United States Patent Application Publication US 2005/0228172 A9 - sequence listing, part 142

SEQ ID NO: 669726 - DNA, 2655 bp, Homo sapiens
caaaccatctctttaagcttcatgataaaaatgatgttcatgtcaattaatgcctttttaaattttggaaaaatatttctgcattcattttaaaaagtagatgtataaagaatataatgacattaaacattaaaacatatttaggctggtttcaaacagaatttcatatagaacatgaagcacaatgaatctattaaatgagccagaatatcaagtcacagcttcctaagctattagaggctgtgtggatcctctctcagctggaagtaactaactctaggtgtcatagcatcctgctgacagcttagctcttatatgacagtcgtgattaaacattatccataaatttttttcatttcatcaaattgaatcatagttttcaaggcaaataaaatattcatttttcacaaatattcatagagctgtcctcaaatgaaactgtgagattagacttcttccaaacccaacttagacagaatgaattttaaaatctcaatataatgtgtcaaaagtgaaaattaactccatattcatcttctacgtaatgatagggaaaattgttcagggctgccctcttgtcagattttctattccagatatgcatataataaaatacaacagtgttttaaaaaatgtgatgtcctttaagaatggaattctttatacatgtgaggtgaagtaaaggtaacaaaggagcctcctagcttcccacatcacttcagaagatattggcttccagttttttctgttttgttttgtttctttttcccaatgaaataaggtaataggaatcacggaagccttacactataaatcgacaggattcaaaataaaagctatgtgtgtaaaaaaaatgagaatttctagtcttttttggttgataaattatttgaattttcctttgaaacttcctgaggaacaagtttaaggaggcaaagttatcttgttagttcttgtcaattctacttctgaaagatcagagtagtattgagagaggccacctctgggccagaggcaaaattttggtgcatttattttgtatcacaactttttcactgagcgcctgttatataacctacagggcattaggtgttacctggtgrcagggaatgagaaaaaccttgtctatttgctaattaatgcaaaaagtatttgtcaaagcaggctcttctataggtgttggggataatgctttaaacaaagcagacaacctcttgtgtgttttatattttagtggaggagggaaagactgaaaaaaaaacatattataatgtataatgttgcatagtgaatcatactatgaacaaaattgaagcagggaaaggagatagagagagttcatttattctttcttttaccaaacatttattgaatgtatgcagcactatatgccaggtccttttaggcaagcaagacctatcagttaataaaaaattgaaaaagtaaccctcatagagcttacattatgttttaaagggaaaagcaataaatattataaataagcaaatgacatacaatcatagaagggaaaagcaataaatattataaattagtaaatgacattcaatcatagaaggcaaaatgtgcaacaggaagttcctcgtgtgcaacatcaaagaagggaagaaactgatctgattaacagaagagacagcccaaaatgttggtgcaaacttgaagtagaccactaccacatttcagccccactcagggttggccttagagacagcaacaaagggaacttctcctggtgagcagagttttaagcagtcaactcagtcattcattttgcatgaaatgggagatgacaaaaggtacagataatatgttgattcctgggttgtggcagtggccagactcaatggtcagagtcctcaaatgaaaaagactaataagtcggggctaaagaactctgggaaggaagtatatggaagatcctataggagtgggcacaacacatgcagataagtgtaactagtattaatttctaccagagagaacccatctccagggagcatctcttcaacaaggtagacaggatgactattgcaatgcttgcacaatgagcacatgaccagggtggtcatagcagaaggattaaggctatgcatgaggctaatgacatgtattcatgtattcgtcttcaccaaggctgatctattgctaccattgctgaatgtccagtctgagagcagtgcatatccattgcagagtcttccatgtgacactacttttcgggagtttaagcagcctcttggtgacagagctatgaaataagaccccttccaccagaaagggaataaggattgtccttatcagaacaaatgcacattctggatatgagtttgcctttttttgcacagtttttcaatcaacaccatcatttaagggcttaaaaaatgcctgatatctcaacagagcatttcatgtgggattgctttagaacaaggagcctgctttatcacaaaggaggtatgttgatgcataggtaatcacaagattcgtggggcttactactagtattctactacactgatagaatgaagactcagttaaggagccagctcagagaaaaaatcccagggtgttgtcttctagtgtacactatatgcactgaagcataggtctgggaggtaaggagtagaagtgggatcc

SEQ ID NO: 669727 - DNA, 621 bp, Homo sapiens
cagtaggagagggaaatgtgagtctagggacctttcagactactcgggagaaacacaggagttctcaccagtggctgctgaagcacaattagagtcatggttgctattcttttcaaagccttgtgcaaccccaatgggagtttggacaagttgaaatgtgtgacgagtaacctttctgacacctaccttgagactgtcagccaactttggcataaaatcctcatcctcaccaaagaataaagttcattccccccgtggtctctactcagcattttatcagcaggcacatgacacttggatgcttctctgttttcatacagctgctttaatgtcaaagatgttatgatgaggctgttttgacccagccatgagaatatttttaaagcagtaatgtacactcatccrtaactcattttccgaagttggaatttttgacaccaactccctgtaataaattacctaggtgtggatgtgtgggccagaaaatctgtctgccctatagtcctcaataactaaaacaatgctggggtctcccagttttaaatagtggtgtgaagacatcttttctcacatcgcctctctgaatccacccaaaagcaactaggagagaaaacaaataaa

SEQ ID NO: 669728 - DNA, 1325 bp, Homo sapiens
gggagcaggaatagctacagttgttggctaaaataggatacaaccagcattagggaccattagaacagtgtctgaccctatggatcctacctgtctcattcactactgaatcctcagcccctagctgaatgccgggcattagttggtgctcactataggaaccacctcactatgaattaaggatatcgaaatatcatgttgtacaccttacatatatgtagtgaaaataattgttgaaagaagaaataaattatcttagaaagtggataggactgagttagttggttgcagcttatggtcagaagctggcagggctgagtaggaagggtctgaggacctcctataattgtaattccagttacctcaattggtgagctctttagactgggacgtttattctggctctctatgccaaaaaccaagcatgatggcaaaaggctggaatagcatttggttccatcatgttcctgtttatgtaaccagtacttgtttctcaagttttcacacacagaagctgttcctctcaagactggggtgttttgcagaggggtttctgtccttccaaatatgcgctcatcttcccgctggtgttcatcgtgtttgctaagacagtttctatggcaaaggcccaccagccaagtgataattacatacagtaaatatttcaaacagataaacttgacatagaagcagctgcttctcaccaaacacaaggcaggagtgtgtgatctgagcggcattttgcacctccgttcctggaacgcgatggctggcttttgctgttggcctttgtggccaaaaagatctgaaatccatccacagtgtatatacatttaggaatattctgaagtactgaaagtagtatagaagatattttataaaatggaaggttagcagacatgttacaataaaaagatgattttggaatcagctggagtcctgctactgattgcttgtaaagtgatattcctgttagattttatatatatttttaagctgttacaggaaagaaatgtgggcaggcttagcttggcttgatggcttatcatgaagaccgaaggttagcttctttctacgtygcacagggaccttaaaaccttttgaacgattttttttgtttgtttttgacaggactggtcatcattcactctttagaggcacacacatgcctacctatttcctacctatttttctttatgaaatagaaattgcagtcttcacctgccaatttcatacatttctttcattgattctggaaaccatgtacacattggccagataacctttttattttgcacagaaattgaagctaatctcaattaaca

SEQ ID NO: 669729 - DNA, 668 bp, Homo sapiens
tttccttatgcattctggctggagcttcctgtttgtttcaaaccatggattgaagaaatgatgtgagagagaatgacagctcatattctaagtaaaggtggactactagttggagtagattcaaatccacatagcctttaaatgtacagattataccttgtaaggcttgttgctaaaccattcttagttcatttttgaagagattcattcttggggrgtggagaagtaaaatgagaattaaaggaatggggtagaaaaaagacaatcataacttcataccagatattggtgagcacttcaagtctctgagcaactctagaaagacgagatcaagacagcatagcaagaatatagtagaggcaaaatctctgattctcagaatctgatttttccactaaatgaagcacaaactagaatagtcccaaagatttttttttttttttttttttttttttttttttttttttttagcagagttttgctctgctgcccaggctggagtgcagtggtgtgatctcagctcaccacaacctctgcctcgcaggttcaagcaattctcccgcctcagcctcccaagtagctgggactacaggtgtgccaccacacccagctaatttttgtatttttagtagtgacggggttttcccacgtttgccaggctagtctca

SEQ ID NO: 669730 - DNA, 616 bp, Homo sapiens
aaacaaaaaaaatgcacaactttttgtttctttagtcagtatttctttggagtcatacttaataatggaaaaacatctttcatattaagaaacttcttttttcccttttaaatgtgacatgtgaccagcaacatgaaattaatgtctttggatcaattacaaaattactgttctgctatcctgatactttatagctgtcttcataactttgcattccttttcatcaaatttataccagcttaagtcctcctttgttaatctacttgccactaattcattatttcttgctaaggaaccacccaaygcactgctgtctctggatagtggttcttactacacttctctgagaaagagcatcctttctgtctttctacatagtattcaagacttccttattccagaaatatttctaacctcatctcacttgattccacatttatttatttggtttattatttattatattttcttatttttcgagacagaatcttgctctgttgcccaggctggagtgaagtggcatgatcttggctcattgcaacctccgcctcccgggttcaagtgattctcttgcctcagcctcctgagtagctgagattacaagcacataccacca

SEQ ID NO: 669731 - DNA, 616 bp, Homo sapiens
aaacaaaaaaaatgcacaactttttgtttctttagtcagtatttctttggagtcatacttaataatggaaaaacatctttcatattaagaaacttcttttttcccttttaaatgtgacatgtgaccagcaacatgaaattaatgtctttggatcaattacaaaattactgttctgctatcctgatactttatagctgtcttcataactttgcattccttttcatcaaatttataccagcttaagtcctcctttgttaatctacttgccactaattcattatttcttgctaaggaaccacccaatgcactgctgtctctggatagtggttcttactacacttctctgagaaagagcatcctttctgtctttctacatagtattcaagacttccttattccagaaatatttctaacctcatctcacttgattccacatttatttatttggtttattatttattatattttcttatttttcgagacagaatcttgctctgttgcccaggctggagtgaagtggcatgatcttggctcattgcaacctccgcctcccgggttcaagtgattctcytgcctcagcctcctgagtagctgagattacaagcacataccacca

SEQ ID NO: 669732 - DNA, 599 bp, Homo sapiens
tctcctacattcagttcattcctaacagtagtgctyttgaaagcagtaaaatggatatcttggggattaaagtggtgagtttaacaaagagagtcactgtggattttcacagaaatacttttagtagatccccactctgagaaaggaccaattggtgctgtaaagttccaattttgatatgccttacctcctgtgttcatcttcaaccatttccttcaagtcagagagaatgaaaagatgtaggtgccaaaaatgagggattgccatttatttcctatgtaggatgataaaatattttagaatctgccatgtgtttcataaagagcaaagtagaagttaattccagctgagctagaaaaaagtggggtatctgcagggtaggatacagcagcatctattcataatgctatgggacattttctttgtgttgtacacagccaggtgacccagaatttgctaactgcatgattttacaagtgtcagcatgtacctagcttttatgtcaatacaaagagattctgattgtagtcatatagcttatatttaattttgtgatgggttcattttacaagtatcttgaatgtcaaggagagacaata

SEQ ID NO: 669733 - DNA, 599 bp, Homo sapiens
tctcctacattcagttcattcctaacagtagtgctcttgaaagcagtaaaatggatatcttggggattaaagtggtgagtttaacaaagagagtcactgtggattttcacagaaatacttttagtagatccccactctgagaaaggaccaattggtgctgtaaagttccaattttgatatgccttacctcctgtgttcatcttcaaccatttccttcaagtcagagagaatgaaaagatgtaggtgccaaaaatgagggattgccatttatttcctatgtaggatgataaaatattttagaatctgccatgtgtttcataaagagcaaagtagaagttaattccagctgagctakaaaaaagtggggtatctgcagggtaggatacagcagcatctattcataatgctatgggacattttctttgtgttgtacacagccaggtgacccagaatttgctaactgcatgattttacaagtgtcagcatgtacctagcttttatgtcaatacaaagagattctgattgtagtcatatagcttatatttaattttgtgatgggttcattttacaagtatcttgaatgtcaaggagagacaata

SEQ ID NO: 669734 - DNA, 624 bp, Homo sapiens
agccaagtagtaaagaatgattttaaaagaggcttaaagcattcgtacaaaaaagaaaatgttattcagaaaatgaatgcttttattcaggtttagcatggcagaatccaggtcatgaatggcattactacattttgtcctttaactgcagccccaggagatagatgaaatcccaataaagattgacttcacataggcaaatgatggataagagtatagatgttaaaaacattcccactctttccttaaccacagagttatttaattttgctggtgttatttgaaataatggctaactttctgctttgcttttcctgtgtaaatacagccactacagtgctgattggaggacctgttattttttataatttaaatattgttagaataaaagcagaaaaaaatrccttcaataattattttgcaatttaaaaatatcttcagaatttctttggataagcttctgttggcttctaccttaaagtaagagaagtaaattgtaaaggcttaattttgaatgacagacattgctggtgatacagatgtctgattcttagttatactagttacgtttccacactagtatctttccctgtatttttatcttctcttattttgagtgagaaa

SEQ ID NO: 669735 - DNA, 593 bp, Homo sapiens
aagtactgataaataattcaacatggttgaaccctgaaaacatgctaagccaaagaagaagccgagtcacatatgaccacatattgtatgattccatttataggaaatgtccaaaaaaggcaaattcattgagacaaaaaataaattggtagatgcctcagacttaggggtattggaaaaatggggagtgactggtaatgggaatggagttttttgggaggtgatgagaatattctaaaattggttgtgacagtggttgcacaattctgtgaatatactaaaaatcattgaattgtgtgccttaaatgagttaattgcgtgttgtgtaaattatagctcaagaaagccattattataaatartatgtgagataacattttacaccataggtttgcaaaaattaaaaactatgatattgtttttcagtgaggatgcagaagagcaaaaccaatgttacaacctctttggagagcagtttgtcaatacctagtgatataagttacgcagaccttatgatcctgaaatttcactctagtatttatcctgaagaaactgtgacatgtgtacaaaagagggaatacccaaaatagttt

SEQ ID NO: 669736 - DNA, 650 bp, Homo sapiens
gaaacctttctttcctcttcataatcaaagtgagtggattaagtaatatttttggttctttctaacatgagaaatgactgtttttcttaacctttttagtcaatatcttgcttttaaatatccatcagaaactgtgaccgttcttggttcactttttcatgcttgtgttgaaactactagaaacaacactttggaattgtaaaaatcaataagccttttgatctaactccttctaatgtcactttcccatctggagttttaggtacctttatgattcttctgactaaaaatatttcttttatatgtatactttttgtttttttgcttctattacttgagggaacaattgatcctcatcaacttgccaacatttccttttatttggttggcaggatgcctgctcttgttctagaactctcaaaatatttctcaactttatagaaatagaatagatttatgctacttgcagtaagctcgaacatagaattgtgaattgtggtcataaaactagtgagaaagataaagtagtgctaattagcatggaaaagtagagaatcaatggaactcagacccaggatactggctgtgtattattgcrtaaggtagtgtacctgtctgaaactctatttcccaacaccaaaaaaagtgtg

SEQ ID NO: 669737 - DNA, 862 bp, Homo sapiens
taccattcccatggcagctttgtacctgcccctcaccactacctgagcccttttctaggaactactcagcagataggaaatagggctcctctgtggtggaagcaggaaggtgtgcagctagcaatctgaaattccgggtgcccttgtcctaagaaatactgagcttaaataccatgtgctatttaagcccctcagtactattartgggaaaaactcaacttcaggatatactggaagagacatctgtggtgttgcagggacacccaacaacaatgtagataactgtttagatgttctgatgtctgtagcaagtacagattttactccagaagttgtgaagttgtattttattctgctctctgaagggttggagagcgttgggtgaagggactcaagagtgtctagctttcctgtatacaaaattttaatcagttctgttttcagctccatcaattgcccctctgtttttgagcaaccaaatgcctccagttccagagccttctgatcattttttgaaacaatttgagttgcttttgcaggcacctgggtttctgctgctctttctctgatgagaaagtaattattcctgtgctttccacagtccagaatgttttaaaactcttcttgttgtatcttctcctattatctttgtctgtattcctttgcttttcttctagttgaacttcagtagggggtataaataaatatgttgttcaaacagatatagtaaaagtttagaaagaatctgtgtgttttactatttggttaatgagcttttactggatgagttgtaggagctctttttatattaaggaaatttagtattttgtcacatgtggtatgaatatttttctaatttgag

SEQ ID NO: 669738 - DNA, 598 bp, Homo sapiens
caatttcctgaacttttttcatgcaaaagtttatatttgcttccataccagcctatttatgttagtggtattcatatatacagatgtaatatatatacacacatatataacatatataacagcaattcccatgtttatctctaaaaacttctagggatcatttctctttagctgcgatagtcaggtatcctttattatgaaaatgaacagaggaaatacagtaactagagtttccaaataccatctaaattaatgattaatttactgtctcctcttcaagcagacatttcatgcaagttttttagtgaaaaatgtataactctggtgggtttaacttatgtgagtgctcactttattagcaaagaggaaggatattctgtgctctgcaaagtagagttcaatgttctcttgctacttgtgtcaaaaacctaagaaacatgaaccaaaatgtcactttatggatatgttattttaaatgtgttcgtgtgtgtgatagctattaaaagggaataacccagccaatataagtgtgcacctgaagtatgctagcagcttttgggaatttcaaatcaaaaatggccctttgctagaaytcatt

SEQ ID NO: 669739 - DNA, 1162 bp, Homo sapiens
gtttagaccaggygtggtgtctcacccctgcaatctcagcactttgggaggccaaggcgggtggatcacatgaggccaggagtttgagaccagtctgaacaacatggtgaaatcccatctctattaaaagtacaaaaattatctgggcgggatggcatgcacctggaagtcccagctacttgtggggctgaggtgggaggatggcttgagcctgggaggcagaggttgctgtgagccaagatcgtgccactgcactccaacctgtgtgacagagtgagaccctgtctcagaaaaaataacactttacagtttatcagcaaacaggaaagtcttgctaggcaatgtaattgattagttccgtgccctggattctgggctcttaactgtatgagcactgtaggtgtgagcagcaacaattaagaagctgcagaggtaaaggtataagggcagtgattgaggatgtctaccaagcagatttcagcaagtgtgtttcaagaagtatgcagcaatctgaaatacctaatcctgaaaaattgctagaatctagtcttttaattttggccagtatttagcagtagtttggccctctactctaaattaataaaaaataagtagtactatattatgagctgtgttatctaacagtttatcttagctagtagcaattaatttatagctgctattaaaatgactaacgtagttaaaagtttgatgactaaggttttttttgtttgtttttttgttttgagctggaatctcgctctgtcgccaggctgaagtgcagtggcgtgatcttggctcactacaacctccgcctcctggctgccagcaattctctgcctcagcctccccagcagctgggattacaggcacctgccaccgtgcctggctaatttttgcatttttagtagagatagggtttcaccatcttggccaggctggtcttgaacttgctgacctcgtgatccacccaccttagcctcccaaactgctaggattacagatttgagccaccacgcccggccttgatgactaaattttaagaaatgttttagcaattcttcatacacctttcacttatcttatagttacttaattcctctactcttatcatttgatattttcattttattgtgtacctctgtaaggccgaatcaataga

SEQ ID NO: 669740 - DNA, 952 bp, Homo sapiens
tcccctaaaaaatttttggtatttggcgaatggcataacacatcaaaaaattggttgtatcacatgattaaattgcaacgtgatgatttcaacttggtggaagacttctgcttcgtcttggtatgtgaaaatcccctttgcttcaaacttaatacacaccaaggaaaacaacctgatacaagtttgcaagtgtctttgagctaatggcttttcgtgggtattaaaaagcattgggttatttatgtataattacgtagaaagaaaatgtttgttccattcaagatacggttacacgaaaaggcatctagttgtgaccttcaaattattacttatatacctacagaaaattcctataaataggctgggtgcgatggttcacacctgtcatcccggcacttagggaggccagggtgggcagatcacctgaggtcaggagtccaagaccagcctggccaatatggtgaaaacttgtctctacgaaaaatacaaaaattagccaggcatgttggcccatgcctgtagtcccagctactcagcaggctgaggtaggagaatcgcttgaactcgggaggggaggctgcagtgagccaagatcacacaccactgcactccagcctgggcaacaaagtgagacccccatctcaaataaagaaagaaaattcctatgaagaaacactatacctctgagtttcaataatatagatgattaacccagtttccctgcaaggatgtgctcactgtgaacagatgtagtggttaccactccagatgtctgcctagcatttgagacaacctgtcacccctgcctctctctgggaacttttgccccacyaccatacagaggggcagtaggcccagccataatcaactgaaacagatacagagttatgacctgagcctaggcaattaggttttctcaggaatatggatctgggactaaagaactcagcat

SEQ ID NO: 669741 - DNA, 1273 bp, Homo sapiens
cttcatttcatacagccacagttattaatactttgctaagggctacccagctgctaaaaactgctgttatctcatactgagaatgctagttctatacctttgctctcaggctgtgaggaaggggtgctagtccaaaaggccatgggattagatttaaaaaggctaaaattaaatcctagaaaataaagaatatttcattttttaacattttaggaaacaaaatgaatatgcttttaaaacataaaaagccagaatccctcaatttataccaccaatctgtcttacatattcatttatccctgtagtttcattctttgctcctttaatacatgagcaagactgacatacaacacataaaatgagaacatctcaatatcatattttttttttttttttggagacaaagtctcagtcactcagtcaggctggagtgcagtggcatgatttcagctcactgctacctccatctcctgtgctcaagcgatcctcctgcctcaacctcctgagtagctgctaattataggcacgcaccaccacgcccggctcatttttgtattttcagtagaaacagggtttcaccatgttggccaggctggtctcgaactcctgagctcaagtgatctgcccacctcaacctcccaaagtgctggcattctaggagtgagacaccgtgcccagcctcaatatcatgttttctgagtgacaaaagaaacagaacaaatgaaaatgaacactttaaaaaaagactcacgttaatgcgcatgattcaagcatgagtccgtacactgtaccaagttcttttgctctgccctagcatgatagaagtatcttccagttactgaaatgtctttaactaagttctcttgctctttgaaacctcaccrtgaacttattaagggagaaaaaaaattgctcaaatattttgggggtgttcacaaagcatcgtttatatcccaacattagtatcccacaaagagtctgcatcaagctaaacattaaaagaaagaaaaattgtgcttaactttaacaacaaagtacctacccttttctggtgttttaaatgtgtagttgattgaagattcttccattggaaaggaagcagagagatttttgactttgctatctgaagactgttcgatatcagagttctttgacagttcacattttttaggttccactttgctttcagatccactctgggctactgaactagtttcactgttgttacttttcaaagatgcattaaaactaaatccaaacaaagacccagtgg

SEQ ID NO: 669742 - DNA, 583 bp, Homo sapiens
tggaggacgccacactgtgttttgctctttatggtatgtctctatgcatttctctactatatgttgttaacctatcattctttcaggaaaccctagcataggtgattttgtcatcttttcttaatgacaattatcttatgagaatatgctttctcattattctcttactatccatggtcaaagtattttagtcttctgttcgacacagcatgttcattatgataaggaacattctaataggtagaattgttacatgaactcaaaaacttgcataaggaacactctgtgcagttaaaagacttaaaagcctcaggcaaaaaattaagcaatgcagcttcctaacccagcgtctgggacacagtagggatgtaatagtattttagaaccatatatatgaagatgcaatcgcttagcttgaatgaaaaactctctctcaaaatacagctgcttatactctgcagggataaatatgtctttaaaatagaaaaaagaggaaccataactaaaaakagtcatatttctccttctcctgactcctcaaggaccttcttctgcacacatgtgacatttcttggtcacagag

SEQ ID NO: 669743 - DNA, 1808 bp, Homo sapiens
tgagcaaaagatctaaatacctcaccaaagaagataatgcagatggcaaataagcatataaaaagatgctaaatatcaaatgtcattagggaattcataattaaaatgagatgccactacatatctattagaatagcaaaaatctaaaacactgacaacaccaaatgttgacaaggatgtagaacaacaggaactcttatttattgctggtgggaatgaaaagtggtatggccactttggaaaacagtcctgtagtaactgatagaattgctaccagaactctgaacactgctggcctgctgcttttcttgttaccacacttcactttctcaggtatcctttcggtgatatctctgaaaagataatgacattgttagtggtcatctaattctaaatcagagtgagattttttttttttttactcagaacgtgtcaataactaatttctatctttctttcctttttttctttttttttgtgatagagtctcactctgccacccaggctggagtgcaatggcaygatctcggttcactgcagcctctgcctcctgggtttaagtgattcttgtgcctcagcctccccaatagctgggatttcaggtgtgcgccactactcctggctaatttttggtagagacgaggtttcaccatgttggccaggctagtattgaactcttgacttcaggtgatcggcccgccttggcctctgaaagtgctgagattacaggtgtgagctaccgcacctggcctaatttgtttctatcttagatatataggtttttgaattttctttcttgattcaaattattctcctaattcatacataaatattttccatttgctttctcactttattctacatatggagattttactataattatatgagatggaatggatgtaggtatatagatgtgcatagatctcatagaggtatttggtttattaaccgcttgttacttgtatttaagttcaggaggctagtgatttcatattaaaagtcgtaggactaatttggcatattctgatattctgttgcaaaacactttcatgctttgaatactcatgtttacacatacattgatgatgttatttgtctttttattagagagagaagattcatgagagatgcaagaatatttgtcctcctaaagataccttcgaaaggactcttttacatactcatggtatgaatatgtgttatttatagataataaagcatagcataaatattagtgaacaaaatctttattttgggaccttattgcctgttatatctataatttttatttctagtaaaatttttataacctatgattataatattttctaagaacttctaagagaaaaagtagatctgatagtagtataatcctttagttcaacaaatattgattggatatcttcgtggttggtatgttccttgttgcttaaaaatagatgagtaagctagacatgatggcacatgtgtgtagtcccaactacttgggaggctgaggtgggaggattgcttgagcctatgagtttgagaacagtaacgtagtgataccctaaagtaaatctatagataagtaaaaagtagctttggtcctcaaagaactgatgttgtcctgaataagtttaaagaaagaaaccaataattgtatcactgtatattaaagagtaagttcagtgtggtaatgttttataacatgcgtaacttagctttagaagcattcctagagttgacagtgattacatgtgttttaaagtcgttagtttgaaacatttatgtgggagaagacattccaagaaaagggaatagtt

SEQ ID NO: 669744 - DNA, 606 bp, Homo sapiens
tataatgtaattgtgtatcctttgtcaattttcaagagcattcatttttcagaatgtcaatttcactacctgataaaatacaacataaaagttccacaaaagacttccctattattggcatggaaartgagtcctttcaaaacaattattctatgaagtattacagattgaaattacttgattattgttaccaccaaatccactaaaaccacataaatgtggttagttttttgttgttggacacagtgactgcctccccagcatccactgccccctctcggtacctatacggattttcattttggtagccattcctctccagcagagcccagcgctttggagaagcttgctctacccctaactctagaagtggggcatgtagctccggccttcactaagcagtttaatcgcattcctagggaaagtaaaacaattctaggaccttcaccttgccctaattgcctcaaagaacttaagaagccaggcatggtggcatacatctgtagtcccaagtatttgggaggctgaggcaggagggaggatggcttgagcccaggagttcaagttcagcctgggcaacatggtgagactccacctcttaaaaaa

SEQ ID NO: 669745 - DNA, 606 bp, Homo sapiens
tataatgtaattgtgtatcctttgtcaattttcaagagcattcatttttcagaatgtcaatttcactacctgataaaatacaacataaaagttccacaaaagacttccctattattggcatggaaaatgagtcctttcaaaacaattattctatgaagtattacagattgaaattacttgattattgttaccaccaaatccactaaaaccacataaatgtggttagttttttgttgttggacacagtgactgcctccccagcatccactgccccctctcggtacctatackgattttcattttggtagccattcctctccagcagagcccagcgctttggagaagcttgctctacccctaactctagaagtggggcatgtagctccggccttcactaagcagtttaatcgcattcctagggaaagtaaaacaattctaggaccttcaccttgccctaattgcctcaaagaacttaagaagccaggcatggtggcatacatctgtagtcccaagtatttgggaggctgaggcaggagggaggatggcttgagcccaggagttcaagttcagcctgggcaacatggtgagactccacctcttaaaaaa

SEQ ID NO: 669746 - DNA, 606 bp, Homo sapiens
tataatgtaattgtgtatcctttgtcaattttcaagagcattcatttttcagaatgtcaatttcactacctgataaaatacaacataaaagttccacaaaagacttccctattattggcatggaaaatgagtcctttcaaaacaattattctatgaagtattacagattgaaattacttgattattgttaccaccaaatccactaaaaccacataaatgtggttagttttttgttgttggacacagtgactgcctccccagcatccactgccccctctcggtacctatacggattttcattttggtagccattcctctccagcagagcccagcgctttggagaagcttgctctacccctaactctagaagtggggcatgtagctccggccttcactaagcagtttaatcgcattcctagggaaagtaaaamaattctaggaccttcaccttgccctaattgcctcaaagaacttaagaagccaggcatggtggcatacatctgtagtcccaagtatttgggaggctgaggcaggagggaggatggcttgagcccaggagttcaagttcagcctgggcaacatggtgagactccacctcttaaaaaa

SEQ ID NO: 669747 - DNA, 616 bp, Homo sapiens
ccctccccccaaccccccaccctgtttttttaacagacagggtcccactacgttttccaggccagactccagttgctattcacaggtgggatcataacgcactataggctcaaactcctggtcccaagggatcytcctacctcagcctctccagtagctgggactacagatgcacaccacagccctcagctgatattcttttatatttaaagttttaattaattaattaattaatttagagacaaggtctcactctgtcgcccaggctggagaacagtggtgcaatcatggctcactgcaccctgaccttccgggctcaatggatcctcctatctcagcctcccaggtggctggtactacaggaacatgccaccatgcccagcaatttatttatttgtttacttttagtagagacagggtttcaccatgttgctcaggctggtctcaaactcctgggctcaagtgatccacccgcctcggcatcccaaagtgttcagattacaggagtaagccactttgcctggacttactctttttaaaaataaagaaactcagagatgttaaaggaatttagtaagggatagaaaaggaatttagtccaagatatgactgattc

SEQ ID NO: 669748 - DNA, 625 bp, Homo sapiens
ggaggctgaggtgggaaaatttcttgaacctgggaggcagaggcttcagtgagccaagatcatgccactgcactccagcctgggcaacagagcaacactccatctcaaaaaaaaaaaaaaaaaaaaargctcagcagactgagagtcaaggatctagaactcaagaaagagactacttagaaagataacaatttgaagaaaaaactaagtgggactaatttgtttgaggacatggattttgaggaaaaggctaattctgaaaggcaaaaggtcttaattctggccaatgaaaaggcatgtgattctattaatatatgaattgtaactttttcatatcttggttccctttagggtcatttgctattattcttctttcacatttgaagactactttgaaaatacatgaggcttattgtatggttttatccaggggaaatttataagaaattgagagtattgtcattaatatggcttgtaggtaacatatatgtcccagttaccattattgtgtaacaaattacctgaaaacttagtggcataaaatgaccattttattatgctcacagattctctgggttaggaattcagattgggtacagtgggtatggatgattgtcttcactcc

SEQ ID NO: 669749 - DNA, 620 bp, Homo sapiens
acttatggtatcagaagtacagtactgtaaattattttccttatgattttcttaataatagtctttcctctagcttacttcaaaaatacggtatataacacatatacaaaatatgtgtcaatcaactgtttatgtcattggtaaggcttctgctcaacagtagagattttggggagtcagaatctccccagaactcagttacacacagttcaactgagtgggaggtcagcatccttaacccctgtgttgttcaagggtcaactgtacataaatgtgcacacattttcacagaaaccatctgtaactatactatctgaaatgacatcaactttgtctccttttctagatttaataaaatattatcgaacatgtcatttactgaaaaaaaaatagtgacgtttaaaacataatgatccttctaygtaaatattcagtataaaccttctatttgcaagtaaaataggccagtctcctaaggcttctcaaatcaaatgaagcaaactaaaattctctcaccataaattacaatgttagcaaagaaagggtgatgagaagaacagaaagggattttaacaaagagggattaaaattcaaatttaaattatagcctgatctttatt

SEQ ID NO: 669750 - DNA, 669 bp, Homo sapiens
tatttaataacttctttaaactttttttctagctagtttccatcagaaagttttcattgcttcatttttccttccttgccatgcacatatacttcataaacatgtaattctatggcatcaagtaaagtttcctttagtgatacattttaattaaaaaacaaatacttatttgtttatattggtagtagtcactgcatattactcattctgaccctgccttatgttactttaagagtggcataacaagtcaattaaatattactgatcacctattatgtgtgagctgttgggttaggtctgcagtagacacagttatacaatagcaataaatgtgttgagaacgctatgggaccatcttgctttgctttgttgcacagygatgtaaagaacttttcagtgttagcaaaatgtgcacaactggacaaaaggaaaccagacagaggtacatctgtgtaaatctgccaccactattataaatcagtttttttattttgctgtttgtaggtcataggtgaattctcatttatatcttggaaaaaaaagttaagggtttgaaaaagtaattaggaaagcaaaaagtctgtattcagagttactcagcttctgtttggggtacagagtagacacccattgtttcgtgtagacttgctgtggagttccatgtagata

SEQ ID NO: 669751 - DNA, 777 bp, Homo sapiens
cgagatgagatttgggcggagacacagagccaaaccaaatcaaaaactatagaaagaaagatgttcacttgcccaaactaaaattagagtgcatatccgtctttattttacattgtgctgaagttaagtctgtctctcctagcgccagtcttgcccagtgctgggttttaaaggctcttctagcctttaattcatacctccagtcaagtctgtttaatgtgccactattttaggatccccaaccctacgaacatgggccctgctcaaagccttgcattcactttgtgtggaatgtgctcgccctgccactaagctaatgtcttctcctagctcccctattacatgttcagtcaacgtgaatcgattcctgctcaccttcttagttcaaatttcagttcccttcgaagattgggttcctctttaaaatctagcattttggaaatcagktcatgcaaaatccttaatgacttcccattttacgaagtaatttttaaaaacttttattttggaataacttgatactcacagaaaaattgtaaaaataatgcagtttccagtaattcttcacccagtttctcataaagttaatatcttatttataaaccatattcataaaataattattcaaatcagaaaattcacctcgatacaatactattaacaaatttacagaccttgttctgtaaatttaccagttgtccaactaataatggtccttttcctgattcaggatctaatttaagattttatactgcattttgtcatgtttcttcagtc

SEQ ID NO: 669752 - DNA, 2778 bp, Homo sapiens
caccatcagcagcttttccaaaggacccaggcaaaatggtcaatattgccttctctcctcacttttacctcacctttcagcctcttggtcccttcctccactcccaccctaagatgcttatagtctatttgtcatcctccagtggtttataattcctgtttcactaccttatttagcctgttgccttttacagcattccaaaatgctcatttattctcttttatgactcatccaatactaaccctatttaccattctaaactgaagtagactgcacctctttttctcaagtactaatgtagaatttcagttttatttgtccaatttcaaacactaggaaagtttaagaaataatcttcgtgccttcctgatagtggcaattgaacatttttcttgacataaaacaatatttggtcttaactgatctttgctgtggaccaggcactgttctaggtattttatacttgccagcaaaatctcacagcaatctttgggagtagttacttttattatctcattttacagatgaagaaatgtagaaagatagtctaacagcttgcccaagattatacatctaataagcagctgggtcaggaggcaaacccatccagtttggcctgaggccaggttcttaatctctgtagtacagtgactaaatcggttctcaaagtgtggccccagaccaagagcatgagtatcattggaaactcataagaaatgctaatccttaggccctatctcaaacctgctgagttagaaattttggaggtagggcccagcaatcagtgttttcacaagccttccaggggattccgatgtctggtcaactttgagaacctctccctcagagtatagtcagggaattgctaatacagattctaaattttattttatctgttagcaaatcattgcacacattcctacacatatttagtttttttcctcatcccagcaacttttaatctactttaatagcaatttatttacaattaaaacactacatatcctttatcttcaaaagccaataaggattttatagatttatttacttacttatttgacagggtcttgctctgccgcccaggctagagtgcaatagcacaatctcggctcactccaacctcctgggatcaagcaattctctcacctcagtccccaagtagctgggattacaggcatgtgccaccatgtctggctagtttttgtattttttgtagagatggttttttgccatgtgacccaggctggtttcaaactcctgggctcaagttatccacccacctcggcctcccaaagtgctgggattataggcatgagccaccgcaccagtgtggattttgtagatttaaacagatatcctaagtgatgtcagatactgcaaaacacatttttctttcctaaagtaagactattcaagatccttaaagagcagaatcagttcacatctagcaagagctttcaagagtaaacagagacckgttttacttttgacttcaaggcatttgatgctgtcatactccagacaaaattcttagttggaaagaagttaagatacctgttgttgaacatttgttcactgggatttggctgtgagcaacctcctcaacattctctctgggagtgagtttagtactcctgagagttgaaaaatatttctgttttgtaaaaaaattgagactttggattgtgtttatgtatgcatatgcatgccaactcaatttgcatcttatgatctaccaatctgaaatcaaaagcaatgtaagaccataaccagtattgctggggacattgctatgacagacagtttcaacataaaatttgaatctctttgaaaaatacttaaatgtccttaaagccaaattattttattgtttcaattcttgaactaaatcaagatactttttcttgtttaaagcaggtgcttcccaatgacttgggtagagagattaaaagaactaccttggtcagccaaatgaagtcttagtattttttttatttctaaaatgtaactatactccagtgcaagtattgttacttaaatgtattaccatcgcagtagttttaagcatataagtcgtgaaaaaaagacatatcccacccatccaacatcaaaattagtgcctcacttgtcctgggggtcagacactggcagaaaattaccagagagagggtgagtcagcatacaaaacccaagtaagtccattgaatctaaatcaaggaaagaaatagttcacattgttcttcttcttcatagtttctttttgaggcagagaattcttctaaatgattgttggaacttagaattactcaagattattataaccgagtggccagagggatatgctgccattatgtccttcagcataaagaactggtgacttctgtaaggtaaactaaatgtcatatttgtcatgaaggcagcaaaataagaaataaagaagcaaaagaatgttatcactgtttttaatgcatttatatgggcttctgtgttggcatttctaaagccatgagatccatgttgcatccgatgagtgtgcttgtaaagagagatgagtaacatagaagtgcacatcacaaatatggctagaggaaatattaatgccaagttgacaagaagcacttcactaattttctttatctttgttttactcttttttagtgtggtgtttctgagggcatcctcttccacatttttagcgtaatctacctcgacacacagatgcaatgctcacagaggccagaacgcttcccagaagcagccaaggtattaactttggga

SEQ ID NO: 669753 - DNA, 2778 bp, Homo sapiens
caccatcagcagcttttccaaaggacccaggcaaaatggtcaatattgccttctctcctcacttttacctcacctttcagcctcttggtcccttcctccactcccaccctaagatgcttatagtctatttgtcatcctccagtggtttataattcctgtttcactaccttatttagcctgttgccttttacagcattccaaaatgctcatttattctcttttatgactcatccaatactaaccctatttaccattctaaactgaagtagactgcacctctttttctcaagtactaatgtagaatttcagttttatttgtccaatttcaaacactaggaaagtttaagaaataatcttcgtgccttcctgatagtggcaattgaacatttttcttgacataaaacaatatttggtcttaactgatctttgctgtggaccaggcactgttctaggtattttatacttgccagcaaaatctcacagcaatctttgggagtagttacttttattatctcattttacagatgaagaaatgtagaaagatagtctaacagcttgcccaagattatacatctaataagcagctgggtcaggaggcaaacccatccagtttggcctgaggccaggttcttaatctctgtagtacagtgactaaatcggttctcaaagtgtggccccagaccaagagcatgagtatcattggaaactcataagaaatgctaatccttaggccctatctcaaacctgctgagttagaaattttggaggtagggcccagcaatcagtgttttcacaagccttccaggggattccgatgtctggtcaactttgagaacctctccctcagagtatagtcagggaattgctaatacagattctaaattttattttatctgttagcaaatcattgcacacattcctacacatatttagtttttttcctcatcccagcaacttttaatctactttaatagcaatttatttacaattaaaacactacatatcctttatcttcaaaagccaataaggattttatagatttatttacttacttatttgacagggtcttgctctgccgcccaggctagagtgcaatagcacaatctcggctcactccaacctcctgggatcaagcaattctctcacctcagtccccaagtagctgggattacaggcatgtgccaccatgtctggctagtttttgtattttttgtagagatggttttttgccatgtgacccaggctggtttcaaactcctgggctcaagttatccacccacctcggcctcccaaagtgctgggattataggcatgagccaccgcaccagtgtggattttgtagatttaaacagatatcctaagtgatgtcagatactgcaaaacacatttttctttcctaaagtaagactattcaagatccttaaagagcagaatcagttcacatctagcaagagctttcaagagtaaacagagacctgttttacttttgacttcaaggcatttgatgctgtcatactccagacaaaattcttagttggaaagaagttaagatacctgttgttgaacatttgttcactgggatttggctgtsagcaacctcctcaacattctctctgggagtgagtttagtactcctgagagttgaaaaatatttctgttttgtaaaaaaattgagactttggattgtgtttatgtatgcatatgcatgccaactcaatttgcatcttatgatctaccaatctgaaatcaaaagcaatgtaagaccataaccagtattgctggggacattgctatgacagacagtttcaacataaaatttgaatctctttgaaaaatacttaaatgtccttaaagccaaattattttattgtttcaattcttgaactaaatcaagatactttttcttgtttaaagcaggtgcttcccaatgacttgggtagagagattaaaagaactaccttggtcagccaaatgaagtcttagtattttttttatttctaaaatgtaactatactccagtgcaagtattgttacttaaatgtattaccatcgcagtagttttaagcatataagtcgtgaaaaaaagacatatcccacccatccaacatcaaaattagtgcctcacttgtcctgggggtcagacactggcagaaaattaccagagagagggtgagtcagcatacaaaacccaagtaagtccattgaatctaaatcaaggaaagaaatagttcacattgttcttcttcttcatagtttctttttgaggcagagaattcttctaaatgattgttggaacttagaattactcaagattattataaccgagtggccagagggatatgctgccattatgtccttcagcataaagaactggtgacttctgtaaggtaaactaaatgtcatatttgtcatgaaggcagcaaaataagaaataaagaagcaaaagaatgttatcactgtttttaatgcatttatatgggcttctgtgttggcatttctaaagccatgagatccatgttgcatccgatgagtgtgcttgtaaagagagatgagtaacatagaagtgcacatcacaaatatggctagaggaaatattaatgccaagttgacaagaagcacttcactaattttctttatctttgttttactcttttttagtgtggtgtttctgagggcatcctcttccacatttttagcgtaatctacctcgacacacagatgcaatgctcacagaggccagaacgcttcccagaagcagccaaggtattaactttggga

SEQ ID NO: 669754 - DNA, 1125 bp, Homo sapiens
cttatgatcttgacacttgaccttagccaaaaggccgagaggtgatggggatgatgatgttattggagagatgaaacatgaattcaggaagatttgttaggcctccataaggaagtggtatgatgtggtggaaataattaaggttgggggtttggcggggagagaaagagtgagagagatctgtcatctgagctcttgtctgtttctttcaccaactctctttcttatttaggaaactcaaatgtcccctaaggtcatagttatacttttatctgtttctgtgcagtgggtttcttgatgatttcatttgaaccaaagtttgctgctgcctctgaaaaatagggtttaaaaaacactcaacaattattttgttaaataagctttctgtgcccctctcggtctctctccctttgaaatactcacagtgtgaagatttgtttacttaatgatgtcccataagtcctgtaggcttactattttactttctatataccttccatagcattatgttgtaaacatgtattttatacaaacaaacgaacccactcaattgctaatatccttttagtttgaatggtccactcttttatgagatgtctcaagagagcaagtttcatttagtctttcttgaccatagcatgagatgtcatacgtccttagcacaagccacatatttgctaagtgctaaataagcagctagcttctttctttcctccctttttcctcctgccaacttttgccttttccttttctctctcacttcttcaggcctccctttgatagtatggcagagctcatcaggatcttttggtttcaacttaaaatccaagaaatwccacctctgacctgcagatagtggctctaggcaaagccaaagcaaaattaaccatgaagccttgagtttggccaaattgaattatttggctctgcagtatccaggaagcttcaatctccacttaccactgaaggtcctcatgagcacatgagtgaagtgtgtcttggaataagtcctatctcctggacattttggcttctgtggctggtgtcctgagttggcctccctgggaccggcacttttactctttctctttcggcctctggtctgaactagtctgggctgcttgg

SEQ ID NO: 669755 - DNA, 1125 bp, Homo sapiens
cttatgatcttgacacttgaccttagccaaaaggccgagaggtgatggggatgatgatgttattggagagatgaaacatgaattcaggaagatttgttaggcctccataaggaagtggtatgatgtggtggaaataattaaggttgggggtttggcggggagagaaagagtgagagagatctgtcatctgagctcttgtctgtttctttcaccaactctctttcttatttaggaaactcaaatgtcccctaaggtcatagttatacttttatctgtttctgtgcagtgggtttcttgatgatttcatttgaaccaaagtttgctgctgcctctgaaaaatagggtttaaaaaacactcaacaattattttgttaaataagctttctgtgcccctctcggtctctctccctttgaaatactcacagtgtgaagatttgtttacttaatgatgtcccataagtcctgtaggcttactattttactttctatataccttccatagcattatgttgtaaacatgtattttatacaaacaaacgaacccactcaattgctaatatccttttagtttgaatggtccactcttttatgagatgtctcaagagagcaagtttcatttagtctttcttgaccatagcatgagatgtcatacgtccttagcacaagccacatatttgctaagtgctaaataagcagctagcttctttctttcctccctttttcctcctgccaacttttgccttttccttttctctctcacttcttcaggcctccctttgatagtatggcagagctcatcaggatcttttggtttcaacttaaaatccaagaaattccacctctgacctgcagatagtggctctaggcaaagccaaagcaaaattaaccatgamgccttgagtttggccaaattgaattatttggctctgcagtatccaggaagcttcaatctccacttaccactgaaggtcctcatgagcacatgagtgaagtgtgtcttggaataagtcctatctcctggacattttggcttctgtggctggtgtcctgagttggcctccctgggaccggcacttttactctttctctttcggcctctggtctgaactagtctgggctgcttgg

SEQ ID NO: 669756 - DNA, 829 bp, Homo sapiens
gtatctagtaagtgacccatgggtattattatgatcagatgaacaacttgacaaattatggaactagaatagctactaacagatcatctagtcctttctagctttctataaaggactggtgactggtacagagctgattgccttaggagctgggcgatggagaagggggattgttaaaaatacagacggttgggtttcaccctgtgaagattccaattcagtaggtctagcttgggcacctagaagtctacattttaaaggaattttccaggtgatcctgatgtagcctaccagttcctcctaactccaaattagagatggagagattgtgattcagaaagggcgaacttgagtaacttgggcaaatgcccagagaaattgaatattacgtaaatgtgaccatctgcaattgaggtttgagcagtgcctgatgctacacacccttgggacaacaggcaggagggaggaaaagaggaaagttaattacaacatgtttaagccactctcagagctctgggggagggagacctactgggtgacagctagcagagggttttgttagggggttaagagagtaagaawaggtaagaggaagacccaaggagttctgatagcacaggtctgaggagtgtttgagataagcattcccttattttcaccttctaagcgtcttctgagtgtcttgaggttgccagccgaggagctgatgtgaaaccatcatgattttatcagtgtttgaggcaagagcagggctagggtggggtaaggggtagctgggctgctggaatgacttttgggcttattctcccttggctgccagagaaattgg

SEQ ID NO: 669757 - DNA, 829 bp, Homo sapiens
gtatctagtaagtgacccatgggtattattatgatcagatgaacaacttgacaaattatggaactagaatagctactaacagatcatctagtcctttctagctttctataaaggactggtgactggtacagagctgattgccttaggagctgggcgatggagaagggggattgttaaaaatacagacggttgggtttcaccctgtgaagattccaattcagtaggtctagcttgggcacctagaagtctacattttaaaggaattttccaggtgatcctgatgtagcctaccagttcctcctaactccaaattagagatggagagattgtgattcagaaagggcgaacttgagtaacttgggcaaatgcccagagaaattgaatattacgtaaatgtgaccatctgcaattgaggtttgagcagtgcctgatgctacacacccttgggacaacaggcaggagggaggaaaagaggaaagttaattacaacatgtttaagccactctcagagctctgggggagggagacctactgggtgacagctagcagagggttttgttagggggttaagagagtaagaataggtaagaggaagayccaaggagttctgatagcacaggtctgaggagtgtttgagataagcattcccttattttcaccttctaagcgtcttctgagtgtcttgaggttgccagccgaggagctgatgtgaaaccatcatgattttatcagtgtttgaggcaagagcagggctagggtggggtaaggggtagctgggctgctggaatgacttttgggcttattctcccttggctgccagagaaattgg

SEQ ID NO: 669758 - DNA, 829 bp, Homo sapiens
gtatctagtaagtgacccatgggtattattatgatcagatgaacaacttgacaaattatggaactagaatagctactaacagatcatctagtcctttctagctttctataaaggactggtgactggtacagagctgattgccttaggagctgggcgatggagaagggggattgttaaaaatacagacggttgggtttcaccctgtgaagattccaattcagtaggtctagcttgggcacctagaagtctacattttaaaggaattttccaggtgatcctgatgtagcctaccagttcctcctaactccaaattagagatggagagattgtgattcagaaagggcgaacttgagtaacttgggcaaatgcccagagaaattgaatattacgtaaatgtgaccatctgcaattgaggtttgagcagtgcctgatgctacacacccttgggacaacaggcaggagggaggaaaagaggaaagttaattacaacatgtttaagccactctcagagctctgggggagggagacctactgggtgacagctagcagagggttttgttagggggttaagagagtaagaataggtaagaggaagacccaaggagttctgatagcacaggtctgaggagtgtttgagataagcattcccttattttcaccttctaagcgtcttctgartgtcttgaggttgccagccgaggagctgatgtgaaaccatcatgattttatcagtgtttgaggcaagagcagggctagggtggggtaaggggtagctgggctgctggaatgacttttgggcttattctcccttggctgccagagaaattgg

SEQ ID NO: 669759 - DNA, 2171 bp, Homo sapiens
tcaaaacaaagaaataaatgtactttcttctttaatctcctggcatattggtccagatatctcagttatgatactcctcacaatggtgcctaattatttttttttacaacatccttctacttatgggtgaatccctggactgttgaactgagttattattcagtctttgtataactagaatattgtaaagtgcctaacatatagtagatgctcaataaatattggataaatgaaaaaatgaatgaaaatatggcaggtactactaagttttaaaacaaaatgaggcttggattttaaattgtttgctcatattcagctaacttatcagtaggagagcaaagattcatacccaagtcctcttattctaagatcaatgctctttctccaaatagtcttactcaaatgaacttacaaatccttgaatattcaaattagatgacactcttggagctttcactagattgattttttaaaagcaagagatatctttgtagagaggtacaagtataatagactttaaatttaaaattaatttaaacaattacattcatttatataacacatccacaacagattacagtatgcaggtaaagcaaagaaatatataaacacaatacttaactttgagaaagccgtgcttacccataaatcttcccttcatgtgactgtcagacaggtaattggactcgatggatctgggtctgaaccaatatttgattcaactacatttcagcatgataaaatgaatgtggagtgccccgggtgtttgtagtactagggggatatgaaatgattaatgcagcctgctaactataccaatttattattttagtcaggcaaaagagctatatgacttggtttcaaaacaaattgattatttagggttacctgagactgttttaagtatttgtaaagagagtaatagtagtgaaaactcacgtgcatattgtaaactgattaaccatgtatctcatttcacgactgattaaagctgtgtctacaggcgtgtctgttgagaaatttcaaaaaacatttccagctatcagtgctatccttctaaatggcagtactattggcagagataagaaaaattggttctttgtaccagaactgagataaaacattctaagtctgacgaagataaactaaaggaaccatttggccccattcataaaggcatgaacccctttactattggattttgtaatttaccataccatatggcattggctgttttggaaatgagagttcagagtacatggaacattggtgtgatgcattgtagctatgtgtgttcttgccttatactctgctgaagcattctttctctgtactaattttaaagaaacattatgcaatttgctgtcaaatttatacagaactgttgaagtgttgtgtcatttcagtcaaaattagattgcataaattcagaaaccctaatctgagatcgttcaatttcccagattactagatttacatattaataactcctagggtatatttcttttcaccagctctaatttcaaccagaatttatgggttgggctcttttaaaatccaaatgcaatggccaagtgcttaaagcctggacagttgccacactgtcacagagcccctcagcagaaacaagtctagaaagctggggcttttatttcattctgttttctcccacaggatggttcttaccacattaaataatacatactcacatactatatactaccagcaatactccaatgccaaatgatgtataaaagagtgtatttatggcctgttgattcaaaatgtgtttgcttttctagtcacattcatctttatcatgacatatacttaaacataagaaaatcagaatgtttctccttgggtccaacttgccaatttctataatgtctatgaattgacaactttttaaaagtaaaatttggtgtgtgggtgtatgtgtgttctgagcaatgaattttgggtgttctgcctcctctcaaacaacaggrtctcctgcagaaggaaagagttagtgcagaagattttgattcactgaaagcatgcttatttccttggtatctgggaaagcaagcattgtttggtggtatattcctcaattcaataaagagagtttttattcccatgtacatatgtaacggtcaattaaagaactattccaaaggctgtag

SEQ ID NO: 669760 - DNA, 426 bp, Homo sapiens
  misc_feature 400: n = A,T,C or G
tgaatatacatctacaggttcaagggtacggggttcatctcaaggtgaagtcaattcttttttggctgtttcttccaatactcaggaaatacattgctacgactgtccttctgcagcatgaatgtagrctgccaggtcaacagcaaatttcacatcaacatatccagtccagcagcagaatgggtccacatggaggaagtctgaagaaagaggtgtcttacatccaaatggaccaggtcctgtgaaactctcctggcaaccttgaaacctcttttgtaaagattatgacagtgagagaagtctaacagggctgactccattttgcttctagcctcacaggctgactgtctttgcttattcctgggcgtaggccaagctaaccatgggaggaatttagttnatagtttaacttggaagcaaggatga

SEQ ID NO: 669761 - DNA, 638 bp, Homo sapiens
ttatcaaaaacattttataggccaggcatcatagctcgtgcctgtaatcacagcactttgggaggctgaggcaggaggattgcttgaggccaagagttcgagacagcctgggcaacacagtaagaacccatctctacaaaaaaaaaaaaaaattgataaacacaagcatggaattaaacaagatgaggaaatgaagaccaattaactgaggctggaccataaaccaaagaagtgactatataaaacccaggctattctagattcttgcttatataaaattgaaagtgcacccaggcttagagggcatacaaggaagggaaagaaatactgaaaaacaggagagaaggggctaaaaagcacctgaacagaatagatgaacactgatttactgtctttgtggtccaggtagggacaaaaactgcctgctgctctccttcctctagccttttgtctatcctgctagaatgatgcctattctattcagaagaccatgcagacagtagcagctkataaaaggaaaagaaaaaaaaacagagaaaatagtgctttagtactagtcaaggaggtgtcttagtcaaaaagagtctgttttccttttgaaaatatggacatgatgttggaggagggaaaatatgagg

SEQ ID NO: 669762 - DNA, 611 bp, Homo sapiens
gattgaattttgttttttgtttttgatccttcaagatacagttgagattccattacctacaatttgtctggggacattaggacactggtgtaattaatattgtatagttgacccttgaacagtacaggtttgaactgcatgggtccagttatatacatggattttctgccacctgagacagcaacaccacttcctcctcctcctcagcctactcaatgtaagatgacaaggatgaagaactttatgatgatccactgccacttaatgaatagtaaatacatggtatggcttcctgtcaacagcaggctatcagtagttaagttttggrggagtcaaaaattacatgcagatttccaattgtgtgggggattggtatcccaatcttgaacaacataggtgttgttccagggtcaactgtgtatttaaacttaagaaatttgcatatctttaagaagtagcagaaccaattgttcactgatgactgtaaagagaataattgtgtggtgtacataaaagtgtgagggactctcagtggttgtctggtttcacttgtatgtatactcataataaaagaggttttttcattttgaaacaacacaacaaaagacaca

SEQ ID NO: 669763 - DNA, 611 bp, Homo sapiens
gattgaattttgttttttgtttttgatccttcaagatacagttgagattccattacctacaatttgtctggggacattaggacactggtgtaattaatattgtatagttgacccttgaacagtacaggtttgaactgcatgggtccagttatatacatggattttctgccacctgagacagcaacaccacttcctcctcctcctcagcctactcaatgtaagatgacaaggatgaagaactttatgatgatccactgccacttaatgaatagtaaatacatggtatggcttcctgtcaacagcaggctatcagtagttaagttttgggggagtcaaaaattacatgcagatttccaattgtgtgggggattggtatcccaatcttgaacaacataggtgttgttccagggtcaactgtgtatttaaacttaagaaatttgcatatctttaagaagtagcagaaccaattgttcactgatgactgtaaaragaataattgtgtggtgtacataaaagtgtgagggactctcagtggttgtctggtttcacttgtatgtatactcataataaaagaggttttttcattttgaaacaacacaacaaaagacaca

SEQ ID NO: 669764 - DNA, 611 bp, Homo sapiens
gattgaattttgttttttgtttttgatccttcaagatacagttgagattccattacctacaatttgtctggggacattaggacactggtgtaattaatattgtatagttgacccttgaacagtacaggtttgaactgcatgggtccagttatatacatggattttctgccacctgagacagcaacaccacttcctcctcctcctcagcctactcaatgtaagatgacaaggatgaagaactttatgatgatccactgccacttaatgaatagtaaatacatggtatggcttcctgtcaacagcaggctatcagtagttaagttttgggggagtcaaaaattacatgcagatttccaattgtgtgggggattggtatcccaatcttgaacaacataggtgttgttccagggtcaactgtgtatttaaacttaagaaatttgcatatctttaagaagtagcagaaccaattgttcactgatgactgtaaagaraataattgtgtggtgtacataaaagtgtgagggactctcagtggttgtctggtttcacttgtatgtatactcataataaaagaggttttttcattttgaaacaacacaacaaaagacaca

SEQ ID NO: 669765 - DNA, 664 bp, Homo sapiens
ctcataaccatgacstcaacctagattccaaatctaggtgctcacattcatttcacaccattagcaagttaaaaatgatagagccaggccaagcgcggtggctcattcctgtaatcccagcactttgggaggttgaagtgggcagatcccttgagctcaggagttccagtccagcctgggtaacctggtgagaccccagctctacaaaaaatacaaaaattagctgggcatggtggcacatatctatagtctcagcttcttgggaggctgaggagagagtcgcttgagtcttggagggtgaggctgcagtgagacatgattgcacctctgcacatcggcctgtgtgacagagtgagaccctgtctcaaacaacaacaacaagatagagccatttactaagcagattggcaggtgagggacgctggttttagctagtacagtgaatgagtgtgtgagtgtgtgtgtgtgtgtgtgtggggggtggtgtattcttagtcccttttacactgacagttgaaaaactgacctttgcccttctctctcccatgttatttctgatgttagtaggcagtttgtagcacagcaggatggaagagttgcaaagggaattgtctatggggtgaaccttttcaattgcccttccatccacataccctctttactg

SEQ ID NO: 669766 - DNA, 586 bp, Homo sapiens
tagaatatttttctcagctagcttgtccataggaacattttcaatgtcccaaggattatctagcctcttggactgtktacctgttgtagaagtttccaggttatcaggagatacatctggatatttctacattctagaaaatctctcagtccttctgccacgtgggccttgggtcccagttttttgtgttcaggtgtctgtttcctgacctgtcccatctctaaggccatgatagagaggctcagttatttgttcttagatctccagctatattttatctagcttttagtcaaaatctttttatttgatgtaacccagatgtcatttgaggccatcctttcttatggagatttatgtaactgatccatgtactgatttctgaaaattgccgagaatactccttggtagtctcctcttgtctgaatgtctgtaggtctgctctcttcatcttattttagcccatatgcagacagctctgctccttcttgacttcatgagcttattaaattctctgtacacatgaagatttaagagatgggaccatgcctcaattacaaagccttctagtgccttgccagctctaccc

SEQ ID NO: 669767 - DNA, 673 bp, Homo sapiens
caagatcttggttcttaaaaggaaaaataaagaacagcagctcactcccctctggggagaggctggctcagggttacacagtcagggtggggacagaggtgggcccacagtacctcccttgttgggttgtctgaggacccctctggccacctccctacaggagatggaggacaacatctggacagtgaggaggaggaggcgcctcggcccacgccaaacatcccagaggacctggagagccgggaggccacggtgagcctgactttccctgccccgctttgccaccttcctctgtggtccctcccagacccccttatgctcttggttttcccaccttctgattkctctggcccctcaccccttccgggagccagtggtcagacactttgtcacctgtgaccaacaggtgcactctctgaggccccaagggaaggggttgttctccacctccctgcctcatttgttctgtctatgcccctacaagaatactcacctcttgccttcaagtggcatttttcacctctgctggagccagttcccaggaggagcaggcacggctatgtgggcagcggaaggtgtgaaggctgtgctgcctgcacctggctcatctgttggccttcgcctggaaggagccagaggcagaggccccagccccagggagtgggggtgagtt

SEQ ID NO: 669768 - DNA, 1405 bp, Homo sapiens
agccaatcacaaacagacaaatactgtatgattccacttaaatgaagtatcaaacgtaatcaaatttaacagccaggtgccatagcacacacctgtaatcccagctacttgggaggctgaggtggaccacttgagcccaggagtttgagtctagcttgggcaacagagcaagacccaatctctaaaaaaaaaaaaaaaaaaaaaaaattaatgtaaaatacttatcattaaaaaaagaaaaaggaatcaaattcacagaaacaaagaagaatggtggtcaccagggactagcaggaggggaaagagaaggtgctgttgaatgggttagacttttcagattttcaagatgaaaaacttctcgagatcaatttcacaatgtgaatatacttaatactactgaactgtacacttacaatcagttaagacggtaaatgttaggctattttaaaatcacaataaaaatatgttttaatatttatggggcatctattatatggcaaagtcttctaattgttttattataccttgattcaaatcaaagttaaatcacaggccataaaagtcaacggcatttagtgaaaaacttaagttataaagctgttgccagataagatggaataatcaaacaccaccttctctctcccactaaaaatgcagctataaaacctagacagaatgcataagacaggcatatgagaaaaaccaattggctaacaataaagtaccactgaatgggcagtgaggttaacattgtctcccctggttctcctgctgcttgaagagcaagtgtgttgcaaggaaggataattaaagccccaattttgtcatcagaggatcaaaagggagaccccagtggaaccagaaggtactggggagatatcagatggggaggagctcagaaaagtaacatcatgaagttgttcatgaactcccaagctgcacaygtgtggatctggtccaaatcatactaaaggctttgagaactgaaataatcaacacccagattgcagactggccactgaatgtcacatacatgggacagatccaaatagcactgcaaagactttctgaaaattcatctgccattagaaccatagcctaaagagagttacaaattgcaaattccctgaagctaattaggtagattgcctaccaagccaaaaatcaccaacatcctcttaggatttaaacaagccctatcatcttataatattcaaaatgtctaggaaacaatccaaaatcattcagcatatgaagtactaggaaaaaactcaatctagaaaagacaattgacagacaccaatgttgagatgctacaaaagttggaattctctgagacagattttgaagtacctattataaaaatgttccaataagtaatcacaaacactcttgaaatgatgga

SEQ ID NO: 669769 - DNA, 1405 bp, Homo sapiens
agccaatcacaaacagacaaatactgtatgattccacttaaatgaagtatcaaacgtaatcaaatttaacagccaggtgccatagcacacacctgtaatcccagctacttgggaggctgaggtggaccacttgagcccaggagtttgagtctagcttgggcaacagagcaagacccaatctctaaaaaaaaaaaaaaaaaaaaaaaattaatgtaaaatacttatcattaaaaaaagaaaaaggaatcaaattcacagaaacaaagaagaatggtggtcaccagggactagcaggaggggaaagagaaggtgctgttgaatgggttagacttttcagattttcaagatgaaaaacttctcgagatcaatttcacaatgtgaatatacttaatactactgaactgtacacttacaatcagttaagacggtaaatgttaggctattttaaaatcacaataaaaatatgttttaatatttatggggcatctattatatggcaaagtcttctaattgttttattataccttgattcaaatcaaagttaaatcacaggccataaaagtcaacggcatttagtgaaaaacttaagttataaagctgttgccagataagatggaataatcaaacaccaccttctctctcccactaaaaatgcagctataaaacctagacagaatgcataagacaggcatatgagaaaaaccaattggctaacaataaagtaccactgaatgggcagtgaggttaacattgtctcccctggttctcctgctgcttgaagagcaagtgtgttgcaaggaaggataattaaagccccaattttgtcatcagaggatcaaaagggagaccccagtggaaccagaaggtactggggagatatcagatggggaggagctcagaaaagtaacatcatgaagttgttcatgaactcccaagctgcacacgtgtggatctggtccaaatcatactaaaggctttgagaactgaaataatcaacacccagattgcagactggccactgaatgtcacatacatgggacagatccaaatagcactgcaaagactttctgaaaattcatctgccattagaaccatagcctaaagagagttacaaattgcaaattccctgaagctaattaggtagattgcctaccaagccaaaaatcaccaacatcctcttaggatttaaacaagccctatcatcttataatattcaaaatgtctaggawacaatccaaaatcattcagcatatgaagtactaggaaaaaactcaatctagaaaagacaattgacagacaccaatgttgagatgctacaaaagttggaattctctgagacagattttgaagtacctattataaaaatgttccaataagtaatcacaaacactcttgaaatgatgga

SEQ ID NO: 669770 - DNA, 1696 bp, Homo sapiens
tggtgaattgtgtagagtatgtctcaatttaaaaaaaaaaaaaaaaaaggaacagttctaattttcggattgtccccagctttgtggctccgatggtctgtagagccagccctgagtgggctgcaatcctcccatttctccattcagcctgtcagatgctgctcctcttcaaggttcatcccaacaccctgtcacccctccacagcccacccttccccacctctgcccaccatggggaagccttctgatttcttgcaggggagccttcccttgaggagtgtagtggtttaagccaaaagcattctgggacactgagttcatcgtacttttctctctacttttgtatacatttgaaacttyccataataacagcaaaaaggactctcccctccagcctgcccggcactcaagcagcttgtgtatatcttcgtagataaatgtacattaatgattgacctacatgaagataaaacaataagaagaattccctctgctggagtgtagacccacactgcccttttcccagcatggtggtatcaggagaatagaacagggcctatgccttctcttctctaatgatccttggtttgtaagttttttccccaagagaccgttccttttatatttttatttttttaaaggtaggtgagttgcctttgcaaatcctttgcccatttttccactgggattatttttcttaaagatttacaggagctatttatatattctggatattgatcttttgttgggactgcaaatatatttttccctgtgtgaggcttatctttaatttttaaccatatttctagtgatgtctttaaaatgctctgaccttccgttactgttcttgttatctgtcagtttaaggcagggtcccatgtaagagtccatcactgcgcttcctggaaaatctgctagtgataaaggaggccgaagtttgtcttccctctttgccttttccaggaagtggatttcatttcattcttccagctcttattgctaccatagtacaacggagttaaaggggcaatcagaggcaagatgacgactgcattgtgagtcactgcaaggactttcccttcaattcagagtaagataaggagccagggagggcattgagcagaggagtagctacagcagtggtctaggcaagagatggcagtggcttggattggggtgatagaggtggaggtggtgagaaatggtcagatttggggtgcatattgaggatacagccaataggccttgccagtggattagatcagcagtgtgagagaaagaaaagagacaaggatatcccaaggtttttggcctaagtaactgtgtctacttttgctcaaaaagtaatcaagtatttgggcttaaagttaagtcagctccacaaatacagagaccatctctgttttgtgactactgatctccaagctaccacagtgacaggtacatacgcactcagtaaatattcgtggaatactaaataacaatctttttacaaatgggcggcatcggtggtataggcttcaagcacaccagaggacccattttatttccacagccctttggcatccatctcaactgtcccaacttctcattcctggccctcccttccattgtcatctcaccctaggaagagcgctaagtcccccactgtatccccatgcttctgcctcctccatccttctcatgcagggtgccc

SEQ ID NO: 669771 - DNA, 1696 bp, Homo sapiens
tggtgaattgtgtagagtatgtctcaatttaaaaaaaaaaaaaaaaaaggaacagttctaattttcggattgtccccagctttgtggctccgatggtctgtagagccagccctgagtgggctgcaatcctcccatttctccattcagcctgtcagatgctgctcctcttcaaggttcatcccaacaccctgtcacccctccacagcccacccttccccacctctgcccaccatggggaagccttctgatttcttgcaggggagccttcccttgaggagtgtagtggtttaagccaaaagcattctgggacactgagttcatcgtacttttctctctacttttgtatacatttgaaactttccataataacagcaaaaaggactctcccctccagcctgcccggcactcaagcagcttgtgtatatcttcgtagataaatgtacattaatgattgacctacatgaagataaaacaataagaagaattccctctgctggagtgtagacccacactgcccttttcccagcatggtggtatcaggagaatagaacagggcctatgccttctcttctctaatgatccttggtttgtaagttttttccccaagagaccgttccttttatatttttatttttttaaaggtaggtgagttgcctttgcaaatcctttgcccatttttccactgggattatttttcttaaagatttacaggagctatttatatattctggatattgatcttttgttgggactgcaaatatatttttccctgtgtgaggcttatctttaatttttaaccatatttctagtgatgtctttaaaatgctctgaccttccgttactgttcttgttatctgtcagtttaaggcagggtcccatgtaagagtccatcactgcgcttcctggaaaatctgctagtgataaaggaggccgaagtttgtcttccctctttgccttttccaggaagtggatttcatttcattcttccagctcttattgctaccatagtacaacggagttaaaggggcaatcagaggcaagatgacgactgcattgtgagtcactgcaaggactttcccttcaattcagagtaagataaggagccagggagggcattgagcagaggagtagctacagcagtggtctaggcaagagatggcagtggcttggattggggtgatagaggtggaggtggtgagaaatggtcagatttggggtgcatattgaggatacagccaataggccttgccagtggattagatcagcagtgtgagagaaagaaaagagacaaggatatcccaaggtttttggcctaagtaactgtgtctacttttgctcaaaaagtaatcaagtatttgggcttaaagttaagtcagctccacaaatacagagaccatctctgttttgtgactactgatctccaagctaccacagtgacaggtacatamgcactcagtaaatattcgtggaatactaaataacaatctttttacaaatgggcggcatcggtggtataggcttcaagcacaccagaggacccattttatttccacagccctttggcatccatctcaactgtcccaacttctcattcctggccctcccttccattgtcatctcaccctaggaagagcgctaagtcccccactgtatccccatgcttctgcctcctccatccttctcatgcagggtgccc

SEQ ID NO: 669772 - DNA, 613 bp, Homo sapiens
gccaggtcactttactcataggtgtttatatgttagctagaacatcagctgaagttactagcaaattattttctctatcactcataggaagtcaagattgttttgacaccatggtgtaagacattttaatttctgtaatccgggtttttccagacttgatattttaaatatacatccaaagacttcaataaagtaatacactcaaaacatacttaaacctactaaatgtcattttaaaatggaaaatcaatttgtgtgggttatatttctttttcattccacttaattgacaactgaacattcaacaaactgtgtaacagcatagtttactctacccccacccagataatatataaaaaatatattttattttgtttataaatcaaatcttcaccttctgatatgggtctaaatcacaagtaaaacagcttccacaagctttgatttttttaaatttarcctgtttaattatttcccagtcttacacatctgtagatggtgaaattgaagacattcaggagacttacataatagaattgtagaataagctattgaattctgtatcaattgatctgataaagtatttattatagtctatataacatattatctt

SEQ ID NO: 669773 - DNA, 605 bp, Homo sapiens
caaacttcttttacctttgtrgaatttatttcagtctgtctaatgggtagcgtggcaatttgtgtaaagaacataaccccctactggactgcaaatgccttaagggtgaggaggatccacacaggtgttctgtacctgtttgttgaattaatcaaaagcagaattcatcctctgttattatctctggaggcggtggggagcaaaattaaataggaaaagagcagtgaacatgcacaaagctcctgaagctttctcctcgattaaacacagacacatgcatgcatgcatatgcacatgtgtatgtgagtgcatgcgcatgcacacacacgtgcacgcacacacacacacacacacacgtttaaaagggactcttggcttcctgctgcttgcttgaaaatgcaagcttcaagagacaattaaatattgatatctttacatctcagtattttttcaaatccaaacagccccaacaggggccattgctggtacttatttaactccttaaaaatatcgacaaggggttttatctttttaaaattaagtcgttaagtgcagagaagatgcaacaggctatggggtgggaataggctaactcccctgaaaca

SEQ ID NO: 669774 - DNA, 605 bp, Homo sapiens
caaacttcttttacctttgtagaatttatttcagtctgtctaatgggtagcgtggcaatttgtgtaaagaacataaccccctactggactgcaaatgccttaagggtgaggaggatccacacaggtgttctgtacctgtttgttgaattaatcaaaagcagaattcatcctctgttattatctctggaggcggtggggagcaaaattaaataggaaaagagcagtgaacatgcacaaagctcctgaagctttctcctcgattaaacacagacacatgcatgcatgcatatgcacatgtgtatgtgagtgcatgcgcatgcacacacacgtgcacgcacacacacacacacacacaygtttaaaagggactcttggcttcctgctgcttgcttgaaaatgcaagcttcaagagacaattaaatattgatatctttacatctcagtattttttcaaatccaaacagccccaacaggggccattgctggtacttatttaactccttaaaaatatcgacaaggggttttatctttttaaaattaagtcgttaagtgcagagaagatgcaacaggctatggggtgggaataggctaactcccctgaaaca

SEQ ID NO: 669775 - DNA, 605 bp, Homo sapiens
caaacttcttttacctttgtagaatttatttcagtctgtctaatgggtagcgtggcaatttgtgtaaagaacataaccccctactggactgcaaatgccttaagggtgaggaggatccacacaggtgttctgtacctgtttgttgaattaatcaaaagcagaattcatcctctgttattatctctggaggcggtggggagcaaaattaaataggaaaagagcagtgaacatgcacaaagctcctgaagctttctcctcgattaaacacagacacatgcatgcatgcatatgcacatgtgtatgtgagtgcatgcgcatgcacacacacgtgcacgcacacacacacacacacacacgtttaaaagggactcttggctycctgctgcttgcttgaaaatgcaagcttcaagagacaattaaatattgatatctttacatctcagtattttttcaaatccaaacagccccaacaggggccattgctggtacttatttaactccttaaaaatatcgacaaggggttttatctttttaaaattaagtcgttaagtgcagagaagatgcaacaggctatggggtgggaataggctaactcccctgaaaca

SEQ ID NO: 669776 - DNA, 1527 bp, Homo sapiens
ccgctcggataatctgattggctctcatcctaacgttggtctactctttggtcacttaagcctgatccagccttgatctgagtacaaccatacctcaaattgtctttttgaccaaccttgtgttgacattctcagatgctatagtcttttctataacctcttttgactaatggataaaagtaccactagctgaatttgcaacaaatttcaagtacaggtcaaagaccttaattccttttggagagggatgttaagtaggaggagtcagtaaggcagctgagaaaccttctaactagggaaaagcctgccatgcttcacaaaaacaagaattaagctgctgcctaaaatttatgtttcactttggcttttaatctgggaacaacctggaacttgaggattgatcaaggacagcaaactaaggcattctctagaacaacactgtccaattgaaatacaatgccaactacaaatgtgaaccacatatgtaattttacattttctcataagcaattttatttatgtatttatttatttatttatttatttatttatttatttatttatttattaagacagagtctcgctttgttgcccaggctggagtgcaatggcgcgatctcggctcactgcaaactytgcctctcaggttcaagtgattctcccacctcagcctcccgagtagctgggattgcaggcacccgccatcatgcccagctaatttttgtatttttgtggagatggggtttcaccatgttggccaggttggtcttgaactcctgacctcaggtgatccacccacctcggcctcccaaagtgctgggatcacaggtgtgaaacaccacacccagcctcataagcaattttaaaagtaaaaaagaagcaggtgaaattaatacagtagtcagttctttagtctaatatatccaaaatattattatttcaatatgtaataaaaatgttaatggaatattttacatctcttttgtactatatctttgaaacccagtgtatattttatacttggggtacatttctttcaattcagaatagccataattcaataacccaatagcacatgtggctagtaaccatcttcttggacaaggacagcactagaagccaaggagggaactatcctgttctgactaccaaagactattatagctgaggaactggacattccatcataaactgtcctaacatcctccacgtgccagccatgcacaagccctggagaaatcactggtgagcttgttctattcaagtcctgagataatactggatctacatgaagcaataactgacaatagttatggaatgggtaaaaatgttatcaagctgttcccagaatctattttattcatgctgaatgatgatacttggctatttcaataaagttgaataatttatatatttaaagtataattgacatgtaaaggtgtgctaacatctcttaaaagtcattggaaacctggtggttccaaccacatgaccctctctcagtgaggagctaagtactcaaaggaa

SEQ ID NO: 669777 - DNA, 1527 bp, Homo sapiens
ccgctcggataatctgattggctctcatcctaacgttggtctactctttggtcacttaagcctgatccagccttgatctgagtacaaccatacctcaaattgtctttttgaccaaccttgtgttgacattctcagatgctatagtcttttctataacctcttttgactaatggataaaagtaccactagctgaatttgcaacaaatttcaagtacaggtcaaagaccttaattccttttggagagggatgttaagtaggaggagtcagtaaggcagctgagaaaccttctaactagggaaaagcctgccatgcttcacaaaaacaagaattaagctgctgcctaaaatttatgtttcactttggcttttaatctgggaacaacctggaacttgaggattgatcaaggacagcaaactaaggcattctctagaacaacactgtccaattgaaatacaatgccaactacaaatgtgaaccacatatgtaattttacattttctcataagcaattttatttatgtatttatttatttatttatttatttatttatttatttatttatttattaagacagagtctcgctttgttgcccaggctggagtgcaatggcgcgatctcggctcactgcaaactctgcctctcaggttcaagtgattctcccacctcagcctcccgagtagctgggattgcaggcacccgccatcatgcccagctaatttttgtatttttgtggagatggggtttcaccatgttggccaggttggtcttgaactcctgacctcaggtgatccacccacctcggcctcccaaagtgctgggatcacaggtgtgaaacaccacacccagcctcataagcaattttaaaagtaaaaaagaagcaggtgaaattaatacagtagtcagttctttagtctaatatatccaaaatattattatttcaatatgtaataaaaatgttaatggaatattttacatctcttttgtactatatctttgaaacccagtgtatattttatacttggggtacatttctttcaattcagaatagccataattcaataacccaatagcacatgtggctagtaaccatcttcttggacaaggacagcactagaagccaaggagggaactatcctgttctgactaccaaagactattatagctgaggaactggacattccatcataaactgtcctaacatcctccacgtgccagccatgcacaagccctggagaaatcactggtgagcttgttctattcaagtcctgagataatactggatctacatgaagcaataactgacaatagttatggaatgggtaaaaatgttatcaagctgttcccagaatctattttattcatgctgaatgatgatacttggctatttcaataaagttgaataatttatatatttaaagtataattgacatgtaaaggtgtgctaacatctcttaaaagtcattggaaacctggtggttccaaccacatgaccctctctcagtgaggagmtaagtactcaaaggaa

SEQ ID NO: 669778 - DNA, 679 bp, Homo sapiens
tcttggcatcattcccaggctcatccatccccagttctatataccagcacttgttattggctttttctctgcctaaaccacttgcacaagggtctagtggcccattcagactctaatgtctggtttcctaaccccagccttctgttaagtgaagaaatgcacgtatctttgatttgccatgactcactggggtatattagtttgtgttacagttactagcaattccaaaatcccagtcacttaagacaacaaatttgtttaactaatctatatgcctaatgctgttgggcatcgggctgtgctccacacgtcattcagggacccaggctgatgtaagttccaccagatcatgacatcaccatctccggattcagcagaggggaaggttggyggggtcgggggaggggggcaggagggacatggagaaatacacacctactcttaagtgcttacatgtcattcctggttacactccacagccagaactagccacttaattctgactaattctttcatgtgaacagaaaaaggaagatgtttggaaatattgatgagcactaataatgtctatcaaactcacactttcatctaataactatgaaccctccccagccaggagagcctccacattccctgctggagacaaaatattcgcttaaacattctcaacatacacacc

SEQ ID NO: 669779 - DNA, 1005 bp, Homo sapiens
cctagcctgttagtgtgtttctgtatctctttgcagctgctgtagtttttgcttataaagatgattaagctgttatatgtcatacagaatttttaataattacggcttttagcattgaaaggtatcctttgttacatttaatacttttggcttgaattcttatgcatcccctttttcattttagtaggcaagttaagtaagtcctttaacaatttttaatatcactaatatctttggtttagctctgaattattactttatgattactgtttgtattatgtcactttttctttatgtgatacgttttctttgctcttacarttttctcctattaaggtttgttttcgtttagtggttgattactttttttttttgtacgtttttaatgtctttagacccttgtttcttccatcttttactaactggtttgtcagcttttaattttatcacctggttctcatttaagactgtatgacaatcagtgagtttgtttgcctttttttctctccttctcttctcattgtttagttgcatgttttattctttttcagaacatatgacatttatatattattctacccccattccgacctttttttctttttcttttctattttttttttttttgagacggagtctcgctctgtcacccaggctggagtgcaatggtgcgatctcggctcactgcaagctccgcttcccgagttcacgccattttcctgcctaagcctcccgcgtagctgggactacaggtgcccgccgccacgcctggctaattttgtttttgtatttttagtagagatagggtttcaccgtgttagccaggatggtctctatctcctgacctcgtgatccacccgcctcggcctcccaaagtgctgagattacaggcgtgagccactgcgcccagccctttttttcttagattttcaattttgaatttcaaccatcagtctttttgctgaaatttcccaatcttctcttggttgaatgaagtgcatcctc

SEQ ID NO: 669780 - DNA, 1005 bp, Homo sapiens
cctagcctgttagtgtgtttctgtatctctttgcagctgctgtagtttttgcttataaagatgattaagctgttatatgtcatacagaatttttaataattacggcttttagcattgaaaggtatcctttgttacatttaatacttttggcttgaattcttatgcatcccctttttcattttagtaggcaagttaagtaagtcctttaacaatttttaatatcactaatatctttggtttagctctgaattattactttatgattactgtttgtattatgtcactttttctttatgtgatacgttttctttgctcttacaattttctcctattaaggtttgttttcgtttagtggttgattactttttttttttgtacgtttttaatgtctttagacccttgtttcttycatcttttactaactggtttgtcagcttttaattttatcacctggttctcatttaagactgtatgacaatcagtgagtttgtttgcctttttttctctccttctcttctcattgtttagttgcatgttttattctttttcagaacatatgacatttatatattattctacccccattccgacctttttttctttttcttttctattttttttttttttgagacggagtctcgctctgtcacccaggctggagtgcaatggtgcgatctcggctcactgcaagctccgcttcccgagttcacgccattttcctgcctaagcctcccgcgtagctgggactacaggtgcccgccgccacgcctggctaattttgtttttgtatttttagtagagatagggtttcaccgtgttagccaggatggtctctatctcctgacctcgtgatccacccgcctcggcctcccaaagtgctgagattacaggcgtgagccactgcgcccagccctttttttcttagattttcaattttgaatttcaaccatcagtctttttgctgaaatttcccaatcttctcttggttgaatgaagtgcatcctc

SEQ ID NO: 669781 - DNA, 2553 bp, Homo sapiens
gtaaatatgttctttcatgagcaccttgtaatttagtttttatttctgatgtaattttatcttaattttttttttcctgaattcaatcaacctttgttcatttcttctccattatgttcttaggttttgcttttctgacttaaggtggtagtgtattgaagagccctataccatgctcatattgggtaatttgccaggactcacaggactcagcatatagttatacctactgctatgagttattacagcaaaagggtaggaggcacagtcagcaaagggaaaaggcacatgaggtgaagtgtagggcaaaccagtcacaagcgcccagagtctgctcccagtggagccacatagtttgtacttaattctcccagcactgagttgtgacaacacttgtaaaatgtttccaaccagagaagttcattagagcacctagagtttttaytgggggaaggctacataggcagcctcacctggtacataccagagttcagggctctcaagagggaaagcaactgttcagcataaaccatttgatttatacagtttagacatagtcagctgttcttaccagttctgggaatggtgggaaccttcctgaaatccagattcccaagcaccagccaagggctagtcttacaaggaggcctttcaaaagatagtggtcaggtctgctaggttaacacttctgtataagcagtgtttcatatagttaattcagtttggaatattatgttccagttttcttcttctttgtacttctttttttgggtgggagatacaggaggggattttcatcagcaaaaaggctttggatgtcattttctgtttattttctatagtagttttttatagttgtaaattacatatctttatgtttttggacagagcttagtataagatttctagttgatgaccactctcttgccagtgtgggaaaatacaattttttaaatggttggcgtttgagggtggtactgagaagaggagaggagttatgtgtccttattttacttttgttttctttggtcttgcaaaatcctaaatttcccttcttttgccgggtctaaagaagtctgcctaaagtctgcctttccctttttaccttcttcccagagtgttgcctttccaagattggctacttgaatcttgtgtacttattttattttattttattttgaaacaagtctgaagtctaaagtctgcctttccctttttaccttcttcccggagtgttgcctttccaagattggctacttgaatctcgtatactttttaaatttttttttatttttattttttgagacaaggtgtctctctgtctcccagactggatgcagtggcgcactcacggctcactgcagccttgacctcccaggctcaggtgatcttcccacctcagctttcctagtagctgggactacaggtgcacaccatcgcaccaggctaattttggtgtttttttgtagagacggggttttgccatgttgccaaggctggtctcgaactcctgggctctggcagttcaccttcctcggcctccggcagttcaccttcctcggcctccgaaagtgctgggattagaggcatgagccactgcacccagcctggtgtacttgttaaaatccattccctttagttagtgctgtggtctaccagggtattttcagtattttcatatttagggggacctttttctgttgtgattttagctcagcctcctcttctgtttttcatttagtttttttcagaactccactagctctatgaaaatacttgcattgggagcttgaaaaatagctctctcaggagttgttttttttttttttcctagttataggtaatttgaagtttgtagaaatttgtgtcttctagttgtgctgtggtcgtgggattcagtgattttgttattaatgagctatatgttttttgagggggacatgtggatatatttggattaaggtggcttccattacctcagcactacagattttttttcttaaatacatattaaagtatatgttttaatatagaattctatcgcttcagttctaataatttcgtttgctttcaattcagtgaattatttaagtcatcttttccttttagtcctgtgtggaaaaaaacacaaactgtttttcctctgctcttaaaacacaacaatcaacacaaaagacttttgtgaccaaatgtgtgggagtttctttcaaccaagaagaaaacaatcacttctgtagcaggcaccagctgggtgtcctctaattcatttctgagactacctggagaaagtgtcagatcctgtaggttgagggcttagtcccacaagactgccttcccttcagacactggtctgaagttcaggcctctggaatctctgactgaccggcttcaagtttaggttcacacagccccctctttgggtttgattaatttgctagagtgcctcataaatctcagagaaaaacttaacttatgtttactggtttattataaaggatattgcaaagtatacagatgaagagatacatagagtgaggtatgaaagaaggggta

SEQ ID NO: 669782 - DNA, 324 bp, Homo sapiens
gcaataagatttggtgattgattgtttgtggggtgtgtgtgaaacagtgaagtcaargatgactgtagattttcttacttaaagctactaaaaaagaggttgcaatttgatgagacaggaaggacataaggaaaagcaagcttggggtagaggggaattaggagttctatttgaaaaataaggcattgtaggcttttttctctcacaaaaaacaggaaaataaagaaaaaggaaaataaggcattgtacacgtcagtgcctcagtaatattcattggaatgaatgaattaaacacttctgtattttttttacttaggattccaa

SEQ ID NO: 669783 - DNA, 598 bp, Homo sapiens
atatattttatacattttgaatgttgtatcatgtaaattaattacttagtgaatatatatactgaccccccatttcaaaatgcaaaacagcatatcattatatatgaattatgaaatattcatatattcattttatatgaactataaaatatgaattatatcattcatatttctgccaccaggaattaacaactgttgacttctgtcaaattggctctcagtccttttatggcatgtgaaaaaaataaaactttatatttaaagttcttttaaaaaaccgtggccaggcacggtggctcacgcttgcaatcccagcaaactttgggaggccaaggtgggcggatcatttgaggtaaggagtttcagatcagcctggccaacatggtgaaatcccgtctctactaaaagtacaaaaattagccgggcatggtggcatgcgcctgtagtcccagctactggggaggctgagacaggagaatcacttgaacctgggaggtggaggttgcagtgagctgagatcatgccattgcactccagcctgggcaacagagcaagactctctgaaaaacaaacaaacaaacaaacaaacaacaamaac

SEQ ID NO: 669784 - DNA, 3767 bp, Homo sapiens
tgcttttggtgtcgtatccaagaaattatcgccgagatcaatgtcaagattttcctttatgttttctttcagaaattttacagtttcaggtcttatggttaagtctttaatccattttaacttgatttttgtgcatggcatgagataaagttccaatgttattcttttgcatatgtgtagccagttttcccagcaccatttgttgaagacatatctttcctccattgtatattcttggcatccttgtcaactatgtatgtatgagtttatttctgggatctctcttctgtttggccatatggctgttttcatatgagtaccatactgttttgattagtgtagctttgtaatatattttgaaatcatgacgtatgatacctctagcttttttttttcttgctcgtaattgctttggtgatttgtttcctaatctgtttttacttgaggatccagtctcatcctagacttggtgagaaatgtctcaagactttttccacaggcagctttctgtgactctagagccatgtgatgcaatggagtagctcttagccaattgtggttgtttaaatttaatcaacattaaatcaaattaaaaatttatttcttcagtctccttgggcacattttaagtgctcagttattttataaagctggtggcaactgtattgggcagcacagatacatgatctccttcgttgcaggctgttctctcaggcagttctagagctttcttttgcttgagtgatgatataagattttaggatgataaaaattttcctaggccaaggcacagtggctcactgggattactggaggctgagccagatggatcacctgaggtcaggagttcgagaccagcttggccaacatggcaaaacaccatctctactaaaaatacaaaaaaattaccagggcgtgatggcacctgcctgtagtcccagctacttgggaggctgaggcaagagaattgcttaaatccgggaggcagaggctgcagtgagccgagatcatcccagtgcactccggcctgggtgatagagcgagactccatctcaaaaaaaaaaaaaaaaagaaaagaaaagaaagaaagaaagaaaagaaaagaaaaagttttcctgtaaagcacctctatttgcttctttttcttttaagaagtggtttcctatagcagaatcacttccgtttgttgaggtctcttacgtggcctaggcatttgttgaatagtaaatggccagattgatgtataaatcactgacaagtgagtattagtcacataatcctctgagttctccccttcagccttgatgattttgcttatgtattgttcttttccctccctatgagctttatggccgatgattttcctggttttacagcagaaaytaatacaacagaaggaggctcttctccctccatatgtactcctacatgttgtaccattttttacaagaatgaaagcactataatactaagtacaatgtttgggggaaagatccaccaagtgtttaatttaatcaggcttaaaaactaatactccacctcactacgtaggaccccttcttgaactcatcctcatttgacaaactatatattttacttccatggccttcctggtgtgtgtttctgtgtgttctcttattataagaacatcagtcatattggatttaggcttcaccctaatccagtatgaccttgtcctaactaacttcaactgcaaagaccctatatgcaaaggaaggacacattttgaggttctcggtgaacatatattttggagacactattcaacccattacagatgcatagataggtcagtcttttccctagctggatttcttaccccatgaagtatattctgttcctgaggctttactaaatctgctttagtgcaagcacaatctgtaatgtttattattctcatggacagacgatcatcatgcaggttgggagattatgttctgctaatgagcgctttctacctgggtgtggaacacatgggatgactcaccttgggactgctgaatcagctgttcttccccaagcctgtcactgtccccagttctgtcttcagtctccaccctttctcttcactcataaagagccacagtcatcctggagcagtggctagtctgtttgcctctttcttgagccttctgcattggcgtttggtctgctctgagctctgctgaagggtgcccattaattatgccttcccttctgcctgctggcagttgtcccgatcagctcaccttacagcagctgtttgcatattctcctgcaatacatttctacatgtccaaaccatcagagctggtggtgacaaatgcagtgtcaatgcttaatcaggctggttgaggatccaaggttgtcctgtaggtgatccatcttgtcattaatgtcagtgctgaaactctgtaagaggctcaagatgacatctgtggagaagggccagtcggccaacaggctggcttaggagcagggcagaaaatatagaggcgagttgcgaagaccattttggtgtctccagcttgtgcttccttagcccagggtcccttcaacctgttaacctttaggttgacagcacttgaagagtactttttgtttgtagcactttgggggagttttaaagtcctatgcagctatgaaagtaggtgtcagtgtctctgaagccacaaaagtgtcattctgctgaagtgtcatagatagagattgacagtaccaggaaatcttaatctgagactccaagaacctcctgaatggtgaaaaatctttttatgcatagttctgtttgaatttttctggtaatagcaccacaacttcccaagaagtgaaagccatagctagacctaaatagctttaatgtatgagaattcaactatacaggctggacaaaaagaatacattcatctccttatttaacaaacatttatgtgacaggtatattattaggcacttaggagacatctatgaacaaaacagggattcatgcacttgtgaagcttggtttctaactaagcaataaaccctaaaccatgagtgcagggaggagagatgaatgtttaattaatatgagtcattctattcagtgtcctggagtaagagcaaaagatgagagaaaggaatctgccattagtttcagaacctggtgccttttatgtgtatcctttttgcagttccacgtgtgatcctgggtttaaagattgtgccattttattccctaacctcaagccaattaattaatctggtactcaaccgatgagcctgttccagctctgaaacaaaaaaaaaacaaacaccatgtgggatttattgttggaagttacattggtctccaatgtgacactctcttaaggcttttcagggattagtttgacagtacatgattttcatcttcatgtgcctattttagagccttattctgggagcaagatgctacttctctgtagtgtggtttggaaatcaaagctatattgttttatttactatttctctgtcatcctttaaaacagttttgtccaagtcaagcatcatcagaaaggggagttcaataagaagttggtattaggttgctgagattttacagaagtcagttaaccttttagatcctggtttacttgtgtaaaatgaggtagttggactatttactctttcagggcctttttcaatctaaaggctataatttttatgtggcagcagaaaatgagcaggacactgtcccattttactttattgtttctctcttccctttctgatagctgacaagtggt

SEQ ID NO: 669785 - DNA, 2149 bp, Homo sapiens
  misc_feature 1702: n = A,T,C or G
ctttttttcccataagtaagccaaaattgattctgcaatttgcaactaggaaaactgaaactcatctaggtgtacactgtgctggtatccaacatatgtcccacaggcaaaagtaacacctctaatcctgaaaacgtattcaaactcaccagtaatcagagaatgtaaattaaaaccacaatgagatgcaaaaagactggcaaaaataaaaaatgctgaccacacaaaatgttggcagggatgcgaaagaggaagaactttcatcaatgggaagttgaaaaactttctgatacttttcagtaactggaaaagttactgattataaattgatacaaccattttggaaatcaatttgatattattaaagttgaaattaaacattycctatgaccaagcaattacactactgcatgcctacagaaatctgtgcacatatgtaccaggatgcaaaagcaagaatgttcacagcagtatttttgataacaaccacatttggaaattattcaaatgtccacccacagtaaaacaaacttatacaatggaatcagtggactacagcatgtagctgttaaaatgcaattaaaaatgacaaacatatataagcaagtcacaaaagtgcatacttttaaacttttaacattggcaaacaatattgtttgcagatatatatactggtagtaaaaactgtaaataaaagtaaggaaaggattactataaaaaggcaatggtggtcaccctataggatagaggatgggaactacagtcagacagggaccttggtaaacttctggtatgccagcattacttgattttttggcctgggtagagttaacatggtattcactttttaactgttaaactatacatatttatattatgtatttttaggtatatatgtgatatttcattgcttaaaaaaattaaatcatgtgatcattttcctgttagatgtgtaagtaagtatatgtcatctcaaaagccaggttatattctgaaaaaactgaaaagtagttacaaagaaagttgacttgaatgcataagataaaatgatggttatctttactacagatttcatagcaaaaaacagaggtctttctaaaatattcacttagagatgagatgtgttacccttcccaatcaaagtgggacaggttttttctactctactcagccctcaacatcattctgctagcacttcagtaagtcataccaaatggtttacctacaaacaacactgtctgcatcaaaacgttccactttaattccaataataggaaaagccctctttcaaaagaactaagaaacacttgtagaacaatattatttgtagataatcataatcaccatagctaccacatatatagcgcttaccattaactaagtccgttacatgttattacctcatataatactcagcactctgaagtgggtattattagtgccccattttatatatgaataagttcagttacacagaagttaaataattttcccaagtaaaaagtagaaaagcttgcatgggaatgagacaaccaaattcataaataattttaaaaagcagaaataccggccaggtgcaatgtctcacgcctgtaatcccagcactttgggaggccaatgtgggcaaaccacgagttcaggggttcaagaccagcctagccaacatggtgaaaccccgtttctactaaaaatacacaaaatntgctgggcgtagtggcgggcgcctgtaatctcagctactcaggcagctgaggcaggagaatcgcttgaacctgggaggtggaggttgtagtgagccaagattgcgccaccgtactccaacccaggcaacagagtgagactccatctcaaaaaaaaaaaaaaaaaaaaaaaaaaaaccaaccaaccaaaaaaggtaaaaattcccacttgatctcactcatacgtaaaaaaaaaaaaaactgaactcttaaaagtaaaaaaccaaaagggtatttgccagtgactgaaggacaaaaggggattggggggatgttagtcaaagtatacaaaatttcagttaaatatgaggaataaactcaaaaaatctattgtccaaaaggatgactatagttaataacatactttgtattcttaaaaattgccaaaaaaaattttaagggttctcacc

SEQ ID NO: 669786 - DNA, 2073 bp, Homo sapiens
taaggctatttaaaagaaaaagaaaactaaagaaagcaacctactgagcttagaagcattcctattaaagttggaaacaagacaaattaccaactatcaccacttctactcaacattgtcctacgagcccttgccaataaaacaagagaaataagagttaaaacaattagaaaacaaattaaaaagggcttctttgctcttcaatatggatgcagaaagtccaaaagaataaacaaacaaaacaatactgggagaattcagcactactgcaggacgcaaaaccagtgtactaaaatcagtgtactcttacatagcagtaataatcaactagaaaacagtaggaaaaaagttatcatttgtgatacctgtggagctacaaagtaattaggaagaaatctaacagaatattttaaaaatatttctaatatagtaaattaccaaaccaaaaaatcttaaatatcataaaaatgtaagctgcagcctagttaatctctaaattcaatgcaatgtcaatgaaaatctccacaatgatattgatatggaaaaacaaagacaacttttagtgaaaaaacaaggtgaggagcagaccttgtctttatagctgactaaaaactataataattatggcagtgtggtggtaggtcagagttttgttttttttttccaaatagacaagtgaaagagactagaaagccaaaatacagatacattaatacatacaaacttgatacacggcaggaataaaatgatctgttcagcaaaagaagcgaggataactgcttatttatacaggaaaaaactggatcctcatatacaaaaataaattaaacttaaaatttttgaaagaaaatatggaaggaaatcttagtgaaaagagaaaccacagatttggagaatacatttataaatcatttaatcaaggaaaattaacatctagaatatatgtaaaactcctacaaatgacagactctttcttagaccaaatttcagttaggctcctctgaggtctcttctcaaccagaccttcgacttctgtgtccatttttgcagaattcagtcatagcaagaatcctgccaagtcagtttagcaagaatcccctcatcctttatatatgatcactctyaatatctgatcaaattcctcattccctctgactcagggaaaaatcaaataattatttttaaaaaattcttcattctccaccatccccaaagtgatatataatcaccctggcctgccttcagcaagaattccattgaattggtttagtaggaatccccctacccttgatgttttctcttaagaatattccatgcattcttcccctctctctgctaattggctataaatgccaacctgtctttactttatttagagttgaacccaatctctctccgctgttgccatagaagcaacccttattgcaacagtcttgaatacactcttccttactgttttaacaagtgtcagaatagttttttctttaacacaaatcattaagaaaaaaaaactcaactaaaaatgtgcaaaacagatgaataggaaacataaaagtaaacttatgaccaaaacgcatatgaaaagatgctcaactgcactataatcagaaagacaaatcagaaaaagataccacttcagacttattaaattggcaataatctttttaagtctgaaatttccaagtattgctaaagacaaagagaaaacaggaattattttttgctgttcatgagaaggtaaacaaacataagaggctggaaagcattttgttgttattcagcaaaattaaatgtgtgcatactccatgacccatttttacacatctatttattagataataatatatatgtatatgatacatattaatatataatataaaactttatatatgtgtttatatgtgtatatatgtaaatatatatattatatatatgtatataaaaaactattcacagagggaaaagaaaaacctaaaagtctacagattatctccagaactcaaaacttcataacattggaattgtgtttgcatggacctgaaagcacattccaaaggattaaaattataaact

SEQ ID NO: 669787 - DNA, 2073 bp, Homo sapiens
taaggctatttaaaagaaaaagaaaactaaagaaagcaacctactgagcttagaagcattcctattaaagttggaaacaagacaaattaccaactatcaccacttctactcaacattgtcctacgagcccttgccaataaaacaagagaaataagagttaaaacaattagaaaacaaattaaaaagggcttctttgctcttcaatatggatgcagaaagtccaaaagaataaacaaacaaaacaatactgggagaattcagcactactgcaggacgcaaaaccagtgtactaaaatcagtgtactcttacatagcagtaataatcaactagaaaacagtaggaaaaaagttatcatttgtgatacctgtggagctacaaagtaattaggaagaaatctaacagaatattttaaaaatatttctaatatagtaaattaccaaaccaaaaaatcttaaatatcataaaaatgtaagctgcagcctagttaatctctaaattcaatgcaatgtcaatgaaaatctccacaatgatattgatatggaaaaacaaagacaacttttagtgaaaaaacaaggtgaggagcagaccttgtctttatagctgactaaaaactataataattatggcagtgtggtggtaggtcagagttttgttttttttttccaaatagacaagtgaaagagactagaaagccaaaatacagatacattaatacatacaaacttgatacacggcaggaataaaatgatctgttcagcaaaagaagcgaggataactgcttatttatacaggaaaaaactggatcctcatatacaaaaataaattaaacttaaaatttttgaaagaaaatatggaaggaaatcttagtgaaaagagaaaccacagatttggagaatacatttataaatcatttaatcaaggaaaattaacatctagaatatatgtaaaactcctacaaatgacagactctttcttagaccaaatttcagttaggctcctctgaggtctcttctcaaccagaccttcgacttctgtgtccatttttgcagaattcagtcatagcaagaatcctgccaagtcagtttagcaagaatcccctcatcctttatatatgatcactcttaatatctgatcaaattcctcattccctctgactcagggaaaaatcaaataattatttttaaaaaattcttcattctccaccatccccaaagtgatatataatcaccctggcctgccttcagcaagaattccattraattggtttagtaggaatccccctacccttgatgttttctcttaagaatattccatgcattcttcccctctctctgctaattggctataaatgccaacctgtctttactttatttagagttgaacccaatctctctccgctgttgccatagaagcaacccttattgcaacagtcttgaatacactcttccttactgttttaacaagtgtcagaatagttttttctttaacacaaatcattaagaaaaaaaaactcaactaaaaatgtgcaaaacagatgaataggaaacataaaagtaaacttatgaccaaaacgcatatgaaaagatgctcaactgcactataatcagaaagacaaatcagaaaaagataccacttcagacttattaaattggcaataatctttttaagtctgaaatttccaagtattgctaaagacaaagagaaaacaggaattattttttgctgttcatgagaaggtaaacaaacataagaggctggaaagcattttgttgttattcagcaaaattaaatgtgtgcatactccatgacccatttttacacatctatttattagataataatatatatgtatatgatacatattaatatataatataaaactttatatatgtgtttatatgtgtatatatgtaaatatatatattatatatatgtatataaaaaactattcacagagggaaaagaaaaacctaaaagtctacagattatctccagaactcaaaacttcataacattggaattgtgtttgcatggacctgaaagcacattccaaaggattaaaattataaact

SEQ ID NO: 669788 - DNA, 593 bp, Homo sapiens
ttcccatagctgccctaatatttttcagaattttgatgagaatgcattgtgtgtccccaacaatagcgctaaactatttttttttttggtctcttctccaaagagatccatcaaaggagaaaaagaagacatcttgggtgctccaaaataagacaccattttgaaaacctttaggaataaaaacaacaataaataaatacaaatgaagaagaaaatatcataatattcaggaagatgaatttggaagcacaattaaaarggagagaaagatgagtcttcctggacgcatcaattactattccttatttttagatatcccatgcatttaacaatataggtctgatggactcccacaaaaggcaggaattatgatctctgctcctatgtttgtgcattccactggctatcctgcttactcagcatgggctactagatctctgtttcacttgggatctgattctctatttcaagagcatctttggtatcctactgggaatcagagacagagcaattgttcaggcaggttcagcatctgcacaaaataagtgatttcctagatatttgagtaaagtggcacatagtgtttctaaaag

SEQ ID NO: 669789 - DNA, 343 bp, Homo sapiens
tataataaaaaaaaataataacaatagtaataataaaataaataaataaataartaataaaaaaaaataaaaatgggagtttccctgcacaagctttctctctctttgcctgctgccatccatgtaagacgtgacttgcttctctttgccttctgccatgattgtgaggcatccctagcctgtggaactgtaagaccattaaacctctttttcttctcagtctcgggtatgtctttatcagcagcatgaaaatggtctaatacagtctgggttttctgagcatctgggaatctccttccaagtagcctgtatgagaccagagatcacattgaggatggcttgt

SEQ ID NO: 669790 - DNA, 624 bp, Homo sapiens
tgcaaacaaagacacaccttctcaaagaaggtccaatatactagggtccacaggggttcctgtattcacagctaaaaatataccaccactccattccactctggcccctggtcattttcttctgtttcttctgttttttctctttgttaygcccctaaggatgggattgcctagcacatgggactttgtccatcaagctctcttctaatgaacctgacaacaggaaatgtgttctcaggaagaagcaaagcatcaaaattcaatccatcaacagacaaatggacaaagaaaatgtggtatcaacacacaagagaatactatgcagcctttaaaaagaaggaaatcctgtcatttccttctttttaaaggctgcatattttaaaacctgggaggatactaagccaggcacagaaataaatactgcatgatttcattttcacatggaatctaaaaaagttgagctcataaaaacaaagtagaatgtttgataccagaggcctggggactgggaggaggagagatgttggtcaaaagggacagagttacacttagaaaggaaaaataagatttagagctctattacacagcatagtgaccatagttaatgatagcataatgtatagt

SEQ ID NO: 669791 - DNA, 2803 bp, Homo sapiens
aatagaagaaggactcactctggagcttaacttgagcctggagccagtttaggttcctctggccccttgctgtcacctcttagagaaaagggggctgaggtcagaagggtgccttctcccagacacctggatccggcaggaagctgtcctaaatcccaggcttcctgggagagagtcatgaggcacacctatgagtttgctcgtctgtagtcctcatctacaatcctttatgatgtgaagccccacatcagagttaaaggaaacgatgttgacaattataaaataccaaatatagctgagtatatttaaaaatgaacaatggtaaaagccttgaaaatttttccttggatgtgaatggagtctttggcatttggaaatacaataaaatgaattaattgctgcttattaggcagcgagtcaggagaagcatgaatgtgccttctgtcctctgcgttagctgttacctgactgaagtagtctccttttgtatttactcctgccttttctaatgataagcaaattagagatcatagctagaaaaaaaatcaagtgccctccatcctttttccaaaaccataatatagttctgtgatgtttatctgctcaaggggtatggctaataattgcagaggtcatgtggagccacatagtgcaagattagaaagaacatctgcaagattacttcttaggaaagtattttgtgttttgtctttttctgaaaaagtgattgtgcaagcaaattgctgtctttcctcccttgcactatattgctggttaaagcatatttgaagaaaaaccatttaataactatcaagagtttttgaatccatggtcgtttttttgactttactattttttctgacgtatttgatggacttctatatgaataaattacattggaatcctatctttaaattctgaaatcatggcccatgaataaactgtttggaatatattgattatgctgttcattaaaattccatatatggcagctatcatatattgtatatgcaagcatgtaacctttttatgttatctttaaagtttgttcatggtaatacctatagaatatgagataattgattttgcagaataatcaaaagctgagaagcagaaggaagagaagggaacaagactcctctgatatccagactgatccgtgagatgtccttgagttttaagagtacaccactccagccatgtgcatttgtgatattgctgtcctcctgtcatgtatattacatgtagatattttccaaacattgtgtccatttcaaccataaaaaggaggcartcagcagaacagagagctatagcagcagtagccttgctctccttcatgaaatatgaaagcctgtttttacttagaacaataacaatttgtaaggcttcaggctgaggagtttatgcatgacacagcctgctggaccatgtagcagaggcagcgagaccattgagtgtggtgtgttggaaattggttaatgataaaagtagggtagatgatgagacaggcatcccgagtctcaggtcagttggaccgtttgttcttagaacccatcctctttcccatcaaaagtccatagaccacccatagttcctgctccatgagtgttttctgcattgcaggtcatgggcttgggttggggttcagttggaaaagggagatttcccttttctttccccactccccaaaacatttggctttttatgtcctcattctttgtaatcttagggatagagggacggaaaatcagcaataagtagtcagtgtgaacttgtccaaacatttttctaggatgcaattttcttattcttgctcatatgcacacgcacgcacacatacacactcagaatatttcctgtaacctaagacttcacagagcataattccgtattaacctaacagtttttcagcatcaaacaatgtgctcacctttgtaaatctcatccacatctcagaaatgttggtgtgaagacatcttaaaattagtgtggtgtacaaatgtagcatgtgtttgaatttacctagcttcgcttgtttggatagattagcctcctcccctttagagtgaggatgagtagtgaggatagagtcgaatgctttaaagtctgggatattaaaccagagtgacacagaggagcagttcactcaggtctgacacttagagttattttttcaaagccaggcaggtatctctgggctgcaaatgacaatttagaggtccttccattgaaatctcttagcttggcattctttcaaattcccgtttcaggataagtgggtctgtaggcagacccttggttctgatttcaagatatccctggtggtgcttattatttccagggtcacattagattttaaacaaaaacattttaatccttttaattttcaatatatattgtagataaaggggagatgttataaaaattaaatgagtagtcagagtagctcgaccacaaaaggtaggaaatcactggtatagacattttagtccatttgcagaaaattgcctattctcaaataggtaggtcaagtgcagaaagaacctctacttgagatgaaatttcctttctacacttagctttctattaggacagcagaccaaagctgcccaaattttaacatcctgctgtcttctcactagtagtttccttgactatatgcattgaaaagtatctgtttataatggaatttaccctcatagctacaaatacctttaaacccagaaggacattaggcagtaatgtgcaacttttaattttataaataaagaaacttcgaagtcattaaatgacttgatcc

SEQ ID NO: 669792 - DNA, 832 bp, Homo sapiens
cattgctcacagcgcccagtggacacaaggtctcttccttccttccttcaggcacaggtgagaggcccacactctgagcagctggttatgagtgggccattatcagggatttgaacagtcacttggcttcactgcttgctcccagctcttggcttgtgtttcttttttctttactaggcaggagggatagcaaaagcaggaaagttattttgcttctacctcaggatctagtgaatgtcacatgataataaactataacaatggtcatcttagctataatttattgaacatgaacacttttttttttttttgagacggagtatctytctgatgctcaggctggagtgcagtggtgtgatcttggctcactgcagcctccgtctcctgggttcaagcaattctcctgcctcagcctcccgagtagctgggattacaggtgtgtgccaccacacccggctaatttttgtatttttagtagagatggggtttctccgtgttggccaggctggtctcgaactcctgacctcaagtgatccaccctcctcagcctcccaagtgctgggattacaggtgtgagccaccaatcctggcccctatcaaacatttcttatatggcaggtcctatgccaagcaccttctgagcattagctcctttaatattcacatatgttgcaaatattacaggtattatatccccattgcacatatgagaagtcttgaggtttcaggtttgtgtctggctccaaggctttcgtgctttacactcagcaccttgcttttcagctgtaccttcatggtccccattggtatgtggtagattttacccccattc

SEQ ID NO: 669793 - DNA, 832 bp, Homo sapiens
cattgctcacagcgcccagtggacacaaggtctcttccttccttccttcaggcacaggtgagaggcccacactctgagcagctggttatgagtgggccattatcagggatttgaacagtcacttggcttcactgcttgctcccagctcttggcttgtgtttcttttttctttactaggcaggagggatagcaaaagcaggaaagttattttgcttctacctcaggatctagtgaatgtcacatgataataaactataacaatggtcatcttagctataatttattgaacatgaacacttttttttttttttgagacggagtatctctytgatgctcaggctggagtgcagtggtgtgatcttggctcactgcagcctccgtctcctgggttcaagcaattctcctgcctcagcctcccgagtagctgggattacaggtgtgtgccaccacacccggctaatttttgtatttttagtagagatggggtttctccgtgttggccaggctggtctcgaactcctgacctcaagtgatccaccctcctcagcctcccaagtgctgggattacaggtgtgagccaccaatcctggcccctatcaaacatttcttatatggcaggtcctatgccaagcaccttctgagcattagctcctttaatattcacatatgttgcaaatattacaggtattatatccccattgcacatatgagaagtcttgaggtttcaggtttgtgtctggctccaaggctttcgtgctttacactcagcaccttgcttttcagctgtaccttcatggtccccattggtatgtggtagattttacccccattc

SEQ ID NO: 669794 - DNA, 667 bp, Homo sapiens
ttgcccaggctggtcttgaactcctgggctccagcgatcatcctgcctcagcctcccaaagtattgggattacagrggttcacacctctgtgcccactctttttttttttttttcttaattttaagtttgtttgtagaggtgggatcttgctgtgttgcccaggctggtctcaaattcttggcctcaagctatcctcctgccttggcctcccaaagtgctgagattacagagcaattatagataagttttgactctgtttcttcctgagagttctgaaaggcagagggtaaatacaattgtgtatatagagaaaatgctttagagttttgtgatttttttatattgcctctagttgcacaaggctgaccatgtctctgtgacaatatatatcactttcatggggttcagagcttcttgttatagctcaggaagttacagagggagattgggagctaatgcaccaaaaccggcagtgagtatgtgtaatggggtcaaaccttgttggttttttttagctacaaagcagcagatcggccactgtgatagaatttgatttttactggtttgggatagattcctggtgatgctgatagtttattacccaatgtaggtctagaatttatacttgcagagcattttcatatttgtgggagaataaatttattt

SEQ ID NO: 669795 - DNA, 667 bp, Homo sapiens
ttgcccaggctggtcttgaactcctgggctccagcgatcatcctgcctcagcctcccaaagtattgggattacagagkttcacacctctgtgcccactctttttttttttttttcttaattttaagtttgtttgtagaggtgggatcttgctgtgttgcccaggctggtctcaaattcttggcctcaagctatcctcctgccttggcctcccaaagtgctgagattacagagcaattatagataagttttgactctgtttcttcctgagagttctgaaaggcagagggtaaatacaattgtgtatatagagaaaatgctttagagttttgtgatttttttatattgcctctagttgcacaaggctgaccatgtctctgtgacaatatatatcactttcatggggttcagagcttcttgttatagctcaggaagttacagagggagattgggagctaatgcaccaaaaccggcagtgagtatgtgtaatggggtcaaaccttgttggttttttttagctacaaagcagcagatcggccactgtgatagaatttgatttttactggtttgggatagattcctggtgatgctgatagtttattacccaatgtaggtctagaatttatacttgcagagcattttcatatttgtgggagaataaatttattt

SEQ ID NO: 669796 - DNA, 667 bp, Homo sapiens
ttgcccaggctggtcttgaactcctgggctccagcgatcatcctgcctcagcctcccaaagtattgggattacagaggktcacacctctgtgcccactctttttttttttttttcttaattttaagtttgtttgtagaggtgggatcttgctgtgttgcccaggctggtctcaaattcttggcctcaagctatcctcctgccttggcctcccaaagtgctgagattacagagcaattatagataagttttgactctgtttcttcctgagagttctgaaaggcagagggtaaatacaattgtgtatatagagaaaatgctttagagttttgtgatttttttatattgcctctagttgcacaaggctgaccatgtctctgtgacaatatatatcactttcatggggttcagagcttcttgttatagctcaggaagttacagagggagattgggagctaatgcaccaaaaccggcagtgagtatgtgtaatggggtcaaaccttgttggttttttttagctacaaagcagcagatcggccactgtgatagaatttgatttttactggtttgggatagattcctggtgatgctgatagtttattacccaatgtaggtctagaatttatacttgcagagcattttcatatttgtgggagaataaatttattt

SEQ ID NO: 669797 - DNA, 667 bp, Homo sapiens
ttgcccaggctggtcttgaactcctgggctccagcgatcatcctgcctcagcctcccaaagtattgggattacagaggttsacacctctgtgcccactctttttttttttttttcttaattttaagtttgtttgtagaggtgggatcttgctgtgttgcccaggctggtctcaaattcttggcctcaagctatcctcctgccttggcctcccaaagtgctgagattacagagcaattatagataagttttgactctgtttcttcctgagagttctgaaaggcagagggtaaatacaattgtgtatatagagaaaatgctttagagttttgtgatttttttatattgcctctagttgcacaaggctgaccatgtctctgtgacaatatatatcactttcatggggttcagagcttcttgttatagctcaggaagttacagagggagattgggagctaatgcaccaaaaccggcagtgagtatgtgtaatggggtcaaaccttgttggttttttttagctacaaagcagcagatcggccactgtgatagaatttgatttttactggtttgggatagattcctggtgatgctgatagtttattacccaatgtaggtctagaatttatacttgcagagcattttcatatttgtgggagaataaatttattt

SEQ ID NO: 669798 - DNA, 997 bp, Homo sapiens
taagtgtggccaacagtggatcaattatattactatgaaaagcttttcataattcatttggggggcatcaagatctcatttctggacagcacacggatgatgaagtcgacaaattttgaagaggtcggcactcacaggcaccgaatacattaaatgtgatagatggtgtaaacactccgttcacaaaaaagggaaaatgtttacatctggcaaaataattaaaatagggtacaacagatcaacaagttgggaattaggtacatgccagtctctctccataaacaggagcaggaaaatctcaaatgctggccatttattctccgtctggctgaccactaaatgtttattctcatctccttcaaaagtaaaattggctaatttctaggtgttagaagaattatttcaagctacgcatgctctgaagtgcctttattccaagaacattagtagtttattacaaattctggctttaaaggcgtgagataataatatcagcgtggcagaatccaattcaatccaagcagcgcaaggcctgaagaaacaaaggcaaagtagctagcgtgagcccaaggagtgccctgcgcgaggttctgctgatccagcagcgagtgaacatgagacacatttcaattgggcagtgtgcataaacctcgcctcggctttgagggaacgctgcatcacacatggaaagaaacactattccaaaccagcgggcctctgcacatgctgccctgatggccagagaaggcatcttgaagaacagggaggggtgcagcagttgtaggttctctacattctcattgtaatgccatcatcacctgtgtcccactttgtcccctccactaaaccatgagcatcttaagagcaggaaccaggtcttactcatcttgagatccctgtccctagcactggagaktcacacaaaagatgtgctaaataaatagccacagggtgtaaattatccctctcactctggaagtcttgtacctggcttgtg

SEQ ID NO: 669799 - DNA, 1410 bp, Homo sapiens
ctgagtgatgtgagcagctccatggattccagcccttattagaattcaccactctcacgggctgcaagcatcatcacaagcatgtatttatccctgacctcccaacgtggatattagtttagcgtgctggacaagttggtcctttgcaaaagatgaaattgtgggctcactgatgtgagttactgctgatgtccctgtgtcaaataaatactgaagagacattggcgctctgaaggcactcaacacgtccttctggaagatacgaccccggtgctctgaaggcactcaacacatccttctggaagatatggcccattggaaatgtccctctgacatcttccttcagtcccagtgaaaaatgggcctccctgaatcttgcaagccacctgtcccggggcttgtcatttacaatcagtgcatgacaaatgacgttactgtgcacacgtgggctgaagtgacggtcaactgatcatcagccggcagaaatatttcctcaatgtcctgacttggggttggctgtgggaggaattccagaccaattagttattctgaatcatggagggttagaggatagtggtgctattgacctaagaataagctgaggctcttgttactcaaacataaagagcccatagaaaagtaaacggtgtcaagagaggacatctgaacctttaaactcatcacagtgctgcgtggcgcagaccaagctttgtcttctcgatccctgcaatttggtgggattcactcccctgtaagaaggcttgttccctgcaggacatctgacgccatcgttcatttcttgaacacatattcctagaactcctcctggcacctggcacctggatactggggaaccaagtacctggatactgggggaacgaagtacctggatactgggggaacgaagtacctggatactgggggaaccaagtacctggatactggrgcaatgaagagggcattttcccgctttgttgggattcagagttacaggacagggctggtgtcattcaacatgcacatgcatgtgcttacagaggtggcatgtgctctgcaggaggaggatgaggacgtatgaaagagacccacagggctgtgatttgagggtggccctaggggagaggctctgagggagagacccctgtgctgaaagcaggaggagcagaagccagcccattagaggttgggaggaatctaccccaggcaagagggcatgcagaatggctgaggcccaaacagactgttccctaaacattgtagggaaaggctgtgtgtgtggtcggagcggggacagggaggtgcgaggtgaggtccccgattcctaaggagataaatccacattcctttcatggttagattttagggttcctcccacctcatttctgtacgaagaggctgcagacttctgca

SEQ ID NO: 669800 - DNA, 1410 bp, Homo sapiens
ctgagtgatgtgagcagctccatggattccagcccttattagaattcaccactctcacgggctgcaagcatcatcacaagcatgtatttatccctgacctcccaacgtggatattagtttagcgtgctggacaagttggtcctttgcaaaagatgaaattgtgggctcactgatgtgagttactgctgatgtccctgtgtcaaataaatactgaagagacattggcgctctgaaggcactcaacacgtccttctggaagatacgaccccggtgctctgaaggcactcaacacatccttctggaagatatggcccattggaaatgtccctctgacatcttccttcagtcccagtgaaaaatgggcctccctgaatcttgcaagccacctgtcccggggcttgtcatttacaatcagtgcatgacaaatgacgttactgtgcacacgtgggctgaagtgacggtcaactgatcatcagccggcagaaatatttcctcaatgtcctgacttggggttggctgtgggaggaattccagaccaattagttattctgaatcatggagggttagaggatagtggtgctattgacctaagaataagctgaggctcttgttactcaaacataaagagcccatagaaaagtaaacggtgtcaagagaggacatctgaacctttaaactcatcacagtgctgcgtggcgcagaccaagctttgtcttctcgatccctgcaatttggtgggattcactcccctgtaagaaggcttgttccctgcaggacatctgacgccatcgttcatttcttgaacacatattcctagaactcctcctggcacctggcacctggatactggggaaccaagtacctggatactgggggaacgaagtacctggatactgggggaacgaagtacctggatactgggggaaccaagtacctggatactggagcaatgaagagggcattttcccgctttgttgggattcagagttacaggacagggctggtgtcattcaacatgcacatgcatgtgcttacagaggtggcaygtgctctgcaggaggaggatgaggacgtatgaaagagacccacagggctgtgatttgagggtggccctaggggagaggctctgagggagagacccctgtgctgaaagcaggaggagcagaagccagcccattagaggttgggaggaatctaccccaggcaagagggcatgcagaatggctgaggcccaaacagactgttccctaaacattgtagggaaaggctgtgtgtgtggtcggagcggggacagggaggtgcgaggtgaggtccccgattcctaaggagataaatccacattcctttcatggttagattttagggttcctcccacctcatttctgtacgaagaggctgcagacttctgca

SEQ ID NO: 669801 - DNA, 1474 bp, Homo sapiens
aaaaaaaaaaaaagaacagtacaagccaacattattaaatgtatttgcagataaagtagcagacctggataaagaaataattttgtagagacaaataacagtgactctccatctgtaaacctctagattcatatgtcaggttgttataacttgcaccaagtaccactgaagggagcaagtcaaagtccgttgcctcttatttttttcagtgagtctttgaaaatgcaagctgcacaaaaaggccagacaactgagaggagtgtagtctcaatctcatctacacgagcatttacacagagagaagaccagatcccttcccgatgatccggtttcattgcccccagtgaccactgtgcagaaaggaaaactggcttcaccctagaaattttaccatgcagcagtcaggggtgcctcaggccttcagaagtcccctctgctctgtctccctcacttgagaccctagggacaccttgctagttataagccttttctttcgcctggaaacccatgggcttagccacatgagctaagtctcatgtgcaaacaccaaacaccatgaggaaagtgcaagagcagtgcttctctgtgaacacagtgcagggcagctctttatgcaaactacagcgttgagctaattcttctgtcggccaaaacctttcaatgtatcccatcatatgaaaatggtaggtgaacagttccgttccagaagcttccgggttagaaatggagctacacagcatgggccattgcttgtgactcatagcttgagaaagtggagggcgtgacccccacatggagaaccagagacatgctatgaacttccacccaggtgacagagacgacggccattcacatgtccattgaatccccatccctgactcctcacctcgtagcagctgagaaggcagcagctttttctccgagcttctacttgtagttttatttgactgtgtcttctgaattacagttcaatagtcccatgatgttgaaacttccccattcccttagctctttattcctacacttttcttctttatccattctatttccttatatgtgctcctcatcacacccgggatagtatactgaagaatccaaaaatccacctgacacttatctttgagtttctggaataaacactttagtrtaaatcattgtttccaagatgcgcttccctgatcaccactttagccaaaagttagctgccgttatttctcttctttcaaattaaatattttatcaagatgatacattaacatattcttaagtcaactagaactatttggctcatactaatcacaaaaaagacactcctcagattcttagaagcagacactctaaactctccacctgctattacaggtataagaacattgtattaatgccttgcaggaacaaatgcagccactcttgattactcctgctagtgggaatataaataacttgggaaaacgaaatccagtgagctcagaag

SEQ ID NO: 669802 - DNA, 617 bp, Homo sapiens
gctggaagtcccagagcaaggtgtggcwgggctggtttctcctgaggcctctctcctgggtgtgcatatggccgccctctctcagtatcctcacgtgggcctcctggtgcccaaccctggcgtctcctcctcttctgaatagtacagcagctccattggatcagggctccaattagggggtcaacatatgaatttcacgccagatgcggtggcttatggctgtcatcccagcctttgagaggttgaggtggagggattgcttggagccaaggagtttgagaccagcctgagcaacatggtgaaaccttgtctctaccacaaaacaaaaaaccccataaaaaccaaaaattagcccacagtggtttgtgcacctgtagtcccagctactcaggaggctgaggtgggaggcttacctgaaccttggaggttgaggctgcactgtgacaacggaaaaagatgcaactacacaaagacagaggaaaggaaggaggctgagcaagagtgcagtgtgatggccacttcaagcccagagacacagtgggtgagggagggctaccgtgtgctgagaggtaggttttgtcaaagtcccagcttttattttaaatgctggatcggta

SEQ ID NO: 669803 - DNA, 617 bp, Homo sapiens
gctggaagtcccagagcaaggtgtggctgggctggtttctcctgaggcctctctcctgggtgtgcatatggccgccctctctcagtatcctcacgtgggcctcctggtgcccaaccctggcgtctcctcctcttctgaatagtacagcagctccattggatcagggctccaattagggggtcaacatatgaatttcacgccagatgcggtggcttatggctgtcatcccagcctttgagaggttgaggtggagggattgcttggagccaaggagtttgagaccagcctgagcaacatggtgaaaccttgtctctaccacaaaacaaaaaaccccataaaaaccaaaaattagcccacagtggtttgtgcacctgtagtcccagctactcaggaggctgaggtgggaggcttacctgaaccttggaggttgaggctgcactgtgacaacggaaaaagatgcaactacacaaagacagaggaaaggaaggaggctgagcaagagtgcagtgtgatggccacttcaagcccagagacacagtgggtgagggagggctaccgtgtgctgagakgtaggttttgtcaaagtcccagcttttattttaaatgctggatcggta

SEQ ID NO: 669804 - DNA, 1984 bp, Homo sapiens
agacagaaagaacaacccatggccacacagcactctacccttttttccttatttccttatttccttttttccttacctggtcccagggtagggccctctctcaggtcccacatgcttcctgtctttattcttgtagcttagtacaaaagatgtgattattatcagttcctcctgctccaagactctgctgcgtgggtccctgattcttacccatctgtagcacatactattggaaaaatggctcccatagacttactcaaaaaaggttgccacaaacaacacagtatctgtggagcaccacaaagttaagtgtaataaaacgaggtatgcttgtattttgagggcagttactggtactaagtagtgagagggttctaactgaatctggcatttaaagtgtagagtggagtggattgaggaggatagaagagaaagaggcaaggccttcagagaaagcaacctttcaaggagttttactcctgctgtccaagggactgtcaaatccaaaatctatccaaagagaaacctaaggtttattatgattgtcatatttgataggacccagacataaagtcgagtggacctgtttgcccttcctctttttttcttccccttcgcactgtaaaacatcaccaccttttcttcagtgctatgataagaagtccttacaaaagcaacaagtctcccacttcagcttctgtttttgacctcatgctttcaggcctcacatctagagaaactaagtggaaaaaaggttgttttttttttttttggaggggaataaattatttggcaattttctcaaatattaatcccttttcttccctaaagttcctccccttcctacttcatttaggataggaggtgcgtttctttcccagaggttgaaatgtttcctagggaaatctgccgtatcatgtgattctaaaacagtttaaaggcaccacatacactgattaggtttctctgaggaggagccccaaagcagaaatctctggcaaggattagttctggaggggtggtgatgagcaaatcagaccaaaggaggggagctcttgagggtctatgcatgcattcctaggcctcaacatttatggtacttgaaagwgcttgtatctaactgtcttgcttttctgtttggtctaattattagaattactaatattacaaatgaatgaacatccccttgggttctgacaggttggttcaaaatcttgctccatcacttactgtttagtgtctgtgagcctcagtttctttatccgttattgtgaggattaaatgggtcagtgtatgtaagatgcataccacagtacttgacacatggtgggctttacgtaaatgtttaggtccattttttccattccttttatagttagttaactatggcagacctgaaaaataatataagaaaacttggaaagcttagtacttgaaacatgagtgtgtattttatttctagtgaattatttggttttactggataattatcagatttaatttagtagcctgtataatataagtggcatgttggtgctgcttctaacgagtaaagagctgtttcaggtgttttgcattttggtgtatattagagttagagaaaccgaggagtcatgtagtccagaggttcaaactggtggggctgcagaatcacctggggagcatgttcaacctagattctcaagtcctaccctcagagatactgattaaattgattgggttaaagctggaaaatgacatgcagatgagtctgatgcagcatttgactatatcccttgtatagatcaggaaactaaggcccagctcacacagtgttagaaccaggacttggtgttaattaactaagttaattaagaaactaagaaagtggtaaagaattattcaacattttaattaatgcactgggctctggagcttactaagacatggtgcctgctcttaaagactgctagaggagacaaacataacataaatactagtatga

SEQ ID NO: 669805 - DNA, 1153 bp, Homo sapiens
acttccccatgtgtgcatgtctgtgtatgcagttttatttaatatctttgtctttaaatattcactacctaaattcacaagaaaaaagttccattcatttcgcaaatcagtaaacagtctttggttgggcaactactcattctgtattttgttaaatagtcattaatcagtgtcttgaattcacaaatagagaggaggtaaatgctcttatcatagaaagaaaaaaatgttggaaatatctacttgtcataaggtcataaaatatatttaagcaggcatttaaaaacaaaaattttaaagttatatattattttaaaatagtataattgaatgagaaagcatactgaatatctatcaaatccaagtctccaaaattgaatttcagctatgttaaatgtatagttagttgtaatcataaaaggccaaggtactttgaatactctttttgatctcaaattctttctctagaccataaagttgtgcaatcaaactgtgttcattaagtgaaatatatgctatctactttactgagagggtgatggtcagtcattgtttagatgttttcattgttgtaaagaattgctatcagtttccaacttctaggtcttccagtgaaccagtactaagatcttaatatggatataatcttgctcatgtcttgcttgccaggatctgaaacaacacatggcatataactgtagttactgaaagctttttgagtcaaactgaattaagatatgtagtgaaacattagaaaaagtttaattatctgcttttcatggaagaacatacattaataaacataactaacctaggcagcaaccgtactttagaaatcacacttcttaggaatttgaaaaaaatgtaaataatgaagagaagaagaaatgtgtcactgttgttgaaatcattgactttgttgaaattgaaattgttctatcctgagaagatagaagataatgtcacatttttatgagtattacctgcaggaaccccaccaggttatcaagtgaatatcctaaacrgataccttcatgatccttgcaggtgtgagtggaagattaaccaatgtagaaatgaatggagactgtaacactaaagcatgaggacattcacataagcactgaacactagttgataaagtagtttccca

SEQ ID NO: 669806 - DNA, 676 bp, Homo sapiens
aattttacttgttatacatcccataatatgttgctatttttctttaaagtcaattatatttaaagagatttaatggtaagtaaagcagcttgtatatttgcccatgtcattgccattttgttttatttctgcattttatttctgtttgtcaatccatgattgtatctagtatcataagccttcactgtaaaagtccttctttactattttctatagtgcagatctgctggtgaaaaagtgtttcagcttttgcatatctgaaaaagtaattattttttcttcattattaaaatacagtttgctgagtaagggattatatttttattttcctattgtaagggtatgttttcactatctgctagctccaattgtttctgacaaaaactgtgctgtcatttttactcttgttctacagtacattgtgtcttattttctgtctcctcttatgactttctgttcatcactggttgtgagaaatttcattatgttatgaagtgcattgttgaagttttcctcatctatatagtgcttgaggatcttggatctatgggtttatattatttgacaatttttaaaaacactgtcattatttttttcaaatattttccctctacctcagctttttccatgtatattagaatgtttaaagtttattgrcagcccaatcacatacttt

SEQ ID NO: 669807 - DNA, 1430 bp, Homo sapiens
taaaataatgaaaaattcttttcatgctttctacaacttatattagtccgttttcatgctgctgataaagacataactgagactgggtaatttataaagaaaatgaggttcgatgggctcacagttccacgtggctggggaggcctcacaatcatggcagaaagtgaaaggcacgtcttacatggtggcagacaagagagaatgagagccagccgaaaggagagaccccttataaaatcatcaaatcttgtgagacttattcactaccacaagaacagtatgggggaaactgcccccatgattcaattatctcccccaggtctctcccacaacatgtggaaattatgggagctgcaaatcaagatgagatttgggtgaggacacagccaaaccatatcaaactttttgaaaacattcttttagctgcagtttctcrcatatggttatagttccaagagataaaattcttgtataatttgaggaagaacatttttgttatttttaatatatggcaatgtgagacatatttttaagttgtaaaaacaaaaattaaaaaattttcaggcctgctctcagtatatgaagattaggcatttaaacttcttatcctttaaatgcattctaaataagaattacaggctttgcttaatttgaagaaaatctatttgacattaatacatttatcttcatttgcagtattattctgaatatgaatgtcttggagctaggtacagtggctcacacctgtaatctcaacaatttgggaggccgaaggcaggcagatcacctgaggtcaggaattccagactagcctggccaatgtggtgaaaccccatctctactaaaaatacaaaaattagctgggcatggtggcaggcacctgtaatcccatgtaatacgagctactcgggaggctgaggcaggtgaatcacttgagccttgggcggaggttgcagtgagttgagattgcaccactgcactccagcctgggcaacaaaggcaaaactctatctcaaaaaaaaaataataataatataataataataataattaatgtagttgaatgaatacaaggataaagccagtcctcaggcacattgtgtgtacatttaaatactagttaaaaggcagtctacttttctttatattctttggtgtgtatgtgcattaagttgcaaaatcaaggactccagttcagtgtattccttttctgcataaataaataacaaaatgatagtaaaatatttgacagaaaaatgaaaaggagactctctcatcattaaaaaaagtaaaaccatgaattgcataaatctatgattagcataaatggagaactgcaaaagtgaaagtaatactaaaaaaatactccagtagcttctgcacagaccaaattatttgaatttataattagaaagttatgctaagtgtga

SEQ ID NO: 669808 - DNA, 594 bp, Homo sapiens
caggcgtgaaccacygcgcccagcctttttgtgtttgtatttttaaacaattgaactaatgctcactgatcatttaaagtgatgctatgtaacttgaaggtagtatttcccacactaggtatagagaacagcagtactctacattggcctgtgaattctcaggtatgaaaataactgctctagagattgattaattagctcaataattgttttaaaagttgactatgtcaccccaattgtttctattattgaaatacaaatatgaacaaggtccagtctttgttctcaaggagtttatgttctaatggggcagagggatgaaaaaccaatgtttgggatataatagttcccctctattctcgagggagacgttccaagacccccagtgaatgcctgcaactgtggatagtacccaaacacatatatactatgttttctcctacacatacattacatacttatgaaaaagtttaatttataaattagacacagtaaaggattaacaataaataaaagtaaaatagaacaattataacaatatgctgtaataaaagttatgttaatgtgtttccaaaatatctcattgtactatat

SEQ ID NO: 669809 - DNA, 1661 bp, Homo sapiens
actagttttactaatagccagcttccccagccctcagccatcatatgaaggtcaatctctccctgctaagtcacatgatatattctaaaactaaacataaataattattgaattatctaatattacagaaattcaagccaggaccctcttcaatacactggccagtcaaaagatgacgataatagcaaagaaatgtttaccactgtttgatcctttctctgcagcattcaaattaaaacaaatatggcagaaaacttagaagcaaaagcaatacaaagatgctatgtagctattcctgctgcttacatttagccatcataaatggcacagaaattgtgcaaaggcaatagacagcaacatatttggaagttatacctgagagtgctttggattttaatcctttgtgttcaaaattactgactagtgaagaaattagttcttttcaaaatatggattttcttctgcaatatcatgtcccaatagggaagactctaaggagtcaattacttcatccccgcctccattcaacctcacttttattttctttaaaaagataaatctctaaaggaaaagatttaccatccttggtaacctagatacacactctcaggaaatatctaaattaatcttccatgctgcaatttaaacctatttccttttattctttcctccgtgaggtacgggaacagctgtccacaacccctgtcatatgcttgcaaactattcttatcccccgcagccttctcttcttccagttgaatactcctcttccccttccttattgttcataggcataaaaaattccactcctaatgcactttcattaggatgcaaaacaccaacatgtagacctgctactgcagtaggatttgtgttctatgggatcctacgggaagactgttgataatcggcagttcctacttcctgtagatacttcccatcaacagatgttagaattagactcttccagcctcagctatgactgaggtactgatatgatacgtaatggataccaaagtaagtataagagaaagttgcatatgagatttccaatgaaaatccatgatgctaggatccacagcagattaagaccttaaaaaggatgtcagatacgttataccatttataaagattaactcaaaatagaccaaaacctgaacataagcaaatgttataaagctcttaaaagaaaaggtaatggaaaccctttatgacattggatttggtaatgatttctttaatatgacaccaaaagcacaggcaacaaaatgaaaaatagatacattggactatatcaaaaytaaaagcttatgtgtcaaaggacactatcaaaagagtgaaaagagaacccatggagcaggagaatatattagcaaatcatgtgtgtgataagggaccgatatccagaatatatgaagaactctataactcgacaattaaaaaaaccaaacaatgcaattacaaaatgggcaaagaaattagacagacatttctccaaagaagatatacaaatggccagtaagcacatgaaaagatgcttgccatcattagccatcagggaaatgcaaatcaaaaccacagtgagataccacttcacacccattgaaatgactattatcaaaacaacagaaaataacaagcatcagggaggacgtagagaa

SEQ ID NO: 669810 - DNA, 1661 bp, Homo sapiens
actagttttactaatagccagcttccccagccctcagccatcatatgaaggtcaatctctccctgctaagtcacatgatatattctaaaactaaacataaataattattgaattatctaatattacagaaattcaagccaggaccctcttcaatacactggccagtcaaaagatgacgataatagcaaagaaatgtttaccactgtttgatcctttctctgcagcattcaaattaaaacaaatatggcagaaaacttagaagcaaaagcaatacaaagatgctatgtagctattcctgctgcttacatttagccatcataaatggcacagaaattgtgcaaaggcaatagacagcaacatatttggaagttatacctgagagtgctttggattttaatcctttgtgttcaaaattactgactagtgaagaaattagttcttttcaaaatatggattttcttctgcaatatcatgtcccaatagggaagactctaaggagtcaattacttcatccccgcctccattcaacctcacttttattttctttaaaaagataaatctctaaaggaaaagatttaccatccttggtaacctagatacacactctcaggaaatatctaaattaatcttccatgctgcaatttaaacctatttccttttattctttcctccgtgaggtacgggaacagctgtccacaacccctgtcatatgcttgcaaactattcttatcccccgcagccttctcttcttccagttgaatactcctcttccccttccttattgttcataggcataaaaaattccactcctaatgcactttcattaggatgcaaaacaccaacatgtagacctgctactgcagtaggatttgtgttctatgggatcctacgggaagactgttgataatcggcagttcctacttcctgtagatacttcccatcaacagatgttagaattagactcttccagcctcagctatgactgaggtactgatatgatacgtaatggataccaaagtaagtataagagaaagttgcatatgagatttccaatgaaaatccatgatgctaggatccacagcagattaagaccttaaaaaggatgtcagatacgttataccatttataaagattaactcaaaatagaccaaaacctgaacataagcaaatgttataaagctcttaaaagaaaaggtaatggaaaccctttatgacattggatttggtaatgatttctttaatatgacaccaaaagcacaggcaacaaaatgaaaaatagatacattggactatatcaaaattaaaagcttatgtgtcaaaggacactatcaaaagagtgaaaagagaacccatggagcaggagaatatattagcaaatcatgtgtgtgataagggaccgatatccagaatatatgaagaactctataactcgacaattaaaaaaaccaaacaatgcaattacaaaatgggcaaagaaattagacagacatttctccaaagaagatatacaaatggccagtaagcacatgaaaagatgcttgccatcattagycatcagggaaatgcaaatcaaaaccacagtgagataccacttcacacccattgaaatgactattatcaaaacaacagaaaataacaagcatcagggaggacgtagagaa

SEQ ID NO: 669811 - DNA, 2890 bp, Homo sapiens
cttaaagccattcagttagttaattctcattatacataaaacaaaactccatttccttacgtccttaccctggccttcaaaggcttacttaagtggctcagtcctttctgcacatggggaacacctagagaaatcaaatgttgaaactctctgatgaataaatgactaagctcaaggcaactgtaattggatttcctgtgtcactgaaacatttggcyctttttgtggcacatggattagttcatgcagtgtattttctgttaaactggttaacgttgctttaaaaataccattctattcacagtacacaactgttaacagaacttttaaaagtagtagcagaaaacattcagatcatttatttaaggggtcattttgtggagttactcccctaatcctaaaaattctgaattgatggactggggtgggcctaggctttggtatttttttttaaagagatctggaagatgcagtcagagttactatagaaacattgcctacatgactggttgactgcctacctccacatccatgtctcctctgattcttgctttccttcgtggtattttagcacactaagcccattcctgcttagggaatttctgctccaaatgtgttctccttagattttcacaaggctggctccttcttgtcatttgtttcttggctcaattgtcacctccacagataagccttccctaatcactaaatctcaagtaactacccattagtatctgtgacacacttgtttttttcttcctagcactagtttttttctggttcattaatttgttcatttctaatcctccctctaggatgttaagtttggtaaaagcagaaaccaaccccagtacttagaatctgataggttctcaccaaatacttgaatgaacacataaatgtggtatccgtgtaatcatcagaatacgaaaggatatttgaaattgatgctgtactggaaaatccaggacattttagttgcttaacaaacaagaacatttagaattgtctagctagtcacaggtttcaaaccgtcattctttggtttgaagaggggagagggaaagggtgttattgttcatttttcttaaacatttcaacaacttaaattctaagatatttaatcagaaggataaaaagaattccgggacctatggttttattgataagtgctattgattcttcactatgctatcttccatatggctgacattatataaaagatcaaggtaagatacttaactgggtaggcttggatgtcttataaacacatgatttagctttcaggctatcagtagagctatcagattgtggacgtcagtggtttccaactctagttgtaccatagaaccctctaggaaaatttaaaaatatatatatgcctggattccaccacaggataattaaaatagaatatctgagtatgggatcctggcatcagtattttttaaagttttttccctaggctgcccaagtaccatgcaaccagtttaaatgccactgacggtcaatacaatttggcctggggagaaggggaaaatctgttaaatacataaatacattaatacaggtagaaaatattcctaacaagagaaatcttttgttgataataaagatggttagtttttaccttgagacaaattgatttttacttcatcatcttagcttacaaagtcacaaatgctattagtggtcataaaaagtaaacacacagcttgggaggtggggaaaaatatttttaaaatgctgattaagccagagaaatgtgggatgtgcaatctactgagaggcacaaaggggttttgttagcttaactatctggctacaagaaggcatcctggagcaaggcggagaccagacctcaggcccagagccctacattggacactctgctattgccagctctgtgaccctggacaaaccactgagtttctcagccccatttactgctgctaaatgggatgaagacatccttcctcattggattgctatagtaaacatgaaccatgtctataaagccccaggcaatccttgtgatttttctctttctctctctgaactgtaggtacactcactggtaggattgtgcctggcatataataagtactaaagaagtaggcctattgttactaatagatttttaacatggacaaatcttacttcaagccctagaagatattatctcaacatgttacttgaggtcttttcttttctttactttgcaaaggtgcttggatcagttttggggcctctggaacagataaccaagccagaaaaattggagagtactggctgctctcaaatgattttcagttggcatttcatgaagagaggtggcctttcagtttgaactgatgaagatgcttcatcaaagggaactctgtatttcaccaaggagggccttctaatccagttaattaattgtgtttcctctaaggagtaagtgaagcctggatccaagagttctttctttctttctttattttttgagacagagtctcacctgtgtcacccaggatagagtgcagtgtcctgatcatggctcactgcagccttgatctattaggctcaaacaatcctcctgcctcagcctcccaagtggctgggaccacaggtatgcatcaccatgcttggctaattttttattttttgtagagatagggtcttgctatattgctcaggccggtctcaaactcctggcttcaagtgatccacctaacttggtcccgcaaagtgctgggattataggtgtgagccactgcacccagccccaagcattctttacagctgtttggcatccccataggatgccaaaatgggctacttgcaaagggtacatccctgtttcttagaactgtagatctctcttgtctgaagcttagaaaactgc

SEQ ID NO: 669812 - DNA, 623 bp, Homo sapiens
tctcaacagatctaaagtaaatttacctttctctcccatattagaaccaccttgggatcatctctgacccttctctctttcttgcaccccatatttaatctgtggggaagtcctgaagaatctatgctcacatcactgttattcttttctttttacttccactgtctagttcaggcccttaacaacttacattgaaactaatgcaataacctgttatctcttctacctggctccaacctctcctatttctaattttctctgaacrttgcctccagattaattggactaaaatatggcttcataataaatcatcatgatagggcatataactgtgaaaagaaaataaagccttgggaccccaaactcactatgtcaaagggaaaaattaagcttggaaactgagtcacacaaaaactgccttccttttgctcctaaacagatcgttgcatttggatatttggactgtttacaaccttaagctattacaaatggcgctattatgaacgttattgtccatgtttttctctgggtacttagttaggaatgagtatgtgataacggaaggccatctatctccccaggtggccttcctcacaattgcttacaaggaaattttttgtggg

SEQ ID NO: 669813 - DNA, 588 bp, Homo sapiens
cccggcaatagactagacattggttatgtaattttaaaaaagccagtggggaatataaattcctctttaaattagtagatacattacaaaggcctgtaaaagaaagctcagaaaataagaagtattaaatacttttgccacttaagaaccgtttatctttgatcactttttcgactcacatttttatgaagtgcataagtcaaacatgattaaataaattgcaatttttttaaggttagaagtggtcaagtattagcaattttatatgtttcaacctaacattactatttctattttgctgagggagaaatggaattgataactgatacagagttactggagattagatttattggagaaatcaggaaagggggctatcaagcccttctgatccccaatactgttttttgttttttgaagctacagttccagtggctgttatggagcagaaacttgataaatgtgtatggtagtttagaaaaaaaaatggccacaagtgtgttgacactgtcccatcaagaggtggmgttgatgttctcactccttgactctagacagacttgtaactactttgaccaatagagtatg

SEQ ID NO: 669814 - DNA, 1403 bp, Homo sapiens
cctttattactttttaaatttgtataacaactgtattaagatttaacttacatcctataaaattcacccttgtttcattgcttgtttactttcaactttttaattccatcaggcttccagatctagtgtccaagtctatgagtagctttattaacagagagaatggccaggagaagcaagcacactacagcaataaaaagtgacagttgacggcctagcagcaaaggaggaaacagaaaaactataaataggagtacaataattccaaagaagaaaaaaaaaaaaaaacaatctggggccatttagagtgttttcgtcaggctcttttggttccgaggaacagctcaagttacatataatattaggggaaggagttataaggaatgaagaaaacagggatctcagccccaaaaggcctcgtgggaacccaggagaggccaaatcaccaagcctctggaagaacaggagcttcaagagcgagaagtctcatgaagactggagccaggacgtcatcgggaatccaaggttacctcaggacttcagcatcgggagttcacctcagcgatgagttatttttgtgaatctgctctcccttgcctctgtgcttgtcagtgtcgttcggtttctgggcttgcccctaactgacttcctcgtcctttctttggaatttgcaaactggcagctcctgacctatttcagcctgcagactcattgtgtttggccagcaggacgcctttgcattgttgagaattccgaagtctctgggcgtggcatgagcttggcagtccggaatctttacgtgcgggatcaccttcgccgcgccctcttctctcattggcactgcctgtctactgccgagggcatttgagtgtgggacccatgccctgcatttcttcgctaccccacagcttctgctcatggtaatatctggtttcttatcagttttgcttgttctatcccatggactctgtctgtactgtatatccctttagctcccactgctaaccagtcattcaaattctccaaagggagaatctggaccatctcacccatttttggctaaacttgtcccgttggttcatagtatagaaagcggccaacctataggatagctgctttgggtcacgtgtgggctctttgcccaatcagccgtggctgaggggcagcctggcccacttagaccagagcactgctgtctaggcccgcacctccgcagggactgtgggcagagcagttaccttagaaagcayctagggacaggcggccaccgtcactgtccagtgcactgggtaagagtgacccaactcttcaaaccataaaaagccccagagaatcaggctccatctagcctccccagataaagtctatgacagtaacatgaagtctttaagaaaaggttaaat

SEQ ID NO: 669815 - DNA, 601 bp, Homo sapiens
tgtattattatttaaaacaagataaatgaaacatagaaatggagttgaggcctactttgcaccttcccctagtgcaccattcctttcttccctcaagtaactgctatcctgaagttttacctatctggttcacttttttttttttttttttttgagacagagtctcactctgtcatccaggctggagtgtartggcacaatctcggctcattgcaacctcccgctcccaggttcaagtgattgtcctgcctcagcctcctgagtagctgggattacaggcacacaccaccatgcccggctaatttttgtatttttagtagagatgaggtttcaccatgttggccaggctggtctccatctcctgacctcaggtggcccaactacctcagcctcccaaagtgctgggattacaggcgtgagccaccgcgtccaggctttttttttcttttttttttttcgagatggagttttgctcttgttgcccaggacggagtgcaatggtagggtcttggctcactgcaacctctgcctcccgggttcaagcaattctcctccctcagcctcccaagtagctgggattacaggtgcccgccaccatgcc

SEQ ID NO: 669816 - DNA, 601 bp, Homo sapiens
tgtattattatttaaaacaagataaatgaaacatagaaatggagttgaggcctactttgcaccttcccctagtgcaccattcctttcttccctcaagtaactgctatcctgaagttttacctatctggttcacttttttttttttttttttttgagacagagtctcactctgtcatccaggctggagtgtagtggcacaatctcggctcattgcaacctcccgctcccaggttcaagtgattstcctgcctcagcctcctgagtagctgggattacaggcacacaccaccatgcccggctaatttttgtatttttagtagagatgaggtttcaccatgttggccaggctggtctccatctcctgacctcaggtggcccaactacctcagcctcccaaagtgctgggattacaggcgtgagccaccgcgtccaggctttttttttcttttttttttttcgagatggagttttgctcttgttgcccaggacggagtgcaatggtagggtcttggctcactgcaacctctgcctcccgggttcaagcaattctcctccctcagcctcccaagtagctgggattacaggtgcccgccaccatgcc

SEQ ID NO: 669817 - DNA, 601 bp, Homo sapiens
tctgtaggagaatgccatatgctaatgtattaacactggcacagtgcctgggatattcatggtttgttattaggccaaggtttctcaacattgacacaactgatatttcagccagagaattctttgttctggagggctttcctatgcactgtagaatgtgtatccgacagtgacctctacctattagatgccagtaacactcacaattgtgacaatcaggaaggtcttcagacatagctgaattttctctagagggcaaaactcacctttgctttaaaaccgctgaaattagcataatctctacctagagctggggaaggtggaatgggtgtgggagtcagccataatgtcagctacagtggtattattctcattttgctgctaaaggatctgatatagattaagaaccttatttgtgrtcgcacaactagtaatctggatctgcctgaatgtgaagccgatattctaacaactttaatatactttctctccttaatagttattatcacccactgagtatcttatgtttaaaagaatttgcatacatcactacattttttctcatagatgttccctgagatatgcattatttatttcttta

SEQ ID NO: 669818 - DNA, 636 bp, Homo sapiens
caatgttaaaatacaagatgaatcttcactaagtattaaggcatggaagagaagttaaaaataaaacaattttttattttgtattcaaataaaagatatataataactttacawttctctccctccttaataagacaaaaattatgatgtgttgtccatggaagttctattgtttcttcatcagttgtgctcatatttctttctaaacctttttttcattttatctactttcattcatttattgtttctattttaattaacagctcaaattgcgtttccttgagatttgccagagtattttccctaaaagaataagctaaatattttgtactatattattctaaatatttccttaaatgtatataatacaatccaaaattatcatgcttacttagtacctttattcttctactagattgcaaattcactgaagaaagagcgtctatcttattcactatgatattcctcatatatcaatgtatacctggtataactaataagtgaataaacaaagtaaaagataagaatctaaatattaaacagcattcaaaaataattaaaattatttatgcattaatatcagggaccagttataaggtactcactgtgatcagtttaatgtgtgcaaatttaccc

SEQ ID NO: 669819 - DNA, 636 bp, Homo sapiens
caatgttaaaatacaagatgaatcttcactaagtattaaggcatggaagagaagttaaaaataaaacaattttttattttgtattcaaataaaagatatataataactttacaattctctccctccttaataagacaaaaattatgatgtgttgtccatggaagttctattgtttcttcatcagttgtgctcatatttctttctaaacctttttttcattttatctactttcattcatttattgtttctattttaattaacagctcaaattgcgtttccttgagatttgccagagtattttccctaaaagaataagctaaatattttgtactatattattctaaatatttccttaaatgtatataatacaatccaaaattatcatgcttacttagtacctttattcttctactagattgcaaattcactgaagaaagagcrtctatcttattcactatgatattcctcatatatcaatgtatacctggtataactaataagtgaataaacaaagtaaaagataagaatctaaatattaaacagcattcaaaaataattaaaattatttatgcattaatatcagggaccagttataaggtactcactgtgatcagtttaatgtgtgcaaatttaccc

SEQ ID NO: 669820 - DNA, 1863 bp, Homo sapiens
ttcagctagactagcagttcttgaacctgactatagttagaacctactggggaggagctttcagaacaataccaatatctgtgccccacctcagaccaatcaaatcagagcctcagccagtagacttctgcatctgtattcaatgttatggctcagagtgatagtaacatgcatctgtggcggaggaytctgagctagacctttctagatcgcccaggaaagaaattacaaggtaggaatcaggacaaaaggggtctgttgtcagcttttgagtgtcaaaagcctagctttcaaaagaaatgaacagaacacaggacctaaacaaaaattttgtaaaatgcacaatggataagagcaaagattctccatcatgaccaccaccatttctacatcctaaatccacaccctgaaaatgacaaaagctaaccctggttgggaagagagtcgaaaaggaggtaaggacagcgcttggaagcttgtcgcctctgagaaatggagggcttgtactctgtcttcctggggtggaggggagaagggagacaaaatccttcttgataagtctgtggatccaaaatcagaaggccttgtgccttacttcccaaatagagccccaaataggcaactggagctcagagaagtgaatgcagtgtgattaagcaaagcagatcttagtgtcagagagcctcagagcctgaggctgcctcctgggaccctgggagcagctcggcagccttcccagaatgacctagcagcagccatcaagagctgacgaccaagagtcaggcaggatagcagtcacctgaccattctccactcccattgatatctatttaaagccttggaacccagggaaaacttaggaaaagaagagaggattccagaatagatggagattaagttttcttcacgcggcaggatgagagctttaaaaaataggttgatcaatagaagaataagtgaaggtacatgccccttgcacctgagcacgtggacttagatttccactgccctcattactcttccatgtttatgagttttagggccacataacttgtctttagaatgccctctcccaccctttcaggcaaagccccccatgttttctccctgataccctctctgactttccttggaaaaactcattatccctcctccacatgccccttagagaactgccctagtcctccagacagctataaatgaagcttacataaatggctaggaagaggagcatgagtgtataaatgcctacatatacataagtttgcatgtatggccgctgtattagtccattttcatactgctatgaagaaatactcgagaccgggtaatttataaagaaaaagaggtttcatggactcaccattccacacggctggggaggcctcacaatcatggccgaaggcaaaggaggaacaaaatcacatcttacatggcagcaggcaagattgtgtgtgtaggggaactgccttttataaaaccatctggtctcgtgagacttattcactatcacgagaacagcacaggaaaaacccagccccatgattcaattacttcccaccaggtccctcccacaacacgtggggataatgagagctataattcaagatgagatttcggtggggccacagccaagcgatatcagccatcaaaacgcttagcacatcatgtgatagtcaggagttcgtctgtctcctccgctagattgtgagccccttgaaggccaggaccatgtcacactgatctttgtattctgacaccttgcacataggaagtattcaattgtttgctaaatgaatgaatgaaagcattaattaatatgataaataactatcaggtgtaagccacagtgatacttttcaa

SEQ ID NO: 669821 - DNA, 1863 bp, Homo sapiens
ttcagctagactagcagttcttgaacctgactatagttagaacctactggggaggagctttcagaacaataccaatatctgtgccccacctcagaccaatcaaatcagagcctcagccagtagacttctgcatctgtattcaatgttatggctcagagtgatagtaacatgcatctgtggcggaggactctgagctagacctttctagatcgcccaggaaagaaattacaaggtaggaatcaggacaaaaggggtctgttgtcagcttttgagtgtcaaaagcctagctttcaaaagaaatgaacagaacacaggacctaaacaaaaattttgtaaaatgcacaatggataagagcaaagattctccatcatgaccaccaccatttctacatcctaaatccacaccctgaaaatgacaaaagctaaccctggttgggaagagagtcgaaaaggaggtaaggacagcgcttggaagcttgtcgcctctgagaaatggagggcttgtactctgtcttcctggggtggaggggagaagggagacaaaatccttcttgataagtctgtggatccaaaatcagaaggccttgtgccttacttcccaaatagagccccaaataggcaactggagctcagagaagtgaatgcagtgtgattaagcaaagcagatcttagtgtcagagagcctcagagcctgaggctgcctcctgggaccctgggagcagctcggcagccttcccagaatgacctagcagcagccatcaagagctgacgaccaagagtcaggcaggatagcagtcacctgaccattctccactcccattgatatctatttaaagccttggaacccagggaaaacttaggaaaagaagagaggattccagaatagatggagattaagttttcttcacgcggcaggatgagagctttaaaaaataggttgatcaatagaagaataagtgaaggtacatgccccttgcacctgagcacgtggacttagatttccactgccctcattactcttccatgtttatgagttttagggccacataacttgtctttagaatgccctctcccaccctttcaggcaaagccccccatgttttctccctgataccctctctgactttccttggaaaaactcattatccctcctccacatgccccttagagaactgccctagtcctccagacagctataaatgaagcttacataaatggctaggaagaggagcatgagtgtataaatgcctacatatacataagtttgcatgtatggccgctgtattagtccattttcatactgctatgaagaaatactcgagaccgggtaatttataaagaaaaagaggtttcatggactcaccattccacacggctggggaggcctcacaatcatggccgaaggcaaaggaggaacaaaatcacatcttacatggcagcaggcaagattgtgtgtgtaggggaactgccttttataaaaccatctggtctcgtgagacttattcactatcacgagaacagcacaggaaaaacccagccccatgattcaattacttcccaccaggtccctcccacaacacgtggggataatgagagctataattcaagatgagatttcggtggggccacagccaagcgatatcagccatcaaaacgcttagcacatcatgtgatagtcaggagttcgtctgtctcctccrctagattgtgagccccttgaaggccaggaccatgtcacactgatctttgtattctgacaccttgcacataggaagtattcaattgtttgctaaatgaatgaatgaaagcattaattaatatgataaataactatcaggtgtaagccacagtgatacttttcaa

SEQ ID NO: 669822 - DNA, 589 bp, Homo sapiens
ttattttacttgattttatcttcatgtcaaaattttattgcaaaaatcttttttaaaataagctgagtacaattttggaataaaatactttcaaaaagaataatgtattcaattsttaacactatgagtctgagcatttattacaacacattcatgagctgcaaaaagagcaaactaaataaaaatacacagcattcagttaccttttttcgaatactctttattcttattacttgtataatttgtttcttttcaaacactttccatactgagtcttctaaaacatttgttatttttggctgattatcattatttggatgataaatataaacatgtagcatttatttggtaagttctcagtttcccttacatcattttttgtatgtaaacttgttaattcagccagtagctttgcacacacaaaattaaaaactgttaaaaagagactggccgggcgcggtggctcacgcctgtaatcccagcactttgggaggccgaggcgggcggatcacgaggtcaggagatcgagaccatcccggctaaaacggtgaaaccccgtctctactaaaaatacaaaaaattagccggg

SEQ ID NO: 669823 - DNA, 575 bp, Homo sapiens
tataaaacagagaacagtcatcttagtaagttatgggttgtagttgtttcttaagccttgttttctcttcttaaaaccactgattgttgaggtaaaatttgcataacacaaaataaaccaaaaaaagtgaaccactcagaagcatttaggatactcagaatggtgtgcgatcaccaccacctttactcttmgtcagaatcacctcttgactgactgtggcgtttcatttgttcaatcaatattgccttcttaacactgtcattcttttcttctttcatctttccaattcaccccatctgcacctggccacatttctgtgcatggctttgtatctagtcactgcaagatgcgctatgtgaattttcacatagagatgcccatggccaaagtgaggaactgaaaggacatccttgtggaactgatttaggaagacactaacttttgtttacagaagaaaaagatgaatggaacatctgcgaggatattacagaagcagtctctcatatatcagaaggctgtgtgtgtgtgtgtttgtatatatatgtgtgtgtatgtttgtatatatgtatgtgtgt

SEQ ID NO: 669824 - DNA, 575 bp, Homo sapiens
tataaaacagagaacagtcatcttagtaagttatgggttgtagttgtttcttaagccttgttttctcttcttaaaaccactgattgttgaggtaaaatttgcataacacaaaataaaccaaaaaaagtgaaccactcagaagcatttaggatactcagaatggtgtgcgatcaccaccacctttactcttagtcagaatcacctcttgactgactgtggcgtttcatttgttcaatcaatattgccttcttaacactgtcattcttttcttctttcatctttccaattcaccccatctgcacctggccacatttctgtgcatggmtttgtatctagtcactgcaagatgcgctatgtgaattttcacatagagatgcccatggccaaagtgaggaactgaaaggacatccttgtggaactgatttaggaagacactaacttttgtttacagaagaaaaagatgaatggaacatctgcgaggatattacagaagcagtctctcatatatcagaaggctgtgtgtgtgtgtgtttgtatatatatgtgtgtgtatgtttgtatatatgtatgtgtgt

SEQ ID NO: 669825 - DNA, 575 bp, Homo sapiens
tataaaacagagaacagtcatcttagtaagttatgggttgtagttgtttcttaagccttgttttctcttcttaaaaccactgattgttgaggtaaaatttgcataacacaaaataaaccaaaaaaagtgaaccactcagaagcatttaggatactcagaatggtgtgcgatcaccaccacctttactcttagtcagaatcacctcttgactgactgtggcgtttcatttgttcaatcaatattgccttcttaacactgtcattcttttcttctttcatctttccaattcaccccatctgcacctggccacatttctgtgcatggctttgtatctagtcactgcaagatgcrctatgtgaattttcacatagagatgcccatggccaaagtgaggaactgaaaggacatccttgtggaactgatttaggaagacactaacttttgtttacagaagaaaaagatgaatggaacatctgcgaggatattacagaagcagtctctcatatatcagaaggctgtgtgtgtgtgtgtttgtatatatatgtgtgtgtatgtttgtatatatgtatgtgtgt

SEQ ID NO: 669826 - DNA, 575 bp, Homo sapiens
tataaaacagagaacagtcatcttagtaagttatgggttgtagttgtttcttaagccttgttttctcttcttaaaaccactgattgttgaggtaaaatttgcataacacaaaataaaccaaaaaaagtgaaccactcagaagcatttaggatactcagaatggtgtgcgatcaccaccacctttactcttagtcagaatcacctcttgactgactgtggcgtttcatttgttcaatcaatattgccttcttaacactgtcattcttttcttctttcatctttccaattcaccccatctgcacctggccacatttctgtgcatggctttgtatctagtcactgcaagatgcgctatgtgaattttcacatagagatgcccatggccaaagtgaggaactgaaaggacatccttgtggaactgatttaggaagacactaacttttgtttacagaagaaaaagatgaatggaacatctgcgaggatattacagaagcastctctcatatatcagaaggctgtgtgtgtgtgtgtttgtatatatatgtgtgtgtatgtttgtatatatgtatgtgtgt

SEQ ID NO: 669827 - DNA, 614 bp, Homo sapiens
ttattttcctactttgaatttgttacattaatatgtcgaattaacccagagccacatgtagagtttaatttgtatgtcttccttggggaattctgggcctattgcagaaattcacttccacatgtagccctggaccctggagggtaagatagggaggagttgcaggaggcgcctcagatggagtcctgtggtccctgggcttcctgggagtggcctagcctggctgtgcgtcagttctgtgtcatcttctccagactctttaytcctctcagaacagcatggaaatccccaagtcacttagtgctactctcaaagtcaccagaagacacctcatcccaaaatcattcaggagcataagcccctggaaggctggatgacactgtaaggctgtttttagaaatgtaataacctgtttgccacttgtatgtcttcttttgagaaatgtctattcaaatcttttgcccattttttgattggataattggattttttcctatagagttatttgagtcccttatatattctgatggaacacatcatataccacaaaaatatatatacctactatgtacccacaaaagttttaaaaaataataatttttttaaaaaatgtg

SEQ ID NO: 669828 - DNA, 705 bp, Homo sapiens
tatatttktttttttttaagacacagttttgctctgtcacccaggttggagtgcagtggctcgatcttggctcacactgcaatctccacttcccgggttcaagctatcttcctgcctcagcttcccaaggagctgggattacaggtgtgcaccaccaagcctggcctgaaaacatatttttgaagaaagagaggtagtttccctggtggaagtaatgtgtactttgaagtcatatgaatatggcttcaaatcccagctctgctaccttcttgggtgaacttagacaatatctctgagtctcagttctctcacttgaagaatggggaagataaacatgtatttcatagaattataaggattaaatttagaaatattaataaatactgtcaactcctataaaacttctactcgctctttaaatatcagctcaaattctacctcctttgagaagtcttcccagactgctcatgggcagcttcaggcactgcctccactaagcccccaccatattttgtatatacctccaagaaagcaagccttaattgtattgtaattgcgtatttgcctattagccttcccaagtgtcttgggaagaggtcagtgattatatgttattcagggttgtatccctagcatctaacagagagcctcacatttggaatatgcttaaaataatttatttttagtaaatgaatgcatgaataa

SEQ ID NO: 669829 - DNA, 705 bp, Homo sapiens
tatatttgtttttttttaagacacagttttgctctgtcacccaggttggagtgcagtggctcgatcttggctcacactgcaatctccacttccygggttcaagctatcttcctgcctcagcttcccaaggagctgggattacaggtgtgcaccaccaagcctggcctgaaaacatatttttgaagaaagagaggtagtttccctggtggaagtaatgtgtactttgaagtcatatgaatatggcttcaaatcccagctctgctaccttcttgggtgaacttagacaatatctctgagtctcagttctctcacttgaagaatggggaagataaacatgtatttcatagaattataaggattaaatttagaaatattaataaatactgtcaactcctataaaacttctactcgctctttaaatatcagctcaaattctacctcctttgagaagtcttcccagactgctcatgggcagcttcaggcactgcctccactaagcccccaccatattttgtatatacctccaagaaagcaagccttaattgtattgtaattgcgtatttgcctattagccttcccaagtgtcttgggaagaggtcagtgattatatgttattcagggttgtatccctagcatctaacagagagcctcacatttggaatatgcttaaaataatttatttttagtaaatgaatgcatgaataa

SEQ ID NO: 669830 - DNA, 653 bp, Homo sapiens
caacagaaataacagatttcccagcctctaaccaaagaaacaacaagtttgggaacattcctctcttctgaaatatgaaagagaggggataaatactggagtaggattgtgaaaaaagtcaagagaaaaaaaaaagaacagcccaagtgtaacagatacttctccatgggatggtaaaaaggaagttatttcaataaaatgaccccttggaaggagttcaaaacaggttgccatatgctttatgtggagttttgaaaaatatataaaataattcaagcaaacatgaaayattttattttacttatttatttacttttttgagacggagtctcactctgttgcccaggctggagtgcaagtggcatgatctcggctcactgcaacctctgcctcccagattcaagtgattctcccgcctcaacctcctgagcagctgggattacaggcgtgtgccaccaaacccagctaattttttattttattttgttttattttattttattttatttttatttatttatttatttttgagacggagtttcgctcttgctgtccaggctggagtgcaatggctcgatctcggctcaccgcgacctccacctcccgggttcaagcaattctcctgccgcagcctccctagtagctgggattac

SEQ ID NO: 669831 - DNA, 593 bp, Homo sapiens
gaatgtattctgtacgtgcatccagtaatcttcaactggatcgtaacagtatattgccttggtcagtccaccggcaacatagatcaggttgtttagggatacagctgttatacaccttttggcaattgggatagctgcacgaagtagccaagaattggtttctggatcataagattgaacctaataacatataaaaatatataattaaaatttctaaacaaaaatggaaatgtacttaataaagaatctaccaatacctacaaacattatttaaaataaaatcctattaattcagagaattaagagaggttagcctgatagtgaaatgtctgaattaygaacattctcaaataaaatgcaaatttattactatcaagcagaatagagtaccaaacacacagattgtttctagaatgaatggccaccaggtttgtccactaaaattaacagtctaaatcttttcacaattgtgttatgtaggataactatgcctcacatctgaatataacttcttaatgcttttagggagtcctttcttcaaaagaaaacaagtaaacctcaattcaatcagtatgctctgaattatcacaaat

SEQ ID NO: 669832 - DNA, 1473 bp, Homo sapiens
catttgttgagaataaaaggtaagaattgcttcgtttgagaaaaacttcttagaaactattttacacacaaaaaggagaaaatatacaaagaataaactgagcttttaaaaatgtgttttaaaaaatcaaaacccaaaacatagctttcttttaatttyaaaaattcatagaaatgtaaaaggcatgtccattttatatcttattttctagacaaaaaaaatgaccgtcttataacatgttccaatatttgagatgtagaaacaaaataggcaaaaaaatcaaacaaacaagcaagaagaacagcagagtgtgatcaaactcaataaatttaaagcgagtcatgaaacaaagcacaatcaaaaatacattcagcagaaagggttaaaaaataaaggacaaaaagcctatagcaagattttaaaagaggaaacaatctctcctcaaacttattaccaatctttacattcaaaacaatttaaatcatgtttagcaagctaaaagttgacaactggagaaataagttttcaagataaaagcctcctaggtaagtctcaattctgaaatgcagaagtcgaggtctttcacacaacagtagagagacaatgtgctaaggtaaaaatgtactgagggaaatacactgatagagggtgagaatgtcagaaattttctcctatttcctctatcttggtaaagtagtaaattaggctccacactgaaacaggacccgtcatatctaatgatattaaacaatatgctaagaagattgccagcatattgccaatgacaatagactttgccagtgcgtgtgcatcctgtaggggaagagtggaagggcagacagctggcttacattcaaccagcaccccattcagtgagatctctggtcgagatactccacccacatccctgcagccagtaggcagcctttcctttcaataaagtacacttaaataacttgtagcaattaaacattatccttgtaattggaacacaaatccaagaagtgtcagacattaaaggatagtcaggaaaaaattccatattgaaaacaaaattccactgggacctttattaactgcttggccagttccctttactgtggataaactgggctcatacattcccaaatccaactcctgctatctcaaccttgatctcatcgttctgatacgttcagagactttgctctccaatgtatctcttttctctaataaattattactgttttccctcagttacattagtcctgtatacaaacatactataatacattttatgggaagacaaaaggaaacctcgcttgaccttttatccgtctaacttccatacaaatgttaagctccaatatagagcccaacttctaaggaagcaggtttgcttcttgttctctggacatccagcccaatcaggcttttacttcacttcagccatttattgaagatcaccaactggctctacaattcccgacccaa

SEQ ID NO: 669833 - DNA, 3095 bp, Homo sapiens
tacaatgccatgattttataattggaatatgcaattgaaatattaccttaccctaatcaaaattaacactgtaaaagcatattcttcccatggcaggcttttaaatacttccttttatagtaatactattaagtattcccatttaaagtaaattggaatatttttaagtttataataggttacattttacaaatttgctgttttgctctttccattttacaytctaaaatacaaaatgggcttctaaaatcttttttaaaaagtagaattgaattacatggcaattacacccccccacacacatatatactgtcaatggaattctactgaataatttattcaactgaccctctattgatatatagtttatttcaaatgtttgcttttaaggacaatgctgcaaaatactgcattgtcccacaagcatttgcatacatataagattatatctataggaagtgtatggatggctaaatcaaataatatatttttttacattttaattttgatagatattactaaaatgcccttcaattacacctatttattctaccatctacgcaagctgagaatgcctgcccctcaacaacctcagcaatatgtagtattaccaaatattttcatctttttaatatgacaggtgaaaaatattgttttgacattaattgttggattatggaagaggttgaacaactttttcaggaccatcataatcatcactacttcataatgcccaggctgagaagataacatagagctaaaatgcagcctacattttcccacgctatgcattgtgatgggagctttagctactggcaaagggaggctttgttctaattcatagcaaggtatcacaatagctagtgtgggcgctaatttgcttaggtgttatttgactgatatatatgaaattgttcaaatctattttattgatctgcttttctaaatgttaagcatatttatcttttgtcatgtgagctgaaaataaatttcataatttttgtttgcttgttttatttaaaattatggtactacttccatcatataaaacttttaaatttttatgtgtaaaaatttgtcaccttttcctttttggctactgctactgttatgcttataaaaatattcccttctttaatattaggaaatatttacccatatttctgtttctattttcacagttatatttgtatgctaaaaatttgatccatctggaatacattttgatgtaggagtaagctagaaacgagctttattttatttccaaataactagtcattttctccctcatttaagtgtcattttaacattatctctaatatatacttaaatccatttctggatttttttttttgttcttgttatttgtgcaagtatagtaaattgttttgtaattctacatttataataggatttaaagtataggagaatgaattctatgtttttttcagaattgattgtctgatcttaaatgtttactgttatagagaaccttttgtgttaaattaaaaaaaatctagctgtcattttaactggtctaatattactttggagattaaaaaatgatttccatgtgaatggaaatactgaaaaactagaaggcagaggagattcttttgtgtaaatacatcataaaaaactggagccaagaattccaaaatatagattcagcttacagaagagtttgagaaaagtgagataatgctttagttctatgacttaacagcaatgcattgcaggagctttactcttttatgaatcctggtcttgtttaatagccagtttcagttcgcctaaatgcacttatccttaaaggtcctgcacgatctccctgatgctgtttaacaagtgtagtgtgctggtgacacatttgactgggctattgaagtcagacttccttttatcccaatgggttgatctatctgtagcagatttattttacaaagccatatcctacagacatgtcagtaagtatatatgtcattgtcatactctgatattttgacgcctagatttcatctcaccctgcagattatctgaaatcctatccccaatattttcctggcaatgtcaactatctgctgctaagctcatccttaaaaattagaaatttaacatattctagatgctgaacaagataaaaaaaaaatgcaatacataaccctcataagcaattaaaaaattatactaaggcactttttattttcacgaaatcaccaacttctggcacctctattatacccatgctacaactcagctatagctactgaaacaatttatatcactgatattaaatcgtactccttgtattaggagtatgattaacaagtaagttaaaaactaagaaacagaaatgtatctgggctgggtgtgatggcctatgcctgtaattccagtactttgagaggctgaggtgtgtggatcacatcacttgaggtcaggagttcgagaccagcctgaccaacatggtgaaacccagtgtctactaaaaatacaaaagtagccgagcttggtggcacatgcctgtaattccagctactcaggaggctgaggcaaaagaattgcttgaacccgagagtcagaggctgcagtgagccaagattgtgccattgcacctccagtctgagcaatagagtgagaatccctctcaaaaaaaaaaaaaaagtttctgaagttgaagatttaattatgctaaatggaaacagtttgaaaaggaaagttattaccagaactgcctggtcatctttccttccctccctcctctaatcaactctcctcaatctgtttccatatacctttcctacttgctactaattcccaagacactttcactgtgctctgtggaactcacagtcatgacttatatcttcaacctcatctttagacattttatttaccttcttgtatattgattgctcaaaaccaaactatttcttgaatacaacaaaacaacaacctgtaaaactgtttttcacccatatttctttccagtttctgcactacttctcttgtcccctttacagcaaaagtccttagaaaagtttcctatggaattttgatttcaaatatatttcttttcattttatcttaaatcc

SEQ ID NO: 669834 - DNA, 3095 bp, Homo sapiens
tacaatgccatgattttataattggaatatgcaattgaaatattaccttaccctaatcaaaattaacactgtaaaagcatattcttcccatggcaggcttttaaatacttccttttatagtaatactattaagtattcccatttaaagtaaattggaatatttttaagtttataataggttacattttacaaatttgctgttttgctctttccattttacattctaaaatacaaaatgggcttctaaaakcttttttaaaaagtagaattgaattacatggcaattacacccccccacacacatatatactgtcaatggaattctactgaataatttattcaactgaccctctattgatatatagtttatttcaaatgtttgcttttaaggacaatgctgcaaaatactgcattgtcccacaagcatttgcatacatataagattatatctataggaagtgtatggatggctaaatcaaataatatatttttttacattttaattttgatagatattactaaaatgcccttcaattacacctatttattctaccatctacgcaagctgagaatgcctgcccctcaacaacctcagcaatatgtagtattaccaaatattttcatctttttaatatgacaggtgaaaaatattgttttgacattaattgttggattatggaagaggttgaacaactttttcaggaccatcataatcatcactacttcataatgcccaggctgagaagataacatagagctaaaatgcagcctacattttcccacgctatgcattgtgatgggagctttagctactggcaaagggaggctttgttctaattcatagcaaggtatcacaatagctagtgtgggcgctaatttgcttaggtgttatttgactgatatatatgaaattgttcaaatctattttattgatctgcttttctaaatgttaagcatatttatcttttgtcatgtgagctgaaaataaatttcataatttttgtttgcttgttttatttaaaattatggtactacttccatcatataaaacttttaaatttttatgtgtaaaaatttgtcaccttttcctttttggctactgctactgttatgcttataaaaatattcccttctttaatattaggaaatatttacccatatttctgtttctattttcacagttatatttgtatgctaaaaatttgatccatctggaatacattttgatgtaggagtaagctagaaacgagctttattttatttccaaataactagtcattttctccctcatttaagtgtcattttaacattatctctaatatatacttaaatccatttctggatttttttttttgttcttgttatttgtgcaagtatagtaaattgttttgtaattctacatttataataggatttaaagtataggagaatgaattctatgtttttttcagaattgattgtctgatcttaaatgtttactgttatagagaaccttttgtgttaaattaaaaaaaatctagctgtcattttaactggtctaatattactttggagattaaaaaatgatttccatgtgaatggaaatactgaaaaactagaaggcagaggagattcttttgtgtaaatacatcataaaaaactggagccaagaattccaaaatatagattcagcttacagaagagtttgagaaaagtgagataatgctttagttctatgacttaacagcaatgcattgcaggagctttactcttttatgaatcctggtcttgtttaatagccagtttcagttcgcctaaatgcacttatccttaaaggtcctgcacgatctccctgatgctgtttaacaagtgtagtgtgctggtgacacatttgactgggctattgaagtcagacttccttttatcccaatgggttgatctatctgtagcagatttattttacaaagccatatcctacagacatgtcagtaagtatatatgtcattgtcatactctgatattttgacgcctagatttcatctcaccctgcagattatctgaaatcctatccccaatattttcctggcaatgtcaactatctgctgctaagctcatccttaaaaattagaaatttaacatattctagatgctgaacaagataaaaaaaaaatgcaatacataaccctcataagcaattaaaaaattatactaaggcactttttattttcacgaaatcaccaacttctggcacctctattatacccatgctacaactcagctatagctactgaaacaatttatatcactgatattaaatcgtactccttgtattaggagtatgattaacaagtaagttaaaaactaagaaacagaaatgtatctgggctgggtgtgatggcctatgcctgtaattccagtactttgagaggctgaggtgtgtggatcacatcacttgaggtcaggagttcgagaccagcctgaccaacatggtgaaacccagtgtctactaaaaatacaaaagtagccgagcttggtggcacatgcctgtaattccagctactcaggaggctgaggcaaaagaattgcttgaacccgagagtcagaggctgcagtgagccaagattgtgccattgcacctccagtctgagcaatagagtgagaatccctctcaaaaaaaaaaaaaaagtttctgaagttgaagatttaattatgctaaatggaaacagtttgaaaaggaaagttattaccagaactgcctggtcatctttccttccctccctcctctaatcaactctcctcaatctgtttccatatacctttcctacttgctactaattcccaagacactttcactgtgctctgtggaactcacagtcatgacttatatcttcaacctcatctttagacattttatttaccttcttgtatattgattgctcaaaaccaaactatttcttgaatacaacaaaacaacaacctgtaaaactgtttttcacccatatttctttccagtttctgcactacttctcttgtcccctttacagcaaaagtccttagaaaagtttcctatggaattttgatttcaaatatatttcttttcattttatcttaaatcc

SEQ ID NO: 669835 - DNA, 3095 bp, Homo sapiens
tacaatgccatgattttataattggaatatgcaattgaaatattaccttaccctaatcaaaattaacactgtaaaagcatattcttcccatggcaggcttttaaatacttccttttatagtaatactattaagtattcccatttaaagtaaattggaatatttttaagtttataataggttacattttacaaatttgctgttttgctctttccattttacattctaaaatacaaaatgggcttctaaaatcttttttaaaaagtagaattkaattacatggcaattacacccccccacacacatatatactgtcaatggaattctactgaataatttattcaactgaccctctattgatatatagtttatttcaaatgtttgcttttaaggacaatgctgcaaaatactgcattgtcccacaagcatttgcatacatataagattatatctataggaagtgtatggatggctaaatcaaataatatatttttttacattttaattttgatagatattactaaaatgcccttcaattacacctatttattctaccatctacgcaagctgagaatgcctgcccctcaacaacctcagcaatatgtagtattaccaaatattttcatctttttaatatgacaggtgaaaaatattgttttgacattaattgttggattatggaagaggttgaacaactttttcaggaccatcataatcatcactacttcataatgcccaggctgagaagataacatagagctaaaatgcagcctacattttcccacgctatgcattgtgatgggagctttagctactggcaaagggaggctttgttctaattcatagcaaggtatcacaatagctagtgtgggcgctaatttgcttaggtgttatttgactgatatatatgaaattgttcaaatctattttattgatctgcttttctaaatgttaagcatatttatcttttgtcatgtgagctgaaaataaatttcataatttttgtttgcttgttttatttaaaattatggtactacttccatcatataaaacttttaaatttttatgtgtaaaaatttgtcaccttttcctttttggctactgctactgttatgcttataaaaatattcccttctttaatattaggaaatatttacccatatttctgtttctattttcacagttatatttgtatgctaaaaatttgatccatctggaatacattttgatgtaggagtaagctagaaacgagctttattttatttccaaataactagtcattttctccctcatttaagtgtcattttaacattatctctaatatatacttaaatccatttctggatttttttttttgttcttgttatttgtgcaagtatagtaaattgttttgtaattctacatttataataggatttaaagtataggagaatgaattctatgtttttttcagaattgattgtctgatcttaaatgtttactgttatagagaaccttttgtgttaaattaaaaaaaatctagctgtcattttaactggtctaatattactttggagattaaaaaatgatttccatgtgaatggaaatactgaaaaactagaaggcagaggagattcttttgtgtaaatacatcataaaaaactggagccaagaattccaaaatatagattcagcttacagaagagtttgagaaaagtgagataatgctttagttctatgacttaacagcaatgcattgcaggagctttactcttttatgaatcctggtcttgtttaatagccagtttcagttcgcctaaatgcacttatccttaaaggtcctgcacgatctccctgatgctgtttaacaagtgtagtgtgctggtgacacatttgactgggctattgaagtcagacttccttttatcccaatgggttgatctatctgtagcagatttattttacaaagccatatcctacagacatgtcagtaagtatatatgtcattgtcatactctgatattttgacgcctagatttcatctcaccctgcagattatctgaaatcctatccccaatattttcctggcaatgtcaactatctgctgctaagctcatccttaaaaattagaaatttaacatattctagatgctgaacaagataaaaaaaaaatgcaatacataaccctcataagcaattaaaaaattatactaaggcactttttattttcacgaaatcaccaacttctggcacctctattatacccatgctacaactcagctatagctactgaaacaatttatatcactgatattaaatcgtactccttgtattaggagtatgattaacaagtaagttaaaaactaagaaacagaaatgtatctgggctgggtgtgatggcctatgcctgtaattccagtactttgagaggctgaggtgtgtggatcacatcacttgaggtcaggagttcgagaccagcctgaccaacatggtgaaacccagtgtctactaaaaatacaaaagtagccgagcttggtggcacatgcctgtaattccagctactcaggaggctgaggcaaaagaattgcttgaacccgagagtcagaggctgcagtgagccaagattgtgccattgcacctccagtctgagcaatagagtgagaatccctctcaaaaaaaaaaaaaaagtttctgaagttgaagatttaattatgctaaatggaaacagtttgaaaaggaaagttattaccagaactgcctggtcatctttccttccctccctcctctaatcaactctcctcaatctgtttccatatacctttcctacttgctactaattcccaagacactttcactgtgctctgtggaactcacagtcatgacttatatcttcaacctcatctttagacattttatttaccttcttgtatattgattgctcaaaaccaaactatttcttgaatacaacaaaacaacaacctgtaaaactgtttttcacccatatttctttccagtttctgcactacttctcttgtcccctttacagcaaaagtccttagaaaagtttcctatggaattttgatttcaaatatatttcttttcattttatcttaaatcc

SEQ ID NO: 669836 - DNA, 3095 bp, Homo sapiens
tacaatgccatgattttataattggaatatgcaattgaaatattaccttaccctaatcaaaattaacactgtaaaagcatattcttcccatggcaggcttttaaatacttccttttatagtaatactattaagtattcccatttaaagtaaattggaatatttttaagtttataataggttacattttacaaatttgctgttttgctctttccattttacattctaaaatacaaaatgggcttctaaaatcttttttaaaaagtagaattgaattacatggcaattacacccccccacacacatatatactgtcaatggaattctactgaataatttattcaactgaccctctattgatatatagtttatttcaaatgtttgcttttaaggacaatgctgcaaaatactgcattgtcccacaagcatttgcatacatataagattatatctataggaagtgtatggatggctaaatcaaataatatatttttttacattttaattttgatagatattactaaaatgcccttcaattacacctatttattctaccatctacgcaagctgagaatgcctgcccctcaacaacctcagcaatatgtagtattaccaaatattttcatctttttaatatgacaggtgaaaaatattgttttgacattaattgttggattatggaagaggttgaacaactttttcaggaccatcataatcatcactacttcataatgcccaggctgagaagataacatagagctaaaatgcagcctacattttcccacgctatgcattgtgatgggagctttagctactggcaaagggaggctttgttctaattcatagcaaggtatcacaatagctagtgtgggcgctaatttgcttaggtgttatttgactgatatatatgaaattgttcaaatctattttattgatctgcttttctaaatgttaagcatatttatcttttgtcatgtgagctgaaaataaatttcataatttttgtttgcttgttttatttaaaattatggtactacttccatcatataaaacttttaaatttttatgtgtaaaaatttgtcaccttttcctttttggctactgctactgttatgcttataaaaatattcccttctttaatattaggaaatatttacccatatttctgtttctattttcacagttatatttgtatgctaaaaatttgatccatctggaatacattttgatgtaggagtaagctagaaacgagctttattttatttccaaataactagtcattttctccctcatttaagtgtcattttaacattatctctaatatatactkaaatccatttctggatttttttttttgttcttgttatttgtgcaagtatagtaaattgttttgtaattctacatttataataggatttaaagtataggagaatgaattctatgtttttttcagaattgattgtctgatcttaaatgtttactgttatagagaaccttttgtgttaaattaaaaaaaatctagctgtcattttaactggtctaatattactttggagattaaaaaatgatttccatgtgaatggaaatactgaaaaactagaaggcagaggagattcttttgtgtaaatacatcataaaaaactggagccaagaattccaaaatatagattcagcttacagaagagtttgagaaaagtgagataatgctttagttctatgacttaacagcaatgcattgcaggagctttactcttttatgaatcctggtcttgtttaatagccagtttcagttcgcctaaatgcacttatccttaaaggtcctgcacgatctccctgatgctgtttaacaagtgtagtgtgctggtgacacatttgactgggctattgaagtcagacttccttttatcccaatgggttgatctatctgtagcagatttattttacaaagccatatcctacagacatgtcagtaagtatatatgtcattgtcatactctgatattttgacgcctagatttcatctcaccctgcagattatctgaaatcctatccccaatattttcctggcaatgtcaactatctgctgctaagctcatccttaaaaattagaaatttaacatattctagatgctgaacaagataaaaaaaaaatgcaatacataaccctcataagcaattaaaaaattatactaaggcactttttattttcacgaaatcaccaacttctggcacctctattatacccatgctacaactcagctatagctactgaaacaatttatatcactgatattaaatcgtactccttgtattaggagtatgattaacaagtaagttaaaaactaagaaacagaaatgtatctgggctgggtgtgatggcctatgcctgtaattccagtactttgagaggctgaggtgtgtggatcacatcacttgaggtcaggagttcgagaccagcctgaccaacatggtgaaacccagtgtctactaaaaatacaaaagtagccgagcttggtggcacatgcctgtaattccagctactcaggaggctgaggcaaaagaattgcttgaacccgagagtcagaggctgcagtgagccaagattgtgccattgcacctccagtctgagcaatagagtgagaatccctctcaaaaaaaaaaaaaaagtttctgaagttgaagatttaattatgctaaatggaaacagtttgaaaaggaaagttattaccagaactgcctggtcatctttccttccctccctcctctaatcaactctcctcaatctgtttccatatacctttcctacttgctactaattcccaagacactttcactgtgctctgtggaactcacagtcatgacttatatcttcaacctcatctttagacattttatttaccttcttgtatattgattgctcaaaaccaaactatttcttgaatacaacaaaacaacaacctgtaaaactgtttttcacccatatttctttccagtttctgcactacttctcttgtcccctttacagcaaaagtccttagaaaagtttcctatggaattttgatttcaaatatatttcttttcattttatcttaaatcc

SEQ ID NO: 669837 - DNA, 3095 bp, Homo sapiens
tacaatgccatgattttataattggaatatgcaattgaaatattaccttaccctaatcaaaattaacactgtaaaagcatattcttcccatggcaggcttttaaatacttccttttatagtaatactattaagtattcccatttaaagtaaattggaatatttttaagtttataataggttacattttacaaatttgctgttttgctctttccattttacattctaaaatacaaaatgggcttctaaaatcttttttaaaaagtagaattgaattacatggcaattacacccccccacacacatatatactgtcaatggaattctactgaataatttattcaactgaccctctattgatatatagtttatttcaaatgtttgcttttaaggacaatgctgcaaaatactgcattgtcccacaagcatttgcatacatataagattatatctataggaagtgtatggatggctaaatcaaataatatatttttttacattttaattttgatagatattactaaaatgcccttcaattacacctatttattctaccatctacgcaagctgagaatgcctgcccctcaacaacctcagcaatatgtagtattaccaaatattttcatctttttaatatgacaggtgaaaaatattgttttgacattaattgttggattatggaagaggttgaacaactttttcaggaccatcataatcatcactacttcataatgcccaggctgagaagataacatagagctaaaatgcagcctacattttcccacgctatgcattgtgatgggagctttagctactggcaaagggaggctttgttctaattcatagcaaggtatcacaatagctagtgtgggcgctaatttgcttaggtgttatttgactgatatatatgaaattgttcaaatctattttattgatctgcttttctaaatgttaagcatatttatcttttgtcatgtgagctgaaaataaatttcataatttttgtttgcttgttttatttaaaattatggtactacttccatcatataaaacttttaaatttttatgtgtaaaaatttgtcaccttttcctttttggctactgctactgttatgcttataaaaatattcccttctttaatattaggaaatatttacccatatttctgtttctattttcacagttatatttgtatgctaaaaatttgatccatctggaatacattttgatgtaggagtaagctagaaacgagctttattttatttccaaataactagtcattttctccctcatttaagtgtcattttaacattatctctaatatatacttaaatccatttctggatttttttttttgttcttgttatttgtscaagtatagtaaattgttttgtaattctacatttataataggatttaaagtataggagaatgaattctatgtttttttcagaattgattgtctgatcttaaatgtttactgttatagagaaccttttgtgttaaattaaaaaaaatctagctgtcattttaactggtctaatattactttggagattaaaaaatgatttccatgtgaatggaaatactgaaaaactagaaggcagaggagattcttttgtgtaaatacatcataaaaaactggagccaagaattccaaaatatagattcagcttacagaagagtttgagaaaagtgagataatgctttagttctatgacttaacagcaatgcattgcaggagctttactcttttatgaatcctggtcttgtttaatagccagtttcagttcgcctaaatgcacttatccttaaaggtcctgcacgatctccctgatgctgtttaacaagtgtagtgtgctggtgacacatttgactgggctattgaagtcagacttccttttatcccaatgggttgatctatctgtagcagatttattttacaaagccatatcctacagacatgtcagtaagtatatatgtcattgtcatactctgatattttgacgcctagatttcatctcaccctgcagattatctgaaatcctatccccaatattttcctggcaatgtcaactatctgctgctaagctcatccttaaaaattagaaatttaacatattctagatgctgaacaagataaaaaaaaaatgcaatacataaccctcataagcaattaaaaaattatactaaggcactttttattttcacgaaatcaccaacttctggcacctctattatacccatgctacaactcagctatagctactgaaacaatttatatcactgatattaaatcgtactccttgtattaggagtatgattaacaagtaagttaaaaactaagaaacagaaatgtatctgggctgggtgtgatggcctatgcctgtaattccagtactttgagaggctgaggtgtgtggatcacatcacttgaggtcaggagttcgagaccagcctgaccaacatggtgaaacccagtgtctactaaaaatacaaaagtagccgagcttggtggcacatgcctgtaattccagctactcaggaggctgaggcaaaagaattgcttgaacccgagagtcagaggctgcagtgagccaagattgtgccattgcacctccagtctgagcaatagagtgagaatccctctcaaaaaaaaaaaaaaagtttctgaagttgaagatttaattatgctaaatggaaacagtttgaaaaggaaagttattaccagaactgcctggtcatctttccttccctccctcctctaatcaactctcctcaatctgtttccatatacctttcctacttgctactaattcccaagacactttcactgtgctctgtggaactcacagtcatgacttatatcttcaacctcatctttagacattttatttaccttcttgtatattgattgctcaaaaccaaactatttcttgaatacaacaaaacaacaacctgtaaaactgtttttcacccatatttctttccagtttctgcactacttctcttgtcccctttacagcaaaagtccttagaaaagtttcctatggaattttgatttcaaatatatttcttttcattttatcttaaatcc

SEQ ID NO: 669838 - DNA, 3095 bp, Homo sapiens
tacaatgccatgattttataattggaatatgcaattgaaatattaccttaccctaatcaaaattaacactgtaaaagcatattcttcccatggcaggcttttaaatacttccttttatagtaatactattaagtattcccatttaaagtaaattggaatatttttaagtttataataggttacattttacaaatttgctgttttgctctttccattttacattctaaaatacaaaatgggcttctaaaatcttttttaaaaagtagaattgaattacatggcaattacacccccccacacacatatatactgtcaatggaattctactgaataatttattcaactgaccctctattgatatatagtttatttcaaatgtttgcttttaaggacaatgctgcaaaatactgcattgtcccacaagcatttgcatacatataagattatatctataggaagtgtatggatggctaaatcaaataatatatttttttacattttaattttgatagatattactaaaatgcccttcaattacacctatttattctaccatctacgcaagctgagaatgcctgcccctcaacaacctcagcaatatgtagtattaccaaatattttcatctttttaatatgacaggtgaaaaatattgttttgacattaattgttggattatggaagaggttgaacaactttttcaggaccatcataatcatcactacttcataatgcccaggctgagaagataacatagagctaaaatgcagcctacattttcccacgctatgcattgtgatgggagctttagctactggcaaagggaggctttgttctaattcatagcaaggtatcacaatagctagtgtgggcgctaatttgcttaggtgttatttgactgatatatatgaaattgttcaaatctattttattgatctgcttttctaaatgttaagcatatttatcttttgtcatgtgagctgaaaataaatttcataatttttgtttgcttgttttatttaaaattatggtactacttccatcatataaaacttttaaatttttatgtgtaaaaatttgtcaccttttcctttttggctactgctactgttatgcttataaaaatattcccttctttaatattaggaaatatttacccatatttctgtttctattttcacagttatatttgtatgctaaaaatttgatccatctggaatacattttgatgtaggagtaagctagaaacgagctttattttatttccaaataactagtcattttctccctcatttaagtgtcattttaacattatctctaatatatacttaaatccatttctggatttttttttttgttcttgttatttgtgcaagtatagtaaattgttttgtaattctacatttataataggatttaaagtataggagaatgaattctatgtttttttcagaattgattgtctgatcttaaatgtttactgttatagagaaccttttgtgttaaattaaaaaaaatctagctgtcattttaactggtctaatattactttggagattaaaaaatgatttccatgtgaatggaaatactgaaaaactagaaggcagaggagattcttttgtgtaaatacatcataaaaaactggagccaagaattccaaaatatagattcagcttacagaagagtttgagmaaagtgagataatgctttagttctatgacttaacagcaatgcattgcaggagctttactcttttatgaatcctggtcttgtttaatagccagtttcagttcgcctaaatgcacttatccttaaaggtcctgcacgatctccctgatgctgtttaacaagtgtagtgtgctggtgacacatttgactgggctattgaagtcagacttccttttatcccaatgggttgatctatctgtagcagatttattttacaaagccatatcctacagacatgtcagtaagtatatatgtcattgtcatactctgatattttgacgcctagatttcatctcaccctgcagattatctgaaatcctatccccaatattttcctggcaatgtcaactatctgctgctaagctcatccttaaaaattagaaatttaacatattctagatgctgaacaagataaaaaaaaaatgcaatacataaccctcataagcaattaaaaaattatactaaggcactttttattttcacgaaatcaccaacttctggcacctctattatacccatgctacaactcagctatagctactgaaacaatttatatcactgatattaaatcgtactccttgtattaggagtatgattaacaagtaagttaaaaactaagaaacagaaatgtatctgggctgggtgtgatggcctatgcctgtaattccagtactttgagaggctgaggtgtgtggatcacatcacttgaggtcaggagttcgagaccagcctgaccaacatggtgaaacccagtgtctactaaaaatacaaaagtagccgagcttggtggcacatgcctgtaattccagctactcaggaggctgaggcaaaagaattgcttgaacccgagagtcagaggctgcagtgagccaagattgtgccattgcacctccagtctgagcaatagagtgagaatccctctcaaaaaaaaaaaaaaagtttctgaagttgaagatttaattatgctaaatggaaacagtttgaaaaggaaagttattaccagaactgcctggtcatctttccttccctccctcctctaatcaactctcctcaatctgtttccatatacctttcctacttgctactaattcccaagacactttcactgtgctctgtggaactcacagtcatgacttatatcttcaacctcatctttagacattttatttaccttcttgtatattgattgctcaaaaccaaactatttcttgaatacaacaaaacaacaacctgtaaaactgtttttcacccatatttctttccagtttctgcactacttctcttgtcccctttacagcaaaagtccttagaaaagtttcctatggaattttgatttcaaatatatttcttttcattttatcttaaatcc

SEQ ID NO: 669839 - DNA, 604 bp, Homo sapiens
caaacatggaggaacaattaagcaaatgcaaagagttctgattattatcttagattttttgtttgttctcatatttcatccattaaagaagtttctgtgaataggacaaaaaatggtcctagaaaaatttttttaagtgactgctgagaatatctacmaaaaacttagaggaataaagcaaagaaatacaaaatatattgaataggagtgatgagagtagatgtttttgtcttattctggttcttggggcaataattccaccttttgtctgttcagaaggatgttcactatgggcttctcattgatggctcttattattatgaggtatgcgcctttgatgcctagtctcctgaaggtttttaacatgaggggatgttaaatttttatcaaaagccttttctatgtccattgagatatcatgtgtttttggtttttagttccatttatgtgataaatcacatttattgattgcatatgttgaaccaatcttgcatcccaggaagaaaacctccgtgatagttgtggatttgctttttgatgtgctgctgcatatgatttgctagaattttgttgagaaattttacgtctatgttcatcaggagta

SEQ ID NO: 669840 - DNA, 1734 bp, Homo sapiens
caatattattactcctaaaatgtaaattttgaataaataatactataattttatatagtcagtaattgagcctttgtatttattgcatgatgaaaatttgtttactacaaaaaaatcagatacattgccccattcaaggtacagggaaaaaaatttctatatgcccataaaagtrtcacactctgaggatatagtctccctcttagttctcctttgacaacaaattacaacattggtaattgaaatgctatataattttttcagtaaaatagcttattacttatttccctgtatagtttatttacattgcacaaagcttaatacctgtcagaatatatatatactagtacatttatgtagttgaaatattttttaaaactacttgatgactcttcttgctgtgaaagaatttttaatgttctgtatctttaaatcccaagtctcccaagttaattaaacaattcattttcagataatcttcacaactattaaaaggcatttacatgtgtatttttacatgtgcaaaaaatgaataaatccagagatgactgtttttaaacctaaatatttgatcaaataatatatatgaataggcataaattatgcacttcatcaatgagaattgatgttcattatttgtttcatttttactacaagatcataaagcagagagagaaaattgaagcaaaaatctaattttttcatccattggtgagatacgatgatgaagtgattaatacaatcccatgggttcttaaatcatacctaatattagggaggaagtagtgggattttagagactcctgctgctagcatcctcaggcttgatggtatttactcatttacatttaagataatccaatataaattccaacttaatatacaacctctgctgtcatcccaacccagtgggtttatccttatttttcgtatctgagttcatctatgccaacatgtctcttgataacctgctatcattgaaacctgtctgcttaaatgagataaactggagagaattgatattttagccttaaaatagaacctagagatgtgggaaagtgaggctttcagtgactcatgaatccccttaactagaagacatatcacatgcttctgaaccaccatgaaatcctgtgagtattttcttattcattatacttgcctacaagtaataaagcacagatcctgttcttcaaatttatctcttgaaagactttaaattctagttgattgaaactacatagtgggaaatacttttttctaaggatcatgtttcaaaatcaagaagcaaaaagaaaaaagaaaaaaaaaacaggtgctttattcacagtcataaggatctgaaagattgtttttatcagcactcttatcctaaggaatctccttgagggagaaagaacgagaacacagagcttcatagcagagctataatgcagaatctgaagaatatttacggttataatttgcacagatcacttagtgctctaacacggtgctcctgatcacagcataagtcacactttaattttaacctttgcagttcatcaatagattcaatatcaaaaataattcaggactgacactactggtttacaggtaagtttaacaagaatggggaggcttagtaatgtattagttggcttgtcaagtgaggcataaagattcatgactcttaacctatgtttccatcgcaaactcagtgccataaataatgcaagcagctaatcaggcata

SEQ ID NO: 669841 - DNA, 635 bp, Homo sapiens
tgattcaaaatagagtaaccatgtttcttttgtacaygcatgtgaataccctgtattataacagaaggaaaaacttaaaaccacagtctggtcagccaatgtcaaatacaagaatattccattttctaatttttttcttatgttgccttatcatgcaagataagtgtatttaatgaatatgaagtagagccccacataaaatggataaacctcaggaataagtatgtaaatacatcaataaataattttcactttttgggtgaacacactagggataaatgagttagcagttcagaagcacacatatacaagaagattcaattcagtggtcatgcaaacattgtgacattgtgtgttaatttgatacactgaactcagactacacacaactatttacttaaaactacacaaaacaaaacaaaaacacctaaccagtcaaggcatagtctaaaagagttccttaatattataagtattgccatttatatctggaagcagaaaactagactgtgaaatcactgaatctcagaaacaaaggtaacagatttgagaggcaataatgagaggaagtaacatgccttcctttatgttcattatatggagacaaatctgtttttctgtgaaaaacctctttt

SEQ ID NO: 669842 - DNA, 635 bp, Homo sapiens
tgattcaaaatagagtaaccatgtttcttttgtacatgcatgtgaataccctgtattataacagaaggaaaaacttaaaaccacagtctggtcagccaatgtcaaatacaagaatattccattttctaatttttttcttatgttgccttatcatgcaagwtaagtgtatttaatgaatatgaagtagagccccacataaaatggataaacctcaggaataagtatgtaaatacatcaataaataattttcactttttgggtgaacacactagggataaatgagttagcagttcagaagcacacatatacaagaagattcaattcagtggtcatgcaaacattgtgacattgtgtgttaatttgatacactgaactcagactacacacaactatttacttaaaactacacaaaacaaaacaaaaacacctaaccagtcaaggcatagtctaaaagagttccttaatattataagtattgccatttatatctggaagcagaaaactagactgtgaaatcactgaatctcagaaacaaaggtaacagatttgagaggcaataatgagaggaagtaacatgccttcctttatgttcattatatggagacaaatctgtttttctgtgaaaaacctctttt

SEQ ID NO: 669843 - DNA, 635 bp, Homo sapiens
tgattcaaaatagagtaaccatgtttcttttgtacatgcatgtgaataccctgtattataacagaaggaaaaacttaaaaccacagtctggtcagccaatgtcaaatacaagaatattccattttctaatttttttcttatgttgccttatcatgcaagataagtgtatttaatgaatatgaagtagagccccacataaaakggataaacctcaggaataagtatgtaaatacatcaataaataattttcactttttgggtgaacacactagggataaatgagttagcagttcagaagcacacatatacaagaagattcaattcagtggtcatgcaaacattgtgacattgtgtgttaatttgatacactgaactcagactacacacaactatttacttaaaactacacaaaacaaaacaaaaacacctaaccagtcaaggcatagtctaaaagagttccttaatattataagtattgccatttatatctggaagcagaaaactagactgtgaaatcactgaatctcagaaacaaaggtaacagatttgagaggcaataatgagaggaagtaacatgccttcctttatgttcattatatggagacaaatctgtttttctgtgaaaaacctctttt

SEQ ID NO: 669844 - DNA, 635 bp, Homo sapiens
tgattcaaaatagagtaaccatgtttcttttgtacatgcatgtgaataccctgtattataacagaaggaaaaacttaaaaccacagtctggtcagccaatgtcaaatacaagaatattccattttctaatttttttcttatgttgccttatcatgcaagataagtgtatttaatgaatatgaagtagagccccacataaaatggataaacctcaggaataagtatgtaaatacatcaataaataaktttcactttttgggtgaacacactagggataaatgagttagcagttcagaagcacacatatacaagaagattcaattcagtggtcatgcaaacattgtgacattgtgtgttaatttgatacactgaactcagactacacacaactatttacttaaaactacacaaaacaaaacaaaaacacctaaccagtcaaggcatagtctaaaagagttccttaatattataagtattgccatttatatctggaagcagaaaactagactgtgaaatcactgaatctcagaaacaaaggtaacagatttgagaggcaataatgagaggaagtaacatgccttcctttatgttcattatatggagacaaatctgtttttctgtgaaaaacctctttt

SEQ ID NO: 669845 - DNA, 679 bp, Homo sapiens
aaacttactagtatataaaatgcataattattctagatagtaaaaaataacacaggctaccatagaaaagaagtgataaaaattggggaatcaataaattactcaaaatgaaaattgagagaaaaataaaaagtttgataaatagccaaaagcattcttatacattttgcagcttgtcttcaaggacatgtataacatattgcctgattttctcatcactaaaaataaaaattttactactatggtaataagcttgtcataaaatagaatgaaaatctactattctgtactttctaaatgagaatgttcctttattaaaatttgctcttgaaattttgaggytacataaaaattaattttgagttttgaaccaccatgttttgtatgaattatgtcttattaaaattttctaaattgctaaatttaaacatatataaatattgtatgaatttttgcagtagcaagtcttcaaattacatatttagagtttcaagagcatcttttttcagatgtatattagtttcgactttttaaatgtatacttatttttcaaagatagattgtactcttatggaacattattttttaaataatttgatattgttttaaacactgtgatagctgctggatataacagtgtacgaagaagcaatggtttctacctccagagattaatgtt

SEQ ID NO: 669846 - DNA, 679 bp, Homo sapiens
aaacttactagtatataaaatgcataattattctagatagtaaaaaataacacaggctaccatagaaaagaagtgataaaaattggggaatcaataaattactcaaaatgaaaattgagagaaaaataaaaagtttgataaatagccaaaagcattcttatacattttgcagcttgtcttcaaggacatgtataacatattgcctgattttctcatcactaaaaataaaaattttactactatggtaataagcttgtcataaaatagaatgaaaatctactattctgtactttctaaatgagaatgttcctttattaaaatttgctcttgaaattttgaggttacataaaaattaattttgagttttgaaccaccatgttttgtatgaattatgtcttattaaaattttctaaattgctaaatttaaacatatataaatattgtatgaatttttgcagtagcaagtcttcaaattacatatttagagtttcaagagcatcttttttcagatgtatattagtttcgactttttaaatgtatacttatttttcaaagatagattgtactcttatggaacattattttttaaataatttgatattgttttaaacactgtgatagctgctggatataacagtgtacgaagaagcaatggttkctacctccagagattaatgtt

SEQ ID NO: 669847 - DNA, 638 bp, Homo sapiens
aatttggggaaattgtcttatcaaatctcatggcttctcatagactactgtactgaagatagggcagcattggcacaggaatcaaaaaactgattaacggaacagaaaccccagaaacagccgctgcatatgtgcgggaactgttctaccccaacatctccagcaagagtgtccttgcttctcattggttctcctggaccaatcactgtggcctgcagcactgggcctctgaagccttaggtgtcacagcaccacccaagggctagagacgggtcagtttcaattaaaccacaaggactgagaatagggaagaggatacttcccaaaagaaaataagtgcactaataagcaagaaagggaaacgaatgccaaaaaataattgtccacacatgctgcagaccagtcctcacaaamctgacattcttagtgatgagaggacatcgatgttgatgcagagtattcgtgcatgtggatacaaagtattcaagcatggccacacaggcatgcatacctacacccaaggagggggctatcatggcctcgcctcatcatcatgctttgctagcaggggcattccttagtcctattcttggtccctaaatcagcatctgaaaaaccatcttttttaaaaaaaaacc

SEQ ID NO: 669848 - DNA, 1493 bp, Homo sapiens
acatctctaaggctctcatttctgatgaattctggttaaaacattgtaatatttccataccagttaagtaaattaaacagtccccgtgatgtgcgccagatccctcctcatcacctgccacacctgatacctttggtgcatcagggtcccaagacatcgcttgataggccagcaccagttctgattggtcagtgccaggccattgcagttattaaatacatacatatatacatacatttatataaacatgctttaggtaattcaggatggttggtgcatggcatggggtcataaggataacaacctatctgggtactaagggaagttaagttacaggatcagtggacataacaatgtcttttccatctctcctttagatgtaggtcatgacagtgatgggaagaatagaattggaaagcaattggagaagttattttaatattggggcctatgacatttaaaaaatatgtcctcatgagttggacttggctcagacacgtttgatgatagatttcaaactattaatagtgcattctaagattgcatgggccaatatagatagaatggcagtgtgacataggggcgctgtggtagagggatgtgtgggcatggagtgcaatgggacccagaaaaaaggatgcattagggaaggttcctggaggaggtgatactgagcctacctgacctttggaatacaaatgagaattaaccactttgcagagaaggaagggtatttcaggcaatgagaaaagtgaccaggaaaaaacatcttgaaagagaggtttgggccaggtgtggtggctcacacctgtaatcccagcactttgggaggctgaggtgggcagagaacaaggtcaggagtttgagaccagcctgggtaacatagtgaaaacacgtctctactaaaaatacaaaaaaattagccgggcgtggtggcgggcgcctataatcccagctactcaaggggctgaggcaggagatagcttgaacccaggcggcggaggttacagtgagccgagatggcgccactgcactctagcctgagctacagtgcaagactccgtctcaaaaaaaaaaaaaaaraaagaaagaaaaagaaaaaatagaaagaaggaaggaagagaaagtaagaaagaaagaaggatagaaagaaagaaagaaagaaaaagaaaggaggaaagaagaaagaaagaaagaaaagaaagaaagagaaaaagaaagaaagaaagagaaagaaagaaagaaaagaaagaaaaggaaaggaaggaaggaagggaggaaaggaaggaaggaagaaaggtttgacatggctgggaaagtggtgtgcttcatgggctgggaggaagatgggaatagaggtcaagagaggtgtaggtgggagatgctggtgacataatagtgtgaggagtgaaatgcaccttgttggacctaagcaaaaatgccatgtttcccatgttttctatgtcacccaaaaacatctctttattcttaat

SEQ ID NO: 669849 - DNA, 1493 bp, Homo sapiens
acatctctaaggctctcatttctgatgaattctggttaaaacattgtaatatttccataccagttaagtaaattaaacagtccccgtgatgtgcgccagatccctcctcatcacctgccacacctgatacctttggtgcatcagggtcccaagacatcgcttgataggccagcaccagttctgattggtcagtgccaggccattgcagttattaaatacatacatatatacatacatttatataaacatgctttaggtaattcaggatggttggtgcatggcatggggtcataaggataacaacctatctgggtactaagggaagttaagttacaggatcagtggacataacaatgtcttttccatctctcctttagatgtaggtcatgacagtgatgggaagaatagaattggaaagcaattggagaagttattttaatattggggcctatgacatttaaaaaatatgtcctcatgagttggacttggctcagacacgtttgatgatagatttcaaactattaatagtgcattctaagattgcatgggccaatatagatagaatggcagtgtgacataggggcgctgtggtagagggatgtgtgggcatggagtgcaatgggacccagaaaaaaggatgcattagggaaggttcctggaggaggtgatactgagcctacctgacctttggaatacaaatgagaattaaccactttgcagagaaggaagggtatttcaggcaatgagaaaagtgaccaggaaaaaacatcttgaaagagaggtttgggccaggtgtggtggctcacacctgtaatcccagcactttgggaggctgaggtgggcagagaacaaggtcaggagtttgagaccagcctgggtaacatagtgaaaacacgtctctactaaaaatacaaaaaaattagccgggcgtggtggcgggcgcctataatcccagctactcaaggggctgaggcaggagatagcttgaacccaggcggcggaggttacagtgagccgagatggcgccactgcactctagcctgagctacagtgcaagactccgtctcaaaaaaaaaaaaaaagaaagaaagaaaaagaaaaaatagaaagaaggaaggaagagaaagtaagaaagaaagaaggatagaaagaaagaaagaaagaaaaagaaagraggaaagaagaaagaaagaaagaaaagaaagaaagagaaaaagaaagaaagaaagagaaagaaagaaagaaaagaaagaaaaggaaaggaaggaaggaagggaggaaaggaaggaaggaagaaaggtttgacatggctgggaaagtggtgtgcttcatgggctgggaggaagatgggaatagaggtcaagagaggtgtaggtgggagatgctggtgacataatagtgtgaggagtgaaatgcaccttgttggacctaagcaaaaatgccatgtttcccatgttttctatgtcacccaaaaacatctctttattcttaat

SEQ ID NO: 669850 - DNA, 1493 bp, Homo sapiens
acatctctaaggctctcatttctgatgaattctggttaaaacattgtaatatttccataccagttaagtaaattaaacagtccccgtgatgtgcgccagatccctcctcatcacctgccacacctgatacctttggtgcatcagggtcccaagacatcgcttgataggccagcaccagttctgattggtcagtgccaggccattgcagttattaaatacatacatatatacatacatttatataaacatgctttaggtaattcaggatggttggtgcatggcatggggtcataaggataacaacctatctgggtactaagggaagttaagttacaggatcagtggacataacaatgtcttttccatctctcctttagatgtaggtcatgacagtgatgggaagaatagaattggaaagcaattggagaagttattttaatattggggcctatgacatttaaaaaatatgtcctcatgagttggacttggctcagacacgtttgatgatagatttcaaactattaatagtgcattctaagattgcatgggccaatatagatagaatggcagtgtgacataggggcgctgtggtagagggatgtgtgggcatggagtgcaatgggacccagaaaaaaggatgcattagggaaggttcctggaggaggtgatactgagcctacctgacctttggaatacaaatgagaattaaccactttgcagagaaggaagggtatttcaggcaatgagaaaagtgaccaggaaaaaacatcttgaaagagaggtttgggccaggtgtggtggctcacacctgtaatcccagcactttgggaggctgaggtgggcagagaacaaggtcaggagtttgagaccagcctgggtaacatagtgaaaacacgtctctactaaaaatacaaaaaaattagccgggcgtggtggcgggcgcctataatcccagctactcaaggggctgaggcaggagatagcttgaacccaggcggcggaggttacagtgagccgagatggcgccactgcactctagcctgagctacagtgcaagactccgtctcaaaaaaaaaaaaaaagaaagaaagaaaaagaaaaaatagaaagaaggaaggaagagaaagtaagaaagaaagaaggatagaaagaaagaaagaaagaaaaagaaaggargaaagaagaaagaaagaaagaaaagaaagaaagagaaaaagaaagaaagaaagagaaagaaagaaagaaaagaaagaaaaggaaaggaaggaaggaagggaggaaaggaaggaaggaagaaaggtttgacatggctgggaaagtggtgtgcttcatgggctgggaggaagatgggaatagaggtcaagagaggtgtaggtgggagatgctggtgacataatagtgtgaggagtgaaatgcaccttgttggacctaagcaaaaatgccatgtttcccatgttttctatgtcacccaaaaacatctctttattcttaat

SEQ ID NO: 669851 - DNA, 1493 bp, Homo sapiens
acatctctaaggctctcatttctgatgaattctggttaaaacattgtaatatttccataccagttaagtaaattaaacagtccccgtgatgtgcgccagatccctcctcatcacctgccacacctgatacctttggtgcatcagggtcccaagacatcgcttgataggccagcaccagttctgattggtcagtgccaggccattgcagttattaaatacatacatatatacatacatttatataaacatgctttaggtaattcaggatggttggtgcatggcatggggtcataaggataacaacctatctgggtactaagggaagttaagttacaggatcagtggacataacaatgtcttttccatctctcctttagatgtaggtcatgacagtgatgggaagaatagaattggaaagcaattggagaagttattttaatattggggcctatgacatttaaaaaatatgtcctcatgagttggacttggctcagacacgtttgatgatagatttcaaactattaatagtgcattctaagattgcatgggccaatatagatagaatggcagtgtgacataggggcgctgtggtagagggatgtgtgggcatggagtgcaatgggacccagaaaaaaggatgcattagggaaggttcctggaggaggtgatactgagcctacctgacctttggaatacaaatgagaattaaccactttgcagagaaggaagggtatttcaggcaatgagaaaagtgaccaggaaaaaacatcttgaaagagaggtttgggccaggtgtggtggctcacacctgtaatcccagcactttgggaggctgaggtgggcagagaacaaggtcaggagtttgagaccagcctgggtaacatagtgaaaacacgtctctactaaaaatacaaaaaaattagccgggcgtggtggcgggcgcctataatcccagctactcaaggggctgaggcaggagatagcttgaacccaggcggcggaggttacagtgagccgagatggcgccactgcactctagcctgagctacagtgcaagactccgtctcaaaaaaaaaaaaaaagaaagaaagaaaaagaaaaaatagaaagaaggaaggaagagaaagtaagaaagaaagaaggatagaaagaaagaaagaaagaaaaagaaaggaggaaagragaaagaaagaaagaaaagaaagaaagagaaaaagaaagaaagaaagagaaagaaagaaagaaaagaaagaaaaggaaaggaaggaaggaagggaggaaaggaaggaaggaagaaaggtttgacatggctgggaaagtggtgtgcttcatgggctgggaggaagatgggaatagaggtcaagagaggtgtaggtgggagatgctggtgacataatagtgtgaggagtgaaatgcaccttgttggacctaagcaaaaatgccatgtttcccatgttttctatgtcacccaaaaacatctctttattcttaat

SEQ ID NO: 669852 - DNA, 1493 bp, Homo sapiens
acatctctaaggctctcatttctgatgaattctggttaaaacattgtaatatttccataccagttaagtaaattaaacagtccccgtgatgtgcgccagatccctcctcatcacctgccacacctgatacctttggtgcatcagggtcccaagacatcgcttgataggccagcaccagttctgattggtcagtgccaggccattgcagttattaaatacatacatatatacatacatttatataaacatgctttaggtaattcaggatggttggtgcatggcatggggtcataaggataacaacctatctgggtactaagggaagttaagttacaggatcagtggacataacaatgtcttttccatctctcctttagatgtaggtcatgacagtgatgggaagaatagaattggaaagcaattggagaagttattttaatattggggcctatgacatttaaaaaatatgtcctcatgagttggacttggctcagacacgtttgatgatagatttcaaactattaatagtgcattctaagattgcatgggccaatatagatagaatggcagtgtgacataggggcgctgtggtagagggatgtgtgggcatggagtgcaatgggacccagaaaaaaggatgcattagggaaggttcctggaggaggtgatactgagcctacctgacctttggaatacaaatgagaattaaccactttgcagagaaggaagggtatttcaggcaatgagaaaagtgaccaggaaaaaacatcttgaaagagaggtttgggccaggtgtggtggctcacacctgtaatcccagcactttgggaggctgaggtgggcagagaacaaggtcaggagtttgagaccagcctgggtaacatagtgaaaacacgtctctactaaaaatacaaaaaaattagccgggcgtggtggcgggcgcctataatcccagctactcaaggggctgaggcaggagatagcttgaacccaggcggcggaggttacagtgagccgagatggcgccactgcactctagcctgagctacagtgcaagactccgtctcaaaaaaaaaaaaaaagaaagaaagaaaaagaaaaaatagaaagaaggaaggaagagaaagtaagaaagaaagaaggatagaaagaaagaaagaaagaaaaagaaaggaggaaagaagaaagaaagaaagaaaagaaagaaagagaaaaagaaagaaagaaagagaaagaaagaaagaaaagaaagaaaaggaaaggaaggaaggaagggaggaaaggaaggaaggaagaaaggtttgacatggctgggaaagtggtgtgcttcatgggctgggaggaagatgggaatagaggtcaagagaggtgtaggtgggagatgctggtgacataatagtgtgaggagtgaaatgcaccttgttggacctaagcaaaaatgccaygtttcccatgttttctatgtcacccaaaaacatctctttattcttaat

SEQ ID NO: 669853 - DNA, 624 bp, Homo sapiens
aggctgagacagaagaatcgcttgaacccaggaggcggaggttgcagtgagcctagatcatgccactgcactccagcctgggtgacagagcaaaactccgtctcaaaaaaataaataaataaaataaaagtgaaaataaatagagggagaaatggagaaaagagaggatgggaaagagaaggaaagagacagaaagagaagagaggtacagaggaagagagcgtgcaggtcctgggaacacatgaggagtgagtggcttgggtcaatccccgtcaactgctttaatgtgtaagaatgtgcagccacagtctccaacaatcatactgtcttatcaagagccagggctctcttacaacagttgcaatctggaatrcacagtaaatgactgggtcttcaggagagttttgggtttatgatcaaagccagatgtcacctaactccatctagcctgtgaggacaggctgcctagcgtcccactccaagggaaattcctctccattccttggtggtaatagtgttatagcttccttggcatcatagcgtttctatcttcccacttttctaagaacctgagaagggcatagaggtttgagtgagaggtctccctctgaaaagggatgccac

SEQ ID NO: 669854 - DNA, 624 bp, Homo sapiens
aggctgagacagaagaatcgcttgaacccaggaggcggaggttgcagtgagcctagatcatgccactgcactccagcctgggtgacagagcaaaactccgtctcaaaaaaataaataaataaaataaaagtgaaaataaatagagggagaaatggagaaaagagaggatgggaaagagaaggaaagagacagaaagagaagagaggtacagaggaagagagcgtgcaggtcctgggaacacatgaggagtgagtggcttgggtcaatccccgtcaactgctttaatgtgtaagaatgtgcagccacagtctccaacaatcatactgtcttatcaagagccagggctctcttacaacagttgcaatctggaatgcacagtaaatgaytgggtcttcaggagagttttgggtttatgatcaaagccagatgtcacctaactccatctagcctgtgaggacaggctgcctagcgtcccactccaagggaaattcctctccattccttggtggtaatagtgttatagcttccttggcatcatagcgtttctatcttcccacttttctaagaacctgagaagggcatagaggtttgagtgagaggtctccctctgaaaagggatgccac

SEQ ID NO: 669855 - DNA, 601 bp, Homo sapiens
gctaaagtttcttacttgcttctcctaactctgtggctgggctcaaaaatgggtattgtttcgttaagactcagtttcagggcagcttccaactcaacatttgcttctgttccagaacatttgtaaaaatttgattcagagcagggagggttggggagacctcactaatatgggaaacatattcacatttgtaattttatatttattaataaaactatttgcttcaggacatattaggcaagccaaaggctgaatcacattgatgattgcctgtgagcttttacctttgaacaatctcttgtggagccaacccttgtacctccgtctgtgggtatggttttccgtggagtggtagctcaaagtggttttatgtgtgatgttctccctctagtggccagtttgggtttgttgtattggtttgattttttttttttctttttttgttgtacaaatgatctctagagttggcaaaccttttatttaggggtagtgtggatttgggaaggctaggaggtatgagcaaaaagggagggggtgcaaaattttaytccataggtgaaacagttattctaaagtgtttgttccaattgctagcttttta

SEQ ID NO: 669856 - DNA, 1116 bp, Homo sapiens
taaagcttaagtttattaacttcacagagaatccacttctgcttggaaagcttctctgcccagtgccaaaaaggcattaagaagttgagggtaaagaaaatggacaaccatttatcatatggtaggtgtcactgaccaagacagaaattttaggttcttatttgatctttgaacccctgaggtgtgctgccttactgaatcaaacctgagccaagcccagctttctcttaagggcagggccctcatctttgtcttgttcgcacaaatacctacccaagaaagtgcatcaataaatgtctgctgaatgaatgactatctggatgactgtgaatgaggaaatatagaaataaattcacactccttttttagactgagtgtcattgtttaccttctccaaagaactctttgcaaaatgttttgagctatgtgaagaaaggcttcatctaaacttattcatgaagcaggccaactagattgtgtcagagggctactaaagtcattctcttattggatgaaaaaatactctagtcataattaagaaacattaaactatatttataatcaaatattctttaaggggattggctttttcttctgggttgagtgggttttgctctcacgcacccagaaaaggccagacagtgtgttgtttgatctattttgttaaccttctcctctggcttatgttaccttaagttgacctttcaagtgctttgtcttctggcaaatatatttaaaactttaggacctaagtaatgtatagctatcagaattcatgcwgaaaatcaaagctgagtctggagcattctcttttgaagagaaataccaccctgcgtgtgatgacctcacctgattcatcacctgatacctgatgggggtcaatgggtgcagagaagatcctgagcctagggctgggagcgggtgttgtccacatattggctttgctgtgaactggatgggggtcaggtttgcatgagggacatgttagacatgctggggttggcctggattagaaaggacatgattttgatttaacttttgttctcatgactttgaaggtaaatctgaggttgtgtcatgtagatgagaagtttctaagttcaaagtcgagaggcc

SEQ ID NO: 669857 - DNA, 582 bp, Homo sapiens
caacgtcaatagcttcaacaagccaaacctaaaactggatggtaggctgctttcccagggttctaataacaggtggtgcacgggttagactccaggcaagcacaaccccagtttcctcattctcattcttccgtcctagagtcataggagtggcttctgttctgctcatctgaaattcagaaacaaaatagggcactcctttgatagactttttatttgctaaatttactggaaatacagcatcagatacagtgtccaatcttcctagtcttccatttttcaattcttctcttttcggtgtacatatcaatgactttataaaatatgaatawgtactatatacatttatataaatgtaaaacatttaacaaaatactcggtatctaactctctccctagaagccagtaatcattgatgggttactgagtccttggaattgaaaactatgacttctattctcttccctttgttacagttcttctcaagttttcttgagtaaaaatccctgctctcatgtgttcaattcacctggtatataaaaccatccaacaaaacagtgttgaatccttccaaaatccact

SEQ ID NO: 669858 - DNA, 1136 bp, Homo sapiens
ggcttcatggctctatgaatgactacactttgtagaactcagaaaaaaatattaacattgaacagcagtgccctctacagtacatgttgggctatccctaactaacattaatcagtaaggacataactaacctgtcagggctctctctcttatgattcttggaaacaggttaccaacactcagtacatgttcttaaacaccagtagagtcaacaaagtattgctcccaacactttgcaaatctggtgattcctagagaaatttacttaaactcttagcatcataaagttccagaaaaaaatatttccctttgttctgttgttttcaaatcatttaggcagattcacctttgtagatggtgccacccctaccatgttaccaccatgctcatttgcagacacaaaaggcctcataatctgaattatggaagcaagaatccacactttgggcagatgtaaaatgccagaaaagattactttccttagcaaagtaagtgtatattaagtgtaagacagcagtaatcagaatatgtctttaagtcttcaactgattcttcacagaaatggcaagtagtcttcagacatctattaataatcatgcaaggctgaccctattattaaatatggggatatatgctaagtgaaggaaaacatggcaaactaccgacttgtgtcagcagcattcttgaaaccctactcagcagtctataccatcctcctagctataccattgctggaggaagatgaggtatgagagtgacaatacagatataccatctccttcagtttaaaataagatatacagcatatgaggatcagaaacagcatctgaaaattcttgccttgcaaattatgagtgcagagctgtatcacagctctgacttgaaasggaaacactttgagtttctttaaataagtcttctgcagtcaagaaattctttccctgaaaaggctacaaattagcttgactaatgaataaagactcttggcttggtattcatcaccttcctttatagacttttcaatacgagaatcaattcctgctcctagccaatgccttcctaggaacagttcttgaatgtattaaatatactagaagccagagtaatgagttcaaccatcttttaaaataaaggca

SEQ ID NO: 669859 - DNA, 1621 bp, Homo sapiens
tcgatctcctgaccttgtcatccacctgccttggcctcccaaagtgctgggattacaggcgtgagccaccgcgcctggcccatactttgtataattttaatccttttgaattgagatttatgttatggcacaacaaaagaccagctttgatgaatgtttaatgtgagtttgaaaataatgtgtattgtgccatttctctgtgcatgttcttttcttttgtgtcctatcaatgaaaaaaatattgttaaaatgtcctactacattgagctgtgtctatttattatcaagggaacattggctccaaatgtccagcttacttctctttttttctcttcttctgaatgtttaacccacaaattccttgcactggtagatctccaatgaaatctttttaacaaagtaaacattttctgcattttaaaatttatcatgcctagaaatttgtatcaacaatctactcagccattgttaaagtccctggatagctctttaaaggtatatcatgtataagttatttctaaaatggcaaagggtcaatttacatttattctttatcttgactcaaatttggtatttcatattctggatgaaaacctattttctacattttcatatttttcccttaaagttgttctcttatatatttttttcatatatgaagattgcttataaagtgtctgcttcttatgaactaaaacataccctctcgaaaatgaaataaaataaaataaaataaaataaaaataaataaagtaagattaaaaaatatcaaatacaaacttagagtgtatcccaatgagttggaaactgaatacaaattaaaggaccttaagatattttgagtgtactctagtgaaaaactatagaataaatacaaaccgtgtaatacattatttttccctctgcacactttgagaagatttgaatcatatgagtgagttttctcattccggactacttacacatttttaagatttcttttgcatatctcagaatagatttttctgggatttcttgttggtttttaaaacgcaaattctgtaaatttcttggtaagtttttcttcaaatttaatatatattgctaatattattttcccccattattattctcccatacattattatatgttccaaaggtttaagataagtatatatatacatatatatatakatagagagagagagagagagagatttatgtataataaatcttatatataaattgttttagatatttatgtataataaatcttatatgtatacacatatataaattatttttaggtattctgttgcatcagggtttttgtacaagaattttttttctttttcttgcataaaacaaacttctcatatctacttatttgtctgacagattatgaccactgagtttttggcttactaaaccttttcaccaataattctttcttgactcgtaaagtttgggcaaggcctatctcttctactttatttcatttctcataatatgcaactcacctaattgtaattctctgtattcctcaggagcagtggttaatgattgattagttatacgtaaagtaattatttgtaaaggttttatttgcttccaaaataaaggggcctaaagcaaaggaaaa

SEQ ID NO: 669860 - DNA, 648 bp, Homo sapiens
ttgtcaagggcacacacctaaaggggctgaggacacaaaggtgggtgagtgccctgagcggcccctcgttcccaggccctgcagccagactcagacacagaggactagcgggcraaaccccagcagaccaggcagaggcatagacacatccagggacacacacagaggtgtatgcacccaggcaccctagtggctctctccctgtgtccagggagtgactgactccaggtgaccagagcagggtgggctcctggggagggaggtaagtgcagggcctctggaccccaggcaacactgctcagccccgaaaaaaggacactgcgagggggtggggtaagacctgcgccaggtccccacacgagggagaaggttgtgcccatcatgcctgggctcactggcaggaggctgccagggcctcttcccagcagtggctctggcgtccatctgacctgctgctggatggctgcctggtggctgcagcgcggctaacgggaactgtctagggtgagtcatcgtgcccgggtggctcacctgggcccgctagctgtgcgtggtctccaaatgagcccaggaatgcgtgtgcccctgtgtgtatgtatacacgtgcatgggtctgtatcctggtgtgggtgttcatgcatgcaggcc

SEQ ID NO: 669861 - DNA, 648 bp, Homo sapiens
ttgtcaagggcacacacctaaaggggctgaggacacaaaggtgggtgagtgccctgagcggcccctcgttcccaggccctgcagccagactcagacacagaggactagcgggcgaaaccccagcagaccaggcagaggcatagacacatccagggacacacacagaggtgtatgcacccaggcaccctagtggctctctccctgtgtccagggagtgactgactccaggtgaccagagcagggtgggctcctggggagggaggtaagtgcagggcctctggaccccaggcaacactgctcagccccgaaaaaaggacactgcgagggggtggggtaagacctgcgccaggtccccacacgagggagaaggttgtgcccatcatgcctgggctcactggcaggaggctgccagggcctcttcccagcagtggctctggcgtccatctgacctgctgctggatggctgccyggtggctgcagcgcggctaacgggaactgtctagggtgagtcatcgtgcccgggtggctcacctgggcccgctagctgtgcgtggtctccaaatgagcccaggaatgcgtgtgcccctgtgtgtatgtatacacgtgcatgggtctgtatcctggtgtgggtgttcatgcatgcaggcc

SEQ ID NO: 669862 - DNA, 1664 bp, Homo sapiens
tgagggacattctacaacatacctgacaaagactcctccaaatgctcaaagttaccaaaacaaggaaattttgagagactatcacggccaagaagcgcctaaggagacatratgactaagtgcaatgtggcatcctgggacaaaaaaggacatcaaggaaaagtgacagaaatctgaaaggagtatggactttagtgagtaagaatgtaccagtattggttcactaattgcaagaaatgtgccatactaatgtaatgttaataataggagacaccagggcagggcatatgggaatgctttgtattatgtaatttttctgtgcatctaaaactgctcaataataaaagacttattttaaaagttttatatcactcttgaaggtggttgacatcttccaaaactttgggttttagttttaggatataaatactgccttttaaagctatttgtcacagaaagaataattataaataaataatttattttttcaaaagctacttagaaaataagaaaaaaatccaaataacactgctacaaaaactttaaataatataaataacctggagtgagtgatgttttaaaaatatttctggtcaggcaaagtggctcacacctgaaatctcaactctttgggaggctgaggcaggaggatctcttgaggccacgagttcaggaccagcttgggcaacaaagtaagacccccttctctacaaaaagtaaaaaaaaaaaaaaaaaatgaattagccgggcatggtggcatgcctgttgtcctagctacttgggaggctgaggcaggaggactgcttaagcccagcagtttgaagctgcagtgagctatgattgtaccactgcactccagctgtggtgacagggcaagactctgtctctaaaaaaataaaaataaaaataaatattttctattttcggaagtttttcagtcaggatattctttgtaggtgggtctttacaacttgcattggctaaattgactagctgatttctttcacaggaggttgtaataaaacctcacattacagaatatatttatttatataaaagttatgccccattgaaattttgtaaataagtcatgttttttgatgtcttggttaaatcatttaaaaataattttgagcaaattattgtgaaaataattaacttttataatgcagatagctaattccaatttattcagtgaattcagatttcatacattaggaatttaattgtgttcctcttcctcaaaatacattgaggatctagtcccctagtgcctcagagtgtggccctattgggaaatagggtcattgcagatgtaattagttatgatgaggtcatagtggagtagaattggccctttttcagtataactgatgtcttaataagatgatggccatgggaagatagagagacacaggagaactccatgtggcaatgaaggcagagattggagtgaagcatccacaagccaaagaatgccaaggattgctggcagccaccagagctggaacaggcaaggaaggatccttccctcaagacttcagagaaagcatggccctgcccacatcttgatttcagacttcttgcctccagaactgcgagatagcaagtctctgttgatataagccatcccatttctagaactttgttatggcagccctaca

SEQ ID NO: 669863 - DNA, 1459 bp, Homo sapiens
atttttcatagaccacaactctacctcccacagagcctgggtagggggaagagctctcaggcacgttcttttaagggtatggaaggatgtaaagtgctgttgtattatatccacccataaagtgctaggaaatttgtttggaaaacatgcctatgtttataataagcattcttttcctgtgctctagggccggtcacattttcaccagaatgcagcaaacatttccaccgactctattacaataccagggagtgctcaacgccagcttgtaagtaacttgggtgggtttttttttttttaattatccaacaataaatgcgtttaattttaaacttcaaatgtctgtgggtgggaagtagtagactaaacattgagattctatttataacactgatttagaacactgacagaacctaaggtttgtgtgtactgttgccactgtaaggaatgaaaccacattctaattgggaatctactcaaatctgataatagccagatttccttaaagactaaagtgtttgttaggatttaaacattttatcatgattcgaattccttggcataaatagggtgctgtctcaaataaatgaaaaaaatgagatgactgtgaactctaagtaaaaattttttcataagttattttaaagtaaatattttttatagcacatcatttatataatggtgctggatttttctgagtaatgatagcatgtaaaggttgctataatgaattcttttggatacttaagttactgaagttaataataattctaaacataatatttaagtgctctcatttgaagtgccgaaattatgactatgtgtggtaactcagttcgctgtttttaaattcctttctaagcctcaactttccttttaaagaacatgaattctaagcattttgtttctttttaactagattgctcatcttgaggaatattgacttttactcagcatgttaagttgtatttgttataatttttttcaaaaacaacttttaaacaaaaggccaggagtgttggctcacgactgtaatcccagcactttgggaggccgaggcaagcggatcgcttgagctcaggcgtttgagacmagccttggcaacatggtgaaaccctgtctctaccaaaaatacaaaaattagccagtcttacaacccggcttctaaataaataaataaataaataagtaaataaataaattaaaattccaaaataaaataaaataaaacaaaacaacttgtattaaatggctagagaaatttaatcacattggattacaggcagaatgactaatggtagccaagcatggtggagaaagcacgtgctttgggataaagcttttgactagttatggggtaattaattaacattttgaggctcttgtctcatctctaaagtgaagataggaatagcaccttcccgattgtgttattgaaagaattgatgagaaaatccat

SEQ ID NO: 669864 - DNA, 1196 bp, Homo sapiens
ataaaacacattattatagtttcaaaatgttataaaacgttcgtatgtttaggtgtgctcaatactagttttctgtatgctgtacaacttttacttcgttcctaaggaggagggcctgaagcacagtagaattgggaaagagagtctacttgaagttttggtcatcaaaggccaggacttagaagccacttctccttcctagtgtatgaatgtggggcaaaccattgaagagctctgagtcttagctcctcaaaacaatggggtaatcccggaaccttgttgtgccaacctcacaaagaatgaatgagcttccaatgagatcatgatgcagggaagtattttttgtttctattacagtaactcacataaatactctttgttattatgggccacaaataaatttagttgattgccgttcttagaaataaagggcattaaccttcaattcttagggttccctgaagaaagtactgcattctattcagatgatagattatgattagaataatgaggggaacagcttttcccacctcaacagactatcaatttatgtgctgtttcttgttttattggatctaatcagcagcaaaaagaatgttcatttataataagttctgagaaacataatttgagctatatagatagaaatattatttattgctttaaataaaccattcaaatgatggtttatttcttatgaatggactctgtgccaccagttamattaatgaattttttctgagtgagatcaatggtggagctgagaaacctgtcagaaggagagtctccagtcctcctgtgccgctgagcacgttaagcctactataaagtttgtttaaatttctctcttaaacagtcttaaatataaaacaaactcgaaccctttaagggaaaaaaagttcccttatgtatctgctaatctccttgtaaatcttccaagcgtgattaatatgattacttaaacccaactgtccaaaggggatttttgacagttttatgagggaattagttattttctattttacggccggtccttttcctctcagttgtgaagctgggtgtctgggagccagggcccgctgcgctcaacccggcctggttcacggcgaagtccccaggccgcatcctggacgtctcagctgcaaagatgctcccctctctcacctgcgagttcgctttaaaaacatatataatga

SEQ ID NO: 669865 - DNA, 626 bp, Homo sapiens
aatagtgggactccattctcaaaaattctgattcatcagatattagagagttagtcccaggattccaaatttttaataagcactcaagagaattctggtttaagtgagctggaccaaacactgagaagcattgtcatagggatctctggctcctagttaaaaggcattgcctcagactgccttagagctccaatgtttctgtatatattttcaaaattaattattatctttctcaatttcactctataaagaaaactcaagttccccatcaaatgaattagccattttggagcaaaaatcaaaagaaaggaaagaagatttttgttttgactgagccagtttggctggcttcctatcctggcatcaycagttgagtattaaatttccaagtcactgggtgacagtatgcctggcttcatcccagtatgggcattcatcagctgcattgtacagtaagtacagtaagaactgtcttgtaagaacgggctagacttagtgagacaatcctggtttgttctgaagagcataatcaaatgagtgattgcaaatggaaattgagatcagagccagaaaaggggtcttgagcagcagatttgtgatcaaggcaatgctgcccaaagagggca

SEQ ID NO: 669866 - DNA, 626 bp, Homo sapiens
aatagtgggactccattctcaaaaattctgattcatcagatattagagagttagtcccaggattccaaatttttaataagcactcaagagaattctggtttaagtgagctggaccaaacactgagaagcattgtcatagggatctctggctcctagttaaaaggcattgcctcagactgccttagagctccaatgtttctgtatatattttcaaaattaattattatctttctcaatttcactctataaagaaaactcaagttccccatcaaatgaattagccattttggagcaaaaatcaaaagaaaggaaagaagatttttgttttgactgagccagtttggctggcttcctatcctggcatcatcagttgagtattaaatttccaagtcactgggtgacagtatgcctggcttcatcccagtatgggcattcatcagctgcattgtacagtaagtacagtaagaactgtcttgtaagaacgggctagacttagtgagacaatcctggtttgttctgaagagcataatcaaatgagtgattgcaaatggaaaytgagatcagagccagaaaaggggtcttgagcagcagatttgtgatcaaggcaatgctgcccaaagagggca

SEQ ID NO: 669867 - DNA, 626 bp, Homo sapiens
aatagtgggactccattctcaaaaattctgattcatcagatattagagagttagtcccaggattccaaatttttaataagcactcaagagaattctggtttaagtgagctggaccaaacactgagaagcattgtcatagggatctctggctcctagttaaaaggcattgcctcagactgccttagagctccaatgtttctgtatatattttcaaaattaattattatctttctcaatttcactctataaagaaaactcaagttccccatcaaatgaattagccattttggagcaaaaatcaaaagaaaggaaagaagatttttgttttgactgagccagtttggctggcttcctatcctggcatcatcagttgagtattaaatttccaagtcactgggtgacagtatgcctggcttcatcccagtatgggcattcatcagctgcattgtacagtaagtacagtaagaactgtcttgtaagaacgggctagacttagtgagacaatcctggtttgttctgaagagcataatcaaatgagtgattgcaaatggaaattgagatcagagccagaaaaggggtcttgagcagcagatttgtgatcaaggcartgctgcccaaagagggca

SEQ ID NO: 669868 - DNA, 631 bp, Homo sapiens
caaatctccataaattatgtcctgcctcatagacaattgtcatttccaaaagtcaggcgcgtrtgtctgttcagggagcagtctggagtgaatgccctcccctctctggttttggatctaactggctggcaggagggagtaattttagctcagttgggctgggggcactggtagccttgctgctagaattaatcctctcactcactgccttcagagcagactttttgctggtttcctaggaggaaagtctacatgcccaaaggcctgcccacctgcctgccctcatattcatttactcattcgtatttttaatcatgaattctttgtctcttccttgaacacctatgagccaggcatggagctagatactgaggatacataagtgagagtgagagtgggagagaagagaagagaagacgtcttaccagggcacaataggccaggacaaaccagacttagcttggcaagggccagggacacctgagggtatcgttgcatggaaaggggtatcaatgaacccaagatggcaaaagagaaatgaggaggagctgaagcatcccagaaacaaaatgcacatgccccaaaaaggttgcatgggtaggccagatctctcactcactcataagcacca

SEQ ID NO: 669869 - DNA, 631 bp, Homo sapiens
caaatctccataaattatgtcctgcctcatagacaattgtcatttccaaaagtcaggcgcgtgtgtctgttcagggagcagtctggagtgaatgccctcccctctctggttttggatctaactggctggcaggagggagtaattttagctcagttgggctgggggcactggtagccttgctgctagaattaatcctctcactcactgccttcagagcagactttttgctggtttcctaggaggaaagtctacatgcccaaaggcctgcccacctgcctgccctcatattcatttactcattcgtatttttaatcatgaattctttgtctcttccttgaacacctatgagccaggcatggagctagatactgaggatacatragtgagagtgagagtgggagagaagagaagagaagacgtcttaccagggcacaataggccaggacaaaccagacttagcttggcaagggccagggacacctgagggtatcgttgcatggaaaggggtatcaatgaacccaagatggcaaaagagaaatgaggaggagctgaagcatcccagaaacaaaatgcacatgccccaaaaaggttgcatgggtaggccagatctctcactcactcataagcacca

SEQ ID NO: 669870 - DNA, 631 bp, Homo sapiens
caaatctccataaattatgtcctgcctcatagacaattgtcatttccaaaagtcaggcgcgtgtgtctgttcagggagcagtctggagtgaatgccctcccctctctggttttggatctaactggctggcaggagggagtaattttagctcagttgggctgggggcactggtagccttgctgctagaattaatcctctcactcactgccttcagagcagactttttgctggtttcctaggaggaaagtctacatgcccaaaggcctgcccacctgcctgccctcatattcatttactcattcgtatttttaatcatgaattctttgtctcttccttgaacacctatgagccaggcatggagctagatactgaggatacataagtgagagtgagagtgggagagaagagaagagaagacgtcttaccagggcacaataggccaggacaaaccagacttagctyggcaagggccagggacacctgagggtatcgttgcatggaaaggggtatcaatgaacccaagatggcaaaagagaaatgaggaggagctgaagcatcccagaaacaaaatgcacatgccccaaaaaggttgcatgggtaggccagatctctcactcactcataagcacca

SEQ ID NO: 669871 - DNA, 1328 bp, Homo sapiens
atgggataagttaggaaggccaacatttaaataattttgaggctctccagaccacaccattccatcaagatgatactcagtgaagccgcacaaaatgggtacctgagacttcataagtaaggtctcaggatctcactagaaaaagtcatttccctgtaatcctgtgctactgtattacacaaccacaacaaaccttacttctctccacgccccattccacttgcttagaacaggggacagccctttgtataatttctacatttgtagtacagctgacacatggatgatctttattttaggtttatattcgtactttgatgatgaccaggcaatttttctctcacctagtccagtcttctaatttttaactgaactctcaagggtaatctgtttttattcctgtctcttgtttttttggcctccctatctctcggtttctcagtctctgttccttttactgtttctctttctcttatgcaaacacacacacacaccctgatccaatccttcagtgtcttaattcaggtcctaaaccttccagtgagatttctgacttagcatctgctgagccacaattcacatgtgacgctctgcacttcttcccaggtacgtttcagctgcaggctctgtattattttggtgtgttatctgtacacagacactcacggcaaaagaaattactcactcgtggaaagagatgccaaacccttaattcaaaaacaccaaatgagtaattctcaaagcatatttttctccttcaaccaggacattttaattatcttgaagtaaacaagaagcctcacaagggttactcaaattgttctttcaaaattttccctcccctatacctaaggatttccacctgccctaaagttcttcatgaagcgagcctttgtttaccacccatgtgataaaaagcccataaaaatggggaggtaaactttgcatccatttctagtcccaaattggcctgaggactaaagagagcccagaaataagcaatgacccatctctttggctaagtgtgcactgacttggcccaaatggtcaggcttcctgcctgtagctacatagttagttgtgataaggagcaaagaaaaccaaacagcttcaaggactaaagcatactttytactgaatgatttgtgctgttagtgttgcagtctgataagcaaaacacatttcccttgccagtggaggcctattaccagagcagaggcacagggagctgaaaacatttcacacacagtagcaaggaggaaagacctgtaggtgggtggtttcaaacacgcatctagcctaactccgaactacagctgccaacaaaa

SEQ ID NO: 669872 - DNA, 594 bp, Homo sapiens
tacttgccttttattgtcgaagatattgcatatttattatacctttttgagctagtttaatgaagtggaaagagctaaatgatctgataaaatcagctagtgcatctctcactggagcatcttgaggatcgaatgaaatgatgttacagttcttacagtttttatcaagctgaaaactttgcaagggtcccttaaattcactgagctttgatagcttggggttaggtagcaactggacaatctctacctttctcactctaatgtttgttattcttataaactttggttggtaagtagagttggattttttwaaaaaattatttcactaaagaggaactggagcaaagaaataaagtgagtggcctcaccaactgaggaggaaaatctgaacagtccaatactttccccacagctgtgcttccctcataggtgttagaagctgatggggccagctgtggcccatgagaaaggccctgtggccccagacatggacaatcattcacttcatacaaattactttagagtagagaacagtaaattgagaccccagattcaccatacgggagctctgatctcaaagagaagttaccaaag

SEQ ID NO: 669873 - DNA, 594 bp, Homo sapiens
tacttgccttttattgtcgaagatattgcatatttattatacctttttgagctagtttaatgaagtggaaagagctaaatgatctgataaaatcagctagtgcatctctcactggagcatcttgaggatcgaatgaaatgatgttacagttcttacagtttttatcaagctgaaaactttgcaagggtcccttaaattcactgagctttgatagcttggggttaggtagcaactggacaatctctacctttctcactctaatgtttgttattcttataaactttggttggtaagtagagttggattttttawaaaaattatttcactaaagaggaactggagcaaagaaataaagtgagtggcctcaccaactgaggaggaaaatctgaacagtccaatactttccccacagctgtgcttccctcataggtgttagaagctgatggggccagctgtggcccatgagaaaggccctgtggccccagacatggacaatcattcacttcatacaaattactttagagtagagaacagtaaattgagaccccagattcaccatacgggagctctgatctcaaagagaagttaccaaag

SEQ ID NO: 669874 - DNA, 594 bp, Homo sapiens
tacttgccttttattgtcgaagatattgcatatttattatacctttttgagctagtttaatgaagtggaaagagctaaatgatctgataaaatcagctagtgcatctctcactggagcatcttgaggatcgaatgaaatgatgttacagttcttacagtttttatcaagctgaaaactttgcaagggtcccttaaattcactgagctttgatagcttggggttaggtagcaactggacaatctctacctttctcactctaatgtttgttattcttataaactttggttggtaagtagagttggattttttaawaaaattatttcactaaagaggaactggagcaaagaaataaagtgagtggcctcaccaactgaggaggaaaatctgaacagtccaatactttccccacagctgtgcttccctcataggtgttagaagctgatggggccagctgtggcccatgagaaaggccctgtggccccagacatggacaatcattcacttcatacaaattactttagagtagagaacagtaaattgagaccccagattcaccatacgggagctctgatctcaaagagaagttaccaaag

SEQ ID NO: 669875 - DNA, 3485 bp, Homo sapiens
catattttacagtattaggaagctctgtattttccaaagccaagaactgtggtaaatctgaatcagttcaggctctctaagcaatatgatgacattgactttttatgttaattaaagggttcttggtgcctactgactcttgaataatgatctggattgactgatgtaaaaggtggatatgagctgcagacttaagactttttctattactaatgctgccatctttgacatggtagccaaggttaaagtactttcagtgagctgaaagaaaaacctctgcagtaattgctctttctatatctttgaggatggtcatgacggaggagataaaggagcaaagctcttttgaatggaaagcaacaggcagtttgcccctggctgaaactcaaaaaaatgtatctcatgtcattgtcagtccttattatattattacttttatggtgttgcatgtgtaagctacagaaacaagttctgattggagtctctggcatcagtacaaaggagagtctcagtggcggttttggtctttgaagccaattaatatctgataaaattgttcgtgactccacttataattagtaggcttctacttagcagaggttaaaaatgccatcactactaaagaacatcaaatcccttcaagatcagggatttcaataacatcctgtctaatgtcaacaaaacattcaaataatgagccaagtaaatacattgtttaaataaaactggtgcatacagaaatatgaaaatcagcaccatataagaagaatccataatattcctaaaaatattatggacgtgtagttaaagtgactttacccaacaaaatgatctgtgtctggcaaaagatgttcactcaccattggtcataatttgcaacatttgtcttatatttgcaaatccccccttcatatatatatatacatacactatagtgaatggcagcattatatcacaatatcgagagagacagagagagaacatagtacatagtatattgtatacagatatagggtatgtacatagtgtattatatatactatgttatatttatataatatattggctggaaaattggaaggcaataacatatatcacaagtcactccaaaatacttataaatgtgtttttgaagaaaacaggaaaaatgtgtttcaaagaaaaaaggatcttattttaacttaatcacaaattactaaattcagaaaatttaaaactcataaatcattaacgtatgtcaatattcaaatatcaccaattgtctaataatgtccccttccaatatcaatgcatagtcaaacattataatacacgtttgaacaaagaatttcaagcgatagaatagctaattcattattagctaattcattattattttctaataaattttatacatttatttgcaaacatgactggtgagagagtacacaaaatagaaagccataaatatatgcaaaatttgacataattaaaagttaaggtggctttttttgaatatgttttagtatacatttttctggaagttaaatggtagttctcttgtgcattactggacaagcaaacaatagctgttccattgtggactatgtataaaacaacttgcaatgaattattgaagtgaatatatgttgcaaagctacttttcacccagttaacataaagacataccttgtttttctgagtaagtaatctataccccaaaatgcacctgtgccctcagctgcctgctggaaaaaaaaaaaaaagtatggttaattaactaggatgtggttcataaggtttgtgatgttatctgcctaaggagtatggaatcaattattcacttttgaaaatgagggaaatgacaaataaaatgtactttgggggaatttgaaatatttttctttcaagaatatatccaaaggtggaagtcagcatgacatcatgtagaggctttgcaaacatagcaggtaaaactctgaaattcttaacccgatgagaacacacataatatttgaaaaaagtttaagtgttgatttcagatttctaattatctaactgattttaggcatatgtgcctgaagatgacaatgtccaataatttttttaaagatataccaagtgagtccttaagatgaggcacgacactactatattatatgtcttagcatgctaatttctaaaygctaaatgagaacggttctagcaaataaaatgttagcacagtctcgaatgaaaggttagtgaagcacaagcactcatacttctctaccattcttgggtattcaacataaaggaacatagaatttgcaacatttgcatggtatctatactgatcttccatgcaccacatggcattttctatttcagtatgcatgaataaccattattttgtaagttggttccatttttcagtacagattatagactctcgttattgccacaacaatcatttgactacacatcatacaggtgtaatacaaacatttattatactatatgttgccttctaatatgaagaacctttataccagacatcttagagacgctgaattaatatcagaattaaccccaaatcctgattagaccattacattagatacatatggaaaactatgagtttaacgttcatctgtgtcaccaagtattttaaaaaacctctactcaataaagcaatgataaaggtgtcactagtataacacttgttccctctacaactatgttgactgtttcttagaaattatcttcccatgggaaatcacttattaataatcagttactccaggacaaagggaaatatggtgtctggtaaggtggatccttccatgacagtttttaacttcttacaaactttaattgcaaggtcacttctctaacatagtgtttatttcatagtactcaattataacgattcaaaagacgaaactgtaatttgacactaatatgatgaaaactgtggttctaaggaatataaaggttttaggactacagcttaaatcactgtcactgagaccagtgtttaattagttttagataccttctctacttaaaactgatttattaacttgctggagctttatttttcattaccaaagtcccagactgattaacttgttctatgatctgtgtaatcaattgtttatcatgaattgaaccaacagctgcagaacacagttggaaataacccaggagcaaaggaagacattatttcaggaagagaaaacaaaatagaaggaataaagccaactaaaatgtaacttacgcaaagatgagtttaaaggtgtctctagtgtgctacttcttagctattaacaagaaacagtctcagccctcaggtcctaaagtaaacacactgacacagtgtaggagtaaattatctatgagagtaaaagacaggttgaagatcttgttttacatgaagtttaattatgttatttaaaaaacgatgttcttcatatttttattgttataattgtatatatctgtcgaaccttaagtgattgtta

SEQ ID NO: 669876 - DNA, 776 bp, Homo sapiens
ggttaaaatacccataatgtaaaatttaccatgcaaactatttttaagtgtgcattttgctggaatgaaatacattcacgatgtttcactgtcatcaccactattcagccacatcactcttcaccaagtaaattgtacctgatgaagtacaatttgatgatgtacttgatgaaattgtaaagtttcaattgaaactttayaccaattaaagaataatttcccatttccatctcccccaccccttggaaaccagcattctactttctgttttatgtgtgctctaaggacctcatataaatggagttgcatagttttggtcttcttgtaactggcttatttcacctcgcataatgtcctcaaggttcatctatgttgcagcatgtctgaatttcattcttttgtagggctgaataatattccattttatgtatatacaacattttgctgcctattcaacagtcgaaggacacaagtttcttttatagtttagctattgtgtaaagcagctataaacataggtgtaaaaatgtctctttgagaccctgctttcaacttggagggttatattcccagaagacttcaatgggaaaagcaaaatctctttaaaaattggtgctgtcatggacataaggatgaaataacagactgaggacaccaaaagaaaggaaatagggagaggggcaagggttgaaaaagctacctattggatactatatttactatttggtgatggattcaccagaagcccaagccccagcattagacaatacaactat

SEQ ID NO: 669877 - DNA, 628 bp, Homo sapiens
tagttatgaaatttttcaggcaatgattgaattcatttcaccctttcttaccttctaactctaatgyataaattctttattgaagattaagactatggaaatgtacatttatctagtagctaaataaagtgtgcatgcagttctaccacctcctaagtactcaccttggtgaactcaacttgtctcatgttaagagccatctgttaaccccctatcactaaaggaaacctcaaaatatttcatagtcatatctttggaaatagcttgaatgtatatccttttaaaactcctgttattatttcagacttaccacaatcaagtttaagaatgcaaaataacgaaaactatatgctcctatcagagtcatatgttaacaaaccaagagaataaatagaacaaaaatagagatttatacttgtaaaattaatacataataatatatctaaaagtgtgtgttaaagatggacttttatctatggtaaaacatttaactgaaacttgtgaaaaaaagtaaaattcatgcctcatgcattataccaaaattctagataaactacttcttaccttagaaaagaaggataagctattatataaaaatatcagcaaaatattttttatttaggaggaa

SEQ ID NO: 669878 - DNA, 2083 bp, Homo sapiens
caaacaccgcatattctcactcatagttgggaattgaataatgagatcacatggacacaggaaggggaacatcacactctgggtactgttgtggggtggggrgaggggggagggatagcattgggagatatacctaatgctagatgacgagttaatgggtgtagcacaccagcatggcacatgtatatgtatgtaactaacctgcacaatgtgcacatgtaccctaaaacttaaagtataataataataaaaaaaaaaagaagttctcactttgggctgcaggtttgcaggtttcaggcttttcagcttgaaggtggggtttcaccagggacccaaccctgtgtgcctagaatttctctgcctcctgcctctatcaatagtattcaatgaataaaacctgtttctgtcttagacatgcataaagctatacctcaagtggtactatttatactctgcatttttgttattttacatgcatatgtctctcctacccaattagattgtagattgcttgaggtcaggaactactgtgtcctcacatcttgtactcaacaaagcttttcacactcaatgttacatttgataaaagtacctagttactgggaatagaatatctgggcttcgaagcagtcatttttattctctataagaaagaatatgcatttctattaaggtagaattgatgaatgatttactaacaaggcatatcaaccactttggaaagtaagcacagaagacagtgctattttcacttttgaatgtaaaaaatgaggctcacaaaatttaagaaatcagcctgtggtcactaagatataaaactatttaatctaaggtataatacaaatctaaaacttgagcatgatccctccaagcagtcaaaatggttggcagttacagacctatacttaatactcacctgactgccagacattactctaagttatttatatgtactaactcacccgcttcaatgactttatgaggtaagtattttatattcttctattttctgatgaagaaactgaggtaaagcgagtaaaagttgtgagtctaagctttcaacaactgttaaacagcagatcaagaagccaaacccagagagtcttatcagcagccgtgttctttactactacgcaagtgcagctcttctttctcacgctaaacatgaaaagtaaaaaatgagagatgataaatagtacagcttacaaagccactcatttgtagtgtgttagagaaaacacactgtaaaattgtaaaattaaaaaaaaattaagtaagttagtctaaacttaatgcatttttttcttagatatatgcactcaaaaagaacaaacaaggtagaaagagccttgtggattttgcagaaatcgttgagaattctaggaagaagaactagcaaatgctggggccctgcaaagggaggagctcagtagtttgaaggagcagaaggaagtcagcacagctgaagcagtgaatgaaggtgagagttcaaggtatgagataaaatagcatgcaaggactaaatctcatgaggccttgtagatcattaataagattttggctttaacactttaggtaataaaaagctattcctttcttcaaaaaaaggattctgaagaaaggaattacaaaaatatgacttactttttaagaggaacattggatactgtattaaatatagactgaaagggaagagcagaagcggtatgaccagtaaagagtatattcaataatccaaacaagaagagattgtaacctagattgggagaagagcagtacaggtgatgagatatatccaacagtattgagtaaagcattagatgtgttgtgaaataaaaagaagaggatcaggaatgactccaggttcttttggcttaggcaattttgaagaaaaacttgccattaactgaaataagaaagactgaagcaggagaaggactgcggagcagagatcaagagctcaaattgcctgtgtgtgtgtgtgtgtgtgtgtgtgtgtgtgtgtgtgtgtagattaaaatgtttattacacatgcacatggggctttcctcaaattcaggagaaacatatcatattaggatc

SEQ ID NO: 669879 - DNA, 2083 bp, Homo sapiens
caaacaccgcatattctcactcatagttgggaattgaataatgagatcacatggacacaggaaggggaacatcacactctgggtactgttgtggggtggggagaggggggagggatagcattgggagatatacctaatgctagatgacgagttaatgggtgtagcacaccagcatggcacatgtatatgtatgtaactaacctgcacaatgtgcacatgtaccctaaaacttaaagtataataataataaaaaaaaaaagaagttctcactttgggctgcaggtttgcaggtttcaggcttttcagcttgaaggtggggtttcaccagggacccaaccctgtgtgcctagaatttctctgcctcctgcctctatcaatagtattcaatgaataaaacctgtttctgtcttagacatgcataaagctatacctcaagtggtactatttatactctgcatttttgttattttacatgcatatgtctctcctacccaattagattgtagattgcttgaggtcaggaactactgtgtcctcacatcttgtactcaacaaagcttttcacactcaatgttacatttgataaaagtacctagttactgggaatagaatatctgggcttcgaagcagtcatttttattctctataagaaagaatatgcatttctattaaggtagaattgatgaatgatttactaacaaggcatatcaaccactttggaaagtaagcacagaagacagtgctattttcacttttgaatgtaaaaaatgaggctcacaaaatttaagaaatcagcctgtggtcactaagatataaaactatttaatctaaggtataatacaaatctaaaacttgagcatgatccctccaagcagtcaaaatggttggcagttacagacctatacttaatactcacctgactgccagacattactctaagttatttatatgtactaactcacccgcttcaatgactttatgaggtaagtattttatattcttctattttctgatgargaaactgaggtaaagcgagtaaaagttgtgagtctaagctttcaacaactgttaaacagcagatcaagaagccaaacccagagagtcttatcagcagccgtgttctttactactacgcaagtgcagctcttctttctcacgctaaacatgaaaagtaaaaaatgagagatgataaatagtacagcttacaaagccactcatttgtagtgtgttagagaaaacacactgtaaaattgtaaaattaaaaaaaaattaagtaagttagtctaaacttaatgcatttttttcttagatatatgcactcaaaaagaacaaacaaggtagaaagagccttgtggattttgcagaaatcgttgagaattctaggaagaagaactagcaaatgctggggccctgcaaagggaggagctcagtagtttgaaggagcagaaggaagtcagcacagctgaagcagtgaatgaaggtgagagttcaaggtatgagataaaatagcatgcaaggactaaatctcatgaggccttgtagatcattaataagattttggctttaacactttaggtaataaaaagctattcctttcttcaaaaaaaggattctgaagaaaggaattacaaaaatatgacttactttttaagaggaacattggatactgtattaaatatagactgaaagggaagagcagaagcggtatgaccagtaaagagtatattcaataatccaaacaagaagagattgtaacctagattgggagaagagcagtacaggtgatgagatatatccaacagtattgagtaaagcattagatgtgttgtgaaataaaaagaagaggatcaggaatgactccaggttcttttggcttaggcaattttgaagaaaaacttgccattaactgaaataagaaagactgaagcaggagaaggactgcggagcagagatcaagagctcaaattgcctgtgtgtgtgtgtgtgtgtgtgtgtgtgtgtgtgtgtgtgtagattaaaatgtttattacacatgcacatggggctttcctcaaattcaggagaaacatatcatattaggatc

SEQ ID NO: 669880 - DNA, 655 bp, Homo sapiens
aatagagcagaaatatatgggagcaaaaaaaaaaaaaaaaagttgagcactctgagattccaaagaagtaacatcttacgtgatataccaaaaagtggccttttctcttgatggaaagaaggaagtgtagtgtccccaaataccagaaagagccttgggaagatctttgggataaccctgggaaggtggagatactgatatgctcacagacagtgagactcctggggagaggaacaggcatctctactcctttttctttttctttctttttttttctttttttgagatggagtcttgctctgtcacccaggctggagtgcagtggctcgatctcggctcactgcaatctccgcctccagggttcaagcaattctcctgcctcacgctccccagtagctgggattacaggcgcccaccaccatgctcagctaatttttgtatttttagaagacgaggtttcaccatgttggccaggctagtctcgaactcctgatctcaagtgatccgtctgcctcggcctcccaaagttctgggatgacaggcgtgaaacatcactcccggcctccattttytaactagaactttgctcccttcctctgtcgtttctgctttccctttttcttctgccttctctctgcgtatgccccactcagtt

SEQ ID NO: 669881 - DNA, 1355 bp, Homo sapiens
tattacattattttgtgtattattttctatgcaggttcaaggcaatttcattatcataatggaacactttattttttttttacaaaaaggaaagatgtatttatgcttgaacataacaagttgaaatgataagttctttattaagttaaaaatgacttgataaaaggttttaattgtttgaatttgttttttcaagtttcaaggataggaaacagtataaatgttgtccatcaatgtcgggtggtacaactgcctgtgataatctgaacttcagaatagttctttttagaaccaggaaggacttactgaaatgtttaaagcaatagacatttatgtcttttgctgggttttggactaatcagttacttctgtcattgttgaggtttggcccgagataaatgggatagagaatgctgaacaacaatctgactgttcagaaaaatgagtgactcttacatcttggagataatttgtgacctcagggtcacaataaaagagtaaagggggtatgcttttatagccctggccatctggatccattaagggctcaactgcaagatactcaccatcttttcaaagtttccttaagaagtcatgttatttttatgaggacaccaaacatgttttcttcctgagccaaatattttcttactgaaatatgtatctccacagagtggaaatacataacatgcaaatataaccttttggtcgtgttagaaagttcatattctcactttgtaacaagacattcaaatatcaaagaatataataaattcatttgtgtcttttgttaattttgcttgtgaattgccactaaaatttatgaaaatcacagtgcatgcttagtttcaaaagtctactctaaagtgctatttgtacagcaagcctcgttagcattaatttctagaatgaacttgagaatgcacattagttcaggctactgaccagatccgttagccttttgcggcagtagttctacctggtggaccacacgtatgctatagttttattctaaggttttcaccaccagtgtaagctgccacattggaaagcagtgatgcaggttttagaactttggggacaacattattggtgatgacaagataagcaatacaaatacaattccttcattattggagccttgaaaaaagtcagtatttctggaaggtactacagatggggctttaacgtttattaggctcagtgactggtggcgattagtcataatgtacaaatttgggtaaaagaaggcagctgagatctgggctttataaatagtacttcatgctgctgagcacttcttttgagagattgacttgttagaaattgacygctaattaatattattttctgcg

SEQ ID NO: 669882 - DNA, 2476 bp, Homo sapiens
tcttccagtatttactagccggtgtgtgactatccacccagctgaccaggctaaaactgtggcaattctttcttattgttctttctcctttctttttttttttttttttttttaacatcaaatcaaataagcaagtcccctagagtctacctgagaaatacatctatatgtctctgtccctacggctacctccatcactggccacaatttttacaaaagctgcctcacagttcctgacatcactctggtctagcccttcagttcactctacacactgtggttagaggaatcttttaattttctaaacactgtaaactttatcaagctattctcttgaatggctacccactatctttaggagcagagtcaagccatatcgagtcatttatgagaggccacctgcctctccaatgcctccaggttcctcatcccaccctcgcaaaccgagaggatttccaccatctaaatggtgtttttcaaattttgttttggaactcactgaagacctgaaattgatttagtggcacttacttaccatttaaaaaaaatgaattgcagaatattagtatcaacagcagcagctaatacccacaaagtacttactttgtaccaggaggagttctaaaatgctttgtatctattaattcccattagcttcaaaacaaccctgtgaggcaggtaccattattatccacacttcacaactgaaaaaagtaaaacacaaagaggttaattaactggccccacacacaaggctggtgagcatacagctgggatttgaactcaggacatctaaatttagagtttaggttcttagccactaccctatgctgctgctcaataaatacatcacactccatcacactgagaagggcaggtatcacttgttctgtgaaatgtttactttagctatctgtgcccatacctgtacacgaggttgcaaggtaggatgtatttcttcttacagatgatatcaaaaaaggttaaatcccactgctgcaaaacactcctttttcccctttgagttcagagaaagaagtcaaaacctctttcagacctgttttaatgtcatttttcagaagaaggcagatggcttctagtctgcgctaggcccatttgtggcaagttcccacaatgtccccatctccctttcacgaggccctggagcaggacctacttactcagtgactgccacgtctcctgtatccaccactaaatccccaacacctctaacactgccaaggatgtagtaggcactccagtaaatatttgttgaatgtatgaaacaaatggttttacctctcaattactaaaatcatcacacctgctccaaaaccaagttttwaaaaaaaaaaaaatccacctgcccatcattagaaaccatttttgccaggtgaaaaataaaaccctcagaatttattttactgcccaggtgaattttttttttttttttttttgtgcaaggcaggtaaaactttatgtgaatgtgttctgcctaagtgattatcaatgctttgccactgtgctcaaagtaacatcaggcaactggctattgctacggcctagaaagaacatcgaaggaaaatttccatcctgttagagtacctacttgcagttgatctaaactttactttctcaaaattgttccagaatcaagatatcctgagataaattaaacagatgtcatcactttctcaattaagaaaatgattttatttttgacactgagcttaagacctccattccaaaaaaaaaaggaaaatatttttactactataaaaggagataaaatttttaaaaaggaaagaaatctgaaattctaggaatagaaaagctcaacttgggatgttttcctaatagctaaaatcagctataagagcaggaattcgataagatgtttttttttttcctctacaatcttcagttagtggaaatttacaaaggtcaggtttgaggatcccagacagatgtgagacaggtgatgctgagcttgaatagcctcccaaggagcaaagccctgagaggtgagccagtgtacccaccaaggatcaggcaattgtgagctgggcggcactgacagggcatgggctgaggtggagaggaagacaaggagacagaggaatgagcagaggatgcaaaaactgctaacacagtctgcggaaaagacctcataattgttttgatagggaaaaatcagaggcagcaatggtggagcaagatagaggtacaaggtggcatgcagtaaggaaaggggaaaatgagggtgggaacaggaagaggcagggaatgcgcagcacagagccacctagaaggaagagagccggaggaaagagggcattgttttaaaatcgtcctcgtttgtgttctggagcagggatggctgccatcgcacctacacagacaggtctgagagtctgtgaagagggagaggaatgagacagctggtaagtttttcattagcagtaaaaatccataa

SEQ ID NO: 669883 - DNA, 1236 bp, Homo sapiens
agaaagagaaatacatgcccttaaaaaaaaagcctaagaaaatattttgaaaatcacaggaaatgctttttaaaaaaccatgcagtgctgaacactttaaaatctcagagaaacagtggtgacgggaatagacactcacttggaagatgactctaacctgaaggaacacgtctctcttctaactcactccacctcctataagaaagattctgagtaactcataaaatggaggaaaatcctaataaatccactgtgtcaacctgattaaaaataagcagcacttcctccagctcttaataactgcactgtacagccatgaatatacatggttttaaatatacataacttcagaatagaaatttaacactgacatattttattttaaacttttttttcttcctcatgccaccagtttaagagcactgacatattttaaaaggagaatagaccttcattacaaatacagatgggtattttaagaaaataatctaaaataagagaaacagttcaccatttcggaatttgtttgcttacatgcttgacatgatttgttttaagttaaatcgaacattttatttaaggtcatgtgaattcttaaagagaactggtgaattactaagctctgataggccatttctttaatctaacaccatcctgaggctggcagcccactgagtgctgagaggataagcaaaaagagaatgtggagaacagctctaggcacggtggccgatggaagggtgctcactggcttctttctgaaacagcctggtggacatcagtaccaaaagcggagcctccgccttgagcagagggctcaggggaagaagtgtcaaggcagaggcagacrcagactgagagaagtgggctgaagtctactttcagatggaatcctggttcccctaagatctttctgctaaaaccaaagtttttaaaaattggtgtttgtgggcctggtatggtggctcatgcctgtaatctcagcactttgggaggccgaggcgggtggatcacttgaggtcaggagtttgagaccagcctgaccaacctggtaaaacttcatctctgctaaaaatacaaaaaagtagccgggcatggtgacgtgtgcctgtgatcccagctactcaggagactgcgacaagagaatcacttgaacctaggaggtggagtttgcagtgagccaataacgcgccattgcattctagcctgggcaatggagtgacactccagctcaaa

SEQ ID NO: 669884 - DNA, 630 bp, Homo sapiens
tctataaaagtttctgtaaaaaggtcctcaggagacaaattcagcaaagcttggaggatatttgagttagatacacgggatgatttacccaatctggaaggacttgcgtgtagaaaagcaatacaaaagataaacaaaactaaaagctcttttttaaaaagataaataaaactgaaaaaattctttagtttaagagaaaaaggactcaaataaataaaattaagaatgaaacaggaaacattacaactgataccaaagaaatacaaaggatcttacaggactattataaacaattatatgccaaaaaattggatagtctagaagatatggataaattctcagacacataaracctactgagactgaatcatgaagaaatagaaactattaacagaccaaaaatgaaagaggatgttgaagtggtaataaaatgttttccatcaaagaaaattcctgggtctaatggctttactactaaattctaccaaacatttagaaaagaaccagtatcaattatccacaaactactccaaaagatccaagaagcaggactacttccaaactccttttataaggccagcattattctgataccaaagccaaagaaagatatcacaaaaaaagaaacaa

SEQ ID NO: 669885 - DNA, 925 bp, Homo sapiens
ccggaaaaggtacgcaatttctgaaaggcagggaggctccagatggcatacagatggatggattggtgggcggacagatggaaagatgagttgatgagaggcagacagatcaatagttaaatggttatcactatattagacttagatgcattggaaattaatgtatacctaagaatagtaagaagattctgaacatcatgaaaagtttccgaatttaagctagggaaggcctgaaagaagtcattcagtttgatagtttgatattagaaggtgttggtgatctcagcacattttgagaaagattggctccgttggtgaggcacccacgatgtcacccatacaccttttcttctgtgggtgtcctttgattaagcaaactacggaacactatttctctttccgtggaacatatctaggccaaagtgattaaaatgaggatagttgcacactagatctcactcctgaagtttcattttcccttccacaaaagaaaaggctaaaattcttttctatgtgaaagttacagcagattttaaaatgtgattctttaaaaaaccatctcattagtcactgacagtaaaaaatcacctcctgttggtctcaatcaaacattttaaaggctatatctgattttacagtatttaaaatctgttcttaaacatttactattgctagcccatagctcttcttttttcttgcatttctaagtaagcattagtgtccagagtaacacaaatgraaaacagaccaatatcaggggctcatgatcataactggtctcagctgagtatgagcggcctgtgatgcaaatgtaatgagtgcttaggacaagggtgatgaagcagaaagcttaacaaactgcactcagattgcctggctctgcattctagatacacttcacactagtttttgagaccttgggcaa

SEQ ID NO: 669886 - DNA, 1552 bp, Homo sapiens
gccagggacctgacttgcacaaggccaacgccctgcatctggctccaaaaccagcatccttgaccaccgcctggcacccggaggcctcctcatggtcaggacctggcgttgctgctggtcttccctgaacgcctaacatgccaggagtgtgctgtcctcccagctctgtgggggtcttacaactgagaaagccatagaaggtgaaagaaacgctcatggtctcacgggaggagagagcgaaaaagtcttaattgctgggcttctttgcctgaatgaagggatctgcaggagccacgggtatttgcactaccaagttctcatgcttctgattttcctccaggtaaaccaggatgcttacttcaagtttcttgttttgccctacagtgaattttaggattgtaatttacctgcaaggtttttgtttgtttgttttgttttgttttttcgagatggagtttcgcccaagctggagtgcaatggcgcaatctctgctcactgcaaccttcgcctcccgggttcaagcaattctcctgcgttagccacccgagtagctgggattacaggcacgcgccaccacacctggctaattttgtatttttagtagagacggggtttctccatgttggtgaggctggtcttgaactcctgacctcaggtgatccgcccgcctcggcctcccaaagtactgggattacaggcatgagccaccgtgcccagcctacctgcaaggttttaagcaattcactaggagccatgcacggtgctagaatcagcatgagagtcaaagtcagatttgaatcaggactagtttatcacaggttaacctcaaggaagtcactcttctgtacccaatgttctcagaagcaaaataaggacagtgataatgcccatcccaggagtggaggcccagacttgttaatgtctgaaaatacttcagaaatgctagagcactgtacagataacaatttgagtaatatttttggtcaaattattctagtttaacacatgtattcttaaaaaatggacttgtgattccttacagctaaagagaatcaagtccacccttagcatgttagcggtcactgccaggttcctgctgcacgaggaggaagtcctccatggctgcttttctataaacaattccatttctcgttgtagaacacagaagtaaatacatcraatttttatttttagtagcaatcagagcctactaaacttccttttgactcacctcttgattgaattcagagtaggcagaaaatctcattcaatctcttcactgtgtgggtgaggaaaccgaggcccaagggtgatgaagccacttcctcaaaggcactccgtgagttggtggtggggctgccggcaggatgaagtgctgttactccaggccagagccactcccccgcttcatcagccatgctgtttcatgggtgcacctgttctcatttatgtggacgttaggaaccgtgggtctctcgtgttaagccataggcctttaataaagacgtgtagagtaaagcctgaatccaagaattgacatttaaacatgaaa

SEQ ID NO: 669887 - DNA, 610 bp, Homo sapiens
taacaaggaacatattcatgttttactttcatttttaaattaaagtttatttatgtgctttcaaaatttaatttttaaaaacatgtttgtatacttttagctcaggtaatacacacatgtgattcaaaattcaaaggtacaaaagagtaaagtatgaaatgttaatcttcctgtttctccatcctctggtcacccaactccccttcttggagaaaccactgttactccccgataacagagatgaatgtttctagaagtcaagaacgcaaattgggtttcatttctgtgattctagtatcttgtaaatccttccagayattctactcatgtaagagaaagttcattaaagttagtttctaattatatttgtaaacatgaatgtgtgctaaaatctcctttgaccatcactcctaacccctctcttccattcctatatttataatattagggttttaaaaacatagctagctggagaagaaacccaacttttccaaatttattagtcaagaacagcaggcaaaagttcaaagttcccagctagcctgttacttagggcccacactttgtgcacaggaaatgctatgaaaccatattataaagagtcattgca

SEQ ID NO: 669888 - DNA, 615 bp, Homo sapiens
ataaatcctgagcattagaaacacaggcataatctgttagcattataaaatgctacaaataaaatgtagaggggtagagtacctttgaagagaacattcaggaaaggcttcctggagcacagattcaggccccttcttcattttccgtaccttcgcctggtccctcacacaagagtccactggcagtctaccttatagccttaatcttctttgtgtccctaagctctgctaaactttacaacaataaatagtctcagcaaaacatgattcaagtcactctttcttacatcttgccccaggataaggataggctaaccaagtattggatgccggggtcttcgatttctttctttctttctctctttctttcttctttatttctctctttcttgtttctctctctctctctctctctctttcttcttyttttttttttttttttgagacggagtcttgctctgtcgcccaggctggggtgcagtggcgtgatctcggctcactgcaagctccgcctcccgggttcacgccattctcctgcctcagcctcctgagtagctgagacaacaggcccccgccaccatgcccggctattttttttttttttttttttttttt

SEQ ID NO: 669889 - DNA, 2384 bp, Homo sapiens
atcctcattgttacgcaatgcgtgactgtagttgaagagataaagtttttctttgtgcaagtattccagctaatgaaagtagaaatatttaaagtaaaataccattttttgtaatctctaataaaaggtggattttggtattcattattatggctgttaacactacataaacatgaaagagcaaaacaccatataagccatactttgtcaataaactgcatccatgtctgatgcagaaatgtaataaatggtaccagcaagttgcaatttgttaaatccatactttaagatactctactggaaagatgtcacagttttttcaagaagtaaattgcaaagaagtaatacgaggcaatgtgacacatcaaccatttgcaagagatggaatacatttgctttcttattgatataataagcagaaaacaatttatgaaaccatcatagaaatttgaaaaaatagaatatttgactatgatattgagaaactatttaggatattctaggcctgatgatgatatagagtttatttagtgtttatttttttaaaagcattctcctgtttctaagacacagactaaaattgttacaggaatatggtatgatgttggtagctggttcaaaataatctagagtgaaaaaggaagaaagtataggaatatatgtgaaacaatttgaatttatcatacagcattctctttattgtatrttttcaaaatttggcataataaaagtttttaaagtttacaagtttctatttaatccctactgtagtcatattaagggaaaaaacatataatgaaatagcaacaaaatattccataacatatatcaacttgacacaaaccttaggattacttgctttaatgtggaattttaatcatattgtgtttaattttaaatattaatttcttagtgttctgcttagattgaaaaattttttagcactattcattttaagagttgctttattgctagataatggcccataaaataagcataacttgtttaatttacttttcatcgcctacttaccatttaagttttttctacttttcagtgttataaataatactgaaataaatactttttgcatgtaatttttttttaaccaagctcatttattttagggcacatgggtcttttataaatccatctctttggaataattcccaaaatttaaataactgaatataaggtctcatcattctaaatattactgatacatgaagacaaatcactctctgtagatatgaaaaatgcatttggtaacaaaaaattgaactttctgtaacaatcacctaaacagggagtgttctgtttatcttacataatgaaaagttcagggctagtagcatggcaccatgcatggtgtcatcagtaacaagtcccttctatcccttctgccatctctaatgctaccaatggtcatgattggttgctgaagcaccatatctgagggccagactggaataggatggaaggggcaaaactttctttcaaagcattatctttctatgcagataggcggctaattcctaaaagacttccaacttctcaacagtcagaattgtgttgcaaagtcatgcctgactagaaggtatgtaggaaaatatgagtttcattttctaatctgcataaaaaaagataaggtagatgaaaatggaccccgagtgagccaattcatagtataagagcctgggttcaggaatcccaaagtgcaaatgacaaccagtctttggtacaatcagtcacattccacttaataattacatataaaatgctatcttgtttttcagctgtatccattaagctgtcaattagaataattttttatctttattaattttattatttattttctaaattacctatacatgtgttttgtcattacctaactaggtaatttttaaaacatttatatcaacaactttatgggtggcagatgttactgtacttaagaggactgagaggtcagaatctgaaattaagttatctggttttgtgttattgctcaacctcttagcaatcatgcaaacttggaattctcctgggcatatagcaagagttctgtacattttagtttattgttattttcattgtttttgaaataagaagcaatcactagaaaactgaatttttagaaaaaaatgttgagaatttctcgaaataatgttttctactcatcctccatggaaagagctttagctctggatatattttcctactttttggcattcgcaagtttttcataatatactccattatacagtgaactgatgagctcagaaaataccgggtaaactcttcagttttaaagtgttaataatagacatgaagtatcatcattctgctatagaatagtttgatttttaaccaaaaccact

SEQ ID NO: 669890 - DNA, 603 bp, Homo sapiens
accttggtaagtattttggtttcatctgaaaatttaaaattatagtaggtagtgaagaactctttaaaattacattattgtcatgaaaagctgcatttaataaaatgttttcaggccagtcttgctgctcttttctggttaatactgtaggacagcaaggtagctgaaaccaaaagccatgatttatttttagagaccataattctttttcttaaacaaatttgtgctcaacatcagtaggtagcacacaagtggggacagtgcacctcaatgtattttaaattgggataaaacagttrttataaaagactcttctttacatacatagtaattcttcatttctaggatggaaaattagtgccaatgactgttttccacaaaactgactctgaggacttgcagaagaaacctctcttggtacatgtatatggagcttatggaatggatttgaaaatgaatttcaggcctgagaggcgggtcctggtggatgatggatggatattagcatactgccatgttcggtgagtcagtatattttacctggcatgtaagtgctagaccattgtgagagatgtcaagaataacaatatatatcagggaaca

SEQ ID NO: 669891 - DNA, 625 bp, Homo sapiens
tgacttcagaccaacaccacactcagaggcaaccgctttaccaggacgtcggcaccagcaaccaccatgtggaaagtcgcacccctgccacaaacccctattctgcatcacttagaggggtttgcttccctgcctgaaccctaccataaaacttcatacgaggcygggcgcggtggctcacgcctgtaatcctagcactttgggaggctgaggcaggcggatcacgaggtcaggagatcaagaccatcctgactaacacagtgaaacctcgtctctactaaaaatacaaaaaattagctgggcgcggtggcgggcgcctgtagtcctagctactcgggaggctgaggcaggagaattgtgtgaacccgggaggtggagcttgcagtgagctgagatagcgccactgcactccagcctgggtgacagagtgagactccgtctcaaaaaaaaaaaaaaaaacttcatacggatgtgtcatggggtcaaacagggcccggcacagagtgaatgctatattagtattgggaagctaagttttttaatgtagagaagccaagatgcaaaatgcaggctttttctgagcatgggttatttctaccagccaccctttgctcctaggactggc

SEQ ID NO: 669892 - DNA, 635 bp, Homo sapiens
ggaagtctgtgatgaattatcaacccaaggtcatacctattgaaatggaagaacatggacctcatagcacttttctgtccctcccatcccacagagtggtgaagctgtacaagatgtggaatggacaggtttgttgatatggtttggatgtttgtcctctccaaatctcatgttgaaatgtgattccaaatgttggaggtggggcctggtgggaggtgacttgatcatgggggcagatccctcatgaatggtttggcaccatcctyttgatagtgggattattatcaagttatttcatgtgagatctgattgtttaaaagtctggaacctccttgttcccactcttgctactgctctcaccgtgtgattccttggctttgccctttaccttctaccatgattgtaagcatcctcaggccctcactagaagtccagcagatgttggtgccatgattatacagcctgtagaaccatgagtcagttaaacctgttttctttataaattacctagcatcaggtatttcttttaagatacctgaaaatgtggaagcagctttggaattgggtaatgggcagaggttggaagaatttggagggctcaggagaagactagaagggaaagtttggaatttctt

SEQ ID NO: 669893 - DNA, 450 bp, Homo sapiens
aaacacaatcctacattaaatgatccagtacggcataaaaggacatggactaagtgttccgtcagttggatcattcagtacttaaaggctactttcattggtaaccggaggcacagacaacaaggacatctagttaatgattgggcatcattatagagggcaatttagaagtatatgcagagccaagcccttcctacaaagttgtcatagtaaaatctagtcatccctagattatactgagaggactactattgtcctctaaaccgtaccacatggttttcaaaagttgtctattaagacagtggattaatcattaatctcaccaacttccaattgcaattacaataatttctacacaaataaacatcttattgtcttctattagtattgcatgttttaataatatgctcctaragttcttaaatttcagtatcaccctctcctcttctc

SEQ ID NO: 669894 - DNA, 1473 bp, Homo sapiens
agtcatttttttatttatcttaggtaaactttttatgttagggaaattagccctttgtgatatgagttgtgaaaatttgtttcccggtattccacatgttattttgatgttgcttattatcttttggtcatgcagattttttaatgcagtcaaatttttaatctttgtgtttcttctttttgtttagtgttgttttgcttttcatcatgcttagaaatacctttcctagtcagagattatacttttaaaatttttccctttatttttaaaatagttttatgttttcatgtttacattcaatttttcatctgattgaaatttatcctagcataggataagagatatggaaccaactttattcttttccagatggctcctccttttcctcttattgacttgaaatgccaccttcataatctagtaattctcagatttaggagctattgctggacttacctactctgttccattgattcgtctactataattattataattttataagagactttaatatctgatagttctagtccatcactattgattggttttttccagtttgcttctctaatttttaaaaatttaacctctggttagcattattttaaaatatgtcttttcatatgttctataatattaattattcaggtataaacttgaaatttgactgagttgggaaaggactactccttttttaaatcattcatattcacaggtaaaattacaggctaattatttcaaaaatatcaaggacttgacatgcatataaaactggattttatacatgcaactttttaaggaacactctttacatttagattgaaacaatagtagtaatatagcatccctcaaaatttgttttacatacatattgttcatgttctagtataattatatgttcatttaattacttgaaagcttttggctggacacagtgtctcacacctgtaatcctagcactttgaggggccaagctgagaggatcacttgagcccaggagttcaaaaccagtctggtcaacataatgagaccacatctctacaaaagaataatttaaaaattagctgggtatggtgtcacatgctcatagtcccagctactrgggagtctgaggcgagaggatcacttgagcccaggagttcaaggctatagtgagttgtgattgtgccattgcactccagccccaggcaacagagcaagaccctgtctcaaaaaatgagtaagtaaaaataaataaagcttttgagactgtttttccattttgatctcattttcttaatattgctgtaaagcagtataaaaactgcaataattgacttcaaatgactgtcttattttaggcctaagtacaccctgtgatactgctcattgtaaaatcttgggcaagtcacttctgtgctcctcagttccctcatgtgtaaaatgaggggtgtttaaaattccgcaattctaagaactaagaactaagagaga

SEQ ID NO: 669895 - DNA, 1473 bp, Homo sapiens
agtcatttttttatttatcttaggtaaactttttatgttagggaaattagccctttgtgatatgagttgtgaaaatttgtttcccggtattccacatgttattttgatgttgcttattatcttttggtcatgcagattttttaatgcagtcaaatttttaatctttgtgtttcttctttttgtttagtgttgttttgcttttcatcatgcttagaaatacctttcctagtcagagattatacttttaaaatttttccctttatttttaaaatagttttatgttttcatgtttacattcaatttttcatctgattgaaatttatcctagcataggataagagatatggaaccaactttattcttttccagatggctcctccttttcctcttattgacttgaaatgccaccttcataatctagtaattctcagatttaggagctattgctggacttacctactctgttccattgattcgtctactataattattataattttataagagactttaatatctgatagttctagtccatcactattgattggttttttccagtttgcttctctaatttttaaaaatttaacctctggttagcattattttaaaatatgtcttttcatatgttctataatattaattattcaggtataaacttgaaatttgactgagttgggaaaggactactccttttttaaatcattcatattcacaggtaaaattacaggctaattatttcaaaaatatcaaggacttgacatgcatataaaactggattttatacatgcaactttttaaggaacactctttacatttagattgaaacaatagtagtaatatagcatccctcaaaatttgttttacatacatattgttcatgttctagtataattatatgttcatttaattacttgaaagcttttggctggacacagtgtctcacacctgtaatcctagcactttgaggggccaagctgagaggatcacttgagcccaggagttcaaaaccagtctggtcaacataatgagaccacatctctacaaaagaataatttaaaaattagctgggtatggtgtcacatgctcatagtcccagctactggggagtctgaggcgagaggatcrcttgagcccaggagttcaaggctatagtgagttgtgattgtgccattgcactccagccccaggcaacagagcaagaccctgtctcaaaaaatgagtaagtaaaaataaataaagcttttgagactgtttttccattttgatctcattttcttaatattgctgtaaagcagtataaaaactgcaataattgacttcaaatgactgtcttattttaggcctaagtacaccctgtgatactgctcattgtaaaatcttgggcaagtcacttctgtgctcctcagttccctcatgtgtaaaatgaggggtgtttaaaattccgcaattctaagaactaagaactaagagaga

SEQ ID NO: 669896 - DNA, 2064 bp, Homo sapiens
tgcatgtttgccagtagctattccacataaaccttcaactaagtccccctggccctccatgtctccccaacatgaagccccctccagccaacaggggaacagtatcagtgagatacaaaccaccctacttacggatggctccacactttacctggtacccacccccttctgactcaggagcctgtgcctcctcttccaccctaagtgtcccatctctactcctttgcttcccctcccaccaggttcagaagaaatgagaacccctctgactcctttccttctagatgtggttgcattaactccctggatttccttctagagcaggggttctcaactttggctgcagtgcagagccggcctgggccccactccagagtctgatgtcattggtttggggtgctgcctgggcacgggcattgtcacaggatcctccatgactcactgtgcagccaagaccaggaccactgttctaggatcttctcttgttccctcttccctaaggctcttgactctgccactatgtctgcccttaagctgcaatttcatttctgtagttactttcaccttgaaaattacagagaagcagaaggcacctgctgcccctttcttctttatccattgcatctagcctccatccagacagttcttctacagcaggtccttgaaatgacaccaatcaaatattccagccttagctctcttatctgcaacatgaagataatagtctctcctgctgatgaaggtgatgaatttgaagatgctccctccacagaacaggcaaaataacccaagtgagccaggagcccaagagagctagatctccctcatgccttcactccatgtccatccccacagtgcagagagggtccctgactccaccaccaccaacaccgaggtgggggtggcaacaaggacgctccatcatccaaaagccagctcctcagaccaggacagagagcagcttgaagacccccttcacatcttgcccacaacacactggagagtcatcctgatccttctgcctctttggccgctgctcccaactcaaaccatctctcatgtgcccggccttcccggtgcccacccttcctggtgcccaaaacatcttaggctgagctgtgggttgctccactggttctcaatcctgcctgagctctggaatcccctggggagcttttgaaatcccaatgttagagatgctagtggtctgtggtccggcctgggctactgacagttctccaggctctcacctgtgtggccaagggtatgaaccactgtgtctatcctattatttgcacaacgaagcagggacctttgttatctgatgcatctgccagctaaaatctgcctaggaaaacataaagtacaggcaggaaaaagccagcctacgtttaggaagaaactacctgtcagtgtcattcatcaaaaagctaaatgcaaaaggatacaaggcccatgcaaagatgtcgatctcaggttcaacctcgtggcagaaacactgggtaggacacaaagtcccaggaagctctgaacagagccaagtgccccatgggcagtgactcatgtctgaccttaacaagagctggctcacaaccacgggctagggacataaggccattagaaagtactcagagggcacagcacatgtacacatgcacactcccacgcccagaagcatgcctgagtgggacaatgacacctgaaagctragagctgatccctacactacagctggatgtgtagcaatcattacagggtatctttacgttcatttttttaaaaactccttagccctattaaattcagctgcctagaaatactgaactcacaagtagcatgataacgttgaagagcctaacctaacagatcctatgaacgggcaaacctccctcttttctaagaaaatatattaaagtatctcatatcactaaggcgctcttttgaggaaaagaaaaaaataagagaaaaagaattccaaaggactttgttgacaaaaatataaagtaatattctattccatcctttataaggttgttatcagctgtgcctgtttgaacgtgtcat

SEQ ID NO: 669897 - DNA, 1426 bp, Homo sapiens
atagggggaaaaaatccatgctgaaagaattaccagatttactttcattttaaataaattcctcttggccgggcgcggtggctcacgcctgtaatcctagcactttggaaggcctaggcgggcagattgcctgagctcaggagttcgagacaagcctgggcaacaatggtgaaaccctgtctctactaaaatacaaaaaattagccgggtgtggtggtgcgtgcctgtagtcccagctactcaggaggctgaggcagaagaatcgcttgaacccaggaggtggaggttgcagtgagccaagatcacgccactgcactccagcctgggcaacagagcgagactctgtctccaaaaataaaaataaaaataaataaattcctcctttmtccagtgccacctaaaatgtggagtcaagatcataaaatccttctgccttcacttctagtaaatgaattctttacaagctaccagcctctcaataattgtcagctcttcctaaggagttccaattaggtggaaaaggccaccctccagtatcccaccacctgcacaatttgtaccttatattatctcctggagtgacacagtccgtgccttgtttgattatctcattacaaatacattgcccttattatgctctcactaaatgcaactcttggaaacctcaaggcttttattaatagattatcagcccctaaagatatatcagttatttaacttaatttttcagatgtatgatcctaaaatcaaactacttcctttacttgtggtttcttccctattatgcttttaagaaaaaataccaaagcatgtaagactctggagccaacatctgggacttctatagaatgcaacaggctgccctgttaagtcaaagactttcactgttggaggagacaaaattcaccaacaaactcagctatatgagcaggactccagccaacctcagacagactagccaagaaatgcaacatccatgctggacttcatcagtttccaaccttctgataagagtccttctgagcaagccttgtaaccccacatgaatccttagcctgtcagtttcacctcccccagtcattaggacactcttccaaaggcagtaggtgattcactggaggcacagcatgagcactcacactcaacatttgaaacaaggtgaagctccctttactcactacgatttaatgtggtgagaggagccgtgtgcccaaatcctataaaaacacctttctcctgagcaattcttaacccaagctgttgtttaaatatttcatcttttaattacacatattaaatactgcactaatagataagtgaatgtttcttatgtccttcactacaatgcaaatgtttttacacctttattctcagaagccattattcagtttttttaaattgtactttgcttttcttctgtcaaacc

SEQ ID NO: 669898 - DNA, 1422 bp, Homo sapiens
taagtgtttctaatgaaactgcgctaccctttaatgaatatcaccgccctcgctataacaaagaatgtacaatatttggcatgatgcactctggaaaaatcgcttaatatgtaatgtgagtgatggctgtctttgtgagccaagctctgttttcattttgtgggagtaattcagctcaacaaatatttttcaagtgcctaccacgtcccaatcaccgtgctaggcagtgggtatataaagttacccccaaccccaaaatgagtggggggtcctgttttgtaaacactaatgagctcttcaatgggcacatgctgggcaccctgctggtgttttatgcacattaacccatatcatcctaacagggttccggcaagggaggcccactgtctgtatccccatttccagatggggcacagaggtcaaagaaatttgcccactattatgcagccagcaagtagacagtcagggttcaaatccaagccgtcggttgcagagtttctgttcttaaccgctgtcccatacagcagcatcagagtcacagcacagggaggtgagttcaatgctactggggtcagcccagggactgcggaggcacagaggaggggcacccctcccacatagtctagggggtgcagagaaggcttcttggaggggtgggtatccttatggggaattggagccggggccaggaagaggagaggggacaagcgacacaggccctgagcttaacgacagcatggcgtgtgtgtgcatgcgtgtgtgctcgcgtgtggtaggtgtggcaggctcctgcatcgaaggtgggagataatcaagagatgaatccagagaagtgggcagacgtcagcccgaggcacagcgtgggcgctacccactggaactcaggaggagggcgggaaggaaggcctgagtcagggtttttaggaggagcagtaattcaaacatttcaggatatgccgcctggaggttctttgcagggatgagggaaaaaaaaaagaaatatagacgagaaaaaatacagattactatttcaaaattccacctagcctggctttttttccctctgtcattagatctatttgtgccgtctacttaagggtggagggtgggaggagggagaggagcagaaaatattactattgggtactgcactgaattcctgggtgaggaaataatctgtacaacaaacccgtgtgacgtgagtttacctatgtaacaaacctgcacatgtgtctccgaacctaaaataaaagttaaaaaataaaaaaaattaaaaaataaaaaggctacagagcattagaaaaaaaaaagatctatttatgcccatttcatcatttagcccccaaagtctgaggttcttatgttttttgttgagtgcgggatgttcctgctgacatmataataataataataataataata

SEQ ID NO: 669899 - DNA, 1422 bp, Homo sapiens
taagtgtttctaatgaaactgcgctaccctttaatgaatatcaccgccctcgctataacaaagaatgtacaatatttggcatgatgcactctggaaaaatcgcttaatatgtaatgtgagtgatggctgtctttgtgagccaagctctgttttcattttgtgggagtaattcagctcaacaaatatttttcaagtgcctaccacgtcccaatcaccgtgctaggcagtgggtatataaagttacccccaaccccaaaatgagtggggggtcctgttttgtaaacactaatgagctcttcaatgggcacatgctgggcaccctgctggtgttttatgcacattaacccatatcatcctaacagggttccggcaagggaggcccactgtctgtatccccatttccagatggggcacagaggtcaaagaaatttgcccactattatgcagccagcaagtagacagtcagggttcaaatccaagccgtcggttgcagagtttctgttcttaaccgctgtcccatacagcagcatcagagtcacagcacagggaggtgagttcaatgctactggggtcagcccagggactgcggaggcacagaggaggggcacccctcccacatagtctagggggtgcagagaaggcttcttggaggggtgggtatccttatggggaattggagccggggccaggaagaggagaggggacaagcgacacaggccctgagcttaacgacagcatggcgtgtgtgtgcatgcgtgtgtgctcgcgtgtggtaggtgtggcaggctcctgcatcgaaggtgggagataatcaagagatgaatccagagaagtgggcagacgtcagcccgaggcacagcgtgggcgctacccactggaactcaggaggagggcgggaaggaaggcctgagtcagggtttttaggaggagcagtaattcaaacatttcaggatatgccgcctggaggttctttgcagggatgagggaaaaaaaaaagaaatatagacgagaaaaaatacagattactatttcaaaattccacctagcctggctttttttccctctgtcattagatctatttgtgccgtctacttaagggtggagggtgggaggagggagaggagcagaaaatattactattgggtactgcactgaattcctgggtgaggaaataatctgtacaacaaacccgtgtgacgtgagtttacctatgtaacaaacctgcacatgtgtctccgaacctaaaataaaagttaaaaaataaaaaaaattaaaaaataaaaaggctacagagcattagaaaaaaaaaagatctatttatgcccatttcatcatttagcccccaaagtctgaggttcttatgttttttgttgagtgcgggatgttcctgctgacataatmataataataataataataata

SEQ ID NO: 669900 - DNA, 794 bp, Homo sapiens
ttgtcatctaattttactttggagatgataaggaattattaaacacaatgatgaaagcattttgtagatcggtgaatatacatattttgtgtcatgagtggggtatgtgcagctgtgaacatctggctctctgccagcatgccccccaagtgttagtctctgtagcatctgatgagtagatcttcccgacatcacagaacccagcttttatgtgtttgggaacagtataaagaaataattattcatttctttggctgagtgttttgatcaaccaacatgtcttctaagtgtattttgtctgtgaagcctgaaacattctaatcacctagtaaagacaaagcaacataagaccttaatttggatccatatactcagctgattagcctttaaccatagcagtctgtttatcacctttttttcctgctggttattgtctaattaaggacccaaaaaaatgaccatccctaaaagcaaatagcctgtacctctgggaaaaattaaataactgtcttccccyactctccctggcatataaatggcatttcatagctgtagatgttgcaatgatatcagtgtattcagatgagactgaaaagaccactcctgacaagcaattctttcctcatcttattgaatatagattgcccggtagtttgttgttgtaaacaagcagtagagtctgttattattaaacatctataactttgctcctgaccttcaccattgtaagacagtagcaattttttttttttttttttttgagaaggagtcttgctctgtcgaccaggctggag

SEQ ID NO: 669901 - DNA, 1249 bp, Homo sapiens
ccgtcagtcccgatgaggacttttctaaagtggggctcagcttgggagttgctgcagggcctgaggttgtgcctcctactctgaaagagttctgggcctggacacctgaggtcttacctgcctgcaattccagcctcctgctttgtaaactcaagccggagctttcacctggggctgttgtacctggagtctgagggcccctccttggggcagcagggagggtgtggctgaraaaaaccagtggaaatggacgcgcacagcctcttcaggagcctccacttctcctgtaactgggactgtgagccccagggagggacccttgagaatcttcttgcctccacatgacctccagcaaagttcttgaccctgtccgtttctatagactggggaatttgtggaagaaagggaaggagaggggagaagggaggatcgctccagacaaaggcgggtcttttccatctctggagtcccccaccccttgccattcacctgggcaccgggagaatgaatcacttgttgagaggctgtaagcatattgagtgcagggcttggagcctgcagccccccagggctaagtgacctttgtgacttggccactgcacctaacctcccacccaaaatgagaggcctgtcattctctcatggtcagaggatatctagggtgtatttgtttctttccgcgtgaataatcatctgagggcctgctgccacatccaagcctggactggccacaagggctgcctccgggagcttctaggataatggggaggaagaggcgtgactggacagtccagttagtccgtgttgtgacagggcttgtgatggaggtgagcatcgagtgctgcagggcatagaaagggtccccaacccagcgtggggtggggtggggggatacaaacccttggaagaggtctgggttgtttgattgcatcctcctgggactgaacatgggcctttgcagaatgacccagtccttgttcccagggtggggacagagccacccgctagtcacaataataacgtcaggagctgcagcgcagtagtgagactctcaccgagcattttccttttgattggcattagtgcacactcttgctatttattccctcagtagatctcagaagtccaatgagccagctccgattcattacgattcacatttcacagatcagaagcttgaagctcagaggagtgaagccgcttgccttagcccacacagctagtgggtaggggagcccttgaccccaca

SEQ ID NO: 669902 - DNA, 639 bp, Homo sapiens
cccacatctctacacacacccacacaaatctgtgtaaatgaacttgacattttcaaagaccttaccttaaggtctcctctggaaagcacagccacccaacctgttattttaagaaagaagcatttatctcctagacccactactgagggttcagggattagaaggcagcctctatgtgccatagacctttggagggagctckgaaagctgaatttcctaatatgaacagtgcttcggcaaaagtggcctcagctaactaatcagtggcctctaggacttggctgtttacattttatcctctgtttccttccccactagtagaaactgtgggaccagcaagtctaaactaatcatactgacaagggaagagaaaagagtaatgtgaaaatgcagatgcaaataagtattctcagaaagagacaattaagcagagtgattagatgtgcttccctgatcatccgtttctgcctctttccattgcaccttgaactccctaggtgtgtattcttccagtggtcccacctgtcaccttactgttcaaacattattcggttctcttggtctccttgtgccctcattctccatatttggcaccatttttttcctgccagccaaaaattcttaagcaggtgttaattc

SEQ ID NO: 669903 - DNA, 639 bp, Homo sapiens
cccacatctctacacacacccacacaaatctgtgtaaatgaacttgacattttcaaagaccttaccttaaggtctcctctggaaagcacagccacccaacctgttattttaagaaagaagcatttatctcctagacccactactgagggttcagggattagaaggcagcctctatgtgccatagacctttggagggagctctgaaagctgaatttcctaatatgaacagtgcttcggcaaaagtggcctcagctaactaatcagtggcctctaggacttggctgtttacattttatcctctgtttccttccccactagtagaaactgtgggaccagcaagtctaaactaatcatactgacaagggaagagaaaagrgtaatgtgaaaatgcagatgcaaataagtattctcagaaagagacaattaagcagagtgattagatgtgcttccctgatcatccgtttctgcctctttccattgcaccttgaactccctaggtgtgtattcttccagtggtcccacctgtcaccttactgttcaaacattattcggttctcttggtctccttgtgccctcattctccatatttggcaccatttttttcctgccagccaaaaattcttaagcaggtgttaattc

SEQ ID NO: 669904 - DNA, 634 bp, Homo sapiens
gcaattttaacaccattcctcaccactgtgacaaatctgacaggtttacaaattagtattctgggactctcaaactggatgtccatgttttgtcagattctgtgaaggatcacaaacgtgcttggtgattgctgcaagtaatacaatagctcacaaaaaacaaagtacactctcaggaaactggccccttggggaaatattttgggcaacagaaaatgctgcccactgtcctccccaccaccaactcttgctaagaaaagagggcatactccacagccrgtgtgtgatgttccccttcctgtgtccatgtaccctaaaacttaaagtataataaaagagggcatactcagccatggaaaaatcaaggtggattttcagggaccccaaggtggcagaggccaagtagcctcccactcctgggtgtcttctataatctatactggcctgagccagcagagcataagactcacccagctctggccattaaaaccctacttcttttagtgaaatctttccctctagggctttcccccattagtcctggagcaacccttgggtgctgcacacaatgaatctaaagccactttcaaacaccggcccttcaacttcaacaacagcagcagggaagcaatca

SEQ ID NO: 669905 - DNA, 575 bp, Homo sapiens
tagccagcaaccaaggtaacaggtttataaaaggaactcagcatttgaattcagagtcactgtgtacagcccagttctgtctatgacttgmaaatttgatcgatgtttttgagtaaaagtaaagagagataggagaaaatagtatagtatagtaatgatagttgtaattttcgtggatgttccaagagcttgatgagagcctaaattctgaatttaaacatttatcttccaaatgcttggggcagtggaatcaacaaaaggcattctcagaaaacataatgaggctaatcttcctacagttactcaacacccagcattccaaggagctcatatggcttccccttaaaacttgtgggacatggatgccatttcagcagcaacacaaagaagccaatgttagcaacttgtctgagccccacaacccggtgtagagattgtgctgtctctcttctgattcttttccctaaactattattgggtcgatttcaatcgccttcagtcactttctaggtttctttcccagaagctgtgtttttacctgcttccggacctgggcacatctgggattctatttg

SEQ ID NO: 669906 - DNA, 602 bp, Homo sapiens
acactctgtaactgtctgcttacttatcacctttcctctaattccatgctggcctatgtggctcttggacactaaactgtaactagtatgactgaggaactgaattcttaatttcaattgctacaaattgtaaattaacactgatatctgaatcagttayagtaaaaatttaaagatgtttggaacaacttgggtatgtgagtctactttttcaactgtaagttgatgagatctaaatacagatgagaattaagcatctgaattgagatgtgctgtaagtataaaatacattgaattttgaagacttagtacaaaataaggaatataactttttagataggttacctgtagaaataatatttttgatatagcagtttacataaactatttaaatcaatcttatttataattcagtcactttttagtatagccactagaaatttttaattacatatgtggcttaccttatatttctattaaacagcactgacctagactataaattctgtggagacaggaatcacaactgtcttctttacttatttttaaaatttttatagcattcaccatgcgttgggtgttaatctatgcattaactagga

SEQ ID NO: 669907 - DNA, 584 bp, Homo sapiens
ctcataacaacctatggacactttttaaatgaatgagtatttttaatatctgtattttacagatcaggaaacaaaaacagagaatgaaataatttgcccaaggtcttacactctcctttaaagtaaacttatagaaatgaattctaactcaggcattcaccctctaaacccgacaagcttgatagaaacctcaaactacccttaaattgaaaatatccttatggcacagacctgaaataaacctccaatcaagaatcaagccaataattcagtagaagattcagagagcwaaagatttggaactgaaggcagagggcagaacccggaatgattctctggagtgcagaagttctttttaatggttcgagagtcttggaactgcttgggccacatgtgacaacacaggtccttgagacttcagagggtgagtgtgggagagactggcactgccacagatgagcctggaggaatccgggaatttaccattgtcctcttcacaattgtttttaggatcaagcctagagataaagagccatggtctctgaaaataatgttgaaaacacacttacaacacagcagaagca

SEQ ID NO: 669908 - DNA, 584 bp, Homo sapiens
ctcataacaacctatggacactttttaaatgaatgagtatttttaatatctgtattttacagatcaggaaacaaaaacagagaatgaaataatttgcccaaggtcttacactctcctttaaagtaaacttatagaaatgaattctaactcaggcattcaccctctaaacccgacaagcttgatagaaacctcaaactacccttaaattgaaaatatccttatggcacagacctgaaataaacctccaatcaagaatcaagccaataattcagtagaagattcagagagcaaaagatttggaactgaaggcagagggcagaacccggaatgattctctggagtgcagaagttctttttaatggttcgagagtcytggaactgcttgggccacatgtgacaacacaggtccttgagacttcagagggtgagtgtgggagagactggcactgccacagatgagcctggaggaatccgggaatttaccattgtcctcttcacaattgtttttaggatcaagcctagagataaagagccatggtctctgaaaataatgttgaaaacacacttacaacacagcagaagca

SEQ ID NO: 669909 - DNA, 621 bp, Homo sapiens
tgattcaaataaaaatgtgtttgtataagaaaaattattttctgctgagaaaacacatagtttggggtaaatttatagttctggccaggtcattaatatctggttgtcaaaaagtattggtttgaacaaaaatatgttgtaataaaaatgcattgttttgaagaaatttattggccccatgaaaacctattcgattcagaaagatatgttgatttcaatgcaaaatctatttgttttaagggagatagtgctgggcgctcagcttttctgtgggaaatcttctctgtgacattgatgttcacttagaaaaatgaaacatgggcataattagtggaaagactgtgaagagagagcagaagtcccatttaataaataatgcttaacacgaacataacragcttcagtcttcagagcacattgacgaacatttgccaaaaatctttccaaacagccaaaagaagggtgtggctggccataattttagaggatagacactcatggaaggaaaagttggaggaaaacagaaaaaaagcagtgtcatcagatgaacaccagacaccacggtctccaagaaaaccattgctctaaataggaagcccctttacacagtgaccttggcct

SEQ ID NO: 669910 - DNA, 604 bp, Homo sapiens
tagtagtggaattttagagtagttcattaaatatcttcaagaaatttaaaaagcaatgaatggctcacatgttcttccagacatgaaaatgtgtagaaatgggtagatcatgatttttaaatcccagtaaaattgttttacactagagaaaattaaaaggagcgctgtactatatcctaaaaatttcacattgggccctttccagtccttcattcaacgtttattacctgagcccctgctatgtgataagcactgatctagaggcatttgggaagtctaaggtgactgaaacaratgaagggttacattcataaagcttgaaatagagtagcaaatttttcagtgtaatgtttctttctttttttctccttaaaatggcgtcttaacgagaagtctatatgcataacatatagactgtcactccacgccacccccctaggctgcccctgtggtacctcttcaaaaaatctggggcccatgaagacatagtttgaagaaagcagctgtagtgcattcaataaagtattagctttctgaagtaatttctattttttttaccactagctattttcaaaagagtgatgtatctatactgagtacttca

SEQ ID NO: 669911 - DNA, 645 bp, Homo sapiens
ccgtgggctgcagggcactgctatgcctmctccgaacgtttctgcaccagcgttcccgctacaccccgctttcttccttaccccatgtttactggagttgtgaggtttaggccacacttaggaaatcaggacaaagccccattgttctgcatgttcaaggccctagcagaggatttatttgcgaccctgggacccacaacggcacagaatcatcacgtgcctgggactggcctcccctggccttgtcctgacttggaaagtcgtggcaagtgacggatctcgctggagcagcgcttgttttgctacataggaagcagcttgagcgaagggctgatcgcctgcctctgggagcagagctctgaaggcgtgaggcaggctcgtcatgagcaacgccgcccgcttttccagctgctgtgggatgcaggggcacgtggcgggtgggcgttgtcctgccttctctgccttctggggcatgaaggaaccggacagaacttggaaacatgctgtaagggggcatggctgcactctttccattcttttttagtttttttttttttggtggtggttgtcttgttttttagagatggggtctcactacgttgcccaggttggagtgcagtggctcctcatagtgcagtcatggtg

SEQ ID NO: 669912 - DNA, 645 bp, Homo sapiens
ccgtgggctgcagggcactgctatgcctactccgaacgtttctgcaccagcgttcccgctacaccccgctttcttccttaccccatgtttactggagttgtgaggtttaggccacacttaggaaatcaggacaaagccccattgtkctgcatgttcaaggccctagcagaggatttatttgcgaccctgggacccacaacggcacagaatcatcacgtgcctgggactggcctcccctggccttgtcctgacttggaaagtcgtggcaagtgacggatctcgctggagcagcgcttgttttgctacataggaagcagcttgagcgaagggctgatcgcctgcctctgggagcagagctctgaaggcgtgaggcaggctcgtcatgagcaacgccgcccgcttttccagctgctgtgggatgcaggggcacgtggcgggtgggcgttgtcctgccttctctgccttctggggcatgaaggaaccggacagaacttggaaacatgctgtaagggggcatggctgcactctttccattcttttttagtttttttttttttggtggtggttgtcttgttttttagagatggggtctcactacgttgcccaggttggagtgcagtggctcctcatagtgcagtcatggtg

SEQ ID NO: 669913 - DNA, 645 bp, Homo sapiens
ccgtgggctgcagggcactgctatgcctactccgaacgtttctgcaccagcgttcccgctacaccccgctttcttccttaccccatgtttactggagttgtgaggtttaggccacacttaggaaatcaggacaaagccccattgttctgcatgttcaaggccctagcagaggatttatttgygaccctgggacccacaacggcacagaatcatcacgtgcctgggactggcctcccctggccttgtcctgacttggaaagtcgtggcaagtgacggatctcgctggagcagcgcttgttttgctacataggaagcagcttgagcgaagggctgatcgcctgcctctgggagcagagctctgaaggcgtgaggcaggctcgtcatgagcaacgccgcccgcttttccagctgctgtgggatgcaggggcacgtggcgggtgggcgttgtcctgccttctctgccttctggggcatgaaggaaccggacagaacttggaaacatgctgtaagggggcatggctgcactctttccattcttttttagtttttttttttttggtggtggttgtcttgttttttagagatggggtctcactacgttgcccaggttggagtgcagtggctcctcatagtgcagtcatggtg

SEQ ID NO: 669914 - DNA, 645 bp, Homo sapiens
ccgtgggctgcagggcactgctatgcctactccgaacgtttctgcaccagcgttcccgctacaccccgctttcttccttaccccatgtttactggagttgtgaggtttaggccacacttaggaaatcaggacaaagccccattgttctgcatgttcaaggccctagcagaggatttatttgcgaccctgggacccacaacggcacagaatcatcamgtgcctgggactggcctcccctggccttgtcctgacttggaaagtcgtggcaagtgacggatctcgctggagcagcgcttgttttgctacataggaagcagcttgagcgaagggctgatcgcctgcctctgggagcagagctctgaaggcgtgaggcaggctcgtcatgagcaacgccgcccgcttttccagctgctgtgggatgcaggggcacgtggcgggtgggcgttgtcctgccttctctgccttctggggcatgaaggaaccggacagaacttggaaacatgctgtaagggggcatggctgcactctttccattcttttttagtttttttttttttggtggtggttgtcttgttttttagagatggggtctcactacgttgcccaggttggagtgcagtggctcctcatagtgcagtcatggtg

SEQ ID NO: 669915 - DNA, 932 bp, Homo sapiens
agcctagggtggtggggagggccgaagctatagaatcaggagacctgacccatgactgaccttcacattaactgcatgaggatcactagaattacaaatgccaagcactggatgcctagatggctcttaataaacttctggggttttcagcatccattttcacagccctgaattctgttaatgctgtcatttcattatcaaaggagaaataactgttgaaaaacactttgcaaattctagcacacaaacgttcaataagatgaatggaggactctaccagaaaatattttgacctcattactaacaccaagcagtgagccaaacacacgtgttgtaatgcattttgcatctaaattgcttgcatctgcaggtggctaagctactgcatctacactgtatgttccaagaaaagtcagcatgatgtccctagagttgcttaacgtattttcaccattcaactgacaagaagtagaaaattggtctgcacagccaggattcttcaaatccctaaagaagcacatctcctgtgcagaactgttctccaaccagtaccccagtggcaaggaggtctccagagatcctttagacacatgaactacaaaaacttcaaatcaagaagtcgcattggtgggacamgtctgtaatctcagcactttcggaggccgaggcgagaggattgcttgaacgcaggagttccagaccagcctgagcaacatccctaccaaaaatacaaaaatcagccagacatggtggtgcatgccagtagtcccagctcctcaggaggctgaagtgggaggactgcttgagcccaggaggtggaatttacagtgagccaagattgtaccactgcactccagtctgggcaatagtgtgagaccgtctctcaaataaaattaaaacaacaacaacaacaaaagcagcagcagcagaag

SEQ ID NO: 669916 - DNA, 932 bp, Homo sapiens
agcctagggtggtggggagggccgaagctatagaatcaggagacctgacccatgactgaccttcacattaactgcatgaggatcactagaattacaaatgccaagcactggatgcctagatggctcttaataaacttctggggttttcagcatccattttcacagccctgaattctgttaatgctgtcatttcattatcaaaggagaaataactgttgaaaaacactttgcaaattctagcacacaaacgttcaataagatgaatggaggactctaccagaaaatattttgacctcattactaacaccaagcagtgagccaaacacacgtgttgtaatgcattttgcatctaaattgcttgcatctgcaggtggctaagctactgcatctacactgtatgttccaagaaaagtcagcatgatgtccctagagttgcttaacgtattttcaccattcaactgacaagaagtagaaaattggtctgcacagccaggattcttcaaatccctaaagaagcacatctcctgtgcagaactgttctccaaccagtaccccagtggcaaggaggtctccagagatcctttagacacatgaactacaaaaacttcaaatcaagaagtcgcattggtgggacaagyctgtaatctcagcactttcggaggccgaggcgagaggattgcttgaacgcaggagttccagaccagcctgagcaacatccctaccaaaaatacaaaaatcagccagacatggtggtgcatgccagtagtcccagctcctcaggaggctgaagtgggaggactgcttgagcccaggaggtggaatttacagtgagccaagattgtaccactgcactccagtctgggcaatagtgtgagaccgtctctcaaataaaattaaaacaacaacaacaacaaaagcagcagcagcagaag

SEQ ID NO: 669917 - DNA, 932 bp, Homo sapiens
agcctagggtggtggggagggccgaagctatagaatcaggagacctgacccatgactgaccttcacattaactgcatgaggatcactagaattacaaatgccaagcactggatgcctagatggctcttaataaacttctggggttttcagcatccattttcacagccctgaattctgttaatgctgtcatttcattatcaaaggagaaataactgttgaaaaacactttgcaaattctagcacacaaacgttcaataagatgaatggaggactctaccagaaaatattttgacctcattactaacaccaagcagtgagccaaacacacgtgttgtaatgcattttgcatctaaattgcttgcatctgcaggtggctaagctactgcatctacactgtatgttccaagaaaagtcagcatgatgtccctagagttgcttaacgtattttcaccattcaactgacaagaagtagaaaattggtctgcacagccaggattcttcaaatccctaaagaagcacatctcctgtgcagaactgttctccaaccagtaccccagtggcaaggaggtctccagagatcctttagacacatgaactacaaaaacttcaaatcaagaagtcgcattggtgggacaagtctgtaatctcagcactttcggaggccgaggcgagaggattgcttgaacgcaggagttccagaccagcctgagcaacatccctaccaaaaatacaaaaatcagccagacatggtggtgcaygccagtagtcccagctcctcaggaggctgaagtgggaggactgcttgagcccaggaggtggaatttacagtgagccaagattgtaccactgcactccagtctgggcaatagtgtgagaccgtctctcaaataaaattaaaacaacaacaacaacaaaagcagcagcagcagaag

SEQ ID NO: 669918 - DNA, 641 bp, Homo sapiens
ccaaaaccttaagtcttatactagattctttcctctgcctcacctcctacacccaaatcttgttgatcctacttcctaaacttctttcgcatcaatagtcatttttcctttgacccagaaatcctactcagaaattatctcaaggaaataatttaaatattaatgaagcaacaaacataaaagcaaaattgttcacgccactattgtacttaataaggaaaaactgaaacaacatgaccacttaagaggaggagaaagattaaactaaataacataaaggttatccttatccaggagcaatataaaattatggttcctcgcagactaactcaaaaaaaaaacaaaaaacttttaaataaattttatcktatatatttaaagtatacaacatgaggttgtgggctgtatatagacagtgatatggttgctatagtgaagcaaataaacatatccatcatctcacatagtaacccattaattttgttgttgctgtttttgagcagctgaaaactacccacttagcaagaatcccaaatacagtacgattttattaactatagtcctcatgttgtgcattagatctttaggcttgttcatcctacacatctgctactttgcatcccctgacctacatctcccca

SEQ ID NO: 669919 - DNA, 649 bp, Homo sapiens
taactcttggcttgccttgctgacactctcacctcctataaggtagaggagcggccagtgaggaattgctactagagttaaattcaaaccaagaagcgggaactatttggtgaggcagcaagaccggaccttgggtgaaggtgagttcatcatctcagaagagggtcatgaagagtgggctggtcagacttcaaaagtcttgaaacagtggttctcaggcttcagtgtggaagggtttatatacgtgaacaagggctgatacagattcccctgcagctctgcctccaagaytgattgggtactttgggagtggggccaggaattttaggtgttcttaattcagggggttcccagaaggcattttgaggaatagtgctttagagcaaacagaggtaggaactcacggcttgagacattaaagagaccatccagaaggttggaagaactcaaaaataaaattccaagttggccaccacaaaggagcccaaggaggaagaaaagacgaacctgatgaagagctactgctacacagggggccctgatgaacacaattaaaaaaaaaatcatgcagaagagctggcagatagccaacaaagaacagaaaacagttgcaaagaacactaagagtagtgccaggaaggctcagtgg

SEQ ID NO: 669920 - DNA, 649 bp, Homo sapiens
taactcttggcttgccttgctgacactctcacctcctataaggtagaggagcggccagtgaggaattgctactagagttaaattcaaaccaagaagcgggaactatttggtgaggcagcaagaccggaccttgggtgaaggtgagttcatcatctcagaagagggtcatgaagagtgggctggtcagacttcaaaagtcttgaaacagtggttctcaggcttcagtgtggaagggtttatatacgtgaacaagggctgatacagattcccctgcagctctgcctccaagattgattgggtacttygggagtggggccaggaattttaggtgttcttaattcagggggttcccagaaggcattttgaggaatagtgctttagagcaaacagaggtaggaactcacggcttgagacattaaagagaccatccagaaggttggaagaactcaaaaataaaattccaagttggccaccacaaaggagcccaaggaggaagaaaagacgaacctgatgaagagctactgctacacagggggccctgatgaacacaattaaaaaaaaaatcatgcagaagagctggcagatagccaacaaagaacagaaaacagttgcaaagaacactaagagtagtgccaggaaggctcagtgg

SEQ ID NO: 669921 - DNA, 604 bp, Homo sapiens
tgagaatctaatgcctgatgatctgggatgcagcagtttcagcccgaaaccatctctcctcctgctttgtctgtggaaaaaatgtgttccaggaaaccggtccctggtgccaaaaaggttaagaaccactgcatacaggttttccttccacaaacgaatgtgctagtctcatggaatattctggtgcatatacattgaatattctggtgtataaacatattttcatgtttagattaataacatgatattctccttcaattagtgttttcatatttttttcttttttactttgggagatcatggacaacctaatatattttatacacacaacaatgtattagatgaccagcaaatgcacctacaagaaaatgcataaataattggggagaacttcaagatccctcagaaatgtatacaaagatactaatttacaataaytcccaaaaaattagagattccaaaagaaaattccagaatcatgtctctccagtaaattttatttatttattttaatggaacactgtaaaattactaacgttcttttagccatggctaatctcaaaattcaagactttaagaaataaaagagtgaaatgggggacac

SEQ ID NO: 669922 - DNA, 2029 bp, Homo sapiens
caagcctcacagagagggcccgtgtaggttcaaagtactagagtcccagttgagactgtccttgagccaccacaccccgaaaagcagactgtgggtagagttaatattggaaatgttttctccagtcttagttgtcccagcccccggcttctagaggtatctccagctgtttaagagatctcaactgaggtagcagatatggtaaagttctaaaatgccactcctattctgtacaccctaatttccaaattcacataatttgtaaccataataaagcaattgcaatcatgtactactaaaatataggatattttaaacacagcaactttaaaagaagtattgacatattttgctacattgaagtcatgctctctgtagccaagagactctcttttcacttctttttaattaaactcatacttcctccaactcatacttgtgaaatatcattatttatgagtattgagcaaaacattattcaaaactacatatacagcatttattcctttaaatggtccatgtctttttgaaaaccttcttagctagaccttccctgttttctagttaaattcctgctaatctaacctaaaytatcagcaacatctcaaggataactatggaggaaatgttccacctcttgaaataaacaaggataaaagaaaattcatctttggcatttttaactcactgtaaaattaagtatatggagaaggtacaaatgcatatctacctgtacacatggttattactggcaaaatttgcaaaacagaactctgtccttattgctcttttatgtcgtaaaccgccagtataaaaccaaagtcttctctccatatagtatttatacactctgattctgtgcaggtctgtaatacctcataaacagttgtgtaatacagattagcttatcatttcctagaagtacacacacacacaaaaagtatataaaacattaaacacattgtgtgaaattggcagattaggagacattatactagatcattccataaaaataataatttatttcctttgttctatgaaaatataaacttcttgctatagacactggatctttatgtttccccaaaatccatatgttgaaatctaatcctccatgcaagagtattagggagtggagactttgggagatgattaggttatgaggatggagtccctatgaatgcaataagtgccctcataaaaaagaaagctcctctgttccttttctccatttgaggacacagaaggagaatgccatctattaattaagaggcagggtttcaccagacgccaaatataagcaccttaatcttggacttcttaacatttagaactgtgagaaataaatttctgttgtttataagccctcaagtctatggcattatgttttagccacttaaatggactaagactcttctcagatcattcttcataatggagaacctataacaaaaaaactatggttgcaatcttattaccataaattttctatagagttcaagacctctcattatatcacctgtatacaacaatataccaatctgttgaaggaaaaagccagtactcagtgacatatgtaattgatgtgactatattcgaccactggaccaaagaatttctaagagatttagtatttagtaaggcaatctgccaaaccactgagatggttccagtagtgatataggtgatatataaaaattaaaacccactcacccttactggcaataacacagatgctggaatcagatgactgatgttttctgtcttgcctggagctgtttatgttctgccttatttgttaaaagccagaagcatctctgagaacaatcagatgttcacgtcttctacagaaatttaatgaccattgtgtcaatttcttcacagttctcccccattggcatgctgataaatgagagtctgaagctttgacataaaaacctaaactctacctgtgtacagaacagaaacagaatgagagcgaaaaaacaactatactgaaagcaaattgaagagaattgtgaactttctt

SEQ ID NO: 669923 - DNA, 610 bp, Homo sapiens
ttgattatgatttatattgtggaaaaattatttactctttttcaatattaatgccctcactttaatatttgagagaagtacctttaaagatttatagaagttttaaaatatgcatataattatatgtaacagagaaacagaatgattaygcagatcacagactgcatcctgaagaccacaaacagccaagacagagtgagaacaaaaaaggcaaatctaatgacaaattctgtagccaaagttggaaacaatatttacataatagaataggtgggtttaacatcagtctgtactgactattttaataggctactaattaaaaaattgtaagcttgctatgaatcccctcactggccttttttgccttgtttattgtgatttcaggctttctagttcacaagcaggtgtctaaaatgtgagactgagacagaaggagttcttatttcttcatgttttttccaagacagaaaggggagtccacagtaaaaatgtgaagtatttgttggttttgaacaagatcagaagagaggtggaagaaaaatttgagaaaaggggaaatgctcctgtttctgagttatttcctgttgactttaagatgtatgccttagta

SEQ ID NO: 669924 - DNA, 610 bp, Homo sapiens
ttgattatgatttatattgtggaaaaattatttactctttttcaatattaatgccctcactttaatatttgagagaagtacctttaaagatttatagaagttttaaaatatgcatataattatatgtaacagagaaacagaatgattatgcagatcacagactgcatcctgaagaccacaaacagccaagacagagtgagaacaaaaaaggcaaatctaatgacaaattctgtagccaaagttggaaacaatatttacataatagaataggtgggtttaacatcartctgtactgactattttaataggctactaattaaaaaattgtaagcttgctatgaatcccctcactggccttttttgccttgtttattgtgatttcaggctttctagttcacaagcaggtgtctaaaatgtgagactgagacagaaggagttcttatttcttcatgttttttccaagacagaaaggggagtccacagtaaaaatgtgaagtatttgttggttttgaacaagatcagaagagaggtggaagaaaaatttgagaaaaggggaaatgctcctgtttctgagttatttcctgttgactttaagatgtatgccttagta

SEQ ID NO: 669925 - DNA, 610 bp, Homo sapiens
ttgattatgatttatattgtggaaaaattatttactctttttcaatattaatgccctcactttaatatttgagagaagtacctttaaagatttatagaagttttaaaatatgcatataattatatgtaacagagaaacagaatgattatgcagatcacagactgcatcctgaagaccacaaacagccaagacagagtgagaacaaaaaaggcaaatctaatgacaaattctgtagccaaagttggaaacaatatttacataatagaataggtgggtttaacatcagtctgtactgactattttaataggctactaattaaaaaattgtaagcttgctatgaaycccctcactggccttttttgccttgtttattgtgatttcaggctttctagttcacaagcaggtgtctaaaatgtgagactgagacagaaggagttcttatttcttcatgttttttccaagacagaaaggggagtccacagtaaaaatgtgaagtatttgttggttttgaacaagatcagaagagaggtggaagaaaaatttgagaaaaggggaaatgctcctgtttctgagttatttcctgttgactttaagatgtatgccttagta

SEQ ID NO: 669926 - DNA, 654 bp, Homo sapiens
cctctagagtagctgggattacaggcaggcacacaacgcccagcttttgattgtgtgtgtgtatttttagtagagatgtggttttgccatgttgaccaggctggtttcgaactcttgacctcaagtgatacacccacttcggcctcccaaagtgyagggattacaggcgtgagccaccgtgcctggcctggtttaatactttttttcttaaggctgttaaaaatagttattttctgattttttaaaatagatgtgtgtcttggttcttttataaattacccagtacctaaaattgggtaatttataaggaaaagaaaatttttttgcagagttatggagactgaatagatcaaggggccatatctggtgtgggcctttccaccggctgggactctgcagagtccagagatggcacgtggcatcacatggtgaggggggccgagcatgctaacatgcttgcttcagttttataaattacattaatgtatctttaagttcattgatttttttctgcgatatctaaacttttataaatcctatccaattgaatttttatttcagtgattatattttttctcttctttttttttgtttttatgttttttgagacagggtcacgctgtgttgccgaggcttaagtgtggtggtgtggca

SEQ ID NO: 669927 - DNA, 654 bp, Homo sapiens
cctctagagtagctgggattacaggcaggcacacaacgcccagcttttgattgtgtgtgtgtatttttagtagagatgtggttttgccatgttgaccaggctggtttcgaactcttgacctcaagtgatacacccacttcggcctcccaaagtgtagggattayaggcgtgagccaccgtgcctggcctggtttaatactttttttcttaaggctgttaaaaatagttattttctgattttttaaaatagatgtgtgtcttggttcttttataaattacccagtacctaaaattgggtaatttataaggaaaagaaaatttttttgcagagttatggagactgaatagatcaaggggccatatctggtgtgggcctttccaccggctgggactctgcagagtccagagatggcacgtggcatcacatggtgaggggggccgagcatgctaacatgcttgcttcagttttataaattacattaatgtatctttaagttcattgatttttttctgcgatatctaaacttttataaatcctatccaattgaatttttatttcagtgattatattttttctcttctttttttttgtttttatgttttttgagacagggtcacgctgtgttgccgaggcttaagtgtggtggtgtggca

SEQ ID NO: 669928 - DNA, 654 bp, Homo sapiens
cctctagagtagctgggattacaggcaggcacacaacgcccagcttttgattgtgtgtgtgtatttttagtagagatgtggttttgccatgttgaccaggctggtttcgaactcttgacctcaagtgatacacccacttcggcctcccaaagtgtagggattacaggcrtgagccaccgtgcctggcctggtttaatactttttttcttaaggctgttaaaaatagttattttctgattttttaaaatagatgtgtgtcttggttcttttataaattacccagtacctaaaattgggtaatttataaggaaaagaaaatttttttgcagagttatggagactgaatagatcaaggggccatatctggtgtgggcctttccaccggctgggactctgcagagtccagagatggcacgtggcatcacatggtgaggggggccgagcatgctaacatgcttgcttcagttttataaattacattaatgtatctttaagttcattgatttttttctgcgatatctaaacttttataaatcctatccaattgaatttttatttcagtgattatattttttctcttctttttttttgtttttatgttttttgagacagggtcacgctgtgttgccgaggcttaagtgtggtggtgtggca

SEQ ID NO: 669929 - DNA, 654 bp, Homo sapiens
cctctagagtagctgggattacaggcaggcacacaacgcccagcttttgattgtgtgtgtgtatttttagtagagatgtggttttgccatgttgaccaggctggtttcgaactcttgacctcaagtgatacacccacttcggcctcccaaagtgtagggattacaggcgtgagccaccgtgcctggcctggtttaatactttttttcttaaggctgttaaaaatagttattttctgattttttaaaatagatgtgtgtcttggttcttttataaattacccagtacctaaaattgggtaatttataaggaaaagaaaatttttttgcagagttatggagactgaawagatcaaggggccatatctggtgtgggcctttccaccggctgggactctgcagagtccagagatggcacgtggcatcacatggtgaggggggccgagcatgctaacatgcttgcttcagttttataaattacattaatgtatctttaagttcattgatttttttctgcgatatctaaacttttataaatcctatccaattgaatttttatttcagtgattatattttttctcttctttttttttgtttttatgttttttgagacagggtcacgctgtgttgccgaggcttaagtgtggtggtgtggca

SEQ ID NO: 669930 - DNA, 576 bp, Homo sapiens
ttcactgtgagataaatcatcttcttaaaaacctaaattaaaaaaagactatctattgagcatcyactactgtgagggcagctcaaaagccaacaaaatgattctgaagtctctgcttgctacagaaaatgttttggaacatgaaggaagagtgtatttgtgtattcttggcagggtaattccctagtaaagagttgttttgaagaaaatgtttcaagagaagaacaatacaatactttgcacctcttcagacaacttctcaaataaatttgagccattgaaataatatccccaatccccttatagctctcaataaggaaagggcaatgttatttgccaagtattgtattaatatttattgtgactaatgtattggaaaatttagggcacttatgctgacttttgctagaggagcttttgtatgtacatttatgagcgctttgtaaaacacagagaccaaccttatattttatatttttatagatgtttataggtattgtcccttttctattgataacattatatttgatctagagttaagagcagaactccaaagtttaacattgtctctcaatc

SEQ ID NO: 669931 - DNA, 637 bp, Homo sapiens
ccagagctggaataaaagcagatcgtgtcatgcctgtggctggacaaaggggctgtgctgtcctgctccttggcgcctcctccgtgaggaccttccgtggatactccttccatgccaggctcctgagagttcagccccgtgaggtttctattcagcactcgtggccttggtgcaagggcagaaagatttccctggggtgctggctgttatcctgggtgcacagggtgtctggggaaccctggactggatgtcctgggccacacagagctccaccttcctcaagggytcatggtcagactaccccttaagcaaagcagtgagaaccacttccctggttttccattccctggtgtcattggatggtgaggtttcattaactttaacgtgacacctattaaagttcatcacgtgacccaacttcacgttttaaacaaactctatttcacggtggtcgaggttaagccagctttgcagatgaatgcagtgagcatgggcccaggtgatggaaccaggtgtgttattttgtttttcctttgcactccttgtttttactggcatggatgctatgaggaaactggctttcttctttgcctgtgatactatttaggacactcagatggtttttgtctttgttttg

SEQ ID NO: 669932 - DNA, 637 bp, Homo sapiens
ccagagctggaataaaagcagatcgtgtcatgcctgtggctggacaaaggggctgtgctgtcctgctccttggcgcctcctccgtgaggaccttccgtggatactccttccatgccaggctcctgagagttcagccccgtgaggtttctattcagcactcgtggccttggtgcaagggcagaaagatttccctggggtgctggctgttatcctgggtgcacagggtgtctggggaaccctggactggatgtcctgggccacacagagctccaccttcctcaagggctcatggtcagactaccccttaagcaaagcagtgagaaccacttccctggttttccattccctggtgtcattggatggtgaggtttcattaactttaacgtgacacctattaaagttcatcacgtgacccaacttcacgttttaaacaaactctattkcacggtggtcgaggttaagccagctttgcagatgaatgcagtgagcatgggcccaggtgatggaaccaggtgtgttattttgtttttcctttgcactccttgtttttactggcatggatgctatgaggaaactggctttcttctttgcctgtgatactatttaggacactcagatggtttttgtctttgttttg

SEQ ID NO: 669933 - DNA, 637 bp, Homo sapiens
ccagagctggaataaaagcagatcgtgtcatgcctgtggctggacaaaggggctgtgctgtcctgctccttggcgcctcctccgtgaggaccttccgtggatactccttccatgccaggctcctgagagttcagccccgtgaggtttctattcagcactcgtggccttggtgcaagggcagaaagatttccctggggtgctggctgttatcctgggtgcacagggtgtctggggaaccctggactggatgtcctgggccacacagagctccaccttcctcaagggctcatggtcagactaccccttaagcaaagcagtgagaaccacttccctggttttccattccctggtgtcattggatggtgaggtttcattaactttaacgtgacacctattaaagttcatcacgtgacccaacttcacgttttaaacaaactctatttcacggtggtcraggttaagccagctttgcagatgaatgcagtgagcatgggcccaggtgatggaaccaggtgtgttattttgtttttcctttgcactccttgtttttactggcatggatgctatgaggaaactggctttcttctttgcctgtgatactatttaggacactcagatggtttttgtctttgttttg

SEQ ID NO: 669934 - DNA, 637 bp, Homo sapiens
ccagagctggaataaaagcagatcgtgtcatgcctgtggctggacaaaggggctgtgctgtcctgctccttggcgcctcctccgtgaggaccttccgtggatactccttccatgccaggctcctgagagttcagccccgtgaggtttctattcagcactcgtggccttggtgcaagggcagaaagatttccctggggtgctggctgttatcctgggtgcacagggtgtctggggaaccctggactggatgtcctgggccacacagagctccaccttcctcaagggctcatggtcagactaccccttaagcaaagcagtgagaaccacttccctggttttccattccctggtgtcattggatggtgaggtttcattaactttaacgtgacacctattaaagttcatcacgtgacccaacttcacgttttaaacaaactctatttcacggtggtcgaggttaagccagctttgcagatgamtgcagtgagcatgggcccaggtgatggaaccaggtgtgttattttgtttttcctttgcactccttgtttttactggcatggatgctatgaggaaactggctttcttctttgcctgtgatactatttaggacactcagatggtttttgtctttgttttg

SEQ ID NO: 669935 - DNA, 666 bp, Homo sapiens
gagccatccccagtgaatcccctgcacggctccactttgcacaactgataaacatttaaataagccttttcaaaaaagaatagcacgtaaaattattaacccattgatggagttagctaccgctcagtaattcatctttcctcaaaacaggtcaatcgcaaaatgcatttgacttggcgacattgaggcattctcattcctgcaaccgtggttaccaggcattatccagaaccgtgtgtccatttgagtacacgcacgccacacgaattttttaaatgtataattaaaagtgtcccgcactatctatgctaagtacatacaatttgagagccaggaaaaggcctagagattgtatgccatggggccttgtaataaatgataacataattcaaaaccagtgatcattccaaaggaatgaaagttaaaaawgccattcaactaaccacggtcatgcaatatctattatttataccacatcggaaagggtattcgcagagcagttggaaagatacacaaataagtgtttatgttattagtagaagggaataacaatttgtttccagcatcaatttatcagggatatgaggtaatacctctgcctctccacatcatatctgtcttccagagagctaccctctgaattttctccagttgaacaggacctca

SEQ ID NO: 669936 - DNA, 617 bp, Homo sapiens
gttcgtttaacaaaattatattttagttatatgaacatagttaacatttgttagaaaacagaaaaagtgaaaaattaaatgtatttgccttttcagtyaatttttttcatgttcaaagttacgtgaaactttcctcaattttttgtttaccttaattaagaattttattttctcatctaaagttcctttttcacttaacctttcccattcacatcatagctgcctccatgaaatacctaggacggttaaatttggccacagattctgacttttcataattgcaattcagattcccctgaacagaacccagctttaattccacagtggttccaaaccttttacttaaaactctaagtatccagatccagctctgattacttctctaagtagactatgctaggtgagatgcataaggcccttaagagatacaagtgttttccatattccaaaactgtctttttttctaagagtgattttatttcagggagcccctccacagactgcatgaataacaagtgcataatttttacattcatgaagtataaatcttatgttctttataaaaactgcaattacagcttttacagattttaacatttagtaaaacttcattggca

SEQ ID NO: 669937 - DNA, 617 bp, Homo sapiens
gttcgtttaacaaaattatattttagttatatgaacatagttaacatttgttagaaaacagaaaaagtgaaaaattaaatgtatttgccttttcagtcaatttttttcatgttcaaagttacgtgaaactttcctcaattttttgtttaccttaattaagaattttattttctcatctaaagttcctttttcacttaacctttcccattcacatcatagctgcctccatgaaatacctaggacggttaaatttggccacagattctgacttttcataattgcaattcagattcccctgaacagaacccagctttaattccacagtggttccaaaccttttacttaaaactctaagtatccagatccagctctgattacttctctaagtagactrtgctaggtgagatgcataaggcccttaagagatacaagtgttttccatattccaaaactgtctttttttctaagagtgattttatttcagggagcccctccacagactgcatgaataacaagtgcataatttttacattcatgaagtataaatcttatgttctttataaaaactgcaattacagcttttacagattttaacatttagtaaaacttcattggca

SEQ ID NO: 669938 - DNA, 637 bp, Homo sapiens
agaagatttttagggcagtggaactactctgtataatatcataatggtggatacatgtcattatacatttgttcaaacccacagaatggacaacactgagagtgagtccaaatataaactatggactttaggtaataataaggtatcaacatagtttcaccaattatagtgaatgtatcactctggtgggggatgttgataataggggaggctatacgtacacagaagcaggggatatgtggaaaaacttgtaccttctactcagctttgtattgcatgcagtgctctaaaaataaagtatgtatatataaagtaaaaaatagaaaatacatmcaaaaatgaatatatatgtgtatgtgtatgtatgcatatacatatatatctcacaatatgaagacaaaatattttagccaatattctattgatacactagtattgtcacttcagtatatgtaaaaaggaaattccacttaatgcattcagccgacttgtgatgactgcctttatgtacctgggttatctgtgccctgggaatcatagataaaaggtacagcttctgctctccaggtagtctcatgatacagaggaagacagcccagttggccaatgataagagcacagctaagtatgccagtag

SEQ ID NO: 669939 - DNA, 895 bp, Homo sapiens
ggaagacagagagcaaacttttgttttcagaaagttgaagaatgctgtgagacaatttaataagagacctgatatgatttggctgtgtccccacccaaatctcatctttaatttctacgtgttgtgggagggactcgatgggagataatggaatcatgggggtgggtctttctcatgctgttyttgtgatagtgaataggtctcatgagatctgatggttttataaagaggagttcccctgcttattattaagctctctctctttgcctgctgccatccatgtaagacatgactggctcctccttgccttccaccatgattgtgaagcctcccagccacgtgaaactcttaagtccattaaacatctttctttggtaaattgctcagtcttaggtatgtctttatcaacggcatgaaaatggacaaatacggaacccccaaatttaattcaaaattgcctgaatagagtaacaaatatttgaagaggaaaagctgattcctaagcctgacttttctaagaactctattttcctaaccagaaatattgtagcaacatcacctacctggtcttttctctcaaatgggtgtctgcatctgtaaaactaatttcagtacagtgactttcagagcaatactatcaagatagggataactctatcacttgaaacaaatagccaaggttgatggctgatagagaaaatcaaacttctaatttccatttattctttcttctttgccaaaagaaatgcccttcaaaatggaagagcataaaatttattatctacggcaaacaaattatcaataaggaagaaaagggcataaataactactcaaaatgagttactatctggtccaggtatattgtattaaaatactaaactttctatattaatca

SEQ ID NO: 669940 - DNA, 895 bp, Homo sapiens
ggaagacagagagcaaacttttgttttcagaaagttgaagaatgctgtgagacaatttaataagagacctgatatgatttggctgtgtccccacccaaatctcatctttaatttctacgtgttgtgggagggactcgatgggagataatggaatcatgggggtgggtctttctcatgctgttcttgtgatagtgaataggtctcatgagatctgatggttttataaagaggagttcccctgcttattattaagctctctctctttgcctgctgccatccatgtaagacatgactggctcctccttgccttccaccatgattgtgaagcctcccagccacgtgaaactcttaagtccattaaacatctttctttggtaaattgctcagtcttaggtatgtctttatcaacggcatgaaaatggacaaatacggaacccccaaatttaattcaaaattgcctgaatagagtaacaaatatttgaagaggaaaagctgattcctaagcctgacttttctaagaactctattttcctaaccagaaatattgtagcaacatcacctacctggtcttttctctcaaatgggtgtctgcatctgtaaaactaatttcagtacagtgactttcagagcaatactatcaagatagggataactctatcacttgaaacaaatagccaaggttgatggctgatagagaaaatcaaacttctaatttccatttattctttcttctttgccaaaagaaatgcccttcaaaatggaagagcataaaatttattatctacggcaaacaaawtatcaataaggaagaaaagggcataaataactactcaaaatgagttactatctggtccaggtatattgtattaaaatactaaactttctatattaatca

SEQ ID NO: 669941 - DNA, 628 bp, Homo sapiens
tgtgtcactcttatacctgacttcatcaaactttctgaatacataaatagtaggaaaattgaaaggtaagcccagggaaaccgataagtatttcatatttttacatagaatgtttaaaaccccaaggaaattggatgagacagattatacctggctgtttagaatgtgttatgagtaaactacattatggaaattaattagaagcttaagggagacgcattaccaatttcagattctaatttagatggattgggtggtatggtaatttaaattcacctcattttgtatattcaaaagattgccactttggggcagttaaggtaacttttctgattccatagacagtgtgayatgagcagcactcaccccaagcattccacgaggctatgatttcctcccagggcatatttatactctaataaaatcctaatttgaggatttatccgtttactgtacaatagtgatgacaatgtgaggttgtgcaaatcctggtgctgcatattacagagagccagcacctatcttcccacagtgcttacactgtatagccccagaacatctttcgtcatgagattcattgttacagtgtggactctcagaaactgcatacaaaatgaaaaagaatgac

SEQ ID NO: 669942 - DNA, 614 bp, Homo sapiens
ttgaatttatctgcttctggactgcgacatttgttctactctcaatgtgtttattcttgcataagactattttgattcattgaagagaaagaataaatatgatttactggtgagactgaggaaagacaagttttcttgaatttaattcacagtgacagtcagataaaaaggtcacttctctcatttaagaagaaggatacgggaggaaggagaaacaccttttttttttcagaggcatttctcttctttataccttacaagtgaccattttgtgccygacaagaaggaaaaaaaaaaaacatatgtatttcttgttgttttctcaaactgagactccacagtgctattctataaattagaacttgagaatagacttagtgaaaattaactgtggactgtaagtttccctctaacagggagagaagagtgtggttttgtattgccttattattccaagaactctgaaaatattagaggaattttcctacacatctttataatacagctaaaggaagtgatagaaagagaaagaaaagtaagtttatggatgtctcaacctgcaggttattacaccaagtgttccacacatgttattttaaattttacaacaacat

SEQ ID NO: 669943 - DNA, 614 bp, Homo sapiens
ttgaatttatctgcttctggactgcgacatttgttctactctcaatgtgtttattcttgcataagactattttgattcattgaagagaaagaataaatatgatttactggtgagactgaggaaagacaagttttcttgaatttaattcacagtgacagtcagataaaaaggtcacttctctcatttaagaagaaggatacgggaggaaggagaaacaccttttttttttcagaggcatttctcttctttataccttacaagtgaccattttgtgcctgacaagaaggaaaaaaaaaaaacatatgtatttcttgttgttttctcaaactgagactccacagtgctattctataaattagaacttgagaatagacttagtgaaaattaactgtggactgtaagtttccctctaacagggagagaagagtgtggttttgtattgccttattattccaagaactctgaaaatattagaggaatttycctacacatctttataatacagctaaaggaagtgatagaaagagaaagaaaagtaagtttatggatgtctcaacctgcaggttattacaccaagtgttccacacatgttattttaaattttacaacaacat

SEQ ID NO: 669944 - DNA, 614 bp, Homo sapiens
ttgaatttatctgcttctggactgcgacatttgttctactctcaatgtgtttattcttgcataagactattttgattcattgaagagaaagaataaatatgatttactggtgagactgaggaaagacaagttttcttgaatttaattcacagtgacagtcagataaaaaggtcacttctctcatttaagaagaaggatacgggaggaaggagaaacaccttttttttttcagaggcatttctcttctttataccttacaagtgaccattttgtgcctgacaagaaggaaaaaaaaaaaacatatgtatttcttgttgttttctcaaactgagactccacagtgctattctataaattagaacttgagaatagacttagtgaaaattaactgtggactgtaagtttccctctaacagggagagaagagtgtggttttgtattgccttattattccaagaactctgaaaatattagaggaattttcctacacatctttataatacagctaaaggaagtgatagaaagagaaagaaaaktaagtttatggatgtctcaacctgcaggttattacaccaagtgttccacacatgttattttaaattttacaacaacat

SEQ ID NO: 669945 - DNA, 2028 bp, Homo sapiens
tacacaaatatattttacaaagacatctcaattctctaccactctttgccagtgaagacatttatgaaattccgatccattgacaatttaaaatttctaaaggaagtcacagtaatttaatacactgaaaatgtaataaaatctccttacagatactatatcatggaaattatcaaaacaagctgagctttcgtttttagagtctagagcaaagtgcaacttttagatctcatgaaagaaacagagcttattttaattcttgtagggtcatgtctagctttagccacaagctaaatagaaaacatgtttacataccttattgcaaaaataaataagataataccataactttccatagcttccatatctctctagtcatctttcactcataaaatgggatttatttaagtaaggagtcattttgctgataattttaytcaatatgctttttttctaacacaaagatttggtgacaacatattcagcctttcttagtttatgtttttaattttattaaatcaattgcttagggatcaagtccgctcataaaaaaatagaaaaaaaaaagcctcaaacactccacaagaatagatgttgagccaaaatctctgtaacttaatccatccaacagtccagaaatgtacacagaaagatgaatgctgttgtatgatctatatttttaaaatgttgatttgaagttacaaattttcctttttctgcaatatgtattcattttccactcagactaaacagaattccacaatttcataaattatcaagccatttaggatgcataattaattggattgtactgtgccatatttatgagggttattcatgcacagtatgagataatcataaattattttgttaacaaaacctcttgagagagtttttaaagagtattcccttgagtaacttccctcggtgtgactgctgtcttatttttttttgttggttaaatcaggaatgagccatttattactttatgattttaagtctagtctgaaaaatgctgaagtaatctgcagaggaggtgcaaaacaacattgatatttaaaatcttcaaatgttagaaataatttgaagaaaaagacaaagtgctatttgtagatttgatgcctacatttatatttaaatgtatctatgagttccaattctccatttcttgaaacaaaatttgtaaaaactctgaggtttttataatttttggagcaacttttaaaaagcataattctaagcagagttcatgaccataaatatgagaagggaaaggaaagtgttttctaaaaaaaatagaaggccaaacacatcaaatgatatttaattgggactggaaatattccaagtttgattttcaaaaaaaaaaaaagctttcattacaatagttcatgttgggctcatgttgagcctgccaaaaattcgagctagatcagagccttttttgaaataaacacaagcttaatctgatgtagatatttcaaaactcccactgctttagttataacatcatctgttactgaatgatttataaatcaccctctatagacaaatttctgcaagatggagggtgagatattttaacctgaggacataaggacacgtctaactcatacattaaagccacatttagaacaactcttcttgggaataaacaaacaagctttttctgtccatgcttttttaagacagtgattgtatctgaaaattcacagtacctaaaatgttactcttttgttccccagtgattagtcaataaatgctcactgctgtcattattcagtgccactagaggactattcctgagagcctgctgcatgccaggatctcaactgtgtgttttcaaatagcaactaagattctgagctcttgagtctgactatggggcttgacttccagcttcctgatccattgctgtggatcttgagccagttacctaacctgtatgtgccttacctatctccctgtgaaaatggacgaaatatactaatgcctgtctcttagaattgctgtgaagaaatgagttaa

SEQ ID NO: 669946 - DNA, 663 bp, Homo sapiens
catgatattgtcaatgtaataaatgttggaagttctggaggaattaccgctctcccggaagtctctggaacatttcaaggagcctcactgacccccaggactgctgggaaaattaccaagatggtaattttcttggaagcatctttktcacttttactatgcctaaatgtgttgggatgtacactctttgctgaggctccagaaatattatgttggcagaattaaattcctgattgtctaagaattaccatgatttgaaaccattcttttgattcagggcagaatcttggatttttctggaggtcattttaagacaatatatttctgagatcatctccatcttcactcattaatccaagtaatgtttattgagcacctcctgcgtcccaagacttggctatgtactaggatatgtacgcagcaaagaatggaaccgagtctttgccattattaagtttacagcatagtggggaatacagacatcagagcaaattaatacaaaggtaatgaaaattacgacagagaaaatgaaaaccacaacatcaattgttccctttaatgaacatgatgtcttctctctctaagtaaattttgaagtgttcatctaggacgttgacatacctcatgaagattgtcctgtgtatttcatatttatcatcatga

SEQ ID NO: 669947 - DNA, 597 bp, Homo sapiens
gagagaatatctgttcaaagctaccacttctggtaccacattctgattacctatggctgcatctcaggtgatccaaagcttaatggattcaacagcaaccattttatcatatctcacagattctgtaagtcaggaatttaggcagggctcggtcaggggactcctctgtgcctcatgtgcccatrgatattgctcagtggaactcagctggaggtggactggtctggagggtgcgagacagcatcactcatgtgttgtccaggcagttcttgcttgcagtggctgccacaagcactgaattaactcaaatggagccactgcttctgaggaaattcaagattcgattcccgtgagcttcagctcacgacatttctgttgactgatcaatatgcaactttggtttttgtgtgtttttgtttaaagataccttattgaatatctatttcttaaaaaataattagttatatgaagtattttctttataaggaaacactagcatggaagagtttatcattttcctgaacctgggtaatgtgtccatgaatttctttggctctcagcctcacaaaaaaatgctgtcactactcttttttctat

SEQ ID NO: 669948 - DNA, 597 bp, Homo sapiens
gagagaatatctgttcaaagctaccacttctggtaccacattctgattacctatggctgcatctcaggtgatccaaagcttaatggattcaacagcaaccattttatcatatctcacagattctgtaagtcaggaatttaggcagggctcggtcaggggactcctctgtgcctcatgtgcccatagatattgctcagtggaactcagctggaggtggactggtctggagggtgcragacagcatcactcatgtgttgtccaggcagttcttgcttgcagtggctgccacaagcactgaattaactcaaatggagccactgcttctgaggaaattcaagattcgattcccgtgagcttcagctcacgacatttctgttgactgatcaatatgcaactttggtttttgtgtgtttttgtttaaagataccttattgaatatctatttcttaaaaaataattagttatatgaagtattttctttataaggaaacactagcatggaagagtttatcattttcctgaacctgggtaatgtgtccatgaatttctttggctctcagcctcacaaaaaaatgctgtcactactcttttttctat

SEQ ID NO: 669949 - DNA, 597 bp, Homo sapiens
gagagaatatctgttcaaagctaccacttctggtaccacattctgattacctatggctgcatctcaggtgatccaaagcttaatggattcaacagcaaccattttatcatatctcacagattctgtaagtcaggaatttaggcagggctcggtcaggggactcctctgtgcctcatgtgcccatagatattgctcagtggaactcagctggaggtggactggtctggagggtgcgagrcagcatcactcatgtgttgtccaggcagttcttgcttgcagtggctgccacaagcactgaattaactcaaatggagccactgcttctgaggaaattcaagattcgattcccgtgagcttcagctcacgacatttctgttgactgatcaatatgcaactttggtttttgtgtgtttttgtttaaagataccttattgaatatctatttcttaaaaaataattagttatatgaagtattttctttataaggaaacactagcatggaagagtttatcattttcctgaacctgggtaatgtgtccatgaatttctttggctctcagcctcacaaaaaaatgctgtcactactcttttttctat

SEQ ID NO: 669950 - DNA, 597 bp, Homo sapiens
gagagaatatctgttcaaagctaccacttctggtaccacattctgattacctatggctgcatctcaggtgatccaaagcttaatggattcaacagcaaccattttatcatatctcacagattctgtaagtcaggaatttaggcagggctcggtcaggggactcctctgtgcctcatgtgcccatagatattgctcagtggaactcagctggaggtggactggtctggagggtgcgagacagcatcactcatgtgttgtccaggcagttcttgcttgcagtggctgccacaagcactgaattaactcaaatggagccactgcttctgaggaaattcaagattcgattcccgygagcttcagctcacgacatttctgttgactgatcaatatgcaactttggtttttgtgtgtttttgtttaaagataccttattgaatatctatttcttaaaaaataattagttatatgaagtattttctttataaggaaacactagcatggaagagtttatcattttcctgaacctgggtaatgtgtccatgaatttctttggctctcagcctcacaaaaaaatgctgtcactactcttttttctat

SEQ ID NO: 669951 - DNA, 597 bp, Homo sapiens
gagagaatatctgttcaaagctaccacttctggtaccacattctgattacctatggctgcatctcaggtgatccaaagcttaatggattcaacagcaaccattttatcatatctcacagattctgtaagtcaggaatttaggcagggctcggtcaggggactcctctgtgcctcatgtgcccatagatattgctcagtggaactcagctggaggtggactggtctggagggtgcgagacagcatcactcatgtgttgtccaggcagttcttgcttgcagtggctgccacaagcactgaattaactcaaatggagccactgcttctgaggaaattcaagattcgattcccgtgagcttcagctcacgacatttctgttgactgatcaatatgcaactttggtttttgtgtgtttttrtttaaagataccttattgaatatctatttcttaaaaaataattagttatatgaagtattttctttataaggaaacactagcatggaagagtttatcattttcctgaacctgggtaatgtgtccatgaatttctttggctctcagcctcacaaaaaaatgctgtcactactcttttttctat

SEQ ID NO: 669952 - DNA, 606 bp, Homo sapiens
actctgtcattgttacaaggattaaagagttaacatacttaaaagctgatgatggtgtcaggcgcataggaaatactgtagaaatgttagcccttttattataaggttgacataatccaaatgagaatctaaatatatatgttatttattgcacattttcttctctgaactatatcctcagttatagaataggataaataggatgagaaaaggattctttgtttatcacaacagatgttgaacgctttaaagagatgggcatcaccgccgaagcacctgtgtacattttcaaaatgycctttgcaatgatctctcacactgcagtcccaggaaattcagcttttgtttttgtggtggtggtcatcattaccattgttattagtagttttagttttgcttcaacaatgttaaatctttgttttgttttctctatctacaacgtctagaattaagctttactagcattgccagactcttatatagtaataattcttttagattaaagtaaatgtagtcatagggtgtgaacatgttttattaaaaaagaataatactatataaacatatgcatgtgttttttaatcaaattataagctttaagcttca

SEQ ID NO: 669953 - DNA, 654 bp, Homo sapiens
ggccaatccattcttgtttcacaatactagttcattaaacaagggatcatgcacactagtttgtgtgattatcatgctagggcgtatgcagactcatgacaaagagagaaagcaaattgataatgggaaacaacaacacagaaggctcattcagaaaaggagaggcaggagagtccttgagactctgagacatgagtcttagctcttgactttactaattttggttttatttcacatgaaatttgacagtacctcagtaactgttcctccactttacaataactcttytaacctgagcgactctgagtgggtttttattccttgttccaataaaaagctgtggctgtgatattcctttagtttaaatatagggataaatagaaatattacattagtaaaatagcatcgatgaagatgaatgcagagctgctttggaagaataaaaatgaaataaacaacttactttaacctattagtctcgtcaagaaaaaaaaaacctttccgtggtaatctcatttaccatcatgtattcaacaactatagatgtatagatgattcctaactctagtcttcaatccacattcctctcctaagaaattcagattgtctcctcaacccatctacctaaatgtctaatggcattttacatttaac

SEQ ID NO: 669954 - DNA, 655 bp, Homo sapiens
ataatttcttaggtcctgaacagatttttaattacatgattttattaataatataaacaagcgcaataactcaaaggggccacttagggtaattgtaaatagtccctgacagcctgactgtttatctatttgcctgcagtgcaaaaatcaatatccataatcatgatatcaggtcatcaagtaaagttcaaatattcaataggctctgtttacgatgatcatatattttagaaagctttgaacataaatgattaaaatagaaaatgcaaccagcagctccacacacatattccctaagagttttgtgtattgccactgcagcactgtttgtaataattaaaaacagagaaaaaatgtaaaatgtaaggaaaagtgataaaataaactttatcacatcctaactatgaaagaacacatggcaaggtataattggtggtgacctctaaatgaagaagagragaagaagaaaagaacaagtttgggaaagaaagtataggaccatacaggtccaggtcccagaggagagtcagtttatgccagcttaattactagcagccacccattcactcccaaaaatgttcttacttggaagctacattacagagtcaccctaaaataaaaataaaataggcactttctttaatccactgcagaa

SEQ ID NO: 669955 - DNA, 815 bp, Homo sapiens
tattattaaagttaaaaaatagatattggcaaggatgcaggcaaaagaaaatgctttcatactgttggtgagaaggtagattactacaacctctatggaaaacagtatggagatttctcaaggaactaaaaacagaactggcattcaatctagcaatcccattactgggtatctacccaaaggaaataaaatcattatataaaaaagatacttgcaattgcagcactgttctcaacagctaagatatagaatcaacttaagtgtccaacaatggggataattggactaaaaaatgtgggatatgtaaatcccaggtttggacaaggtcagcctgagaagctacttcwtgaaataaggccctgatatttggtgtcctttggactatctgacccaccaaaccatggagagaaacgattcaatctccctgcctctcctagcgtcttttactgtctaccagccctgaagaagcaggatcatgcaataaacctcttccttttcttggccagttagagcaccccatatatacaactctatctcctaatctactgggagctgttaggggctaaattgtgctcctgtaaaatttatatgtaaagtcctaacccacagtacctcagaatgtgaatttctttggaactagggtctttacagaggtaaacaaattaaaatgagataattaaggtgagcccctattcaaaatgactagtgtccttataaaaacaaaaaatttgaacacagagacatgcacagagggaaaataacataaagaaacacagggaaaagatagatacctgtatgccaagaagaaatacgta

SEQ ID NO: 669956 - DNA, 586 bp, Homo sapiens
tttacatttaaaatacatataaaagtagtgtcataatcctcaaaattaagcaaaatagtgaatacaaatgaacagtgactgtgtacatatatatgtaggtatatatgtatatgtatatgtatgtgtatatgtatgtgtgtgtatatatatgcatatatatgtgtgtgtatatagcatatgtgtgtgtttgtgtgtgtacatgtgtatacatatatatawaaaattatatataatatatattatgtataatatatattatatatatatgtataatatatattatatatatatatatatataaaattccagaatggaaaatcactttttggttatttgtaggctctatcaatttggacacaaactactctgatactctgcagcaagagagatcaaagatagcattcagagatatgtctgccacatagtagcaactgatgctattgaagaagccctgaagtgatggccgccaacaatttctctatctaggaccctgttagagctctactcctctcccactgaaccatgggagagaatctctggcatgagggccaaccaaacccttctacaaaaatctagagagaagaaa

SEQ ID NO: 669957 - DNA, 684 bp, Homo sapiens
taggatatctggaaagagggttattgtaaggaattggctccacacttagggaggctgacaagtacctctatctgcagttggcaagctggggacccagggctctcacttcagttacagcctgaaggcaggaagggccaatgtcccagctcaaggcaggcaggagaaagaattccctgtttctcaygggaggtgagctttttggatccattcaggcctttgatgaatgaggcccactaccactgggaagggccatctgcttcactcagcccatggattcaaatgttcaactcatccgaaagccccttgacagatctacccagaataatacctgacccaatgtcaaggcaccctatggctcagtcaagttgacataaattaactatgacaggtgttatgggagaaaaggagcaaactggaagggaaacaagcccaggagttgtctttcctagagagatgccccccaattcagtcactggtaccacctgctcagagcttcacctttgcaatggaccaattgtttacggctgcctcaaattcctatgttgaaattctaacccccaagtttgatgatataggaagtgaggcctttgggtggtgattaggtcatgaatggaattagtgtcctcggagaccccatagaacttcctcgctcctttccaccatgtgaggacacagccaaaagtg

SEQ ID NO: 669958 - DNA, 639 bp, Homo sapiens
tcagcctcccaagtagctgggaccacaggtgcccgccactactcccggctaattttttttgtatttttagtagagacagggtttcaccatgttagccaggatggtcttgatctcctgacctcgtgatctgcctgcctcggcctcccaagggtgctgcattcttattattcttattaatggcagtgttttcaaaggccaattttatcagaatgtaaaaaggataaataagcaaataccattggataaacatttgaatatatatgtatatagtgtatatacgtatgtgggcatgtaagagaaagagaaagacaaaacaaggtatgttttcttttacaataaataccattacaaatgcataaatccagtaaatgcaactttacacatttggaattttctatcactacattacaccataaaaataaatacgttttccccagccatacataaagtcaaatagacattcctagttgtaagacattccaattatatcaataatctaacaagccacaaataatcacatttctgcaatacrccttttgactaattatcaatcaatcagctgtcgtttctctcatccaaacatgctactttaaaaggtgtgtattgagaacggtgtaagatgtgcgtttactatagcca

SEQ ID NO: 669959 - DNA, 599 bp, Homo sapiens
tcccaacactctggaaggccaaggaggcacttgagcccaggagtttaagaccagcctgggcaacatggcaaaaccccatctctacaaaaaatacaaaaaacagccaggcatagtggtatacatttatagttccagctactagagaggctgaggcaggagtatcacttgagccccgaggactgaagctgcagtgagccgaggtcatgccactgcactccagcctgcataacagagccagaccctgtcttaaaaaaaaaaaatawatatatatatatatatatatatatgcacacacatgcatacacacacatatacacacacatatatatacacacagacatacgcaaaatggtagctatctaccaagtagaatccatctactaacagaaatgacaaacgcatgtacccttaaacccagtgccccgacttttaggaatctctcccacagctataacgttacccctgaagcactgtttatcatatctaaagactggaaacactccaaaagtccagaaagggaactggttggaaaaccaatgatacttccaagatagtggaattcaatgcagccataaaaagaaggaagatatacatattcc

SEQ ID NO: 669960 - DNA, 599 bp, Homo sapiens
tcccaacactctggaaggccaaggaggcacttgagcccaggagtttaagaccagcctgggcaacatggcaaaaccccatctctacaaaaaatacaaaaaacagccaggcatagtggtatacatttatagttccagctactagagaggctgaggcaggagtatcacttgagccccgaggactgaagctgcagtgagccgaggtcatgccactgcactccagcctgcataacagagccagaccctgtcttaaaaaaaaaaaatatawatatatatatatatatatatatgcacacacatgcatacacacacatatacacacacatatatatacacacagacatacgcaaaatggtagctatctaccaagtagaatccatctactaacagaaatgacaaacgcatgtacccttaaacccagtgccccgacttttaggaatctctcccacagctataacgttacccctgaagcactgtttatcatatctaaagactggaaacactccaaaagtccagaaagggaactggttggaaaaccaatgatacttccaagatagtggaattcaatgcagccataaaaagaaggaagatatacatattcc

SEQ ID NO: 669961 - DNA, 616 bp, Homo sapiens
tgaattcctgaccttgtgatccacccgcctcggcctcccaaagtgctgggattayagacatgagacactgcaccctgccccattccttttaatctcccttggaattagctgtttggttgatttggagttccagggtgatactgtctgagtcataaatgatttatttgtgaatttctgtggctggtcacgtattttggtcctgtttgtatttcccttcccctctctgtgtctccttatagcctgtctctcttgctgatcgagaggtgatatcccggcttcggaactgcatcatctcgctggtaactcagaggatgatgctgtatgataccagcatcctgtactgctatgaagcatcccttccacatcaggtactctccccagggcctctcccttcttcactgatctgtgagctgctctgttgtttgttcagagacaatatgcacatctccccaatactttcccaacatccgtcagtatgaactggcctgaaacagccttaatgagtgtctggtagatctttccctaagaaacttgcaatattctcaatgcctagtgtcagtctaaggattttggggcaggaggtgtcaggtgggactagtttatgagagcaacctct

SEQ ID NO: 669962 - DNA, 438 bp, Homo sapiens
ggagctgtatgccaggaaatggaggaagactaaatatatatttcatcatatcacatgtctatatcctatactctgtcaagtgtatagaaggaagcatacttcctatcacatatacacatatcacacatcatatcacactaarcaccaagctatgcccactaatcctataaatagctgacccttgcatagctcttcaaagagtttaacccacattattttattttatttaatccttacaagtatgtagtacaaatacagcatgtagtattgccccacttcacagttggggacacagagcacaggcagaagagtgagaacttgatcccaagtctttctcattagcacaaggtgctcctctctctgtatgagacaacctctcctaacaggtatctaagaaacgcctgtaggatgaaaccagctaatgcctctaacaaatgc

SEQ ID NO: 669963 - DNA, 438 bp, Homo sapiens
ggagctgtatgccaggaaatggaggaagactaaatatatatttcatcatatcacatgtctatatcctatactctgtcaagtgtatagaaggaagcatacttcctatcacatatacacatatcacacatcatatcacactaaacaccaagctatgcccactaatcctataaatagctgacccttgcatagctcttcaaagagtttaacccacattattttattttatttaatccttacaagtatgtagtacaaatacagcatgtagtattgccccacttcacagytggggacacagagcacaggcagaagagtgagaacttgatcccaagtctttctcattagcacaaggtgctcctctctctgtatgagacaacctctcctaacaggtatctaagaaacgcctgtaggatgaaaccagctaatgcctctaacaaatgc

SEQ ID NO: 669964 - DNA, 1355 bp, Homo sapiens
tgacaggtggatgcatcagactaatgataattgcacaccccttcaaagccatatttttgttcaatatcaaaggtaaggctttgtgggggctggtagcagatgtcaacctcttgtcaatccagctctgggggcatgtttgtacaccattcagtaaaacagtcctccaggtgttaatgaaaactaccttccttggaagtactttattttaacctcagctcatttctgcaagtggcttaaccaagtgttccctccaaacacatacagtgcttggcctgtgaaaggctttgggagacagaattgtctccttcttggtagatttccagtgagttttgggtaatctgcatcctggggagtggtacagtagcccaccccttattgggtcctacttagccagaagtctaactttgagaattcatcaaaatttggctgggtactgtgagaagacagcagaatcctgtataatccagaatcagaatcagaatgtgatgtgcatcacaatattatcacagttgtctttattatcaccgcyctcttcctctaatcccttgctactcaaagtgtgatcccaagacgttgcattggaaccacctaggagcttgttagaaatagagactctcaggccctggtctgggccaactaaacaaaatttgcatttgaacaagaacaacctatgacccatgagtagagtaaagtgtgagaagcatagcaggttagtccatagtccctcaaggcccagtcacaagtgtgcttttccataacccttcttcaggggacctcaaaactggtatttggactctccactctccacctcactaaaaggagagtgtccctggcctgctttccaccctcagagtgagtctccctggactattgaagatcactatgtcttgggacattcaggcttgatctttgggctgctaccctatccctgagcgatgtgtgacacagtcatgctgtcttcccaggttctgatgatgttgggggaatgtaattaaaaataaaatctcctgccaaaccaggagacctccccacaaacacagaagggaaagacaatttattattgaataggtattaaaccagaatgtgacgtgcatcacaggcaatctgctgaagagattgcagattgcaaagtcagaaagaaatcttaccctttcctatatctaggcagatacagtccattacatacatgttttcaggtagaagacttgacagcaccattgtcacacatagttcatccgaaattcacgggataattgggctggccatctgtgttaattgcctttatccgaaggaaaaataaaacttctcatatctttatgacaggaggtagttttgcaacttagagccaggcacct

SEQ ID NO: 669965 - DNA, 582 bp, Homo sapiens
agctggatggtacttgtctgctagaagtgagtcgaggcagaagaatcaacacaggagctggaagggcctctggaaatcagctggggactagagacaggtgtgcagccctcggtttacagaggctgtgagaccaagagagttccaagacctccaggaaaacatctccctgctaaaaggctttcccaacctttagaaatctattcatttyccccactttccatcctctttctcttgctatctctttatcgctcctcctgccttcttcctttctttccttcagtaaacgttttttgaaacgatgatgagcaaaaaacgcctgatccagtctatggcgcgtttcggtgggaagatgaacacgccttcccagcagagtaaaacgtgattacaccaaggaccggtaccctctcccttccctcggccaggtccacgtccccaggcgtcggagaaggggttggaccgcgcagcggggcgtcagagttgccaggcgcccggggcaaataccggcagcggtggttgtgcggtgtcctagcaacggggcggcagcagggcacacacaccgcccaagcccggacggtggccgcg

SEQ ID NO: 669966 - DNA, 582 bp, Homo sapiens
agctggatggtacttgtctgctagaagtgagtcgaggcagaagaatcaacacaggagctggaagggcctctggaaatcagctggggactagagacaggtgtgcagccctcggtttacagaggctgtgagaccaagagagttccaagacctccaggaaaacatctccctgctaaaaggctttcccaacctttagaaatctattcattttccccactttccatcctctttctcttgctatctctttatcgctcctcctgccttcttcctttctttccttcagtaaacgtttttygaaacgatgatgagcaaaaaacgcctgatccagtctatggcgcgtttcggtgggaagatgaacacgccttcccagcagagtaaaacgtgattacaccaaggaccggtaccctctcccttccctcggccaggtccacgtccccaggcgtcggagaaggggttggaccgcgcagcggggcgtcagagttgccaggcgcccggggcaaataccggcagcggtggttgtgcggtgtcctagcaacggggcggcagcagggcacacacaccgcccaagcccggacggtggccgcg

SEQ ID NO: 669967 - DNA, 586 bp, Homo sapiens
tgaataattgaaatgttaaatactcttaaataacaaaaattttaaagtttgaaatattttgttgactatgaaaacctgatgcattgcagatactgggagagccatcaccatctgactgcctcaaagagttcaaaaacgatgaagatttgttttaatgcataaaatgatcctaatatgctagcgatttaccagtcatctttggaagagtttctccctcaatatacaggaatacatgtacattgtattcacgtcgtatgaaatttcattttttaatataatctctattttaagagttagaaaaataaatctgaatgttaattgacccacttagagatgaaasaaaacagacaaaatgcaaccaaaagcttatggaagagagagtgggcaggttaactcattatagctagaaatgcaaatctgataaattgttcgttacacaactctgtttggggaaaatatatttttattttgttcaataaaatgaagtcaaataagactaacagggaaaatcgtaatacacacttttggactgagaaaatcttgctctgaaattccagctccagtacacagaagtagctagtctttc

SEQ ID NO: 669968 - DNA, 607 bp, Homo sapiens
cctttcacctccatgaagtttcrtagctggaaaggaactccaatcccaacccctcatttaacaaatgagaaaattgaagtgaaatgatttgccaaactaaggaattcttgagagcaatgcctagagtccagactctctcactcatgagtcttttgtattcttagtctgtcatgctgccttcagaccagggcaaaatatgagactgaactgaagtgggagaaggtttacttcagtcatgggaaaccaccattaagggttatttgttgctgggaaagtacactgttgtaatagctgcactgtaacaatcacagctgactaacagcaagttatcctcagcagagccgtgaacagaaaactttggttgggcttcaggagatgagtttaaattattctctgttacagacaaatttgttattcattccttcattcatctgtgcctcctgtgtgcatgggagtgtgcttggcactgtagaatagataaagcaatagaccctgccctgaaagttcttatagtcagtatggaagataagatatacgtgtacagaattataataaaacactgactgacaaaagtgtcgtgagatctggaacaaatcagtagccagga

SEQ ID NO: 669969 - DNA, 1074 bp, Homo sapiens
gattatggtttcccttgaaagcccaacaaaccactatatttgtttgttttttttaaagcaatggtaggtaccaaytttaaaactactaatttacttatccttctaactttctaactagtagtctgagtgtaatagggccaaatgcttatttagacagttgagatagaaacgtccaatagtttactgacagttgtccaaattaatgtgttttaattattttcattataattgatctaagtttttgatcctatttttatagagacatttaaaatcctcccttattaattgcttgcctcatcattgcgtacactctcaaggtcactccgacaaaacctgggcaatgaagcagaatgatgactttctgttttaagttagagtcttgtttgtttctaaacagtttctaagtccccagggtttgttgtcttaaaaagtcaaatttgtcattgtctccagaccttgagctatctaaacatggaaacccaagttcatggatagggtaatagaagagcaagcagaaatcttgatttccaggcttccagttgccacatcagctcatctagacatcggtttaagggcagagtaaggacatttgagtccaaaaattcctttaatccacttttattatctactaaattcttaacctacagtatttaaccctcagaaaatttcatgaaaatatattctatttttttaagtttcttttaccaatgggaaaagttaaactcaaagtatttaaagcaccttcctggagttcccagtcagctcataacccttaggctgaatctagaacattggttctcagccagggatgattttgctctctctttctaggggacactttgcactgtctggagacatttttggttgccacaagtggaggaaggtgctaccggtgactatgagtagtggctgctaaacaccgtacaaggaatgcacaggataagtccctgtagcaaacaatcagccagcccaaaatgtctagtgccagagctgagaaactagagttctggtagacagagcactgtctaccagaactttctgtgatgatggaaatgctctactagacacttgaaa

SEQ ID NO: 669970 - DNA, 985 bp, Homo sapiens
ctcccgcagcatccattacacaccaccacgcataatgtgtgtaatatttttctcaaatgatattctaacatttttgttcaagcgttctcagtctagaattctctttcttccataagcttggccaaaagtatgttttctaggctcagaccagaggccagtttctctattgattttttcattgttcttattctcccttataaatgtcttccttatattccacaaatacttccatttagtgctcatatgtaccaccatatcctcaattacgtctrtttttccaaccatatatgatctagacgaagtcagaaattgttcatatgagcttgatgtctcacagtatcttccttgtaactgattgggttataaaaagacaatgaatttccagcacctattgtgaaactgttgtgggagtcatatttatttttgacatttaagttgaattgaagttattttaatattgggagcatcaagttattctgaaattgtgccatttgggggcattacaaacacaagatttgggaaatactatcaggaagttaatgcaaggagtaggaaaaccaaaatattccttttattcttaaccactaatagggtaatttttggttttgttttggtatcatatagtacaaacataggagggtcttcccatagtcaggacttcctaggcaaattttacgatatttttgtaaggaggaaaattctcatttcctcataacttatttaaatttagaggatcacctataggcaaaggataatcatgtattgtgatatgcctagttttttgaactacctttcaaagctaaattccatcaaacattttctcaattttttcttaaaatgtcatgttctctactgaagaagtaagattcaaaattgcagtatctgccatcttcccagaaagacataaatctccaaccaatgataccaaataataatcagttcactgtaggcagactatttcttacaaggtagtataaagtttttc

SEQ ID NO: 669971 - DNA, 635 bp, Homo sapiens
gtggcctgacagcactagggaggggctgcatgcacagtgtgtttactgaagctgtgcacatgttcacttgaggtgctttcccttaccagtagtgcattgccagaggaaggttatatactggttaaactccaccattttgcctcttagtgtgcatgcttgagcccactccttcaacgcctamgatcaccagctcaggtgttttctatctatcaggagactatctttcactagcgctggctgtggccaattatcatttcagagagacagtttagcaaccaccagaccatcaactaatgtttgcttgacatttctggggaggtggtcctctcctgcactgttcatgtctgactaactacctactctaacatgacaacagatactttaaaatttgtaaactgcataaacaaattccaaagtcaagcaacaaattgggaacatttttggtggcacatatgatgagaaaatggccattactttcgtatacaaagagctattgcaaataaatttaaaaacactactttgattctaaaattgacaaaaatgaatagaccagaaaaatcaatacaaatgaacaataaatatttaaagcatgctcatccacactcatgatttttataatataaattaatatggca

SEQ ID NO: 669972 - DNA, 669 bp, Homo sapiens
ctccggttgcccaggctggagtgcagtggcacgatcacractcactgcagccttgacctcccgggctcaggtgattcttccacctcagccttccaagcagctgggactacaggtgtgcaccaccacgcctggctaattttttgtatttttagtagaaatggggtttagctatgttgcccaggctagtctcgaactcctgaactcaagcaatctacctgccttggccttccagggtgctgggattacaggcgtgagctactgtgcccagcctgcttgttaaaatttaaaattttattatcctttagcaagtataaaaatgtgttcaaatgatttggtttctgattccctttcatttgttttgcagatctctattaagagaaaaatacaaagaataaatgagtaaggctcttgaaaccattgaattgtacaaactttggtggttttaaatctggatttgtgaatagctgagcccgttcactgtcccattttggagaaccatgaggcattctacaatctagcccttctccaggtggatgcttacctgtccgcccaaccacatttatctgattcttcagggacccgctgactgaggcaatcatgatctggtactgctccccggcctccagtctgtggaacgtgtgctcaaagacgtgcttgggaatagtctga

SEQ ID NO: 669973 - DNA, 669 bp, Homo sapiens
ctccggttgcccaggctggagtgcagtggcacgatcacgactcactgcagccttgacctcccgggctcaggtgattcttccacctcagccttccaagcagctgggactacaggtgtgcaccaccacgcctggctaattttttgtrtttttagtagaaatggggtttagctatgttgcccaggctagtctcgaactcctgaactcaagcaatctacctgccttggccttccagggtgctgggattacaggcgtgagctactgtgcccagcctgcttgttaaaatttaaaattttattatcctttagcaagtataaaaatgtgttcaaatgatttggtttctgattccctttcatttgttttgcagatctctattaagagaaaaatacaaagaataaatgagtaaggctcttgaaaccattgaattgtacaaactttggtggttttaaatctggatttgtgaatagctgagcccgttcactgtcccattttggagaaccatgaggcattctacaatctagcccttctccaggtggatgcttacctgtccgcccaaccacatttatctgattcttcagggacccgctgactgaggcaatcatgatctggtactgctccccggcctccagtctgtggaacgtgtgctcaaagacgtgcttgggaatagtctga

SEQ ID NO: 669974 - DNA, 669 bp, Homo sapiens
ctccggttgcccaggctggagtgcagtggcacgatcacgactcactgcagccttgacctcccgggctcaggtgattcttccacctcagccttccaagcagctgggactacaggtgtgcaccaccacgcctggctaattttttgtatttttagtagaaatggggtttagctatgttgcccaggctagtctcgaactcctgaactcaagcaatctacctgccttggccttccagggtgctgggattacaggcgtgagctactgtgcccagcctgcttgttaaaatttaaaattttattatcctttagcaagtataaaaatgtgttcaaatgatttggtttctgattccctttcatttgttttgcagatctctattaagagaaaaatacaaagaataaatgagtaaggctcttgaaaccattgaattgtacaaactttggtggttttaaatctggatttgtgaatagctgagcccrttcactgtcccattttggagaaccatgaggcattctacaatctagcccttctccaggtggatgcttacctgtccgcccaaccacatttatctgattcttcagggacccgctgactgaggcaatcatgatctggtactgctccccggcctccagtctgtggaacgtgtgctcaaagacgtgcttgggaatagtctga

SEQ ID NO: 669975 - DNA, 2416 bp, Homo sapiens
gttgtacagagccctgtacttagaagggttccatgattggtttaatgctctaatgtcactatcttgattttttgtttgtttttgagacggagtcttgctctgttgcccaggctggagtgcagaggtgcgatctcggctcactgcaacctctgcctcccgggttcaagcgattctcctgcctcagcctccctagtagctgggattacaggcgcccaccaccatgcctggctaatgttttgtatttttagtagagacagggttttaccatgttggccagtctggtctcgaactcctggcctcaagtgatccgcccgcctcagcctcccaaagtgctgggagtacaggagtgagccaccgcgcctggccatcttgatgttttaaataattttttaaataagaagcttgaatttccattttgtactgggtcccataaattatgtaactggtcctgcctatactagaagataaaatccagatcagaatgtgtatgtgtgtatgtatatttcctacaagatcaggatttccctcctctcctctcctcccttcccctcccctggccctcccccccccccccgccgccgtctcccctctcctctcctctcctttcctctcctttcctctttttttgagacagagtctcactgttgcccaggctggagtgcagtggcgtgatcatggctcactgcagcctccaactcccaggctcaatcagtcttctgcctcagcctcccaagtagctgggactacaggcaagtgccaccacactcggctaatgtttctattttttgtagagacaggggtctcaccatattgcttaggctgctcttaaactcctgggttcaagtgatcctcccaccttagatgcccaaaatgctgggattacaggtgtgagccactgtgctgatcatatttcttatctttataagaaacacagtttggtgctttccacataataggcatttaagatatatttgctgagttttcttttcctaaggtagtgtgaaatggcagagggggtgagaatcagagtccagctcttattatacttattagcctagtggtcttggaaaaatcccattatcatgttgaatctcagtttcctcatctataacatgggatgataatatctgccttacagaactgttgtaaaatagtgtgtagaaaatagcaatgtctcagtctctggaacaagaagcagctcaaagcaagtttttccccttttaaagaaagtgaattaatagtgtccttaactatttaacctgataacagtatttctaatttttcatattatttacttccttaaaagttttacttttttttttttttgagacagagtttcactctttcccaggctggagtgcagtggcacaatcttggttcactgcaacctccgcctccccgggtttaagtgattctcctgcctcagcctcccaagtagctgggattacaagcgtgcgccactacgcctggctaatttttgtatttttggtagagacagggtttcaccayattggccaggctggtctcaaactcctgacctcaggtgatccgcccacctcagcctccagcctcccaaactgttgggattacaggcatgagccaccgtgcctggccaaaagttttactttaaaggaataacatctatgcttcattggtttcactttaaaaagtccatatgagtagcggtcttattgcaaatccaaaattggatttttaaaagacccagatttataattttcctaattgacagttaatgattatcaatgtaaacatttaacttccagtttatcatggttatcagtaacattaatgttccttaacattaaacattagtatattatttcattcacaaattaacaatattgaatttgatcctttcacttccttactggcttttccctctgatgtgtgtgtgtgtgtatgcatgtattatataaatctatgtatgtatatatagtgtatggtatataaatacagttctgtacctttgcaacaccctgtgtgactgggttgggaagttgtaaagaataagaagactgcttattagatgcaaaagagaaaaaatacatggcttacatctctagttattagtttgtagacagctgctttaaaaaaaaagaaagcaagaaaaagaaaaaaattacatcttcagtagtttccttctattttcttggtcaaagactgcattccaaactcaatgcagttattttataaattctaccacttaatcacacaggagaccaggtaagagcatattagaccattgctattatgagaaaacactcagaactcatactctcctagggtagtttgtgttcctctaagatttctgttttggggaaaccatgcacttatatataagaaaaatgaagcagcttggcatgtttctattctgtgtaataactgtaataactgc

SEQ ID NO: 669976 - DNA, 2416 bp, Homo sapiens
gttgtacagagccctgtacttagaagggttccatgattggtttaatgctctaatgtcactatcttgattttttgtttgtttttgagacggagtcttgctctgttgcccaggctggagtgcagaggtgcgatctcggctcactgcaacctctgcctcccgggttcaagcgattctcctgcctcagcctccctagtagctgggattacaggcgcccaccaccatgcctggctaatgttttgtatttttagtagagacagggttttaccatgttggccagtctggtctcgaactcctggcctcaagtgatccgcccgcctcagcctcccaaagtgctgggagtacaggagtgagccaccgcgcctggccatcttgatgttttaaataattttttaaataagaagcttgaatttccattttgtactgggtcccataaattatgtaactggtcctgcctatactagaagataaaatccagatcagaatgtgtatgtgtgtatgtatatttcctacaagatcaggatttccctcctctcctctcctcccttcccctcccctggccctcccccccccccccgccgccgtctcccctctcctctcctctcctttcctctcctttcctctttttttgagacagagtctcactgttgcccaggctggagtgcagtggcgtgatcatggctcactgcagcctccaactcccaggctcaatcagtcttctgcctcagcctcccaagtagctgggactacaggcaagtgccaccacactcggctaatgtttctattttttgtagagacaggggtctcaccatattgcttaggctgctcttaaactcctgggttcaagtgatcctcccaccttagatgcccaaaatgctgggattacaggtgtgagccactgtgctgatcatatttcttatctttataagaaacacagtttggtgctttccacataataggcatttaagatatatttgctgagttttcttttcctaaggtagtgtgaaatggcagagggggtgagaatcagagtccagctcttattatacttattagcctagtggtcttggaaaaatcccattatcatgttgaatctcagtttcctcatctataacatgggatgataatatctgccttacagaactgttgtaaaatagtgtgtagaaaatagcaatgtctcagtctctggaacaagaagcagctcaaagcaagtttttccccttttaaagaaagtgaattaatagtgtccttaactatttaacctgataacagtatttctaatttttcatattatttacttccttaaaagttttacttttttttttttttgagacagagtttcactctttcccaggctggagtgcagtggcacaatcttggttcactgcaacctccgcctccccgggtttaagtgattctcctgcctcagcctcccaagtagctgggattacaagcgtgcgccactacgcctggctaatttttgtatttttggtagagacagggtttcaccatrttggccaggctggtctcaaactcctgacctcaggtgatccgcccacctcagcctccagcctcccaaactgttgggattacaggcatgagccaccgtgcctggccaaaagttttactttaaaggaataacatctatgcttcattggtttcactttaaaaagtccatatgagtagcggtcttattgcaaatccaaaattggatttttaaaagacccagatttataattttcctaattgacagttaatgattatcaatgtaaacatttaacttccagtttatcatggttatcagtaacattaatgttccttaacattaaacattagtatattatttcattcacaaattaacaatattgaatttgatcctttcacttccttactggcttttccctctgatgtgtgtgtgtgtgtatgcatgtattatataaatctatgtatgtatatatagtgtatggtatataaatacagttctgtacctttgcaacaccctgtgtgactgggttgggaagttgtaaagaataagaagactgcttattagatgcaaaagagaaaaaatacatggcttacatctctagttattagtttgtagacagctgctttaaaaaaaaagaaagcaagaaaaagaaaaaaattacatcttcagtagtttccttctattttcttggtcaaagactgcattccaaactcaatgcagttattttataaattctaccacttaatcacacaggagaccaggtaagagcatattagaccattgctattatgagaaaacactcagaactcatactctcctagggtagtttgtgttcctctaagatttctgttttggggaaaccatgcacttatatataagaaaaatgaagcagcttggcatgtttctattctgtgtaataactgtaataactgc

SEQ ID NO: 669977 - DNA, 1218 bp, Homo sapiens
agcactttactctgtcaactgcctgcacctttggcctgcacatcccacactagcagactcagaccagtgggtcttcacaaactgccagaggaaggccctaatgtcacctgtaacctgcctcctgaccctgtggccctcccccatttgtgtgctgtctgggctcacaccctcaccctgtcagctgcgtgactcaacttccctaagccgaactcccccttggtgaaatggagcaaatcctggtactgcttcctggggtttgctgtgaggataaactaagatgacctatgtctagcactcagctcggtgctgggcatatctttagagccccatcaccatgacccgttattatttgcccctctaaacatgggaccaaccagggcaacagggacccattttaaagactggtcttgctgagaagcagcacctttccttccttaccccctcctttcagctgagtttttcttccagagaactttccaggtagagctacgaacccaggagtgaggggaggggaggcacatggctccagaaatgccaatgggtccagacagagcatcccgaggtgcctccccggggcttccccagagcctcaagaagtctgtgtttttcacatgcttccatcatcttggcctgcgtgacccgtgctctggccacctgggagcagagccctgtctacctgggaaacatgtcatggagaggggatcccagcccctgccacacccccgccatttccagctggcagtccaggccacactggcaatagcaggcagggaggggaagctctcaccctctggtttcactttctagtgtccacggacttgtctgacaggtttaggttaaagacccagagagtaagtgttttcatacaaaagaaaagaaattcaaaaatttgtccattctcagccccctccaaagaataggattcagaatgatgacgatgatcatgaggaggaggatgaagatgatgatgaagatggctaaaatttactgaggagttacacatactcagcattgtcttcagcattttggtgcagataaactcaattactcatcacagtacctccatgttgaagataccactattacccccattttagagatgaggaagctgggcctcagygatgttaggtaacttgtctacattcaaccagctgaaaaggagcagggcctgcttgagtccagcctatctggctccagagcctctgcttaccacaccca

SEQ ID NO: 669978 - DNA, 659 bp, Homo sapiens
ttcagatgtgcctggagccacggtcccctggcctgagcagtcacagcctggtttcgtatcagctaccaaggcagacctgggctttagcgttctggaatctttagtaccctgaacccaccagctgcccagactccacctgttctgggcatccaaataagccatttcctttgatatgtacatccatttgttcattctgaaaatgacatacccatattactaggttagaaaacaaagagctagccaaggcgtggtggctcacacctgtaatcccagcactttgggaggccgaggcrgggggattgcttgaattcaggatttgagaccagcctgggaaacatggcaagaccctgtctctacagaaaacacaaaaattagctgggtgtgatgcacgcctgtggccccagcgccttgcgggggccgcatctccagctcctgtttctcagcgttgtcactcagtcatgtgccgtcagatgcatctttcatgagggcacttgctgtgaatccagtggcttaagcccagccccatgttgggacccgcgttccccgtcctacacgacgccgtgatgcgtgtcagcaggcagcctgctcagtgggcacgccccgccttgccttccccagagggacattggctggcgcccggacagcacccacctgctggt

SEQ ID NO: 669979 - DNA, 531 bp, Homo sapiens
acttgtaatcaatttgtaactcttgtccaaaagccagttggcaaccagtgccacagcacgttgccttcctactcccacccccaccactgcctcctgctcatctagtctctccttgatttgtattaaagaaggaaagaaatgtgcaaaatgatttaaaaaaaaaaaaaaccctggtcagagatttgcaagccacccacagagactgctatacagctgacaaaaaccaaccgggcagggtctctgggctaattaaacaaatttgacaatttgaaaagctgcaatgtgccttatgaactatggagtggtcaaaaatgaaaaaaaaaaactactctattaaagacatgaaaggagcttacatatttaatattcaagaaaatcacaggggcaatctaaactccttggccaaatcagatagagagtctgtgaagggtcgaaatatgraattcaaagtgaccctttgaaaatatttggaatttctgaataacaagaagagtcacaataacaatccaataggagcttgtatgtatttgg

SEQ ID NO: 669980 - DNA, 600 bp, Homo sapiens
atttttagaattagaaaataaagtttatacaaattgcctaggagccaatacagctaccagctatcactttcatcttggttactattgatattgttattattattgtcaaaggaattttgttgtagaggtgggaataataatttttaaaagctgatgtgttaacctagaggctggcagaggaatcaggccccacacatcattggaaaccatgaccaaataaggagaggttcaaagactataaaggagtttggaaagtttcggagctttggtttactcttctagaaatggcctaaatccatcagatctgtcttgggttttcttagatcttcttggagtgcttaagttatcccagaaatttgaaagacagttgcaagaggaaacatccagaccgtaccaagtgagagttcagaaaaaaatgagtggycccgatgttctgacctttatacctgggaagctacctgctgatccagagaaatgaaccaagggcgaccccccagttgaagttgtgctcaccttgagcaccgtgtctttaggcctgtcactctcaggaagctgttccaacacacatctgtctctgaagtttgcgtgtaagactgggca

SEQ ID NO: 669981 - DNA, 620 bp, Homo sapiens
tgtggctcttctttaccaatgggaccactttaagaaacagactcttgtagctcctgggtcagagcaagcttattattattcttcattatattttgcttggaacaaagaaagaatttctaaaggtgataaatattaatccttttaatggtggagggctacagtctgtcattgttctagagaattaggtgactttaagaaagatagctaagtttggaatagtgttgtgtagagtaaaaatcatttttataaatcattttcaagaggtagaggagtttaaggtgagtgaaaatagccactcacattagtcaagcargctcttcataggcggatgctgaaggaaaaccaacgcaaagatgagttttcatcaggaggctagcaaacaataacagcaaaactcaagtagcacgtaagcagtgttatcactacttaaatcagcactgatttaatttttagttatgttagatcctgagataattctttttatggagtctaggtatttgccacatctttatcactaggtgcatgttactgaggattgagaagacacaattgtatgtttctaaagagatccaaactacatcgcctcttctttaagtcttgtgttcatgtgaaattattat

SEQ ID NO: 669982 - DNA, 1384 bp, Homo sapiens
acttgatctatccatggctttgggcatccactggggggtcttagaatgtatcccctgcagataagggaggactactgtacatatcagagatttggggagatttataagtctgagagaggcaatgatggcaaagcatgaggtgtgaacacagcttagattcaaactctgacttagacattattagctgtatgttcctacttatcctttttgtgcacagttctctcattggtaaaatgcatctattaatatctgcctcaaagcgtcatttcgtaaattaaatcagaaaatatatgaactatgtaaagaattaaatcaaaacttatacaaaacacagaagctggcacagcaggcttcagcatgctatccgctcgctccattcactccattagcmttgtcatctgtgtctccacacccctttcagattccatacacctctgaaagtctgattttcctgtacttgcctcagcatcttgtgtaacaatttccaaaatacagataatgctcatgcattgtagagggtggagactgggaaaagtgaataccccaaaacctaagctgttgatcaggttcatggactagtagtgagaagatcccatttgttggggccatatatacatagtcattgcgcagatgtgaaaacacaaagcctatggagagaagtaaatgaattcaaattgaaacaaggaaaagagttctcaaaataagaacgagtatttaaatgaagacaatattgtcatattgtcagagagattctctggaggaatctattgagcactgcctaatgagaaatggctcagtcatttttatgcacaattatttatcaattcactatagaaatattgcacaaatgctacaagagcaattgaagatgaaaatgaaatattcttatatttttactttccagggtttccgaatttttattccatgaactccctggtggtgtgatgaagcccatggaactacgtcttaaaataacattattaaatatataaaataaaagatgtcgtatgataaaatcaattaccttcaagtacaattattaaatttttttaacccaaaagaactgaatttgtgatatagtattatatatgcatccttcatgtgttaagcaaaaacaaaatctagtggcgcatctaatccccaagaactactccaataattaatgagcataaatgatatttagaaatacctgcaactggacccctttcttatgctatgtacaaatatcaactcaagatggattaaagacttaaatgtaaaacctgaaactataaaaactctggaagataacctaggaaataccagtctggatctaggacctggcaaaaatttcatgacaaagatgccaaaaacaatcacgacaaacacaaagattggcatacgg

SEQ ID NO: 669983 - DNA, 1384 bp, Homo sapiens
acttgatctatccatggctttgggcatccactggggggtcttagaatgtatcccctgcagataagggaggactactgtacatatcagagatttggggagatttataagtctgagagaggcaatgatggcaaagcatgaggtgtgaacacagcttagattcaaactctgacttagacattattagctgtatgttcctacttatcctttttgtgcacagttctctcattggtaaaatgcatctattaatatctgcctcaaagcgtcatttcgtaaattaaatcagaaaatatatgaactatgtaaagaattaaatcaaaacttatacaaaacacagaagctggcacagcaggcttcagcatgctatccgctcgctccattcactccattagcattgtcatctgtgtctccacacccctttcagattccatacacctctgaaagtctgattttcctgtacttgcctcagcatcttgtgtaacaatttccaaaatacagataatgctcatgcattgtagagggtggagactgggaaaagtgaataccccaaaacctaagctgttgatcaggttcatggactagwagtgagaagatcccatttgttggggccatatatacatagtcattgcgcagatgtgaaaacacaaagcctatggagagaagtaaatgaattcaaattgaaacaaggaaaagagttctcaaaataagaacgagtatttaaatgaagacaatattgtcatattgtcagagagattctctggaggaatctattgagcactgcctaatgagaaatggctcagtcatttttatgcacaattatttatcaattcactatagaaatattgcacaaatgctacaagagcaattgaagatgaaaatgaaatattcttatatttttactttccagggtttccgaatttttattccatgaactccctggtggtgtgatgaagcccatggaactacgtcttaaaataacattattaaatatataaaataaaagatgtcgtatgataaaatcaattaccttcaagtacaattattaaatttttttaacccaaaagaactgaatttgtgatatagtattatatatgcatccttcatgtgttaagcaaaaacaaaatctagtggcgcatctaatccccaagaactactccaataattaatgagcataaatgatatttagaaatacctgcaactggacccctttcttatgctatgtacaaatatcaactcaagatggattaaagacttaaatgtaaaacctgaaactataaaaactctggaagataacctaggaaataccagtctggatctaggacctggcaaaaatttcatgacaaagatgccaaaaacaatcacgacaaacacaaagattggcatacgg

SEQ ID NO: 669984 - DNA, 643 bp, Homo sapiens
aaccagtgattctttgcctcctcagaagataattaagagccaacagacaaattgaatcttggcgtttgaattaacagcaggagataaatacatcccgaaatgtttgaatgttaaattgtaaggtgagttgctttatctgcagcccttgacaaaacatagactctgttatcattgttacagggtaamtgggtataaactgttgcctgaagaaaggatgcagagatacagcaaggaaggcaaatacatagcaagcataatgccactgcttcttccacacccacagcagtcatcactaattgattgcagcactcttctcactacggtcaggcaattcttattaacacagcgtttccagcagccattaacaatcagagtggcatgtgagatttagccatttaacagacatttattgagtgctggctatatgcctggtactggggatttacaacgaataaaacaggcaaaaatgtctatcctcctagaacttgtattactatagggggcagggtcagtaattaagagaaataagttaaatatttagtagtatattagatggtaacaagtacagtggaagaaagtaaatcaggaaagggggatagagattgttgggaagagagaggttatactgttaaataagtagcta

SEQ ID NO: 669985 - DNA, 643 bp, Homo sapiens
aaccagtgattctttgcctcctcagaagataattaagagccaacagacaaattgaatcttggcgtttgaattaacagcaggagataaatacatcccgaaatgtttgaatgttaaattgtaaggtgagttgctttatctgcagcccttgacaaaacatagactctgttatcattgttacagggtaactgggtataaactgttgcctgaagaaaggatgcagagatacagcaaggaaggcaaatacatagcaagcataatgccactgcttcttccacacccacagcagtcatcactaattgattgcagcactcttctcactacggtcaggcaattcttattaacacagcgtttccagcagccattaacaatcagagtggcatgtgagatttagccatttaacagacatttattgagtgctggctatatgcctggtactggggatttacaacgaataaaayaggcaaaaatgtctatcctcctagaacttgtattactatagggggcagggtcagtaattaagagaaataagttaaatatttagtagtatattagatggtaacaagtacagtggaagaaagtaaatcaggaaagggggatagagattgttgggaagagagaggttatactgttaaataagtagcta

SEQ ID NO: 669986 - DNA, 2149 bp, Homo sapiens
acataatacatctgtgttgatctaggtcgctaactttgtggtaatttgttacaggagtcacggggaaacatgtaacttccatgttacaaatggggatcactgttcaagactgttcaggcaagaagtgattccagcctgggcctgcctctggagcacaaggttttccctactctacctcctcgcttctccatgtagcccagcacacagaggtttgctgcttcatgtaagaaaagcgtcctgcaggaagcataacaggcattttgcagcaagtgttttgcaaagcacacatcttcacagttctagcatctgtggtgatttatgcagtggcaaatcgaacagaaatagctacagcaataaaaatacagttaaagaagtctctgtactttaaaggctgaacttcaagcaactgcagacttagggcctgatgattctctgtaattagtacatcagttttgatataaggagggatggatcagcataagacagaggtggaaagaaaccgaaggcagcacaaagccacataaaggacagagcacagcaccagggctagatgaaagttacagacactgtgccagayatttgcagctgagaccctctacctggtgaggttttaggtggccaagcctcattaaaaagttaaatctgtatatcaatctaagctaattgctcagtaagctgcgtagttcattttatagtatgggcccacttattcccagtggatcttgtggtttataaaaacctgagaaaaagagctacatatgaacaccaacagggtgaacctattaaacagtatttgtgggccctgaaattagccctgccttctcctgcccaccacccagactccagcccagtgataagcaacagaaatctaccatgttcatccagtagccacacttccacacctgcctcttcaccttttctccaagggcaagtaggaggaggaacaaaagggaaaaggatgcagtggaaagaccagtctcactgaagtctcgcaagttaaccttgtaagatcaatccagctaggtgctcagggaccattttctatttacttcctggttctgtttttagaagcaaaaggccatggagctactttatcctagagtggctttgctttttagaggacagtggaggaaaacaaaacaaaactccatacttagatctcctagaatattttaatttgcagccatgagatctcttatcataaattgaagaagggacagaaaaaaagggtacttactccactcaaacctaatttccatactcaactctccacttgtctattacaagagtgcttgaagcctggataattcttttcaaattttacccaaaaacttcttaattaaaatgtacaggggcagtttggatcagggggaggggagagacccaaaggaattagaaataaactccaaagacttttattatttcatgatttaaggattcctgtttgattacataacataaaggcactgtacagcttaaccttccccatctgctatgggtgggcagaatcgtgtataaacctccagacagcacatcatgtctagggctttttaaagtcaaaagtgggaaactacattacagcatgatctttgcattaaattcttacatcctgttggcatacacacaaagggtttaatcgagccctttatagatcaatttctctctttgtacatattgactggcaaacttttttaactgaaaccttcacccagaatgagctatcttttctaaggtacagtaatgagttcctttgggaaacaggaatgccacagatagggatctatcactttaagccagcaaatgtgaaaaattggattcacaagtagttagaagaaagggtaattgtaattattcaattcctttttacttcattaaaaaatgcccaagaagattcatttaatggtgagttccttgaccatattttaaaatacctaattcacaagcatttgatttaacagaatgatctaagatgaaatggagaaaatcactgacactttgtgagtactactatatcgcaaccacttcatgcaaggcactttacattttccactcattcaataaacacaaatttattgagtgcctatgataagccaagccctgttctaagtgctgaggatacaaaataaatgtagtaagtcgaaaatctctg

SEQ ID NO: 669987 - DNA, 614 bp, Homo sapiens
ggatcctcggttgggctctaggcttactgaaagcatcttctgggtttagaaatgcattatgtgaacatttatcaagatcccaaggtaattctgatgttgactaaagttacagaaaagtcaatcttgcaggaagggtggcaagaggccagagtttctccttgtaagaagaaagccccctaactctcttcatgaaagagcaaacctgaggtcctccccagcaccccagcacttcctccccaggaatggcttggcagggctgatgggccaagccttcccaaagctgtgtggagacattccttctggtctgttccctcaaagcaactcctctttcaaagcctctgaaataattatatcagtgttcatatttttcaaataagaagacagaggctcaaaaaggtaaaggaattcccaaaggttaactaattagtaagcagcagcatcaacattttggccccaatctgcctaacccaacaattccgaacaacaagaaaaaagtaaaacaacatcaatatctaaaaatttataaaaaatacaatataacacctagaaaaatatttagagtgagctatttttaaacataatgtaatctcaycgaaaagtatataaaccacgat

SEQ ID NO: 669988 - DNA, 1551 bp, Homo sapiens
gaaacgtaagcatcataatattaccttttcctagttcactttccctggaacaacacttacttgggatgtttatgtcacatgctatctcgatataaataaacacaggaaacatggtaattggaacttgtacagctaagaaaaaacagcaccagaagctaatacacacacacagtatatctttactataaactagccccttagtgtctgtttggatgtgaacattttaaggatctctgagaattagggggaagagaaaataatctttttaaataaataattccttgattgaataagccagcaaatttaatcacagtgttgttaaaaataaaaccaaaaaaaaaattaactgaaagagaaaactttagagctttaacacagaatacaaagtccatgaatacccaaaagttatctacgtcctacaatttagcaaacaagagatatgatttattttgcaaagattttctttcaaactttcccaggcgtttgagcacaggctcttagtcatagctaagaattacttcccaaataagttccatatgttataamtctcggccctggtcttttccaaatccagatctggtcataaactatgggccagttttccacactgtacagctgtcaaaagcctttcttacccaaggaagtaaagagcctctttcagcccttaatgtgaggtcttacatcatgtgaagaatgagtgatatgtcaatactagacaaattctctttaaaacatatgacaaacaacattaaaaaaattacacttttccttatctgtgaaaagcatgttccaacagaaaatacaatcatttaataaatcattaacatctgacctcttttggtcttacccttaggccatggcttgaattactttcagttcatagaattggctatgaggctgtttaagattcttctccagaaaatgaagcttaaaaactacttttcttccagacagcttgagacatttgagacattcacactctcctgcacttatcacgatgcgtacaatcagataataaggtaaagcagaaaggctatgccatgtgccacctgaatcatcctatataattatgaaaaactgctcgcttctctttcttttgcctcctaaaaaattaagagatatctactatatttagtgggaaagaaaagttacattttgggaggccaaggtgggcagatcacttgaggccaggagttcaagatcagcctggccatcatggtaaaaccctgtctctactaaaaataaaaataaaatagccaggtgtggtggtgcacacctgtaatcccagctactcgggagcctgaggcaggagaatcacttgaacctgggagacggaggttgcagtgagccgagattgtgccactgcactccagcctgggtgacagtacaagactccacctcaggaaaaaaaaaaaagaaagaaagaaaaagaaaagttagctccttagatgtccagtttacatgagcaggaagatggttgctggttgtaaaactctccttatctccatgttaacccggtccccaaacacagaatcctaacaacaaaacata

SEQ ID NO: 669989 - DNA, 687 bp, Homo sapiens
gtaagcatgtgcagaaaagatgtggccaccaagctattgaatactaactctatgctaccctgggaaccttctcacaaacattcctacagtttcacttccagaggctactmcccacatgctgccggtgggtgggggatatgcaagtgcattcagatatacttaatctgcaaaagcacaaacactgtcttaattataatctaataattctaataaactcatggttaaattcatggccaaataatgcccttacttttttcagcaatgctctacttgattgaaaatctttgttttagaattttacttttgaaatctgtcagaatagcacattcttttcaaatatcctcaataatgacataacctttaaatataggtgtggttttgggggtaaaaatgatttttattagaggcaatgccttgttttcactgatgatatcatcataagagcttctcagaggaggtcattatttataaggacaaataaataattgtttatatttgataacctaatattctctgacagtcttgataattccacgagtttagagttaacaaaacagaggctttttccagttagaaaactatctcagattttgctggttgttgcttagttcaagggcctgcagggaactccaaagaaaatattccctctagtaatacttggattaaattggtgatttggatgttttg

SEQ ID NO: 669990 - DNA, 587 bp, Homo sapiens
ttctgagcaaactatcacaaggacagaaaaccaaacaccgcatgttctcactcataggtgggaactgaacaatgagaacacttggacacagggcagggtacatcacacaccagggcctttcagggagtgtgggggcctggtggaaggatagcattaggggaaatacctaatgtaaatgacgagttgatgggtgcagcaaaccaacatggcacatgtatacctatgtaacaatcctacacgttgtgcacatgtaccctagaacttgaagtataataaaaaataaaakaaaagaaaaaagaacacccatttgacagagctccatcctttttcactgtaatagaaccctgtaataggcacacggctgctaagaatagagaataaaattccctgtctcctagcaatgagatgtgtgcatgtgactaagtttccatcagaaaatctgggcagaaacatttaggggaagttcccagatgccttcctcaaatacacctggcactccttctccttcagcatttcttccctccagctggaagaacatggtctgaacttgtactgcagaatgacctcagctggcttcctctgaccct

SEQ ID NO: 669991 - DNA, 652 bp, Homo sapiens
catcacataaacgtgaccagaacacttgcaaaaatgcagaaaaatgcagtctgtaagtcaagtcactatcttgtctcttgtgaaattacccaggtcaccactcacacagctcatgaaagtctagactatgtttacaactatgccaagtccgtgagtgagggctgggcataccttacaccattaaactcaaatatcccaaagaactatttggcagaatacattctgatatttctttaaaatgtagaagtatagctgactgaaaattttccattactttattttcactggaatacaacctgtctaaaattcaaaatcctcactcttaaacaatgcttcatcttttcttatatttgcaaaggattgcaaagaaaaaataaaatagccattggtgggtaaaatgtgagattgattctcaggcatggggtgattcattatttctcaagaattacttaattaatgtttttaataatgaactcattgcagttttgagacttaaaagctaaattgtgaaaataactkataaactagagaaaacctaaaataaatatttctatcaattctgtttactgcttgacttgagaaatagggttcttctttatgaaggaatttatcaattagaattaggaaaattcctaaaagcttagttctgtgg

SEQ ID NO: 669992 - DNA, 1159 bp, Homo sapiens
cagttccatgtctttttcgtctcatctccaacacttggaacttcatattttatgctctactaataccaatgtgcttgaagttcttctcacataccattacaatcttttgcctactatgcctatgctctttgcttagacagccctcctttcccctgctagctctcactcatctagcaatacctgcctcaagtatcatctttccagagactggacttccacattagatcaagtgccctttatgtccacaaggcacttcatacctacgtgtacctctaactcggcatttactatggcacagacataaactatctgtctctattgcacccttcaatagttgatgcttttggctgggcgtggtggctcacacctgtaatcccagcacttagggaggccaaggtgggtggatcacctgaggtcaggagtttgaggccagtttggctaacatggtgaaaccctatctctactaaaaatacaaaaattagytgggtgtggtggtgtgcacctgtaatcccagctactcaggaggctgaggcaggagaattgcttgaacccaggaggcagaggttgcagcaagccaagattgcaccattgcactccagcctgggtggcaaaagcaagactccatctcaaaaaaaaaaaaaaaaaaaagtcgatgcttttaagttatttcctatgacttactcatctctgaacctataaggatattaaaaaaaaatgtctacctggcatgcagacgggtaataaatgtttttagactgaacactttgaagactatatgaaaacaggagcaaccgaagagggaggagggacaaggacagaaagacattaggagcttgctacgggccacacaaacttttgttcctgtgaacaaaacaagagtcttctgactcttctgtgaataaaaaccctatgaaacatatgtttgaaacccagacaaagccatgtttttggcaatgcttccctttttcaaggttgcgtctgtctcacatgcctcagaaaaaccatctactcagttggtccagaaaataaacaaaaagccaggaattacatgtggataaggaaaggcatctctgactcatctgcctcaagatgctgagtgcaactcattatgaaaaccaacagcccccttggagagaacctcacaggcgtgaaatgcctg

SEQ ID NO: 669993 - DNA, 857 bp, Homo sapiens
tcagaaaatggacaatgattagtaagaagccaaaattaactttaagcacttaggcttagccgattaattccaaagtgaaaattttacagcagagatgtacgtttactgtgggatgttgatacattttaatatgttttatataataagtggtggggcttccaatgtgcctacagattagaagatcctaaaatgacagtacttctgcaaagatccttctgggacaggtgggtggctgcatgccattgtcgccagtcatttttattctctttaactagagtagctcctcttttattcattttatatatttggatctgggatatgtatttatgtaaaatgcaccaagcacactgttttagagactgagaacacagtaataaattgtaaaaacagaaaggaaaaaaagaaaagaaaatttgtgccttcaagtaacttaccttaggggagaattactggctaccaataaataagctagtataagagatagtatgttagatagtgataagcacagctaagaaacatagagcaagtaaagaaaggaaagggagtaggctattttaaacaggaaagtgagagaaggactcactgaagaagatgagagagttcgacagggaggtgtcacagagaagatcataagttcagcgttggacttgttctgctgggattcctcatgaatccaagtggaaagtggagatacatgtaaggtggttgaatatacttgtatggagtttagggcaaggtttagaccagtggtctccaaccctttttcgcaccagaaactggctttgtggaagagaatgatgtgcacttcagtcgttgtgaattttyaatgagataatttataaaaatggtctagtcca

SEQ ID NO: 669994 - DNA, 611 bp, Homo sapiens
tggttatgggtccacaactcaggatcatggtggcccaagagaaacacccgctcaccctatttgatatctccatggtgtacaacaacatgtgctctttcccttttgggtccctagagatgccatgataaattaacctgcaacaaagatctctgcaaatgaaacattctggtccacagactgcctgatgcctcttcagcaaccacatctaataatgtttagtggttaaacaatctcccttgatcttgcccatttcctgtttcccgtgacttagtgatcccgtttccaatgtctcacaaacacaaccttcatttcctgcattaagaaaggcagataagggaacatatttgcaaggagcaggattttcccttcgtcataaatttcttgatgctttgataaagggagaaagtgctgagccccccctggggaamaaagatggcagatatgtggatcccacatgctagatctacccaaactttcaccaaaagtcttccgattccttctttcctattgctgcaggggctttctgacatctgtttatttaagattccatcaccaacagatcaaacagttaaaaaccctctcagctactctcatagatgcaactgtgaaaa

SEQ ID NO: 669995 - DNA, 653 bp, Homo sapiens
cacccgcctgtaattccagctacacaggaggctgaggcaggagaattgcttgaacccaggggggccaaggttgcagtgagctcagatggcgccactgcactccagcctgggcaacagaaattagagcttttctttaaagtgggtgataataaagttcttaattttctcactattccatgagctaagaaattaatattttgaacgagtgacttttgttctttaagactctagtgcacagtaagaagcagccagcatactccaccatccttgtattcctaaagcctattaaaacggttcattgcaacagtcacatggacagccaaaccagtcctttcactaagcactgcattgaaattagtaacttaagtgactttgtaccataacatccaagtgtcagttcaaataataatgacccacccaaaattcttcttggtggttttttacctgcatctgttacaggaaccaatagacaacggtttttcattggctgacagtagaatacacttaatttactttaggtagaaaggtattattagggattttgtagtttaaacattttatttttcagagaggarcccagtcacaaggcatcccttgtagaaaatattaatctggccagtaggacattccatttttcagctgaggatcccaga

SEQ ID NO: 669996 - DNA, 663 bp, Homo sapiens
atgaacaagctaaygttaacttcatattgtatggtgaatgaatcactgttttttccttaagatccggaacaaggcaaggaaattcactctcacatttctattagcctatctcccagaggtcctagcagtacaataaggtgagaaaaagaaattggcatataaattaacaagaaattaaaactctttttattcgtagataatatgattgagtgggtagaaaatcctaaagactacataaaagctactagatttaataggtgaatgtagcaagtttgcaggttacaagatcactataactattagcaataaaacaatggataacaaaaatttttaaatgccatactcagtagcatctaaaaacttttagttttaataaaatgtgtacaaaacctatacacagaaaataacaaaacacgctgaaagatattatagaagaaccaactgaaatggagatacaccaagctcatgaattaaaatttgttaataagacatcaattgtgtccaaattgatctataaatttgatgtaatcccaataaaaatccaagtagaactttttttaaaaataaaaattgacaaagtaactctgaaatttgtatggaaatgccaaaaaatatatgaaccatttatatatctgatatcaagactttctataaagcacagta

SEQ ID NO: 669997 - DNA, 614 bp, Homo sapiens
gtttagtcattagtgactactgaactttaggtagtagtaactatgagagtctattattcttgcttatggctgctgccatgacctatcccacatggttaaaatagtagtgttgctaggatgaggcagcctgtgtttaaacacgcaaagaaaaacacaatgacaaagaatcagacaacaggaaatcttaatagagaaactagagcacaaataaagataatcagagaaaaaagtaaatagagcttcagagagaagagaataataacatcaatcatttcaacatacgtgaaatgggcattttagaaggggaggagagaatcaagggactgaaaaagtatttggaaagataatggctgaaaacatcccaaacctaactaatctatgtgagctcaacaaagcccaagtaggacaaacatraagtgatccactatatacgtagtcaaactgttaaaagtcagagagacaggagaagtgaatgagtgacagaatcaatctaggataaatcttaataccaacaaaagaaaacttacgtacaggcagacattaatataattaatggctgatgtccaaaatgtaatggattaacatattcaaaacaatgaaagaaaaaacaagca

SEQ ID NO: 669998 - DNA, 2568 bp, Homo sapiens
ctactaaggatacaaaatcatgaaacttttgtgttaatcctaacatttgtaaagcaaaactcataaaaaatacagtaaggaactgtgataaagaatctcacatcatttttgtgagaaatttactcagttgaagatgagcagtgtgttaacagacaaaaagaattttttacagaatttgaaaaatattaaaaagttgaattagtgcaatcaatgtaatatacagagctacagaaagagaatgtcaaaatattttaaaaattgataatttgttagactgaaagtaaatctcaataaaaatatcagaaactaagccccattctctgaccacaatttaataaaactaaaaatatgaaagtgtaaagcaaaataaaatgaaataaaccctcaaacacctgaaaaatttaaaaagaaaacaaacttctaatttaggtcacagaaaaaagcaaaacgataattccacactattggaaaataatggcaattataacaactcatatgcatatcaaatggaatacagccaaaactataatgagaggcaaattcatagatataaatgttcctatcctaaatgtgaaagaatgaaaacaaagttaagcattccatttaaagagtaagaaaaaaacccaagaaaaccagaaggaccaaaaataaaagcacctaataaatgaaaaaaagacaagaaaataaaacatatcagattttacttgtctaaaaaagaaaaatctaaaaaataaattaggctaagtgaaatatgaaaaaagaggaaaattcaatgtacaaaactagaaatatcaaaaagcatataagaagatacaaaagatattaaatttatgagagaaacaaatgaccaaaattgatgaataaagtaaaaacctaaccagtgtaaaacacaaaaattgtcaaagaattacctccaacaaaggctccaggcctagatggttttgtagttgagttctttaaaactttcaagaataaataagtcccatgctatataaactgttccagagcacagaaaattagggaaagagttccaattcattttgcaaagctggcctaaccctgatatcaaaacctgacaaagatagcataaaaaaaaaaagaaaattacagaccaaattcatttatgaatgtagatgcaaagttcctaaataatacacttgaaaacagaactcaatggtacactacaagataacacgtcttgacataaggaggacattcattctagaaataagagwttatattaggtatctttttttttttttttttttttttttgagacaggatctcactctgtcacccaggttggagtgcattggcttactgccgcctccacctcctgagctcaagcaatcctccaactcagactctcgtatagctagcactaccggtgcatgccaccatgcccagctaattttttgtagagacagggtcttgttttgttgcccagtctggtcttaaacttctggcctcaagtgatcctctagacttggcctcccaaagtgttgggattacaggcatgagacactgtgcccggcctatattaagtaatatctttataaaatacatcacattgacaggtcaaataagaagcactgcaaaataatctcatttggatgccaaaatatttaatgaattccaatattcacttctcattaaaaagaaaataaagtcttgttcaactataagtgatacatacttaacatcagtgaacttactgtaagaggaaatgatgtctatcactgctatatgtaaaattggaaggaaagtctattaaatgtaataacaaagtaaagacaatgaagaagattcacaggataaactatctagaaaagtcaaaagtaacaactaaaaataaggactaaacaaaatccagtaaatataaaatgtacaacataaaaataacagaaatctaggaagttcctataaaccaaaacaaatagtctttttcatatttattcattttttcatattattcatatttttcacaatatgaatagaaattaccgaggattatgttaaaggagaaaataagtgaacttaattgagggaaaaaagggaaaacattaatgaagggcatgaaagaaacatgtaaattaagaaacatatttctagtctgtagttaatttttctaaaattttcagttaatgtgtttgaatcaaaatccccttagagtttccttttttaaaatcagaaaactgattcgcaacttcctataaaaaaaattaactggtcagaaaataaaaccaaggaaacttgtgaaaaagaggtataaggaggaaagatgggtcctgtcagctatttaaacatttaatagctaaaatatctaagtagtatagtattaccagaagaacagagaacataaagaaagaaaattgagtccagaagcctttagtaaggtaacagtacattatagattagtgttaagacagaaaaattattcaataaaaaagctgggataattaaccatttagaaaaaattaaaataagtaccttatctaatagcatttactaaaataaatcacagatagactcaaggcttatatataaaaaataaaataaaaaatacct

SEQ ID NO: 669999 - DNA, 1215 bp, Homo sapiens
tgagttgttaaattttttcaattctattcaaaatctatttagcagaaatgggttcagtttacaattattagcatacataggctgggcgtggtggttaacgcctgtaaccccagcactttgggaggctgaggcgggcggatcacttgaggccaggagttcgagaccagcctggccaacatgatgaaaccccttctacccaaaaaattaaaaaaaggaaagaaagaaagaaagaaaagaaaaaaagaaaaaagaaaagaaaagaaaagccaagccaggcatggtggtgggtgcctgtaatcccagctactcgggaggctgagagatgagaattgcttgaacccgagaggtggaggttgcagtgagccgagattgcaccacttaacttcagcctgggagacagagtgagacttcatctcaaaaaaaagaaaaaaaaacataaatagtatattcaggaaaagactttggtcactttcagataaaaccaaggtctttcacaatttatttttctcgtaataaactgcctccactcatttggggaaatagaaccagaactatagagaaattttgtaagctacaagtttctcagctttaaatagaaatagcagaacaattcaaagacagcttcccayaacaatgattcagtattttttaagttgcagtcaatataccttaatttgtttcacatcactttacagatatgatcttcaatataattatttagaggctatttcataaaactccaagtgatggtgtgtatttataccctaacaaatactgaaccaatatgtaataataaggccatttttacaaatttactagaccttgaggaaaagaacataacaatgtaactgaggaccaaaagctccaaattgcccctaggtaataaaaggacacctagcttaattttaacactgtgataactattttgctttcaaattattatttcattttttcatggattttcacacatacatagttgactggctaaatttccatgcaagtgactagttatgaaaacattaaactacatttaatttgatttaatagatatctgttgatattaatttgttgatttctttctgcattgactaaaaaaaatcattcctttaactacacaattattccagtttatcagtttatcctacacactaattctcatcaagtcacctctccacccttcatccacacatacattacgtaataatgctaagttag

SEQ ID NO: 670000 - DNA, 614 bp, Homo sapiens
gtggcaccatcttcatcctctcccctgacctatcagatagagaggatatcattttcaaaagtaattcctcgcacacctcctttgtcccaaatatccaagtagtcagaaaatccgggtgcggcttactctgaagtgtgtcacagtttcctcctttgcttttatttttaaaaatctccatttttatccagagctttatctctctagtagtattcaagttcgtgtctttatattctaaattctttctgctctagtccatcttgcatgcagccgcaataaatttttcaaatctatgactattaccacacctaatctmagtttgaaatctaaaattgccctacattgtatatatcttatgagattgtatatcatatgacattgtgtatcatatgagacatgaaatatttttaagatctttcaacttctatttctctatgcagccacatccgtgcttctcagatctcagaaaatagagcacagataaactgacagactatgtgggaaatctatataccaagccatacacttctcaagggtacagacactgccaattacctcacagaggacctggtgtatagtaggcagttgaatttatagtgtgtgttattgcattgagc

SEQ ID NO: 670001 - DNA, 959 bp, Homo sapiens
ggatgcagagaggttttgcatcacacaccacagagtgacttggtaataaatttaaattacacatttccgataacaccaaagttcccctggcgaagcctagaaaatctgcttccctctggtcccactttctagatcttccttcccagcttctctttgtctttctctggcaggaaatagctatcccttaatgcttccattcttacagagcacactcaacaactggctcccagaaaaagacacactttgatctctagaacctaccctcgtaagaaagaagcaaggagactggaaaatatagatatacttttctccrtcacatacttaacgataatttgttgggttttgaatagctagaagagagttcaataatgtggaacagtaatcaatgtcccacaaggagatatcacaaaagttggacagaatactacctataaattatccatgaggaacatttgttttagccaaacctagttagttaactaataaatccagaatgtagaaggatggtttaaaacgatatttctctgagaaagaataatttagttttgtgagtctctacttttttctctttttctttaattaatcattaatttttaaatcaatacatgtatactgagcctaaaaatttagacaatcaagatattatccatccataagtatgtaaagactccatatgcatagatttaaattttttagaaatagcacagtcattgcaaacatacactctgaatgtactttgtctataatcttacttagctatcaactctcttcagaaaaaaatggattctatttggttctagttgaagtcttacaagttccaaataaagctttattgtgtttggggacctccgaagttgaagtactgatcccttcagccatttgccatttgtttcctactaatgcaatgggtaactcgtgtgtgtgtgtgtatgtgtgtgggtgtgtgtgtgtgtggtttg

SEQ ID NO: 670002 - DNA, 659 bp, Homo sapiens
tgccataacaaagtaccactgatacggcagcttaagcaacagacatttattttcttatagtgctgaaagctggaagtctgagatgaaggtgtcamcagggtttctttctactgaggcctatctccttggcttgcaggtggctaccttctccccgggtgcttacatggtcttccctctgtgcatgtctctctcctaacctgccagtcacactggattagggcccacctatatgacctcattctaccttaatcagctctttaaaggcccaacctccatatacagtcacattctgaggttctgcagttaggacttcaacatatgaatctaagggggcatagctcagcccataacactcttcttctgactctccaggtcctgattgttacccctcctggggcctggttacacttcccatccttgggatataagatcagttctatctttgacttgtgataacttaagcagatttctactccagccagtcaaacaattcctcacaaagataattacccttttagcaaaagctgctctgtgatttttccagaatatgaggatcagaaatgttaatactgtctttatatatatgaatgttaaacagcaacagtttccagctatctcttgacgttttcattttgaactgatctcaaatttctcaaagc

SEQ ID NO: 670003 - DNA, 659 bp, Homo sapiens
tgccataacaaagtaccactgatacggcagcttaagcaacagacatttattttcttatagtgctgaaagctggaagtctgagatgaaggtgtcaacagggtttctttctactgaggcctatctccttggcttgcaggtggctaccttctccccgggtgcttacatggtcttccctctgtgcatgtctctctcctaacctgccagtcacactggattagggcccacctatatgacctcattctaccttaatcagctctttaaaggcccaacctccatatacagtcacattctgaggttctgcagttaggacttcaacatatgaatctaagggggcatagctcagcccataacactcttcttctgactctccaggtcctgattgttacccctcctggggcctggttacacttcccatccttgggatataagatcakttctatctttgacttgtgataacttaagcagatttctactccagccagtcaaacaattcctcacaaagataattacccttttagcaaaagctgctctgtgatttttccagaatatgaggatcagaaatgttaatactgtctttatatatatgaatgttaaacagcaacagtttccagctatctcttgacgttttcattttgaactgatctcaaatttctcaaagc

SEQ ID NO: 670004 - DNA, 659 bp, Homo sapiens
tgccataacaaagtaccactgatacggcagcttaagcaacagacatttattttcttatagtgctgaaagctggaagtctgagatgaaggtgtcaacagggtttctttctactgaggcctatctccttggcttgcaggtggctaccttctccccgggtgcttacatggtcttccctctgtgcatgtctctctcctaacctgccagtcacactggattagggcccacctatatgacctcattctaccttaatcagctctttaaaggcccaacctccatatacagtcacattctgaggttctgcagttaggacttcaacatatgaatctaagggggcatagctcagcccataacactcttcttctgactctccaggtcctgattgttacccctcctggggcctggttacacttcccatccttgggatataagatcagttctatctttgacttgtgataacttaagcagatttcyactccagccagtcaaacaattcctcacaaagataattacccttttagcaaaagctgctctgtgatttttccagaatatgaggatcagaaatgttaatactgtctttatatatatgaatgttaaacagcaacagtttccagctatctcttgacgttttcattttgaactgatctcaaatttctcaaagc

SEQ ID NO: 670005 - DNA, 565 bp, Homo sapiens
tcttggggttatgccttcagctttcatcaagggatgctatgaaaaaacaggctaatgaaatccattattctttgttctaggaacgcggaagatattgcccactacatcccacagctctcgctctagaaagcctctcgtgaaaatttccaacaaagtggcctgctaggaaggctttgcatcccttgagtaacaggcaaaatttttttctcggttgataagactagagtaactctctctcttggtactttgcctaacaggaacttagagccttatttaaaggtcaaagattcagtctccagttgggggacatggctcatctagcactaacagagttggtttctagagtggagaggagaccccagatccatgaggccaaatatcctgctcagggctggccagaaagaaatctcagtttatggagcttctgagctaawtgaccaatagatttttttttttttttttggatgatgctttccctgccagcctgtgaagttactgaacttagggccttacacagggtaatccattgggagtcctaacttgagtactaagttacacttccttt

SEQ ID NO: 670006 - DNA, 610 bp, Homo sapiens
ttaataagtttcctgcatgtttaatgctgtctgtcttggcctgtttatcatgtgataccagaagtggtctgacaaaagtgttataatatagggatttgggactggctcacaccctgcccagtgggcaaaggtgaccccatccttggtagaggggcacaaatagaatctgtgacaaaatgttggcttaatgaatgaagatttcactaaaggaagcctgaaaaatgtccttgtgaagcagaatcctgcaagtgcaatgatgcagccttttgaaaaatacaagggggacaaagcctgtgaagacagtagagttgattacttaacgggaagttatactgatgccctgcagcagrataatgacaggctgagagatatcaagcagttaatgggtaaatgtgagtcacagggcttgtgtggtagcttgcaaggaggctcatccctcctgcagtggaagggcaaacagtttataaacctaagctgttggccacagagctccagaaacattgaaatgctcagccaagttattttgttatgtgaagttcaaggccctactagggagacctgagaccttgtaacttagatccagacatctggatagatgcctctaaagatg

SEQ ID NO: 670007 - DNA, 1444 bp, Homo sapiens
aatcggtaaaaaagagaaaaaaggttagcagtttcccaagtatagtccgaatgaaccaaagcaacagttctaagcgttgtgaaagcataaattaagacaaatatcttcatgtttaaatatcaaaagaagcttattaaccacggatggagaggagaactagacatccaagtgtccaagatagaatgcatatagacgatgcccatgtgggactcaactttgatgtcttgatgacatctacacattcacttaacctaaagtagctaatcaaaccacagttatcaaaggaggaatggttctttactaaatgatacagtaacatttcctacatagttttggtatccyagaaactaagagagtcaccatattggttagtcatttctttttccaccaagacaaactcaaaaatatttagatcatcttgccctttcaaatgatgctctgtgagtatgagaatgtcatttatttattacctctttattaagcaaaatatgtgaaccaattttatttttaatatcaagtaatgctcaatacttcatgtatgcatcccacttcgaaatacaagagcatagagacaattaacaaagacctacacaacataatattcatttcaacctggagtgagccattactagcatgaaagtcacacacctttagcttttgatcactggcaaaataatggcaaaaaatcctcttagactctctaaacgtgtgcaaatatttgcaatgcaattttcactgacagtatggcactgggtacttgctccctagcatatacaagaaatgtaagataactttatggtttctatgccaattacatctaaaaagcaggtaaacaaagtcattctatcacatttaccttcatgctaaaataccatatctactgtcgctggaatttgtgtatttatcaactaatgtctattttgaacaattcattctcgcagtaaaacaagtgtataggcaaatgtaccacaagatacaaacaggttaggaagtatgcttttggacatctggaaaacctcaccaagttttgtagctaagaacaccatcagaagttctggaaagagaaatccaaatttactgctttctggtgactttgcttcagaaagaacaacaatacaaataacaaacagtcacttttctggatgagcaatatatttattgactttggacggagctcacatatcatcctgctctatttcaagcctgcggaaggtcaccatctagacaccaacccacctcactaaatgttttcacagtcaagtttcctgagagaagagatgattagctcacccttcgtccatcctcacttccattcacctctcaacatctgctttcttggaacccttcctttcaggatttctgggatgtcactctatagagatttcttccctttcccttcacgtgacttctctgcagtcctctctctcttttcctctgctcggtc

SEQ ID NO: 670008 - DNA, 633 bp, Homo sapiens
ttgaatcccggaaataaccaggtgatttaaagctttctagataatcaccagcaactagaatgataatactttaatgacatattatatttaaataacacctttcaaactccatcatgttaatctacacaacatgttcacaaagtaagaaggaatgggtattactcccattttagattagaaaattgaagggtaatagaggacggcttaccaaggtctcttctcttcctggcagtgggtccaggattggatactcagatgtgttttttattagatttcagtgcctccaaaccgatttagctggtrgactgagttggtctcctgtgaatttttttcagcatcccctggtagacacgagaatttctcagaagtttgaacaaatctcaggctttctccacttcctgccaccacctggcagatatcctaagatggcttcctgggacctacagaaataacatctgaatctccctcaaaccctttcttagttctaaggctttgccacacacagaatgcagaaaatcaagtatgccatgggttacgggcttttcagggtacacatcattctccttttcctcagcactagacatatccacctagtcattagaacctagcctctccttggccttgctcattaaa

SEQ ID NO: 670009 - DNA, 479 bp, Homo sapiens
ccacctcttcagaaagaggaactcaacagggtcccatggtgaccttgacctggtgtgcagcagggaaaagaagataattagccaggctgttgcagagttttcagatacaactttggcttgcctgtcacaccatcccgtctgttctctaactccctgaagaggtttcccttcttgccctgagtgtgttaagcagtgtgggggctgagagaactaaagaaggttgatctgtctagacacttttaggggagtgagttttcagaatgtgatcaggaacagattaacaccttccacgcatatctttaggtttcatccccattttggcaaataaaaatcacccctcagttgtttaataaagaagtttctaatctttaaaacwgtaagctgaccctgcttctctgagtcggtttggaactcaagggcgtgtggtgtcatggaagcccagctgtgtacacatggtgggggagggggttatcaaactg

SEQ ID NO: 670010 - DNA, 2436 bp, Homo sapiens
tcccatggcaaacacccaatctaatgatgtgattaaaaagaatagagaaataagtatggcaacatccttgagcctggccatcgatcagacattaatgtcactcgtaaaacaaatcaaagactctgaagtgttggcacaggataccgggaaaatcagatcaaatcccccaaaatgaaggctagaaatctggtgtctaagccctggccacagattacatactccgaagcatatgtcctaagacacaattctaaggtgaaaagagagttggacattagcagttcactgtgagaggatcaaagagttgctcagatcacactcactagctggcccaccactgcaaagggcagacggcaagaatttggccgatgaccagtctgtacttaccattgtccttccattcccttgagagccagggaacaagttccagcaacattaacatgtagggaaggggacaggtctgagaaatggccaagctcaggacatcaacctctcttttcctccccaggcccggatgcccatgttaggtagtatgctgtagccgttgtcttgaaacacttactttgaacagccgtctaaccaccccatcgagcacatcccacttcgtcttgccactaactccaatgcagccaataagaaagagatgtggtctggaatcctaagggtaaggaaatgtacacaggtgaaaaacaggtggatcttttctgactcagttcagcagaggactcaggttgccttagaactccgccaatggtttgagaggggaataaaagtcctatttgtattaaaaccaggtataacttaggtggaagtaatagtcttaatacctttccctgctttactgctaaaacagcggtccaagagtcaggaaaagaggatttcctctctggaatatggaaacttttgctaagtaaatgtgtcagacagggcataaatcacatattccttgtatggaactctctccacatctgtctagcatctctctcttttcaaaccttgcttataaactcacctcttccaggaagccttcagtgattaaccccatcaggctcagagcttaaattgcttcggcaattctgtacgtaacttatataatgatatattctgtactaatttatatttagttttaggtatttctgtcatatttttgcatatcaagtttacctccttactagatcttaaacattgtcaggacaaaatgtgtttctattttttcttctatcttgtttttaaataacatttattgtttttattcttgttaaaacttaaaacatgtgcaactcagaaaactagtaaaactctgggaagaatactctcaaracatctttttctaactcttttgcatctctgttcacagggctttgcgtagtggcagctaaccagatcacagtgataaaagaaaagctgatagaacatgccataatattgggtttttacatgctcataaggatcagagtcaggagcgtggttgggtggaggtgggggaggtgtcatatggcggctaagcaaaatcagcagagaaaagagcagcagtcttgcagtgacatgatctgaccccaccacttgcccctggcttcaaataagtaatgtttggggtctcgggtttctcaattgtataatgaggataataatccctggtcaaccaacctcacctggatgctgtagtgatgcagaataatataacttttgaaggtgacttgtaaacttttgtaaaaggtatgctctatgtgttcatattgacaatcactagaataaataatccacaaggtgtaacctgcatttactgtaagaatgagtttcccagccggctgtggtggttcacgcctataatcccaacactttgggaggccgaggcaggtggatcacaaggtcgggagtttgagaccagcctggccaatatggtgaaaccccatctctactaaaaatacaaaaattagccgggcatggtggcaggtacctatagtcccagctacttggaaggctgaggcagaagaatcgcttgaacctgggaggcagaggttgcagtgagccaagatcgcaccactgcactccagcctgggcaacagagtgagactctgcctccaaaaaaaaaaaaaaaaaaaaaaagataaagaaaagaaaaaagaacgagtttcccctaacagtccatcactttactagctatgttttgaaaacggagctatctactatatatttcatggctagatgacgctaatggaagtgccaaaatgctgagcttaccccctatagtgaggctagcaagccagccgcaaagctgaatcccctaagaaaggtctggctgcagacgctttgttctgtgggttccctagctgtctgaaactacaatagcatgttggctagaaatactaagaaataacaaacaaaaaactcaagggaacttgaaatggtgactcatgaggcctttttacatttattcga

SEQ ID NO: 670011 - DNA, 601 bp, Homo sapiens
ctctctgcctatgtaaccctgagcaagtcacataagctcactgagccaggattccttatttgtgaaatatggataattcctgatgtggtaagtcctctgggaggttaaagctagtatgtagagtacctaggagaacacctagaacatagcaggtgctcagtgaatgaaaattgttgtttttgatgatgaaattcagactaggaccactgatcccaaactgtcaagagtcctacggtagagtttaagcagcctcccaaggagcctctgtttctggtgtacccagagctctcatgagttgctaccacactgacaatggaaaaatgaacctattctctccacaaaactcttccacaagttggaggggccctggaggcccaccaacatctccccacatagtgctccaccagcttctggttaggtgtagggcacccaaagtcgtccctgcactcaccttctagygtcaaactttgcaccccataggaggtgacatgacagactcctacccagactacaatggcctgtggttctgttcacatcttctctagggcttcaattactgcatactcataggttgcccacaagcaatgtccaggcaactcaa

SEQ ID NO: 670012 - DNA, 1553 bp, Homo sapiens
gttctcatgaatattacagaaacattcttggtcctgtcatttgacaaagaaacataaatatttagatattgcgcagaagtggttgactggaagtatagacaaatgatcaggtttgggatgtcatagtttattcattcaggaataaaatagagacaaaacgactccacggtagatagtgtgaagtggaaaagggtatttaggcaggattcttcagcagattgcatgctgccaaccttgcctttttggattgttgagaaaacagtcatatagagaaaccatagatttcaatggtgaaggggaagagaatcaaaaattgttatacttttatgtccagcacattgtataagatctggatttcttctttgtttcctgaggccaggacccaactgtctcttctaaactcgtgaactttttttttttttttgagatggagtctcactctgttgcccaggctggagtgcactggcgcaatctcggctcactgctagctccacctcccgggttcacgccattctcctgcctcagcctcctgagtagctgggactacaggagcctgccaccatgcctggctaattttttttttttttggggggggggtattttttagccaggatggtctcgatctcctgaccttgtgatctgcctgcctcagcctcccaaaatgctgggattacaggcatgagccaccgcacctggccaaaactcatgaactcttaaagcaaccatgtgttaatgaggccagtatgagatgggagtaggcacttcatcttcatctcatcaaataagcaacacatcattgactccataagatctgcagcttgattgaagcttctatggcagtgacccagatattctggttcataaaaatactaaatcctttaatgaaacacacagaattaagttaatatgatttatgtcacccgtcacccagggggctgatgcttcatagtgatcttgattaaagggagattatgaaatacatgcaacctccctcatttkcatttagttcaaagaaaatggcccaaatggaactaaataggcatttgagcacaaggaaaagatttttttttttaaattaggcatgaaaatgaaacaacgtgccaataatttgcacagcattatttttggactagaaagtgaattaggcatgaaaaaagttccaaactgattatgttaattatgtttcatctgaacaaggaaatttaataatctccatcccccaatatacatcaatctcaaatttggtactttaagctatttccatcttagaatgttgagtggtgcatattttaaacacatgtggtttcttttttgattcgaaggaagaaaaaagttagaaactagtatgtaatactctgtgacatttgtttcattatcttcatattacaggtaaaaatattgaagctcagtgggtccaatcttaatagtaggaagaagtaaagcagaaatttaaattcacgcctatctgtttccatagctcattattttctaccgcatcatgttgccttctattctttcctttatatctggagcaaagactatttcgcatgact

SEQ ID NO: 670013 - DNA, 1553 bp, Homo sapiens
gttctcatgaatattacagaaacattcttggtcctgtcatttgacaaagaaacataaatatttagatattgcgcagaagtggttgactggaagtatagacaaatgatcaggtttgggatgtcatagtttattcattcaggaataaaatagagacaaaacgactccacggtagatagtgtgaagtggaaaagggtatttaggcaggattcttcagcagattgcatgctgccaaccttgcctttttggattgttgagaaaacagtcatatagagaaaccatagatttcaatggtgaaggggaagagaatcaaaaattgttatacttttatgtccagcacattgtataagatctggatttcttctttgtttcctgaggccaggacccaactgtctcttctaaactcgtgaactttttttttttttttgagatggagtctcactctgttgcccaggctggagtgcactggcgcaatctcggctcactgctagctccacctcccgggttcacgccattctcctgcctcagcctcctgagtagctgggactacaggagcctgccaccatgcctggctaattttttttttttttggggggggggtattttttagccaggatggtctcgatctcctgaccttgtgatctgcctgcctcagcctcccaaaatgctgggattacaggcatgagccaccgcacctggccaaaactcatgaactcttaaagcaaccatgtgttaatgaggccagtatgagatgggagtaggcacttcatcttcatctcatcaaataagcaacacatcattgactccataagatctgcagcttgattgaagcttctatggcagtgacccagatattctggttcataaaaatactaaatcctttaatgaaacacacagaattaagttaatatgatttatgtcacccgtcacccagggggctgatgcttcatagtgatcttgattaaagggagattatgaaatacatgcaacctccctcatttgcatttagttcaaagaaaatggcccaaatggaactaaataggcatttgagcacaaggaaaagatttttttttttaaattaggcatgaaaatgaaacaacgtgccaataatttgcacagcattatttttggactagaaagtgaattaggcatgaaaaaagttccaaactgattatgttaattatgtttcatctgaacaaggaaatttaataatctccatcccccaatatacatcaatctcaaatttggtactttaagctatttccatcttagaatgttgagtggtgcatattttaaacacatgtggtttcttttttgattcraaggaagaaaaaagttagaaactagtatgtaatactctgtgacatttgtttcattatcttcatattacaggtaaaaatattgaagctcagtgggtccaatcttaatagtaggaagaagtaaagcagaaatttaaattcacgcctatctgtttccatagctcattattttctaccgcatcatgttgccttctattctttcctttatatctggagcaaagactatttcgcatgact

SEQ ID NO: 670014 - DNA, 1429 bp, Homo sapiens
tctatctatctatctatctatctatctayctatctatctatctacctacctacctacctgtctacctgtctatctatatctcttgttggttctattcccctggagaactctaactaatacaacctctatgctataacatgataggatattattcaacaacattcagaatataagaattaatagccaggcttggtggtacatgcctgtagtcccagctactcaggaggctaaggcaggatgattacttaagcccaggaatttgaggttgcagtgagctatgatcacaccactgcattccagcatggggaacacagtgagactctgtctctgaaaaaaaaaaaatacacacacataaaagcatttagattgggacaacaactgagacaatttaacgccagttaagtgttttctgtctactagactgtattggaaataagtatgtatgttgccaccatctgcttccccagcttatccccagggtgcctctaggatgcacctaattctctaacactttcaattctgtcccctaaatgcatattcaataaaaatataccaattctaggccctgctttttgagagtgcactctttaggggctctgctctatcttttttggagggcaatagtgaattcaataatctttttgctaatatttaaagatgctaatggccatctcttatcaactcacaaataaaagctatagaaaggaattatagaagaaagctggtgcctcttcaatgtgatgtccagccatgggtattttccgggtaggcttgacagtgaagtgtctaatttgcagtaatttgcttaatcatggacacaaattggaaaatttccctccttggcagcaatataaagaagtagagggtcttttattctgtaaatggaaataaataggcttttgcattaccttggtacatctgtttagcatatattcttgaagcatttctcttaagcattagtgcaacttcaacatccatgtactctcaaagatacttataaaatgcccatctataactttctgttttaaaattacaaatagtttttaattctcttgatgtttgtttaattctctcttgcagatgatctatgagcacttattcacttcctaagaatggctatttagagacagagtattgcatgcacggcagtgatttcactcaaagaaatatcaggataaaatctatttaatcttacattggtgtcgtttaatgaaaaatatattttaatattaaaaattcaaaatctttaggagagtgtctgcagatatttgcaggaaccagtacattaagaaagactcaataacagaatattgcctttatatagaacttatataatcataaccttttgtacagcatcaactacaatatttaatttttaatatgacagaagcattcaaacagatcccctaacagattgcctgaactaagc

SEQ ID NO: 670015 - DNA, 655 bp, Homo sapiens
tcaatagatctgataaaatctatgtttccctcatttctaaaggtatatgaatgtatattttccaaatcctttgaaagttcttttatatgcttataaattaaattcaactctgggaaacagaagaaaaatatgtcagcaaaagccttacaagtggccatacaactaacaacttacattaattaaggatttaccaggagccaggctctgtgctaagcactttatatagattatcttgctttctaatcacaaaagctctatctttatttcacatgtgagaaaattgaggytcaaagaaattaactgtttcttgtttcatagctgctaagaggtagtgctatggtttgaaaccaatcagttttcagatcttatactataaatcacactctacacctgttttgtgccatctaaaaatattttttcaaatatattcaagtctgtgttataacattttttatgcatagtgctgtaatttttattatgtaatctctaaagtaaggtaagaccctacaaaaattatggttgtttcaatctgctggcttatgaatgagcttttcaaacagtaagttacctactcattaagtagtttatctagtattcaatggtgcctgatatttccggagactgacttttggtcttgaagaataatctattgaat

SEQ ID NO: 670016 - DNA, 655 bp, Homo sapiens
tcaatagatctgataaaatctatgtttccctcatttctaaaggtatatgaatgtatattttccaaatcctttgaaagttcttttatatgcttataaattaaattcaactctgggaaacagaagaaaaatatgtcagcaaaagccttacaagtggccatacaactaacaacttacattaattaaggatttaccaggagccaggctctgtgctaagcactttatatagattatcttgctttctaatcacaaaagctctatctttatttcacatgtgagaaaattgaggctcaaagaaattaactgtttcttgtttcatagctgctaagaggtagtgctatggtttgaaaccaatcagttttcagakcttatactataaatcacactctacacctgttttgtgccatctaaaaatattttttcaaatatattcaagtctgtgttataacattttttatgcatagtgctgtaatttttattatgtaatctctaaagtaaggtaagaccctacaaaaattatggttgtttcaatctgctggcttatgaatgagcttttcaaacagtaagttacctactcattaagtagtttatctagtattcaatggtgcctgatatttccggagactgacttttggtcttgaagaataatctattgaat

SEQ ID NO: 670017 - DNA, 633 bp, Homo sapiens
tgataagaggtagaaatatctattgtgtcacccatttcttgtggtagcattgacttagagttaatctcagaaacttcacttaaccttcttartccttttcttcctgtaaaacaaggctaaaaattgtcataactatattctagtttccacaaaagctaatctaagtattaaaatttttattgtgactttgtgagagtgatcctgtatttttcacaaaactaagaagaaaatatttttatttagtgtttttctatgaatagcttttggtttttggaaaaaccatctgatctttattactaagattcttgcttcttaggtcaaattcttgttccctgtctttatatagagtctaatattgggaacatacccaaggaccacatggataattttatgatgcttgctgactattatgtttcttgcccactttaatagcctaataataatagttacgaattcttattgagaaatagccattcttaatcaatgccaatgacagtgtttcctctttcagactgaaggaaaaacagggagaaaaccagttcatatattatggttaaacactgataaaacattttggttaaatatctgccttcatgggttattgcaaaatagattagtttaaagctcatctag

SEQ ID NO: 670018 - DNA, 1553 bp, Homo sapiens
tcccagcactttgggaggcgaaggtaggtggatcatctgaggtcaggagtttgagaccagcctggccaacatggtgaaaccccatctctactaaaaatacaaaaagttagctgggtgtggtggtacacacctgtaatcgcagctaccagagaggctgaagtatgagagttgcttgaacctaggaggcaggggttgcagtgagccaagatcgtgccattgcactctggcctgggcgacagggtgagactctgtcttgaaaaaaaaaaaaaaaaaaaagataggacgctgatgsctctttcttaagagaatgaagacactcatcattatattgactaagttaaaatatataagtatagagaagcaactagaaggaaacactctaatatgttaagagtggttatctcttttggtgggattatgtgattttaaaaaagttatgtgttttctgaaatttatgaaatgaatattattcaaatttaggaaaaaaattttgttttagaaggacgctggttaaattcagtgtaactcattgaaaactgctctgcacctcagcagttggtggtgcctttttctcctgcctggattcaaaccctggctctgccttttaccaactggggtgatcagggacaagttaattaacttctctgtgcctttgctttttgttttgtaaaacaggagcttacagtgcctaattcaggctaatttagcaattaaatgagatactgcttataaagtacccggcacacataagtacacaaaaatgttagctacgtgaggtgcagtggctcacacctgtcatctcagcactttgggaggccgaggtgggtgggtcactggaggtcaggagttcgggatcagactggccaacacggtgaaaccctgtctctactaaaaatacaaaaaattagccaggcatggtggtgcatgcctgcagtctcagctactctggagactgaggcaggagaatcacttgaacccgggaggtagaggttgtagtgagccgagatcgcaccactgccctccagcctgggcgacagagtgagactctgtctcaaaaaaaataaaaaagaaaaaagaaaagaaagaaagaaagaaatattagctacaatagtattgttattgcatgggaaggtctggaatgtagtgactgttccagaccttcctcagctcaggtatctcagaggaagaattcttccttctctgagtggcctcagctatgctgcctcctggattactatcctattattcacccaaagattgcaggcagctgggcctcccgtgggacaacaatctgaggcaagggtgacaaaccaggcagaggaagtgtttgttttcctaacttcttgagcgggatccaaagacatcagttgcttagctgactcagcctctttgcattaggagaccatgagtggcacccacagggcaaacgatatagctctgtgtctgagttggtatccagtttgggatttgttatttcattcatttggttgttaaattcacacatgtgtattagatgcctgctatatgtcaggcactgctgtaggcaatgagag

SEQ ID NO: 670019 - DNA, 1553 bp, Homo sapiens
tcccagcactttgggaggcgaaggtaggtggatcatctgaggtcaggagtttgagaccagcctggccaacatggtgaaaccccatctctactaaaaatacaaaaagttagctgggtgtggtggtacacacctgtaatcgcagctaccagagaggctgaagtatgagagttgcttgaacctaggaggcaggggttgcagtgagccaagatcgtgccattgcactctggcctgggcgacagggtgagactctgtcttgaaaaaaaaaaaaaaaaaaaagataggacgctgatgcctctttcttaagagaatgaagacactcatcattatattgactaagttaaaatatataagtatagagaagcaactagaaggaaacactctaatatgttaagagtggttatctcttttggtgggattatgtgattttaaaaaagttatgtgttttctgaaatttatgaaatgaatattattcaaatttaggaaaaaaattttgttttagaaggacgctggttaaattcagtgtaactcattgaaaactgctctgcacctcagcagttggtggtgcctttttctcctgcctggattcaaaccctggctctgccttttaccaactggggtgatcagggacaagttaattaacttctctgtgcctttgctttttgttttgtaaaacaggagcttacagtgcctaattcaggctaatttagcaattaaatgagatactgcttataaagtacccggcacacataagtacacaaaaatgttagctacgtgaggtgcagtggctcacacctgtcatctcagcactttgggaggccgaggtgggtgggtcactggaggtcaggagttcgggatcagactggccaacacggtgaaaccctgtctctactaaaaatacaaaaaattagccaggcatggtggtgcatgcctgcagtctcagctactctggagactgaggcaggagaatcacttgaacccgggaggtagaggttgtagtgagccgagatcgcaccactgccctccagcctgggcgacagagtgagactctgtctcaaaaaaaataaaaaagaaaaaagaaaagaaagaaagaaagaaatattagctacaatagtattgttattgcatgggaaggtctggaatgtagtgactgttccagaccttcctcagctcaggtatctcagaggaagaattcttccttctctgagtggcctcagctatgctgcctcctggattactatcctattattcacccaaagattgcaggcagctgggcctcccrtgggacaacaatctgaggcaagggtgacaaaccaggcagaggaagtgtttgttttcctaacttcttgagcgggatccaaagacatcagttgcttagctgactcagcctctttgcattaggagaccatgagtggcacccacagggcaaacgatatagctctgtgtctgagttggtatccagtttgggatttgttatttcattcatttggttgttaaattcacacatgtgtattagatgcctgctatatgtcaggcactgctgtaggcaatgagag

SEQ ID NO: 670020 - DNA, 1553 bp, Homo sapiens
tcccagcactttgggaggcgaaggtaggtggatcatctgaggtcaggagtttgagaccagcctggccaacatggtgaaaccccatctctactaaaaatacaaaaagttagctgggtgtggtggtacacacctgtaatcgcagctaccagagaggctgaagtatgagagttgcttgaacctaggaggcaggggttgcagtgagccaagatcgtgccattgcactctggcctgggcgacagggtgagactctgtcttgaaaaaaaaaaaaaaaaaaaagataggacgctgatgcctctttcttaagagaatgaagacactcatcattatattgactaagttaaaatatataagtatagagaagcaactagaaggaaacactctaatatgttaagagtggttatctcttttggtgggattatgtgattttaaaaaagttatgtgttttctgaaatttatgaaatgaatattattcaaatttaggaaaaaaattttgttttagaaggacgctggttaaattcagtgtaactcattgaaaactgctctgcacctcagcagttggtggtgcctttttctcctgcctggattcaaaccctggctctgccttttaccaactggggtgatcagggacaagttaattaacttctctgtgcctttgctttttgttttgtaaaacaggagcttacagtgcctaattcaggctaatttagcaattaaatgagatactgcttataaagtacccggcacacataagtacacaaaaatgttagctacgtgaggtgcagtggctcacacctgtcatctcagcactttgggaggccgaggtgggtgggtcactggaggtcaggagttcgggatcagactggccaacacggtgaaaccctgtctctactaaaaatacaaaaaattagccaggcatggtggtgcatgcctgcagtctcagctactctggagactgaggcaggagaatcacttgaacccgggaggtagaggttgtagtgagccgagatcgcaccactgccctccagcctgggcgacagagtgagactctgtctcaaaaaaaataaaaaagaaaaaagaaaagaaagaaagaaagaaatattagctacaatagtattgttattgcatgggaaggtctggaatgtagtgactgttccagaccttcctcagctcaggtatctcagaggaagaattcttccttctctgagtggcctcagctatgctgcctcctggattactatcctattattcacccaaagattgcaggcagctgggcctcccgtgggacaacaatctgaggcaagggtgacaaaccaggcagaggaagtgtttgttttcctaacttcttgagcgggatccaaagacatcagttgcttagctgactcagcctctttgcattaggagaccatgagtggcacccacagggcaaacgatatagctctgtgtctgagttggtatccagtttgggatttgttatttcattcatttgrttgttaaattcacacatgtgtattagatgcctgctatatgtcaggcactgctgtaggcaatgagag

SEQ ID NO: 670021 - DNA, 583 bp, Homo sapiens
aggggtgtcaaggagaaagcatgtggtcaccttcatggcaccatcacagcctttggtttgtttaaacaaagtgaattagtgttgtggtttctgctgctaagaaaaccctgttcgtttattcattcacctattcattccttcatccgttcatttattcatttattcatccattcatccattcagctgacatttattggccatctggcaggtgctgatctgggcattagaagtacagataaggtcctctttgcaaaaaacttcttgtctattgggaagacctacaaagaaaagatgaaaatgaaatgtgaagattgctgtactaaggttccagtggaacagagaagagaaatctttaaaatctgcctgggagagccaagagaggcttcagccaataggtcctatgtgagctgacccttgaaagccggctcaaattttaccctggggtggatttcacccatggggtgggcaggagaagggagtgtccacscaagagagagatgtgtgcagaagaatttggtagatgagtctggtgtattttagaatttagactccggatttgaccataggatgtttgagttctatc

SEQ ID NO: 670022 - DNA, 1081 bp, Homo sapiens
tagcaccactgttagtctccatttcctcacactgccttatttttcttcatagatattattactaaaaataygttttgtttatttatttattggtagtctcctccattagaatgtcaattatattgagggcagagatattagcagttttattgattattctttccttacagtctagggcagagcttagcatataatagcactaaataaatgtctacagaataaacaaatacagagaaacataaactcacctccaaccccggaaaaaggaaaccttttaaatatacacaatccttttaagtgtcagttacaaaaattaagtattaagccaaaaagtgaatatttatacttccaaaagacataaattacttagtttataattagtaacacaaaataatataaataaaaaattagtaagatggaagtggccataaaaatataaacaatgacatcttaaaaaggaaatctatttaataattcttaggttaaaaagaaattactattactaaattgctatttaaaattaactacgtatcaaaaccagtggttgcagccaaagcagttttcagagaaaaaatcatacacataaaacattcactaggaaaaaaaaacaaaaaacacaaaactgagaataattcgattttactttaattttaggaaacttgaaaaagagcagaaaattcaccatattcttctgaatagaagagtaggcataataaagataaaagcagaggactttcaggtaaggtcataaaaattaagttattcaaacaaatcttaacactgcttacaattaaaaaatgctgaatacattattttaacaatcttcttgaaaagtatcaagtacttgacaacaaagtaagcaattaccaggacagagtggaaggaaaaacaaagcagggattctagagaaagaagtagaactcagctgtcatttagccttaagaacttttgacattccagaaagaggaactttgttttcagatctgtgcaggataaggaaggtgaaacaaatgacaaagctgaaggtttgaacaagataaggggtgtaatgtacatgatagtggagactttcttcaccata

SEQ ID NO: 670023 - DNA, 683 bp, Homo sapiens
catgagccacctcgccgggcccagatcagtttttttcaaattcacctgaagggaaatcttgatgctaacagattagaagataacagtctccttccctcactcccaaaaagaaccccagtccctagtcaggaccccaaaagcaagatctagtctttaaagcctaatatgatatttggtgccctcaagatccccctcctggatcttctctcaaaagatactgttaatgaagatgaaaaaggtacctgataactctgctgtgaccgtcaggtgatgrgtgcaccaaaatctcagaaatcaccactaaagaacttatctatgtaaccaaacaccacctgttccccaaaaacctattgaaattaaaaaaaaaaaaaaaaagaggagctaaacatcaggaaaaaaaaatgaaaagaaaaaggtgcctgataactctgctgtgaccataaaggcaatataccaatatactctaccctgtccacacggctctagattttccaaagagcatgttccctgaattctctccctccttacttacgaagcactttgataagaactttgtgttctgtgtgagttgtccattaggtaatctcaactggaaaaggagtcctaactttgtcccaagtgctacccccaccacaccaataacctggctaggttgagaagtgttttaaacggcttttatattc

SEQ ID NO: 670024 - DNA, 683 bp, Homo sapiens
catgagccacctcgccgggcccagatcagtttttttcaaattcacctgaagggaaatcttgatgctaacagattagaagataacagtctccttccctcactcccaaaaagaaccccagtccctagtcaggaccccaaaagcaagatctagtctttaaagcctaatatgatatttggtgccctcaagatccccctcctggatcttctctcaaaagatactgttaatgaagatgaaaaaggtacctgataactctgctgtgaccgtcaggtgatgagtgcaccaaaatctcagaaatcaccactaaagaacttatctatgtaaccaaacaccacctgttccccaaaaacctattgaaattaaaaaaaaaaaaaaaaagaggagctaaacatcaggaaaaaaaaatgaaaagaaaaaggtgcctgataactctgctgtgaccataaaggcaatataccaatatactctrccctgtccacacggctctagattttccaaagagcatgttccctgaattctctccctccttacttacgaagcactttgataagaactttgtgttctgtgtgagttgtccattaggtaatctcaactggaaaaggagtcctaactttgtcccaagtgctacccccaccacaccaataacctggctaggttgagaagtgttttaaacggcttttatattc

SEQ ID NO: 670025 - DNA, 1304 bp, Homo sapiens
ggtgcctcccagttaggctactcgggggtcagggacccacttgaggaggcagtctgcccatctctcaagctgcgtgctgggggaaccactactctcttcaaagctcagttggaaatgcagaaatcacccgtcttctgcatygctcatgctgggagctgtagactggagctgttcctattcggccatcttggctcccaagccatgatcacaagttccaacaataggctgtctgcaagctggaggagcaagaagagccagtccgaatcttaaaactgaagaacttggagtctgatgttcaagtattcctggaagcatccagcacgagagaaagatgtaggttgggaagctaggcccatctccattcttgctttcttatacacaaaataaaagaaagtaagctctgtgaattgttgattgacttgtatatctcaagtgtgaagatttatttgatgaaaatgttaaatatttgtgagtgtatagcttatgagatgcagctataatacgtttaaaccaatggagttttattggcagagtaaacgtacacttgcttctaataatactcacaataaaaaataaggcctgtcccaagtgccttagctatggagtaatctgtatcagtcagaaaaacttaactccacccccagaaaaagaggttagctaccttcagatttgtctctgtttatttactatgtagactctaaatcccatactggggagattacctgtgttgtcaaggtttcctttcaagaaacaacaaactcttcacaggtcaggtagcacttaaagctcatgaaatggagaataaagacaaagttggcattctggcattcagaagggaaaagtctttaaagagtaaaaaacattcctatagttagttgtataagtgtacggaaccatggggcattgcatgacccaattttggggcaattcatgagtaagaaagtggagaattgacaaagcggttagaaaggaggcgtgttctacaacaagacaagattacagagccttttggataaattaggatttcagctggtgcccccaattcacgtttttttgtttggttgggttttttgttgttgctgttttttgttttgttttgttttagtagagatagggtttcaccatgttagccaggatggtttcgatctcctgacctcatgatctgcccacctatgacttcccaaagtgctgggattacaggcctgagccactgctcccggccttccaattcacgtttggaagaggaaacttgcagatcggagtgactcattcttcaagtgtgttctttaggcagggcctccatc

SEQ ID NO: 670026 - DNA, 1304 bp, Homo sapiens
ggtgcctcccagttaggctactcgggggtcagggacccacttgaggaggcagtctgcccatctctcaagctgcgtgctgggggaaccactactctcttcaaagctcagttggaaatgcagaaatcacccgtcttctgcattgctcatgctgggagctgtagactggagctgttcctattcggccatcttggctcccaagccatgatcacaagttccaacaataggctgtctgcaagctggaggagcaagaagagccagtcygaatcttaaaactgaagaacttggagtctgatgttcaagtattcctggaagcatccagcacgagagaaagatgtaggttgggaagctaggcccatctccattcttgctttcttatacacaaaataaaagaaagtaagctctgtgaattgttgattgacttgtatatctcaagtgtgaagatttatttgatgaaaatgttaaatatttgtgagtgtatagcttatgagatgcagctataatacgtttaaaccaatggagttttattggcagagtaaacgtacacttgcttctaataatactcacaataaaaaataaggcctgtcccaagtgccttagctatggagtaatctgtatcagtcagaaaaacttaactccacccccagaaaaagaggttagctaccttcagatttgtctctgtttatttactatgtagactctaaatcccatactggggagattacctgtgttgtcaaggtttcctttcaagaaacaacaaactcttcacaggtcaggtagcacttaaagctcatgaaatggagaataaagacaaagttggcattctggcattcagaagggaaaagtctttaaagagtaaaaaacattcctatagttagttgtataagtgtacggaaccatggggcattgcatgacccaattttggggcaattcatgagtaagaaagtggagaattgacaaagcggttagaaaggaggcgtgttctacaacaagacaagattacagagccttttggataaattaggatttcagctggtgcccccaattcacgtttttttgtttggttgggttttttgttgttgctgttttttgttttgttttgttttagtagagatagggtttcaccatgttagccaggatggtttcgatctcctgacctcatgatctgcccacctatgacttcccaaagtgctgggattacaggcctgagccactgctcccggccttccaattcacgtttggaagaggaaacttgcagatcggagtgactcattcttcaagtgtgttctttaggcagggcctccatc

SEQ ID NO: 670027 - DNA, 555 bp, Homo sapiens
agatagcagtcgttgcagtacagttggtggtttctgatcctgacttcagctcctgaggaagagcctccgaggtcacactcacaggcaacacactggggaacaaaaaaaaaagaacatctacaatcagtcagctcaagaaagcttggggcactcctgggggtgggggggaaatgagcagaatgctacttctaagctcttagatacatttcagcaaagaaaaaaaaaggccgaaagatgattagtagattcaaatcaagmccgccagataagatgttaaagaattcataaagccaatattaagagccaagatgaccagtctaaatatactccccaaaaatagaaataatttgctgattgactttaagaaatttagtttttatccccccagaggaatggcaggtaaggccccccatgaaagaagtggccagagtgaatgaaggctgggccctggcactccaccctggggtgggccgctcccagtgtccctgctgcactagcttagcaagtgttcccacacagcgcctcacttcaaggctggatatttcgattccatgt

SEQ ID NO: 670028 - DNA, 630 bp, Homo sapiens
ccaaagcaatctaaaatatttgtgatttacctgatcttgcttaatcacagtttgaaaaaattggtcatggcaaaatttttttgcagatayatatttagttcttaatttactgaaactgagtttctatgcgatagcaattttttttttcttcagaattatctagtgttacttggttgactcttgagcttcatgttaacatggtaagaaaaaactgctttgctaatctctttgacctggagtaactgcaaagctaagtccttataatattacaaggctgagcttatgtccaaactagaaatttcaggtgtttcaaatgcagtacttgaattttcagcttctttaatggaaatgcaacattaccacgatgcaagaagacattaacaacaatatatttccaagacatgcttttacattctaaggttattatcataaacatttaaaaatatacatcattcaacacaatagataatgaatttaagttcctaagagacttgttttcccattgattatgaatgaaacccattataattgatggtgactgtgtatccacctcaatgagcagctttgctctttttcatgtatgcatctggacttaggttatttaaaagttattttttcacatttagataa

SEQ ID NO: 670029 - DNA, 661 bp, Homo sapiens
tatttaagtctactaaaatccatggtacaatcttgatagaaactgcatgaaaccagtttcaatatcagttttggaagaatggacatttttacattgttgaatcttccagttcatgaacatggtatgtctctccacttatttagagagcaaagcttagtatacttacagtaaagttaaaaatgagcaaaattttgcttattatcaactgagtaaaattgtgcagggtttatttcaccaaattgaaatttttgtgacattagatagacttgcattcatttattttgacttttccaaattattttatcttctattgctcaaaccagatggaataatagacaaatragctgatcacaatgtccgtgtgtaaaatctttttgggagtattaagcattttaaatagtatgcagtttatcctgaaaagagaaaaatagttgcttattgtcatattcaggttaggacaaactagagaagttgccccatggtgaccaggcgtttggagtggaagagaaaggaagtaggtgaagaaaggagagatagatagtacacaatcacctcaataggcagactacttacttcacaaaactccagggcttgtgatttgtcttcagcattattggtttcctttttaccccagctatttcactaagttatgtggagttaa

SEQ ID NO: 670030 - DNA, 661 bp, Homo sapiens
tatttaagtctactaaaatccatggtacaatcttgatagaaactgcatgaaaccagtttcaatatcagttttggaagaatggacatttttacattgttgaatcttccagttcatgaacatggtatgtctctccacttatttagagagcaaagcttagtatacttacagtaaagttaaaaatgagcaaaattttgcttattatcaactgagtaaaattgtgcagggtttatttcaccaaattgaaatttttgtgacattagatagacttgcattcatttattttgacttttccaaattattttatcttctattgctcaaaccagatggaataatagacaaatgagctgatcacaatgtccgtgtgtaaaatctttttgggagtattaagcattttaaatagtatgsagtttatcctgaaaagagaaaaatagttgcttattgtcatattcaggttaggacaaactagagaagttgccccatggtgaccaggcgtttggagtggaagagaaaggaagtaggtgaagaaaggagagatagatagtacacaatcacctcaataggcagactacttacttcacaaaactccagggcttgtgatttgtcttcagcattattggtttcctttttaccccagctatttcactaagttatgtggagttaa

SEQ ID NO: 670031 - DNA, 671 bp, Homo sapiens
ggagtctgttgccttgcatgagacagaggtgaggaagcctctgctagggttggaagactctatgttctgaaattcattaactgccccaaaagcccaattattaaggacattctgcaggactcttcctgcatgaaattagaaggaaagcagcctacctacttagtgatctttggaatgggaatgaactgatatactacttagagttctgccaaaaascatggaaccctttgtaggtcagactacttgctctgactcataccttacaagttacagcagaataaaagcttctcaaaaacacttgaaatctgggaatatattttttcctaaataatatttcccttaaaagttctcaagagttaaatctccaagcggggagaaatctgtacaaatcatatatacattggatattctatatatgtgttatattaaataaaaacgttgattcttttttatataccctcaattttaactgaaggaattgatttttaaaagttttattaataataacaattgatttcacatctacaactaccatttaaaagttatgcaaatttttgtctttgaaaatgaacaatagcaataatatatagtgcttataaatattatatataatacaacaatgtaatatattatattaatacactatatagcttattgtgtagctgtattat

SEQ ID NO: 670032 - DNA, 603 bp, Homo sapiens
ccttgccgctgtcccacaggagagatacacatttcacactgactgggttctactccttccttctttcccttcttcttctcctttagcaaatgaaaagatgcacagtacttgcgatttcaaatagaatggtgtctgttaaagctttacctaggaggaattccccaaatcaagggacatggaattactcagccacaggaattctggagaatccggtctctgaagatgaagctagaaatgagcaaaggtttactgttcgttgttttcctcggcagacagcgcagggtccttatggcawggaaaggctgagctgttggagcagagtgaaacctgattcccaacatctgtgctctagaccccactccgaagggggactttctggaggtatttttctactctccgtcccctgggtcccaattaagggaaacactttttttagacatgttattatcccatgatagaaaagcaggactcactgttcctccttccctccttccctcctttcttccttccctccctccctccctccctctctccctcccttcctcactttttcctttcttcctttcccccatctagatgagcaatgcaaaaggtctggtattt

SEQ ID NO: 670033 - DNA, 642 bp, Homo sapiens
aggcttagtgttagaccgttaaggtgtctatagtttacaataatctgttgtacacttcaaaatagctagaagagaataatttgaatgtttctgacataaaggaaagacaaatatttaagtgatggatatcccaagtacactgatttgatctttacaaattatataaatgtgttaaattatcgcacatacccccagactatgtacatctattatgcatcaataaaatttttaaaaaggttcaaagaacaacaacaaagcagrctgggctggtgaggaagacagtgacattgcaggcaaaaagctgcaactcagacctgggaggaccatctacagacttctggggctgtcatggccagcagatacacaaagacagccagagtcacgcaggctgggcttccttctccactcagcagtgtctttgcaattcttctaatggaagaaaagaaaggtgagaggagagaagaccagaggcagggagattcctgcgaggcagatgagaaacctggggcaggggtaatgctagcccaaggggcaggggagacaggagggcagagcccaaaggcctgaaggatgggtaagtgccagggagctatttagatgtggagaggaggacagggagaagcaagggtgccccgggactca

SEQ ID NO: 670034 - DNA, 1080 bp, Homo sapiens
  misc_feature 690, 691, 692, 693, 694, 695, 696, 697, 698, 699, 700, 701,702, 703, 704, 705, 706, 707, 708, 709, 710, 711, 712, 713,714, 715, 716, 717, 718, 719, 720, 721, 722, 723, 724, 725,726, 727, 728, 729, 730, 731, 732, 733, 734, 735, 736: n = A,T,C or G
  misc_feature 737, 738, 739, 740, 741, 742, 743, 744, 745, 746, 747, 748,749, 750, 751, 752, 753, 754, 755, 756, 757, 758, 759, 760,761, 762, 763, 764, 765, 766, 767, 768, 769, 770, 771, 772,773, 774, 775, 776, 777, 778, 779, 780, 781, 782, 783: n = A,T,C or G
  misc_feature 784, 785, 786, 787, 788, 789: n = A,T,C or G
agaaaaaaatagggaattcaatttggtattgcacaaagtgataagttggatgaaactaggtacaacacaattgttgaggggaggggtgttgcaaactcaaattacgtaatttaggtcatggtataactcaaatctaaggggcctgaattgaaagtcgacctgctctgggcttggaaccccctgaagtcacattaaaaagcgcttgagaggaatcacccaggatgattacgttttagtcttcagtgccaaccactacctctggccaccagtacctgcagcctgtgagatgstaccaatagcatgaccgtaatgactgacccagaacctcagctcacctgaaatgagggtgctgtagctgggttggcaacctcagttttcttgggataagaaagcagttcccacagtgaaaaggtgtctttttaacccctggaaggtataaattaaatacataaataatgaagtcaattaatagtaatacatttatgttaaacttaggaatgatctgtatatacttgatatttgtaggttttgtgatgtgtaagagaatttggcatatctgagattacactgtaaatatgtaattaagtaactgatttttgacttgtgattttgcattaaaagttgtaagagaatctgatgagtttagtaaatagtgttggaatgtttatgaaaatctgagattcaccatannnnnnnnnnnnnnnnnnnnnnnnnnnnnnnnnnnnnnnnnnnnnnnnnnnnnnnnnnnnnnnnnnnnnnnnnnnnnnnnnnnnnnnnnnnnnnnnnnnnctctataattagggacaggcaggttttccttactccttcttgccttttataaagttgttgcctttcatgatgaccctgagcctgtagggccctcttgtcccatatcacaaaggtgaacattatggctcaagctggagacgacaccatgttccccatcccttccagttcagggagagtggttgagggggctcctctcaggtagtaccagggagtctatcctgacactagacccttccttccaggcagggataggcagtgttccttgaggactcaaaatacacagttcacatc

SEQ ID NO: 670035 - DNA, 1149 bp, Homo sapiens
  misc_feature 805, 806, 807, 808, 809, 810, 811, 812, 813, 814, 815, 816,817, 818, 819, 820, 821, 822, 823, 824, 825, 826, 827, 828,829, 830, 831, 832, 833, 834, 835, 836, 837, 838, 839, 840,841, 842, 843, 844, 845, 846, 847, 848, 849, 850, 851: n = A,T,C or G
  misc_feature 852, 853, 854, 855, 856, 857, 858, 859, 860, 861, 862, 863,864, 865, 866, 867, 868, 869, 870, 871, 872, 873, 874, 875,876, 877, 878, 879, 880, 881, 882, 883, 884, 885, 886, 887,888, 889, 890, 891, 892, 893, 894, 895, 896, 897, 898: n = A,T,C or G
  misc_feature 899, 900, 901, 902, 903, 904: n = A,T,C or G
atacattacacatttataaagagagagttttttttccactatctttaacaattttaacagctaaggaagggaagattttctccaagagacaaccaactccatggtatagatgcagcatgaaaacttaccagtctctcttatctttcaattgacttttgctaagaggtattggcggaagtatgtattctctgargtatgaatgtctaggacttatccaagaaagaagttctgtaaagaagacagattcaactgaaaatcagaaattaaatgataatacacaattcaaattgatgacctataagattctttcaaagttttcgtttggaattcagaaaaaaacacattttcctatagggtttcatgtttaaattattgacaaaacacttggagcaaagtagttctgcacactgcagtttatggaacatttgtgggaaggagagggattagcacatgctgacggcattagatttacaatggaacctcaagcctcatattctcaagagaaattgatgagatggtgtttagtggactagatccagtgatgtttgccatcttacaatgcatctagacccaacttcatttgtcataaaaaaattgagtgatttctactatataatttttcagttttactgctttcatgcaaaataaaggaagattgtactttcttttgtttagaattttatcgagaattgcctattttagaaaatcccattggtgtcatgaacattgagcttgacacattacacattaattaccaatattcattatgggtttcatggataaatgagttttattttttaacatnnnnnnnnnnnnnnnnnnnnnnnnnnnnnnnnnnnnnnnnnnnnnnnnnnnnnnnnnnnnnnnnnnnnnnnnnnnnnnnnnnnnnnnnnnnnnnnnnnnntatatattgctttgttgccacagggctatgtcagttgtctagacatctagtaaaatacagtctgaaaggatcttggtctaagtatatcacagaacattatgttactcaattagactgaagacacaatttgaggtggatatggtctgtgaaggaatcacgcatgatggggtatggacaaaacaccctgtaatgttgaggggcctaacacaagttgctagaagttttatggttcctcatcctatgag

SEQ ID NO: 670036 - DNA, 1149 bp, Homo sapiens
  misc_feature 805, 806, 807, 808, 809, 810, 811, 812, 813, 814, 815, 816,817, 818, 819, 820, 821, 822, 823, 824, 825, 826, 827, 828,829, 830, 831, 832, 833, 834, 835, 836, 837, 838, 839, 840,841, 842, 843, 844, 845, 846, 847, 848, 849, 850, 851: n = A,T,C or G
  misc_feature 852, 853, 854, 855, 856, 857, 858, 859, 860, 861, 862, 863,864, 865, 866, 867, 868, 869, 870, 871, 872, 873, 874, 875,876, 877, 878, 879, 880, 881, 882, 883, 884, 885, 886, 887,888, 889, 890, 891, 892, 893, 894, 895, 896, 897, 898: n = A,T,C or G
  misc_feature 899, 900, 901, 902, 903, 904: n = A,T,C or G
atacattacacatttataaagagagagttttttttccactatctttaacaattttaacagctaaggaagggaagattttctccaagagacaaccaactccatggtatagatgcagcatgaaaacttaccagtctctcttatctttcaattgacttttgctaagaggtattggcggaagtatgtattctctgaggtatgaatgtctaggacttatccaagaaagaagttctgtaaagaagacagattcaactgaaaatcagaaattaaatgataatacacaattcaaattgatgacctataagattctttcaaagttttcgtttggaattcagaaaaaaacacattttcctatagggtttcatgtttaaattattgacaaaacayttggagcaaagtagttctgcacactgcagtttatggaacatttgtgggaaggagagggattagcacatgctgacggcattagatttacaatggaacctcaagcctcatattctcaagagaaattgatgagatggtgtttagtggactagatccagtgatgtttgccatcttacaatgcatctagacccaacttcatttgtcataaaaaaattgagtgatttctactatataatttttcagttttactgctttcatgcaaaataaaggaagattgtactttcttttgtttagaattttatcgagaattgcctattttagaaaatcccattggtgtcatgaacattgagcttgacacattacacattaattaccaatattcattatgggtttcatggataaatgagttttattttttaacatnnnnnnnnnnnnnnnnnnnnnnnnnnnnnnnnnnnnnnnnnnnnnnnnnnnnnnnnnnnnnnnnnnnnnnnnnnnnnnnnnnnnnnnnnnnnnnnnnnnntatatattgctttgttgccacagggctatgtcagttgtctagacatctagtaaaatacagtctgaaaggatcttggtctaagtatatcacagaacattatgttactcaattagactgaagacacaatttgaggtggatatggtctgtgaaggaatcacgcatgatggggtatggacaaaacaccctgtaatgttgaggggcctaacacaagttgctagaagttttatggttcctcatcctatgag

SEQ ID NO: 670037 - DNA, 640 bp, Homo sapiens
tgatggtctgaattcatgctgatatttgggaacttgaaaacaattgtggtttgccagatcattctggaggtcatgggatagatgaagtcttggccaaagtggatccagtgggatctcagaccaattttgyggtactcttatagtcccctaatcaatagtaagaatgcatgtactttttaactggaagaattcccacatttgttccctggcccacagagtaaatacttgtattattctgttcttgtgctgctaataaagacatacctgagactgggaaatttacaaaaaaaaagaggtttaatcagctcacagttccacatagctggggaggcctcataatcatggtgaaaggcaaggaggagcaagtcacatcttacatggtggcaggcaagagagaacttatgcaggggacctcccatttacaaaaccatcagaactcatgaaatttttcaccaccacgtgaacaatataggggaaccacccccatgattcaattatcttcccctggccccactcttgacatgtggaaattattacaattcaaggcgaaatttgggtggggctacagccaaaccatatcaatactattaagacagaaagagctgcaaaaaagccctggaacagcccttctctcatgcta

SEQ ID NO: 670038 - DNA, 640 bp, Homo sapiens
tgatggtctgaattcatgctgatatttgggaacttgaaaacaattgtggtttgccagatcattctggaggtcatgggatagatgaagtcttggccaaagtggatccagtgggatctcagaccaattttgcggtactcttatagtcccctaatcaatagtaagaatgcatgtactttttaactggaagaattcccacatttgttccctggcccacagagtaaatacttgtattattctgttcttgtgctgctaataaagacatacctgagactgggaaatttacaaaaaaaaagaggtttaatcagctcacagttccacatagctggggaggcctcataatcatggygaaaggcaaggaggagcaagtcacatcttacatggtggcaggcaagagagaacttatgcaggggacctcccatttacaaaaccatcagaactcatgaaatttttcaccaccacgtgaacaatataggggaaccacccccatgattcaattatcttcccctggccccactcttgacatgtggaaattattacaattcaaggcgaaatttgggtggggctacagccaaaccatatcaatactattaagacagaaagagctgcaaaaaagccctggaacagcccttctctcatgcta

SEQ ID NO: 670039 - DNA, 640 bp, Homo sapiens
tgatggtctgaattcatgctgatatttgggaacttgaaaacaattgtggtttgccagatcattctggaggtcatgggatagatgaagtcttggccaaagtggatccagtgggatctcagaccaattttgcggtactcttatagtcccctaatcaatagtaagaatgcatgtactttttaactggaagaattcccacatttgttccctggcccacagagtaaatacttgtattattctgttcttgtgctgctaataaagacatacctgagactgggaaatttacaaaaaaaaagaggtttaatcagctcacagttccacatagctggggaggcctcataatcatggtgaaaggcaaggaggagcaagtcacatcttacatggtggcaggcaagagagaacttatgcaggggacctcccatttacaaaaccatcagaactcatgaaatttttcaccaccacrtgaacaatataggggaaccacccccatgattcaattatcttcccctggccccactcttgacatgtggaaattattacaattcaaggcgaaatttgggtggggctacagccaaaccatatcaatactattaagacagaaagagctgcaaaaaagccctggaacagcccttctctcatgcta

SEQ ID NO: 670040 - DNA, 640 bp, Homo sapiens
tgatggtctgaattcatgctgatatttgggaacttgaaaacaattgtggtttgccagatcattctggaggtcatgggatagatgaagtcttggccaaagtggatccagtgggatctcagaccaattttgcggtactcttatagtcccctaatcaatagtaagaatgcatgtactttttaactggaagaattcccacatttgttccctggcccacagagtaaatacttgtattattctgttcttgtgctgctaataaagacatacctgagactgggaaatttacaaaaaaaaagaggtttaatcagctcacagttccacatagctggggaggcctcataatcatggtgaaaggcaaggaggagcaagtcacatcttacatggtggcaggcaagagagaacttatgcaggggacctcccatttacaaaaccatcagaactcatgaaatttttcaccaccacgtgaacaatataggggaaccacccccatgattcaattatcttcccctggccccactcttgacatgtggraattattacaattcaaggcgaaatttgggtggggctacagccaaaccatatcaatactattaagacagaaagagctgcaaaaaagccctggaacagcccttctctcatgcta

SEQ ID NO: 670041 - DNA, 614 bp, Homo sapiens
tttgatttggcttagttagtaattagaaccagatggtgatttcaaaactccattaactttaaatatatgtatatacctttaacttcattttaatgaacatatatagatatttattggaaatcaatagatggactgtgggtctaacggaaagcacaattgtgcagataccacagaatgttacttttaaaacgtgacctcaaattatttgatgctctttctattgtgaagtgggaccccctttccttgtatctgagtgggcttataactactttgaccaagagaatagcatagatatgaccctcagattttcaaggctaagtcagaaagtcatatgtcttctgcctttttccctggaatatttgcgctggagtcctgggacatgatgtaaggaatttgactatcttcaggccaccatactttgaggaagcccaagccacacagagaagactgaggtagaagcgcgggtcaagagtcccatgygagactaatttttgagtcactccagcccaggtgccaataaggcaagtgaaaaagcctccaaatagttatagatcccagccctttgagtcaccactaggtaattgagatttccaagctgagcccgggacctgaga

SEQ ID NO: 670042 - DNA, 830 bp, Homo sapiens
tattaaaacctgtggctgaatcaaatattgtaagaaagagaaaccattctagatgtttatgaagacaattataacttcatcattgctttaagttgcctggcattgagatagctgagcctaataccctcatttccagctgaaggggctgcaacttctggagttgagatcacttgtccctactgctcagaatgttccacaggtctaaggatgatgaaaatctccatttctacgcagttagaatctcccagcattctcctgtaaagcaggcacgtatggtctgaatgcatgatttcctaaaccccaaaatgctaatttatgtggttactccctcttttcttccatatggagtaagaacaagcagacagagtttctctcatgcagagtttctctcatggatcctagtctgtagatgtgttcatccgtaccttggtccaaacatacctctttgcaggatgccaggaaagtaaatgattcattctcttactggccctttaaatgttaagttctgacatgtgccaagtgcttttagctatagtttatttccatcatataaaatttcatgtgagaaacaacaggttacaaaaacgttggaaggactagaggggtgaaaatcagggttctaaacctctattcattttggggttaaactaccatctctgtgatcctgaggtcagcaagctcctacttctgtggctatcactggtgccaacatcacagctttctcacacccagaagactggtgacggatcatcagactrtgggaagtggtcaacaaaaactctcctatttgtcagcacttgtctaacagtgccacaagcaagggaatatcc

SEQ ID NO: 670043 - DNA, 445 bp, Homo sapiens
tgtgggagctacggaggtgcttataaagatttatgatgaacagaacatgagactaaacttgatgtaaaattgtgaaaaacaggatatcagagtaagcttaatgtaacaacttgacacaaatttaayatctgctttttatttactaaaactaggatgatgtatgaaaacttgtatagctttttttaatgtatatctttcctatatactagaaattccccacactttttaagctacttgctgactgcctgcttgcattcagcatattttttgtgcaaattagctaaattctataaaatgctacactatatataatatataactatactatatataaaatactataaaataaaattctataaaatactatagtatgtatatttaggacaattttggctttgtaaataatttggctcaatatatttcttagagttacccttttaaaatt

SEQ ID NO: 670044 - DNA, 1304 bp, Homo sapiens
acaagtcataattgatcacttatgaagtacaatgtgatgttttgatatttcaaaataactgagagtaaatttcaaacgtcttacttttttttttttttttttgagatggaatctcgctctaccgcccaggctggagttcagtgacacgatctaggctcactgcaacccccaccttctgggtttaagcaatcctctggcctcagcctcctgagtagctgggactaccggcgcgtgccaccacacctggctaattttttgtatttttagtagagacagggtttcaccgtgttagccaggattatctcagtctcctgacctcgtgatccgccctcctcagcctcccaaagtgctgggattataggcgtgagccaccacgtccggcctattaaagacttctattgcattaacagtgttactacttgtgaaagaaaattataaaatacaattaaaaatagcagaaaataaaatcaactacataaaattttaccacttaataagcatgattattactaaataatctagttatacagttttatgaaaatattattaaatgagataatatagaagcgttttaatatttcataaatgtctttacattttagtaaatcttttttcaaaaaacattttctttacataaagtagtatcataatttacatattatcttccatttaatgctagatcataaaaacgtttttatatcagtacatgtagctcctacttattttgtatacagatgagcatctgtaatccaaaaatctaaagtatgaaatgctccaaattctaaaactttttgagttctaaaatgatgcacaggtggaaaattccacacctgacctcgtgtgacaggtacagtcaaaatgtagccacacaactcagttttttagagtccccaagagaaaaagaccctcccagtccacttaagctgtgatatctttttccattgcatgccgggattcccccaggcaagcatacacattaaagtttttttgttttgttttgttttgcttttttttaaaaaaaaaaagaaaaagaaaaagaaaagaaaagcatgtggtcagggctaaatgcaccagtggcaggatccccacaatgccctacatggaaccaaaatctatgtgaattactcatcgagattgtttgcataatctctgctgtacggtataaagatattgttgaaaawgtcaaaaaagcctgcagatacccctatcagtaacagtgggaccaaaaataataagcatttatgtttatctatagcatagaaaatcaagctgttggagaaagagagcagtgtaagtgtgaaatg

SEQ ID NO: 670045 - DNA, 1666 bp, Homo sapiens
tattctttattcattgactaactaccgattgaaggcctgccatgtgtctctaataaaaaagagtttgtatrttgatattcaatattatgtaaatcattcagtgtaggagagagtattaaacaacacttacacttaagtaggaaacagtaagcaaaaacagaaaaaagagggagagcaatcttcatgaaattggaatattacccagaccattaagtggactcaagttagaaacaataaagacgcagttacagaaactataattcagtgcaggattttatatcaggaacaatgtaaaagtctagtcttcattaaggcaccaactaaagactattagttgccagagctcataacttgtacttcctaaatgtttgaactttgttttccaaaagtcttctgaatgttctcaggcaagcttaggcttacagtcacaaggtttctttaagatctccaaagacacaggcatttaaagacagcactcaatatcataaacaaattaaatataagcatagtgcacattaaattttattttaaaaaatgaaattatcttattttgtgtgttttatataatatacatatatatatatatatatatatatttttttttttttttttttttttttttgagaccgagtctcactctgtctgcagtggcgtgatctgggctcatgcaacctccgcctcctggtttcaagtgattctcctgcctcagcctccagagtagctgggattacaggcatgtgcccccacgctcagctaatttttgtatttttatagagacggagtttcaccaagttggccaggctggtctccaactcctgacctcaggtgatctgcctaccttggcctcccaaagtgctggggatacaggcatgagccaccatactggccttttataatttttaatgagctatgatttttctgcaaacatccttcatacagaatgttttgtgtttttacaatttaaagaaaattgtatttttgtgtcccactgtgactttaaaatatatccattggaaaaaattcttcccttactcctgggagatatttttgacgattttcaggtaatacaattttcatgatcatttaattttactaaaacagtatcaatttagaaattaaaatactcagttctatgttataatccagactatgaattcgatataaatttttacatgactctttctgccccccagctggggctttctataggtaaaaggaggggaagaaaatgagaatttcacccatttaataccttattgtttatggacacttcaaggtttaaggagactaggaagaaaagagagttgaatgattagagattaagatcagaaaatttctcccttaactagtattgaggtaacttaataattatatcatgtagtaattccatttttaactttttgtggaaccactaggctgttttccaaggtggatgcaacattttgtattctcaccaataatatataaggattctaatttctctacatcctcactaacatttgtcattttctgactgttttattatagccatcctaatgggtgtcaaaggatatctcattatagttttgattttcatttccctgatggcaaatgctgttgagtatattttcgcgtccttattagccatctatatctctttgtaggtaagttttgaaaagttaaatat

SEQ ID NO: 670046 - DNA, 1666 bp, Homo sapiens
tattctttattcattgactaactaccgattgaaggcctgccatgtgtctctaataaaaaagagtttgtatattgatattcaatattatgtaaatcattcagtgtaggagagagtattaaacaacacttacacttaagtaggaaacagtaagcaaaaacagaaaaaagagggagagcaatcttcatgaaattggaatattacccagaccattaagtggactcaagttagaaacaataaagacgcagttacagaaactataattcagtgcaggattttatatcaggaacaatgtaaaagtctagtcttcattaaggcaccaactaaagactattagttgccagagctcataacttgtacttcctaaatgtttgaactttgttttccaaaagtcttctgaatgttctcaggcaagcttaggcttacagtcacaaggtttctttaagatctccaaagacacaggcatttaaagacagcactcaatatcataaacaaattaaatataagcatagtgcacattaaattttattttaaaaaatgaaattatcttattttgtgtgttttatataatatacatatatatatatatatatatatatttttttttttttttttttttttttttgagaccgagtctcactctgtctgcagtggcgtgatctgggctcatgcaacctccgcctcctggtttcaagtgattctcctgcctcagcctccagagtagctgggattacaggcatgtgcccccacgctcagctaatttttgtatttttatagagacggagtttcaccaagttggccaggctggtctccaactcctgacctcaggtgatctgcctaccttggcctcccaaagtgctgggratacaggcatgagccaccatactggccttttataatttttaatgagctatgatttttctgcaaacatccttcatacagaatgttttgtgtttttacaatttaaagaaaattgtatttttgtgtcccactgtgactttaaaatatatccattggaaaaaattcttcccttactcctgggagatatttttgacgattttcaggtaatacaattttcatgatcatttaattttactaaaacagtatcaatttagaaattaaaatactcagttctatgttataatccagactatgaattcgatataaatttttacatgactctttctgccccccagctggggctttctataggtaaaaggaggggaagaaaatgagaatttcacccatttaataccttattgtttatggacacttcaaggtttaaggagactaggaagaaaagagagttgaatgattagagattaagatcagaaaatttctcccttaactagtattgaggtaacttaataattatatcatgtagtaattccatttttaactttttgtggaaccactaggctgttttccaaggtggatgcaacattttgtattctcaccaataatatataaggattctaatttctctacatcctcactaacatttgtcattttctgactgttttattatagccatcctaatgggtgtcaaaggatatctcattatagttttgattttcatttccctgatggcaaatgctgttgagtatattttcgcgtccttattagccatctatatctctttgtaggtaagttttgaaaagttaaatat

SEQ ID NO: 670047 - DNA, 1666 bp, Homo sapiens
tattctttattcattgactaactaccgattgaaggcctgccatgtgtctctaataaaaaagagtttgtatattgatattcaatattatgtaaatcattcagtgtaggagagagtattaaacaacacttacacttaagtaggaaacagtaagcaaaaacagaaaaaagagggagagcaatcttcatgaaattggaatattacccagaccattaagtggactcaagttagaaacaataaagacgcagttacagaaactataattcagtgcaggattttatatcaggaacaatgtaaaagtctagtcttcattaaggcaccaactaaagactattagttgccagagctcataacttgtacttcctaaatgtttgaactttgttttccaaaagtcttctgaatgttctcaggcaagcttaggcttacagtcacaaggtttctttaagatctccaaagacacaggcatttaaagacagcactcaatatcataaacaaattaaatataagcatagtgcacattaaattttattttaaaaaatgaaattatcttattttgtgtgttttatataatatacatatatatatatatatatatatatttttttttttttttttttttttttttgagaccgagtctcactctgtctgcagtggcgtgatctgggctcatgcaacctccgcctcctggtttcaagtgattctcctgcctcagcctccagagtagctgggattacaggcatgtgcccccacgctcagctaatttttgtatttttatagagacggagtttcaccaagttggccaggctggtctccaactcctgacctcaggtgatctgcctaccttggcctcccaaagtgctggggatacaggcatgagccaccatactggccttttataatttttaatgagctatgatttttctgcaaacatccttcatacagaatgttttgtgtttttacaatttaaagaaaattktatttttgtgtcccactgtgactttaaaatatatccattggaaaaaattcttcccttactcctgggagatatttttgacgattttcaggtaatacaattttcatgatcatttaattttactaaaacagtatcaatttagaaattaaaatactcagttctatgttataatccagactatgaattcgatataaatttttacatgactctttctgccccccagctggggctttctataggtaaaaggaggggaagaaaatgagaatttcacccatttaataccttattgtttatggacacttcaaggtttaaggagactaggaagaaaagagagttgaatgattagagattaagatcagaaaatttctcccttaactagtattgaggtaacttaataattatatcatgtagtaattccatttttaactttttgtggaaccactaggctgttttccaaggtggatgcaacattttgtattctcaccaataatatataaggattctaatttctctacatcctcactaacatttgtcattttctgactgttttattatagccatcctaatgggtgtcaaaggatatctcattatagttttgattttcatttccctgatggcaaatgctgttgagtatattttcgcgtccttattagccatctatatctctttgtaggtaagttttgaaaagttaaatat

SEQ ID NO: 670048 - DNA, 464 bp, Homo sapiens
gcaaagtgaattttttttaagatgaaggaaataagggtatatttatatgattaaatcacttaagtggcaaaggagaaagaataaaataaatgacgctatattatacccagtagagttcagcagctcagtcatgggatgacaaaggatgaaagccaagaagtgaaggcattaaccttgactagtagttgtgcaaagagagtttaaggttaagwctttttctgagtcttgggaaaaagaagtaagacaggatttaaatgataacctttgtttttaagggaaaaggagcagatggtttccaaagctttttggtggggatattgtgtgtttgctttgcttctaaatctaaattttgccgattttttcttcctaaagttactgtgtttccaaaattacagttaacaagtatctgataaggtggcttctagctaatcaggcttttatctatgttgtcttcttactgacag

SEQ ID NO: 670049 - DNA, 595 bp, Homo sapiens
tgtacttctatatkggtatatagatgagaacaattaagtaaatggatggtggatagtggggccaggtttcacactttatatatatatatctatatatgtagtatgtgtgtgtgagtatgcatatgtgtgtgtgcatatatatatatatagtgtgtgtgtgtttgtgtatacacacacagagtatatatacacgtatgtatatatatatcttttttttttctttctctgtcagctgaaagggccttgaagcaataatagctaagaaaattaagatgattcacaagagaatgacaaaaagcaaaaactaagggagagtcaagcaactcatcctagatagaaatctttgaacagctatttaaaaatgggataaatgggccaggcacgaagggtgacacctgtaatcctggcactttgagaagcctaagtgtgtggatcgcttgaggccaggatttcgagaccagcctggccaaaatgatgaaaccccatctctactaaaaatacaaaaattagccaggcgtggtggtacatgcctgtaatccctgctactcagggggttgagacaaaagaatctcttaaacccgggaggcagaggttg

SEQ ID NO: 670050 - DNA, 1540 bp, Homo sapiens
gaaatctaaaattgtgaaattaaactggatttatgtccagtgatagggctaatagagactcaaaatatgaatgcataaatcattatattttcctctatttactacacattcctccagattttttaatatgtcattaaacatcaagtccgatgtcagcattagaaagtatctaattttgtttcctaacaaaagtgagttcataaactgtgatttatctttcactgacattactacattagtgtgagttgttgataagctaatttacaatggtagacaagatcaaggcttaccctaagggtgatttatcatagttcctatatttgctaacaggctggcatgtgaagcctttgaaaatataatgaatttacaatgtttacccattatctcacaccaggtgattagttaacctattccttgcatatttacattctttcatattgagtttcagcagcaaatatttagagttgtaatacatcagtagaataaatttgaaatattcaaatgtttagccattgtgaaaataaatacaatcatctaccataatttattttacttttagtttactatactaccttgcattcattttatgaaattaattataaatcaagaaaaaaagcagcctacgattttagagttcaaaggaaaccttagaaatgatgttgttcaactttattttatagacagaacaaatgacaaaagctgggaagtaatttgctcattgtaacaaagctagtttgaaacaggagttggactaggtttctcaaaatcttttaatgtgataaaaatcctttcattagtcactacatcatattttcctgaaattacgatatttcctttgcatttatgaatcattatttataacaatgcatcttctaggaaatggcatttttataagtgcttaacatagtaaatgatactttattcttattgctatttgataaaaagaaagatacrtacactggggcagtaaaatcccccagaactatttcgagaatagatggtaacattcacattcaaaagttttaagagagctattattgtttatagtgtgctgtagatggcatacataaaaaaaggattgaatatagttcatagaaataaatcaaaaaattacataaattgcctatgccaaaataaatttagggagttttggtataaccagtttaacatcacagtttagttatcaaacacaccatgtttcagtaattctagggaaaatttatttttcacatttgtatacatgttggaattatcctcctaaatttagtatatcccagcaatctttgaatgtatatgtccatgaagatttaattaagaaacacaattctttgggtcatatactcaacttttctggccatttaaaccctttctgtttgactgaatttgagctgagatgcccatggtaatactaatctgatgatgtttgctgaaatattaaggaatgccttaattcttagactagtccaatatctgtcttaaaagctgacctagcatatgaatagaacattatagtattacacgatttcctttgaaggaatta

SEQ ID NO: 670051 - DNA, 592 bp, Homo sapiens
tcaaaagccacagccacagccagcagtcacagctttctcctatctcttttcaagggtggaaaactcctagaccagccccaggtttcctgccatgaacttggatccgggaccccaacctgcatatggtgatttttgcccttgtcgccctgtaggaattcaacttcctagggtccagcggcccatggctttagcctccatccaggttgtttctgttctgtttctggttcacagtgagtttaaagtacagctatatctttttggtttggcatttaatattttatttatcatttttatatatttggattgggatagtgagattttaatgcataagtttatagcaccaccacaaccagaaatctttgaagaattctttaagctcaatttaagtaaatgagaacctattgttaaaaatagtgttatttgacaatccatgtgttgtaaataatttstatgaacctgtggtcattgctgctgttaggtttccaatgaaagtgttagaaggtatctaagaataaaaaattttcctttggaacaatccaggaaaaatcaaagcggtggggggcggtcaatatttctttattcagggtctggg

SEQ ID NO: 670052 - DNA, 622 bp, Homo sapiens
gttctgtctatgtgactttgaaattaactaaagctttcttctctgggctaaaaactagatcctgtggcctacctattggtcttaatttctcttatttttacgtgaagccagatctgcccagtacaagttcagcctggtgatctgaactactctatctgatgattccagttgttgtacatcttgaactttccttgaccatgttattcctgaccagattctgaaatatgatttcgtgaaataagcatagttacacactggctacaaagtccttgtgcatgccagttgaacttatgtctgcatccttgtattagtccaytctcatgctgctaataaagacatacctgagactgggtaatttttaaaggaagaggtttaattaacttagagttcagcgtggctggggaggcctcaggaaacttacaatcgtcgtggaaggggaagcaaacacatccttcttcacatgatggcaggaaggagaagtgcaaaaggggcaaaagccttttataaaaccatcagatatcatgagaactcactcactatcatgagaacagcatgagagtaaccgcctcccgtgatgaaattacctttcaccaggtccctcccatgaaatgtggagattatg

SEQ ID NO: 670053 - DNA, 622 bp, Homo sapiens
gttctgtctatgtgactttgaaattaactaaagctttcttctctgggctaaaaactagatcctgtggcctacctattggtcttaatttctcttatttttacgtgaagccagatctgcccagtacaagttcagcctggtgatctgaactactctatctgatgattccagttgttgtacatcttgaactttccttgaccatgttattcctgaccagattctgaaatatgatttcgtgaaataagcatagttacacactggctacaaagtccttgtgcatgccagttgaacttatgtctgcatccttgtattagtccactctcatgctgctaataaagacatacctgagactgggtaatttttaaaggaagaggtttaattaacttagagttcagcgtggctggggaggcctcaggaaacttacaatcgtcgtggaagggraagcaaacacatccttcttcacatgatggcaggaaggagaagtgcaaaaggggcaaaagccttttataaaaccatcagatatcatgagaactcactcactatcatgagaacagcatgagagtaaccgcctcccgtgatgaaattacctttcaccaggtccctcccatgaaatgtggagattatg

SEQ ID NO: 670054 - DNA, 622 bp, Homo sapiens
gttctgtctatgtgactttgaaattaactaaagctttcttctctgggctaaaaactagatcctgtggcctacctattggtcttaatttctcttatttttacgtgaagccagatctgcccagtacaagttcagcctggtgatctgaactactctatctgatgattccagttgttgtacatcttgaactttccttgaccatgttattcctgaccagattctgaaatatgatttcgtgaaataagcatagttacacactggctacaaagtccttgtgcatgccagttgaacttatgtctgcatccttgtattagtccactctcatgctgctaataaagacatacctgagactgggtaatttttaaaggaagaggtttaattaacttagagttcagcgtggctggggaggcctcaggaaacttacaatcgtcgtggaaggggaagcaaacacatccttcttcacatgatrgcaggaaggagaagtgcaaaaggggcaaaagccttttataaaaccatcagatatcatgagaactcactcactatcatgagaacagcatgagagtaaccgcctcccgtgatgaaattacctttcaccaggtccctcccatgaaatgtggagattatg

SEQ ID NO: 670055 - DNA, 664 bp, Homo sapiens
ttttatattaaacatgcagccagtgggataaaccaacatttagtagtaaaactgtaatgccaactacctactagcattattataagaattaaatgacttaaaaagtgaagcagtacttggcacatagtaagtactcaataaacactggaaattattaatagttatttataggatctgtgtcttgctcacttctagcttgtgtctttattggaattagctcccctcccagaaatgcttcatttttctcctctatcaatccaagctcatstcttcattcaaagcttagtgtaagactcactacttcagaatgaaagccctgccagaaaaatttcactggagggggatggaatttattaatccctttgataaatacatttctatccttgttctaggtactgagtgcttcagtcaacgaaacaaagttcttgatgtcacagattttacttacattttagtgaggaaggacagtcactagaccaataaacatataaatacataacatgtcatttgccatgcagggtaaatgctatttaaaaattaaacaaagtaagatctcactattatttgacatttaagtagacaaccaaatgaagcaacagggtaagaaaagaagagaaaaggatgatggagagcactttgtctgttcaaggaagagccaggtagt

SEQ ID NO: 670056 - DNA, 619 bp, Homo sapiens
aggcctgggcaacaaagtgatactctgtccctacaaaaaatttaaaaaattagccaggtgtggtggcacatgcctgtggtcccagctactatttgggaggctggggtggaaggatcatttragcctgggaggtcgaggctagtgaaccgtaatggtgcccctaacctcagcctgggtgacaaaacgagacactgtctcaaaaaatcaaatcaaatcagaatcagtcaattgtatcatgctacttctacagttaacccaaaaatatactatatttaaacatttttgaagtttagtccgagttctctaagaagctgataccaagacagaatgaaacacccaaggattttattaggggaaatgcctgtgagaaagaatagggagttagttagcctgataactagaagagccatcaccatctgatggtgacacccaagagaaggaaacagaagccaagttgatagaagagaacaaaaaacaattcattaactggtcccaatcaaaatatgttagagcagatataggctcaatgtagtaatactatattttaaatttttttcatacttcatttaaaaacagtggtacatttgtatacgtatatggtacctataaaaactacaca

SEQ ID NO: 670057 - DNA, 619 bp, Homo sapiens
aggcctgggcaacaaagtgatactctgtccctacaaaaaatttaaaaaattagccaggtgtggtggcacatgcctgtggtcccagctactatttgggaggctggggtggaaggatcatttaagcctgggaggtcgaggctrgtgaaccgtaatggtgcccctaacctcagcctgggtgacaaaacgagacactgtctcaaaaaatcaaatcaaatcagaatcagtcaattgtatcatgctacttctacagttaacccaaaaatatactatatttaaacatttttgaagtttagtccgagttctctaagaagctgataccaagacagaatgaaacacccaaggattttattaggggaaatgcctgtgagaaagaatagggagttagttagcctgataactagaagagccatcaccatctgatggtgacacccaagagaaggaaacagaagccaagttgatagaagagaacaaaaaacaattcattaactggtcccaatcaaaatatgttagagcagatataggctcaatgtagtaatactatattttaaatttttttcatacttcatttaaaaacagtggtacatttgtatacgtatatggtacctataaaaactacaca

SEQ ID NO: 670058 - DNA, 619 bp, Homo sapiens
aggcctgggcaacaaagtgatactctgtccctacaaaaaatttaaaaaattagccaggtgtggtggcacatgcctgtggtcccagctactatttgggaggctggggtggaaggatcatttaagcctgggaggtcgaggctagtgaaccgtaatggtgcccctaacctcagcctgggtgacaaaacgagacactgtctcaaaaaatcaaatcaaatcagaatcagtcaattgtatcatgctacttctacagttaacccaaaaatatactatatttaaacatttttgaagtttagtccgagttctctaagaagctgataccaagacagaatgaaacacccaaggattttattaggggaaatgcctgtgagaaagaatagggagttagttagcctgataactagaagagccatcaccatctgatggtgacacccaagagaaggaaacagaagscaagttgatagaagagaacaaaaaacaattcattaactggtcccaatcaaaatatgttagagcagatataggctcaatgtagtaatactatattttaaatttttttcatacttcatttaaaaacagtggtacatttgtatacgtatatggtacctataaaaactacaca

SEQ ID NO: 670059 - DNA, 619 bp, Homo sapiens
aggcctgggcaacaaagtgatactctgtccctacaaaaaatttaaaaaattagccaggtgtggtggcacatgcctgtggtcccagctactatttgggaggctggggtggaaggatcatttaagcctgggaggtcgaggctagtgaaccgtaatggtgcccctaacctcagcctgggtgacaaaacgagacactgtctcaaaaaatcaaatcaaatcagaatcagtcaattgtatcatgctacttctacagttaacccaaaaatatactatatttaaacatttttgaagtttagtccgagttctctaagaagctgataccaagacagaatgaaacacccaaggattttattaggggaaatgcctgtgagaaagaatagggagttagttagcctgataactagaagagccatcaccatctgatggtgacacccaagagaaggaaacagaagccaagttgatrgaagagaacaaaaaacaattcattaactggtcccaatcaaaatatgttagagcagatataggctcaatgtagtaatactatattttaaatttttttcatacttcatttaaaaacagtggtacatttgtatacgtatatggtacctataaaaactacaca

SEQ ID NO: 670060 - DNA, 619 bp, Homo sapiens
aggcctgggcaacaaagtgatactctgtccctacaaaaaatttaaaaaattagccaggtgtggtggcacatgcctgtggtcccagctactatttgggaggctggggtggaaggatcatttaagcctgggaggtcgaggctagtgaaccgtaatggtgcccctaacctcagcctgggtgacaaaacgagacactgtctcaaaaaatcaaatcaaatcagaatcagtcaattgtatcatgctacttctacagttaacccaaaaatatactatatttaaacatttttgaagtttagtccgagttctctaagaagctgataccaagacagaatgaaacacccaaggattttattaggggaaatgcctgtgagaaagaatagggagttagttagcctgataactagaagagccatcaccatctgatggtgacacccaagagaaggaaacagaagccaagttgatagaagagaacaaaaaacaattcaytaactggtcccaatcaaaatatgttagagcagatataggctcaatgtagtaatactatattttaaatttttttcatacttcatttaaaaacagtggtacatttgtatacgtatatggtacctataaaaactacaca

SEQ ID NO: 670061 - DNA, 649 bp, Homo sapiens
atcccagcactttgggaggccgaggtgggtggatcacgaggtcaggagatcgagaccatcctggctaacacggtgaaaccccatctctactaaaaatacaaaaaaatatggtgggcrcctgtagtcccagctacttgggaggctgaggcaggagaatggtgtgaacctgggaggtggagcttgcagtgagccaagatcgcgccactgcattccagcctgggcgacagagcgagactcaaaaaaaaaaaagagtacttaggcataatgggtcatgcctgtacttctagcactttgggaggccgaggtggaaggatcacttaagaccaggagttcgagaccagcctaggcagcaaagcaagactctttctctacaaaaaaattaatcaggcatagtgacatgtgcctgtagtcctagctacttcggaggctgaggtaggaggatcacttgagcccaagaggttgaggctgcactgagccaagatcgtaccacttcactccagcccagacattagagcaagaccttgtctcgaaaaacaaaaaaaagaaagaaaagaaaaataatgctttttactaggatttttacaatatgtgaaacgaattctatcttgagaacagagtattggtattgccagtaatattttaaagttct

SEQ ID NO: 670062 - DNA, 629 bp, Homo sapiens
ctctgttgcccaggctggagtgcagtggcctggtcttggctcactgcaacctttgcctcccgggttcaagtgatcttctgcctcagccttccgagtagctgggattacaggcacatgcccagctaatttttgtatttttattgagatgggatttcaccatcttggccaggctggtcttgaactcctgacctcaggtgatccgcctgcctcggcctctcaaagtgctgggattacaagagtgagccactgctcctggctggcctacttgattcttttagcaacttattttacatttttactgatttttccattgctacaaggaatcattaaccagaattttaattggacttaaagatgggaaagaaagcagttttatcttcaaagagtttatgtttcttctgttatttcttttttattgatgtttatctcaaagcatttatttttttctcatgattacataatgtcttaacacttattcttcctagatgtactgctttttttcccygcaaattattatgagtggttctttaaacataattaagattatctttagccctttgaagttctgtgatcatgtcagaacaaactaagaaattgtaattcaagatttaggttttgatttttgaaag

SEQ ID NO: 670063 - DNA, 607 bp, Homo sapiens
gcatataagaggttgtctctgtgttaggtgtgccagtatccttgttagtgcttccatctcatttatgccagatctacatcagagtttctcacttgctttattatggccctgtttccatgatctttttttattttgtcttctttggtgtgttagacaagctttccaaaagttaatgttgtgtctttctggggttttgcttgccatcacaaatcattattttaaaattgtttacatgtaatttgttctcaaactcatgttcagatcaaaaaggtcttagtctgcttgagactatatgrgagacctgaactacaatatgtaaagcatataggatggatttctctatcagttgtctagacgatattagtaaatcgtaaaaagtattgaccctaagcaatttatgctcttttacttaactgttgctttggaagtttaggttatgatttgtaatattttgccaattttattttctgtactcagattactgttgctatatgcttcacctttgagaagagtgggaacaatcttatggtaaagtgtttttgttttgttttatatttttatttatttttttacagtccaaggccattggtttgctagatgtggatgt

SEQ ID NO: 670064 - DNA, 2178 bp, Homo sapiens
tgcctacaaatgtgcggactttttagcattctctaaggtttccttcttttgcgaacttttcaacatcatgtgtctttaaaggtttggaaattgcctgcctttatgatgtgttaaccttttctacacagcgtcctattgaagacaatctaaccttaaagcccgttattgaaaatacctccactggtaaaacccagacattctatagtctctttctcaaagcaccactgttgaatctttgctttatatgaaattaacttacctccttcaaaataagaaaatccaataattattattggcgattatggaatacttaccgagttaatctgtaattagcattttccagtgactgttgatttggataaagttgcattcagttcaccacaatcattggaaacttacaaagctcagactttattactgagttcccttgctactcatcagggatgcagctatcactcatactccagtggccagtaatcagggcgttgcctgttaagggaggaacctctcgtcactgtcttaggagcgtcacctctgtttcctctcttcatcccacagcaggtagatagataaaaatattgtagcatctaacaagcagacattgaatttttgttctaaaacggcaaattaaatctgtctctggtggttccaaattatgtaaaataaaaaagaaacttttatcactgataggtcttgtcatttctattcagtagcatttttaaaaaattgatgaattggaacttcttttcttccaaagaaactcatcaaccctgttcattgttattcctgaaaggcttacttcccaagtgtaaagttgtctgaaaaaaaatttttttccttttatcatcatttaattttcctaataatgctgctactgtaatagctttttataaaccaagaacatgatrtttttcaaaaaccaagccaactagttatgccatgtggatcaaagggagcaaagtgtggcagaaaacactttcctattgttttaataactaattccatgattgcatcatcttcccttaaactgcactattttttttttaaatcagttttgcgatttgagtagtacccggcttttgctgtttcacgctttatggtcccctcattcagagcttgctgctagaggtcccttttcctgccattgtgttctcacttgggggtatggccccattaaggtaggcacagtcaggtgttatcttaggctgtgtaagccattctacagcatgcagtgtttgttcctaaagaagtgttcactttgtaatttcccaaatgaaaataggaagtgctagaatcacatgataaacttgcgtataacaaccgtgatattctgtgagtttttttctgtttgtttgctcagttcctaactaaggccctagcacataattagtgcctagtattgttgcttttttgaatgatttatgagtcagtcggtctttgggtagtcatgaagaatatgacttctatacagaggaaatatttgccaggcccaaagctaaacaaaattaagttatttagttttacaaacatagcaattagaaggaaaatgaacaggagttgtggctttgaatttggagaagcaggataggcactgggacacgccaggagcatccatggtgacctcaccgtcttttcctcagcatgctagtgacagagagaggccacactggctgtggagcctaacaggagaaaggagtcccacacccgtcatggctcctggtggcattgctgttagcctggcaccgagcagctcagcctgtagctactggagagttagcaaagatgaaggggaaagaactggcaggtctatctcatttgatcttcttgtatagatgtttttaataattatacatcagtctgttgtaatagtatttggcaggtcatagacaatttctgtcatattacttgataacagccctctgaggagggaaaaccatctctcttcttttatagaaaatcaaattgactttagaaaggctagggatttgtccacatttctataaccagtagttaacagaactagctctcggactagggttcttctctgtgtacctcgttgtccaggtcgttagccactcccagcgagcctcgcctaagcctgcgctgcccctcacatacctcaggtgagtgctgcaaatgttcctgccgctgctcactgcaactgaagttaccagagga

SEQ ID NO: 670065 - DNA, 2178 bp, Homo sapiens
tgcctacaaatgtgcggactttttagcattctctaaggtttccttcttttgcgaacttttcaacatcatgtgtctttaaaggtttggaaattgcctgcctttatgatgtgttaaccttttctacacagcgtcctattgaagacaatctaaccttaaagcccgttattgaaaatacctccactggtaaaacccagacattctatagtctctttctcaaagcaccactgttgaatctttgctttatatgaaattaacttacctccttcaaaataagaaaatccaataattattattggcgattatggaatacttaccgagttaatctgtaattagcattttccagtgactgttgatttggataaagttgcattcagttcaccacaatcattggaaacttacaaagctcagactttattactgagttcccttgctactcatcagggatgcagctatcactcatactccagtggccagtaatcagggcgttgcctgttaagggaggaacctctcgtcactgtcttaggagcgtcacctctgtttcctctcttcatcccacagcaggtagatagataaaaatattgtagcatctaacaagcagacattgaatttttgttctaaaacggcaaattaaatctgtctctggtggttccaaattatgtaaaataaaaaagaaacttttatcactgataggtcttgtcatttctattcagtagcatttttaaaaaattgatgaattggaacttcttttcttccaaagaaactcatcaaccctgttcattgttattcctgaaaggcttacttcccaagtgtaaagttgtctgaaaaaaaatttttttccttttatcatcatttaattttcctaataatgctgctactgtaatagctttttataaaccaagaacatgatgtttttcaaaaaccaagccaactagttatgccatgtggatcaaagggagcaaagtgtggcagaaaacactttcctattgttttaataactaattccatgattgcatcatcttcccttaaactgcactattttttttttaaatcagttttgcgatttgagtagtacccggcttttgctgtttcacgctttatggtcccctcattcagagcttgctgctagaggtcccttttcctgccattgtgttctcacttgggggtatggccccattaaggtaggcacagtcaggtgttatcttaggctgtgtaagccattctacagcatgcagtgtttgttcctaaagaagtgttcactttgtaatttcccaaatgaaaataggaagtgctagaatcacatgataaacttgcgtataacaaccgtgatattctgtgagtttttttctgtttgtttgctcagttcctaactaaggccctagcacataattagtgcctagtattgttgcttttttgaatgatttatgagtcagtcggtctttgggtagtcatgaagaatatgacttctatacagaggaaatatttgccaggcccaaagctaaacaaaattaagttatttagttttacaaacatagcaattagaaggaaaatgaacaggagttgtggctttgaatttggagaagcaggataggcactgggacacgccaggagcatccatggtgacctcaccgtcttttcctcagcatgctagtgacagagagaggccacactggctgtggagcctaasaggagaaaggagtcccacacccgtcatggctcctggtggcattgctgttagcctggcaccgagcagctcagcctgtagctactggagagttagcaaagatgaaggggaaagaactggcaggtctatctcatttgatcttcttgtatagatgtttttaataattatacatcagtctgttgtaatagtatttggcaggtcatagacaatttctgtcatattacttgataacagccctctgaggagggaaaaccatctctcttcttttatagaaaatcaaattgactttagaaaggctagggatttgtccacatttctataaccagtagttaacagaactagctctcggactagggttcttctctgtgtacctcgttgtccaggtcgttagccactcccagcgagcctcgcctaagcctgcgctgcccctcacatacctcaggtgagtgctgcaaatgttcctgccgctgctcactgcaactgaagttaccagagga

SEQ ID NO: 670066 - DNA, 1103 bp, Homo sapiens
atccaagatgacaaagatagtagccaccacttagaaaatgcttgtcatgcataaggtactgtcacaaccactttacagtctttactcatttattcttcacaaaatactttgaggtatatattattattctcatgttacagatgaggagactgagactcataaagttgaagctacttatccaacatcataagaagctaataaaaaataagactggaatttgaacaaggtctgtctaatcacaaagacttctttctattacaacactgtctggaatgatacagagtagctcctaccttccagcagttccaagagactcatttcattcaatcccttcaggttgatcccaacccttaaaaccaatgaactatagtagggtcatggcggccaccctggaataggatccctagtgacacatccagactttgtcatcaaacatgtttcatgtgtgtgagatgatttttatagctaattgacattttctgcaatctggagagaaactcaccaggagaaaaaaaaatgtgtgctkcaggggtcgggggagtgggtaggtaggagaggaaactaagaaaaataagagggcaagggtacaaagggaacaggagaaccagaggccaagacagacaccagattattatttgaacgctgtcactctgctaaatgaaacctgagactctagggtctttgaaaagtatatgtgaagaaatgagaaacctttgccaataaaccaagtaaaaataagcagctacaacagtgtagcccattgtttggaaccttctttagtctacttactaaatttaaacatgacagccagttttataaattttttccactgcttttttatttctgttttttaatgcaggttgaaattggaactttctctgttccttttctccaccttccaaataagtcctaataacagatttcctcagaccctacatcacccacgatgcttacacatgcccagctatgtttctaaaggtctttggcccactttttgttgtctgattatctctttttgactttatcttgccctgtcattactttctttacctgaaggaagctatatttaagcagtttgtctagaggtacttacattttctgca

SEQ ID NO: 670067 - DNA, 1484 bp, Homo sapiens
tttcccctttggttgtttttgtcagctttgtcaaagttcagatggtcataggtgtgcagccttattactgggctctgtgttctgttctattggtctatgtgcctgtatttgtaccagtaccgtgctgttttggttactgtagccctgtattatagtttgaagttgggtaaagtgatgccatcagtgttgttctttttgcttagaattgccttggctattcaggctcttttttcggtttcatatgaaattttaaacagttttttctagttctgtgaataatgtcattggtgrtttgataggaatagtactgaatctgtaaattgctttgggcagtatggccattttaatgatagtgattcttcctattcataagcatgggatgtttttccatttgttggtgtcttctctgacttttttgtgcaaggttttgtgattctcattgtagagatttctcaccttcctggttatctgtattcttaggtattttattctttttgtggcaattatgaatgggattgtctttctgatttggctcttggtgtgactgttgttggtgtagtgatatttgtacattggggaattcacagtcttaagagacttaaagaacccatgagttctatatttttaatgcactgaagctcttaaaaattaaccaaagtggcagtttgtccttagtgcatacaattagaaaattatttggaggttgtgctagagtggcaataacagtacagtggaggctaaagtaataatgatttacagaactcaaagcatcccagattccaaaaatatgtgacttgaagctagacagagcatgccctttgatatgattaggctttgggtccccactcaaatctcattttgaattgcaatctccctaagccccgtaatccccatgtgtcaagggagagaagaggtagaggtaattgaatcatgggggcagtttcccccatgctgttcttgtgagagtgagtgacttctcactagatctgatggttttataaggggttcttcccgctttattcggcactactcattcctgccgccttgtaaagaaggtaccttgcttccccttcaccttccaccatgtttgtaagtttccggaggccttcccaaccgtgctgaactgagtcaattaaacttatttcctttatcaattacccagtctcaggcagttctatatagcaatgtgaaaatggactaatacacccatttaattgtttccaaatttagctgtcagataagtctttgccccttctctgaaattgtttactcatttgtaaaacagtacaataatgccttatgcatagggttgttttaagaattgaatgagataatttactttaagtgcctgagtatagaatacgtggacaccagggtagtgtgggtctcatctgggtctaactgggctctagacatgcatggggagctgattcgaaagagtgaacagaaattttatttacagagataccaaggagcctccctgg

SEQ ID NO: 670068 - DNA, 1484 bp, Homo sapiens
tttcccctttggttgtttttgtcagctttgtcaaagttcagatggtcataggtgtgcagccttattactgggctctgtgttctgttctattggtctatgtgcctgtatttgtaccagtaccgtgctgttttggttactgtagccctgtattatagtttgaagttgggtaaagtgatgccatcagtgttgttctttttgcttagaattgccttggctattcaggctcttttttcggtttcatatgaaattttaaacagttttttctagttctgtgaataatgtcattggtgatttgataggaatagtactgaatctgtaaattgctttgggcagtatggccattttaatgatagtgattcttcctattcataagcatgggatgtttttccatttgttggtgtcttctctgacttttttgtgcaaggttttgtgattctcattgtagagatttctcaccttcctggttatctgtattcttaggtattttattctttttgtggcaattatgaatgggattgtctttctgatttggctcttggtgtgactgttgttggtgtagtgatatttgtacattggggaattcacagtcttaagagacttaaagaacccatgagttctatatttttaatgcactgaagctcttaaaaattaaccaaagtggcagtttgtccttagtgcatacaattagaaaattatttggaggttgtgctagagtggcaataacagtacagtggaggctaaagtaataatgatttacagaactcaaagcatcccagattccaaaaatatgtgacttgaagctagacagagcatgccctttgatatgattaggctttgggtccccactcaaatctcattttgaattgcaatctccctaagccccgtaatccccatgtgtcaagggagagaagaggtagaggtaattgaatcatgggggcagtttcccccatgctgttcttgtgagagtgagtgacttctcactagatctgatggttttataaggggttcttcccgctttattcggcactactcattcctgccgccttgtaaagaaggtaccttgcttccccttcaccttccaccatgtttgtaagtttccggaggccttcccaaccrtgctgaactgagtcaattaaacttatttcctttatcaattacccagtctcaggcagttctatatagcaatgtgaaaatggactaatacacccatttaattgtttccaaatttagctgtcagataagtctttgccccttctctgaaattgtttactcatttgtaaaacagtacaataatgccttatgcatagggttgttttaagaattgaatgagataatttactttaagtgcctgagtatagaatacgtggacaccagggtagtgtgggtctcatctgggtctaactgggctctagacatgcatggggagctgattcgaaagagtgaacagaaattttatttacagagataccaaggagcctccctgg

SEQ ID NO: 670069 - DNA, 1484 bp, Homo sapiens
tttcccctttggttgtttttgtcagctttgtcaaagttcagatggtcataggtgtgcagccttattactgggctctgtgttctgttctattggtctatgtgcctgtatttgtaccagtaccgtgctgttttggttactgtagccctgtattatagtttgaagttgggtaaagtgatgccatcagtgttgttctttttgcttagaattgccttggctattcaggctcttttttcggtttcatatgaaattttaaacagttttttctagttctgtgaataatgtcattggtgatttgataggaatagtactgaatctgtaaattgctttgggcagtatggccattttaatgatagtgattcttcctattcataagcatgggatgtttttccatttgttggtgtcttctctgacttttttgtgcaaggttttgtgattctcattgtagagatttctcaccttcctggttatctgtattcttaggtattttattctttttgtggcaattatgaatgggattgtctttctgatttggctcttggtgtgactgttgttggtgtagtgatatttgtacattggggaattcacagtcttaagagacttaaagaacccatgagttctatatttttaatgcactgaagctcttaaaaattaaccaaagtggcagtttgtccttagtgcatacaattagaaaattatttggaggttgtgctagagtggcaataacagtacagtggaggctaaagtaataatgatttacagaactcaaagcatcccagattccaaaaatatgtgacttgaagctagacagagcatgccctttgatatgattaggctttgggtccccactcaaatctcattttgaattgcaatctccctaagccccgtaatccccatgtgtcaagggagagaagaggtagaggtaattgaatcatgggggcagtttcccccatgctgttcttgtgagagtgagtgacttctcactagatctgatggttttataaggggttcttcccgctttattcggcactactcattcctgccgccttgtaaagaaggtaccttgcttccccttcaccttccaccatgtttgtaagtttccggaggccttcccaaccgtgctgaactgagtcaattaaacttatttcctttatcaattacccagtctcaggcagttctatatagcaatgtgaaaatggactaatacacccatttaattgtttccaaatttagctgtcagataagtctttgccccttctctgaaattgtttactcatttgtaaaacagtacaataatgccttatgcatagggttgttttaagaattgaatgagataatttactttaagtgcctgagtatagaatacgtggacaccagggtagtgtgggtctcatctgggtctaactgggctctagacatgcrtggggagctgattcgaaagagtgaacagaaattttatttacagagataccaaggagcctccctgg

SEQ ID NO: 670070 - DNA, 1772 bp, Homo sapiens
atatatacacacacacacatatttgtatttgtatttgtattttaattagtattttaggaaacattcatatttatatataaaatacattttatataaatatgttatttgaagtatttgtgttacatatatttatgttaatatattttatataaaatatctactttcccaaaacatgtatatattatataattttttatacttatacataaatttataaatataaataatatataaaattcaaaatataaataatatgtagctatatacataaatatacatttaaaaatatttgaggttatatatttatatataacaatatataatatataacaatatataaatatataatatagaaatattttatatgtgtatgttatatacacttatattttggaggcttttatatgatagcctagcaatttctttaaaagaaaaacccaaagcaaatacattcttggctgatagggtgttttgtgtaaatgtgcctggaaacttgagtaggtaataatgctttattaatttttttagaagtatttaaaccaatttttgagaatgtgagtgtgctagtgaacaaatttcatctcagtaagagatcatgcccccttgctctgctgggcccagtctagttacatacgtattttctacaaacagggcactaggggtgggtgcctggcaatgggcttaattgtttgatgacagaaggcattaaaaaacggagggaagtcccttggcactgcagaggggaggagagaagagagaataagaagtctgtgatccagactgtttattaaccttgcctttctgtggaaaagatcattcaccctgtcactgggcatggaactggcagctggggtgttgtctctggcccctgaaaccagatgagcaaggctgttgaaggatgagttcggctgcgytccagctacctcatgctctgaataaaagtcacaaagaaactcagatgcagcatatgcaagactgcgctgaggggctagaagcttttagctgctaatttgttctgtttccaaaggactagctgttaagaagcagcaagggccatggtgatggaaaatattactatgtaaaggttgccaatgagactgcttgaaaaggtgttggtaggaattttcttttggaggtgaagatgctcctccacttataatggggttatgtctgaatacacccttcctaggttgaaaatatagcaagacaaaaattcatttaatatacctaacccagtgaacttcataacttggcctagcctaccttaaatgtgctcagaacactaagcctacagttgggcaaagtcatctggcagcacagaaccccatagaggttgtttacccttgtgatggcatggctgactgggagctgtgacttgctgccactgcccagcagtgcgagagagtatggcaccactttctactgaaggcatatggcttttacaccatagtaaagtagaaacattgtaagttggggcccatctgtatagtcagtgacaggctagtattaaaactcatggatatcaaggatttgctttctcctgatagctctgtggctatgggcttcttggactatagctccatcccttgggtaccaataaagctgaaagttctgtagtacagttgcagtgcctggtgtgtggggacagagatgacagtctagggtacctgactagatattcctctgtggttccagagtagagttgggtgaataattgctgagatatgtccaggcattgttccatctccttgtatttgaaccatggcctctgg

SEQ ID NO: 670071 - DNA, 1751 bp, Homo sapiens
taacattcttgtgcatgtctcttggggctcgtgtatgtgcatttatgatagtattatacctaggagtgcaattattacatcttaggttatgtttacctgcaacgttagcagatattgccaaacagttttccaaaatgatactgatttatattcctatcagcagcagtaagtcagagttcttactacttcacatcttcatccaaatttgtgattcaaagcctttttaaattttagccaatctgctgagtgtctagcagtatctcattatagttttaattagcrtttccatgattattaatgagcttgagtactttttcatatgattattgacaatttggctatcttttttttttgaaaatgcttttcaaagtcccttgaccttttttctattatgttgtctattttaattgttaggaattattggttgtatgtgttgcgaatgtcttatctagctttctgacttgcctctttactgtcttaatgtgaaccttgataaataaaaatttttaatttatctctaatttctttatgtttggtgctttttaaattcttgtaaggaatttttccctttgctaaattgttgatgttatatccctgtatattatattttaggacctttgctattttaaattttatatttagatattttttatatcagtatccaactgtcctagtacaaatagtgaaaataatcattaccctacagctctacagtgtcaacttcctcataattcaactatccatatattaattattccatttattccacttacctattcatttgtgccttgtaccagtaccacataattttaattactgtaggtttttaataagtcttaatttccaatagagcaagtcatcttaccttgtccctttttttcaagagcattttggttatttctttgcattttcatttatgtttctaaattagtttgttaggtaccattggaatatctgttagtgctcttattaagattgcattgaattgtagaaaatatgacattcggtctagtttgcctagtacagtcacagtttacacctgttgccctcgtatcctttctaggttagtattcctatgaggtttttcaccttttcactattcatattattactgaattatgataagctagaaagggtatacctcactttgtaattctagcttctgcatggtcacatctagaagtagtagtaccatttgttgaaaagattatcttttcaactaaagtagatgagatacatgggtagtgaacagaattttcacttttacttatggtttaattggaaaactgaccagcaatgatccgcctctttttatcaatctttttctgtcacaatgctaataatacctctcattcaaaggcaacaagcagaatgcttgttgatgaactgaactcaaacacgaagagctaggagtagctaactcattttgatttagggtcgtggcagaaaattatttgattttgctgtctctgcaaagccgcctgcctgtgcctttggtttatctaacaaattctgccttatgaaaatatttgtcaaaaaaaaagtgctcttcaaagtggcagagtcaatatttataaaaatatttggatataggtattttaataaacaactctatgccaaaaaatgtgataacctagatgaaaaggaccaattactacaaagacacaatctgccaaaactcacacaagaagaaatagacaatctgaataaacctatttaatcaataattaacaacccattaaaacagaaag

SEQ ID NO: 670072 - DNA, 2080 bp, Homo sapiens
ttgagtcttccatgtatgagcatgatgcatctctctccatttatttttgtttgctttatttcctttaaatactattttgtagatttttggtgtagatatcacgaacatcttttgttagattttattctgagtatttgagatatttaattctcttttaaatgttataattcttattttttatttgttcattatggtagcataatttgttcttgtaaaataactctgaattcagtaacattgctaaatttactaattaaatctaatagttttctgcagactctttaaaaacattattttcattttaaatgtatttcatcatttattaaaagaaatgaattaaaattattttcattgatatttctagtgaaaataaaattggaatttttattttaaaatattaattgaataataatattaacttatagtgaaaagaaaagctggattatagatgagagtgtgggatagttcatcagcatgtgagtagatgctagataaactggaaccattgcctcttctctgtcttcataagcataatactcttcagtaaatgagtctgccattctggtctttagtttttatatctataaaataatgatactgtactacataagtttaagttcttttttatctgggatggatgactgagataactttttgctaaatgattgtgctttagacttttttccttttctgctttttcttttatagtcttgtgatgatggggataatgggcctcatgtgatctcattctgggaaagggtactaggtgggaccaagtccacctgcactcccctgtctcctattcatggtatttgagaacttctattgctcctggataccaggtattggctattgagatgatgcaattttgtctcaggttcatctttttagagactatcctccactaatgcaccctaagtgttcctatatcatgttagatgttggatgatgttttttttttccctgaaaatctcaagttcttttgagtctatgtcctgaaaagccatctgctagtcctaatgcttctattacctttattccactttcttgtggggggtttcacttagaaagaagggaaatgaagacttcatgtttgacttcctcctctgtttcttttcctcttgcctatgctcttgagcctgaggtagtttattatattcttttctcctcttttagcatggcaaaagwccttgatctagttttctaagtctgaattctaatattgtaatggaaacaagaaaagccttatattcaagattattgtcttgctatatggatccagaattattggcagacatcaaaatgtagactgccttttttaattttatttatcttgtagcaatcttgatctttttagaggcaaatgctatgcctggcagaaaggtgaggtcagacacagagaaatgcaaaaggattgcatttagatatatttccaaacaacatccttgttatccttgttacataatgtcatatcatatttctcatgttattttgttttctgcttcttttccatctgacatgtccaaatagtgtttaaatgtaatgtggccatggacacagggaggggaacaatacacacttgggcctttcaggggaatggggtgggggaagggataccatcaggataaatagctaatgcatgtggggcttaatacctaggggatgggttgataggtgcagcaaaccagcatggcacgcgtttacctaagtaacaaacctacatgtcctgcatctgtatcctggaacttaaaataaagtaaaattaaatttaaaaaaaaacttggtgcggcaacaactgctatgccactgctatgcaatttctgtcataggacatggaaggatattatgccacataagtcaacgctgtctacctacattaatagatatttaatagatagcaattgtgtctgcacttaacaggtaccttctccatatatgctgatcattgagtttagcacaaaaggaaaaatgtgagaggcacaagttaaaataactgtccttgaagaacttaaaatatatctgtggagacacgacagcacaagacaactcaagaaggcaatataagttataggcattgact

SEQ ID NO: 670073 - DNA, 603 bp, Homo sapiens
tccgaaaatctgaaatttgaaatgctccaaaaatctgaaactctttgagcacagccatgatgctcaaaagaaatgagtgttgaagcattgtggattttggatttttggattagggatgctcaacaagtatgatgcaaatattctaaaattggggggaaaaagcccaaatccaaaacactcctggttccagccttttyttttctttttctttttttttttttttttgaggcagggtctcactctgtcacccaggctggagtgcagtggcgccatcttggctcattgcaacctcagcctcccgggttcaagcgattcttgtgcctcagtctcctgagtagctcgggttacaggcgcacgccaccatgcctggttcattttttttctatttttagtagagacggggtttcaccacattgaccacgctggtgttgaactcctgatctcaaatgatctgcctgccttggcctccccagcactttgggaggcatgagccaccacgcctggcctggtctcaggcattttggataaggggcactcaacctgtgcaaagtggggcttaaaatcaaggccctggattcctcatccgggactttttctcttata

SEQ ID NO: 670074 - DNA, 588 bp, Homo sapiens
gattctgtgattctatttcagtctggttgagttctttagttgcaagcaacagataaccaacttggttaatcttgcccagtttccttaataagactcatacggcccttcgmtacctgggccctgcctgtgcctccagcctcaaatcttcttcaggcactgtgaagctccagacatatggcgacatcccccacaccatgtgtgccccttctccggcctctgctgcctaatagtaggtttcaggtaggcatcacttccgctgggctgccttccatgacctccccagtctggatcgcgtcctctcctgggtgctccagcagcagcttcctccacttctccatcatacctttgagactattgtattataattttctaaatgctttcccctcctgtgagtcctgggcagaaggaagcatgtccaccttcttcacgggtatccccaatacacagtacagtgtctggcacacagcaggtacacaaaatatatttaatgaaggaacagaggaagggagagaagatatctcttcttggatagtgccagtcatatattaggtgttcattaaacatttgtagaaccgaactgagaatgct

SEQ ID NO: 670075 - DNA, 588 bp, Homo sapiens
gattctgtgattctatttcagtctggttgagttctttagttgcaagcaacagataaccaacttggttaatcttgcccagtttccttaataagactcatacggcccttcgctacctgggccctgcctgtgcctccagcctcaaatcttcttcaggcactgtgaagctccagacatatggcgacatcccccacaccatgtgtgccccttctcyggcctctgctgcctaatagtaggtttcaggtaggcatcacttccgctgggctgccttccatgacctccccagtctggatcgcgtcctctcctgggtgctccagcagcagcttcctccacttctccatcatacctttgagactattgtattataattttctaaatgctttcccctcctgtgagtcctgggcagaaggaagcatgtccaccttcttcacgggtatccccaatacacagtacagtgtctggcacacagcaggtacacaaaatatatttaatgaaggaacagaggaagggagagaagatatctcttcttggatagtgccagtcatatattaggtgttcattaaacatttgtagaaccgaactgagaatgct

SEQ ID NO: 670076 - DNA, 588 bp, Homo sapiens
gattctgtgattctatttcagtctggttgagttctttagttgcaagcaacagataaccaacttggttaatcttgcccagtttccttaataagactcatacggcccttcgctacctgggccctgcctgtgcctccagcctcaaatcttcttcaggcactgtgaagctccagacatatggcgacatcccccacaccatgtgtgccccttctccggcctctgctgcctaatagtaggtttcaggtaggcatcacttccgctgggctgccttccatgacctccccagtctggatcgcgtcctctcctgggtgctccagcagcagcttcctccacttctccatcatacctttgagactattgtattataattttctaaatgctttcccctcctgtgagtcctgggcagaaggaagcatgtccaccttcttcacgggtatccccaatacacagtacagtgtctggcacacagcaggtacacaaaatatatttaatgaaggaacagaggaagggagagaagatatctcttcttggatagtgccagtcatatattaggtgttcattaaacatttgtagaacygaactgagaatgct

SEQ ID NO: 670077 - DNA, 1910 bp, Homo sapiens
agcactcacttaaaataattacttgtcatgagaaatgttccaaaggcaccgcaaatttccttgtgaaaactgacacaatttactttagaatagtcactcaccacttcttccaatgcagcacttcgcccaaaagaacaagtgaggtgtgtgaggcagttaacaaaggaggagaaaagttcacttggaatggcagttaaaacatttcgtgggaacacggttatcaggttgctgataatgctggagatccccacagcttcagaatcttctatttcaattctaaaaccaaggaatgagtattattaagtggcagtaaaagaaaaattattaatataataactcatttccaaacaagcaaatatcgttactgattcattttaaaaggtatgtctctgtttattaatttcaaattacccatatgactttacttcaaaatataagggggaaaaaataactagtttctttttttcttctactgttaaacacaaaacgtagagctcctttttcagctgcaaagggcaagtatacctacccattgatagtattcagtaatccctcaatgaagtgtgctagataatcaacttgtgatccttcatctgggaagatgggtccatgaagagaagctaactgggcaaggcactgcagagaatcttgtgccatatctgaatcttctctgatttttcgatgtacctgttagaaagaattactaatccataaatataaattcttcctttgtaagggtcacgtgtctaccatgccgaatgaggtaagacaaaaattcactgtagctggttatttctagaaaattaattcctgaattaaactaaattgaaaattgtccctcagtccactttacattacaggtcattattttaaacatatcaattgatttttaactgagggctacctacattttgaaaattgatctgtctccagcatgttatgacaaagagagaaacagatgccagccagtcagacatactgcttcttctaaaaacagcaacaatgacagtcatctgtattatgctaactatgcctagctacagcttcttgctaaacttagcagacaagttcaataaagagtatatagatgctgctttagtggaagtaaacagttgtgcacttagaaaagcaatataccattgaatccctagacattcatgcattcattcaaccaaaatataatgagcacgttcttttattaattctcagtttgcttacaatttgtttgaatctcagtttaacctacatcattgctattaataaatgctaaaagattttgaataccaaatgtaaattatacttaaatccatttaaagctaacctatattttacttcagtgatacaatacggacatgaaacacctggtagagtgttttgtatgaagggaatgctcttgaaatactgctccctagttttatagtattaatattctcagatgttaaaggtttcatttctgtaatctgacatattagagccaaggaaaatttagtgaaggaatatgatcattattaatctyaatccatccaacacttactgttggatgtaccattttgtacttgccgaagtacttaactagcccttttctttcccacacaaagttctctctctattttgtaaatgttgtgtaacatcaaactcatagttttaggctatattcactttgactaggcaaattgtttctaaattacttcaggtcagaacatttaagtactcactggtatgctgggccacaatgaacacttaataaatccttgttcactgagtcccttaatccttaatctctgaacttctcaaggttctagtaatgaaatttaaaacactaagtaatctctaaacattacaaagttagttgatttactgacatgcttaaaatatgctatactctttggactagaacaaaccacagccca

SEQ ID NO: 670078 - DNA, 608 bp, Homo sapiens
ccaaagtaggcttaattctgtaacagtcaaaatctcagcaactgaacaatattgaagtcaatttccaatttatatcacattctaatgtggattgatgtatatgtggtagggggtgaaatttgttgaagagaagcttgcctccatgcggtgactcagaaattcagggtctttctagctagtatctctagcttcaacatgtggtcttttgggaaaaaaaaaaaaagttgggggagaaggcagaaaatgaaggtaaaatgtacaacactgtatatggtgttttacttgaaggtacaagcctagtagctgtgtacatcacatggccccaacctaactagaaaggagggtgggaaatagaatctttctatattgccagaagaatctttttatattgctatattaaatgggttaataaagaacacagtgttttcctgtcacacagacatataagaaaatatttacaatataataatatatattttatataaatatraaaatatgtccaatataaaattgtatataatttataatataatgtatacaatataatatataattatatattataatatatatttaaaatataataagaaaatatttacaatataata

SEQ ID NO: 670079 - DNA, 659 bp, Homo sapiens
tattttgtttagattttctctgtatgataatgtacttctcccttttcatcctccatttccatttagaaacacaaaaaataatttatttaatgtcacaaagaccactgtttctccaattcagattgcaatttagataggtaaatgtattagtccattttcacactgctgtaaaaacatacctgagactaggcaatttacaaaagaaaaaggtgtattggacttacagttccacatgtctggagaggcctcacaaacatggcagaaagtggaaggcacatctcacaaggaggcagacaaaagaagagagmttgtgcagggaaactcccatttttaaaaccatcacatctcatgagactcattcactatcaggagaacagtgcaggaaagacccgcccccataattcaatcacctcccactgggttcctcccacgaaacgtgggaattgtggcagttacaattcaagatgagatttgggtggggacacagacaaacaatatcagtaaatgatcaaaaccctttactcttggccctggaaatgaaggatggaaaatgaggagggaaaaattaagaaagcaggccattctttggaaaaataatggaaaaatgatttggagagaggcaatagaaatctttatctggattaatatatgaaaaacac

SEQ ID NO: 670080 - DNA, 659 bp, Homo sapiens
tattttgtttagattttctctgtatgataatgtacttctcccttttcatcctccatttccatttagaaacacaaaaaataatttatttaatgtcacaaagaccactgtttctccaattcagattgcaatttagataggtaaatgtattagtccattttcacactgctgtaaaaacatacctgagactaggcaatttacaaaagaaaaaggtgtattggacttacagttccacatgtctggagaggcctcacaaacatggcagaaagtggaaggcacatctcacaaggaggcagacaaaagaagagagattgtgcagggaaactcccatttttaaaaccatcacatctcatgagactcattcactatcaggagaacagtgcaggaaagacccgcccccataattcaatcacctcccactgggttcctcccacgaaacgtgggaattgtggcagttacaattcaagatgagatttgggtggggacacagacaaacaatatcagtaaatkatcaaaaccctttactcttggccctggaaatgaaggatggaaaatgaggagggaaaaattaagaaagcaggccattctttggaaaaataatggaaaaatgatttggagagaggcaatagaaatctttatctggattaatatatgaaaaacac

SEQ ID NO: 670081 - DNA, 643 bp, Homo sapiens
ttgtaaagcccaatacacatgagggattgattatctagagatcttagtctataaaatgtcctatgggagccaaaatagagccttgagaaaacaaggggactaaagaccaagagagagatggcctatctatatgttcctgtgcattttctgccaaagtgcctatttgcaataaaaacctgggattgaggtaaacattaagtcacaagtacacttctgaggtttgccacaccaagccacaaacttccagaaaggactggctgtgtaaaggcatcattgtattttccaccacggtagtcataacacaatcaataaaggtacagcaaatacctgatgaatggaaatgtgaagcttttctttgtttttcctttaaaagagtgatatcagtcctgggagtgggtargaaggaagaaatcagatgacccccttcctgtaaaggaactcggatatacctaccccacccacccacacccccctccaaaaaaataagaatgaataaagggaattgggtggggcagtgtgaaatatttttattgcaacaatgagttcaagaaaaaacacctttaaactccagtccaaataggttaacatctttaaatgttaacgattctgttgattattgcttgaattctcccagggaatgact

SEQ ID NO: 670082 - DNA, 643 bp, Homo sapiens
ttgtaaagcccaatacacatgagggattgattatctagagatcttagtctataaaatgtcctatgggagccaaaatagagccttgagaaaacaaggggactaaagaccaagagagagatggcctatctatatgttcctgtgcattttctgccaaagtgcctatttgcaataaaaacctgggattgaggtaaacattaagtcacaagtacacttctgaggtttgccacaccaagccacaaacttccagaaaggactggctgtgtaaaggcatcattgtattttccaccacggtagtcataacacaatcaataaaggtacagcaaatacctgatgaatggaaatgtgaagcttttctttgtttttcctttaaaagagtgatatcagtcctgggagtgggtaagaaggaagaaatcagatgacccccttcctgtaaaggaactcggatatacctaccccacccacccacacccccctccaaaaaaataagaatgaataaagggaattgggtggggcartgtgaaatatttttattgcaacaatgagttcaagaaaaaacacctttaaactccagtccaaataggttaacatctttaaatgttaacgattctgttgattattgcttgaattctcccagggaatgact

SEQ ID NO: 670083 - DNA, 1360 bp, Homo sapiens
ccacacaatccagcaattccactctgggtatatatccaaaagaactgaaagcagagactcaagagagttgtacacccatgttcccagcaacattattsactgtagtgaacaactcagatatccaccaatgcacggatgaataaaacgcagtgtatacatacaacagaatcttagcctttaaaaggcaggaagtctagatacataagctacatcatggatgaacttggaggacatgctgctaagtgagataagccagtcataaaaagacaaatactatgggatttcacttacatgaggcacttacagtatcataggaacagaaggttaggactgtggttgcctggggctggggaaggggagactgacgagttaagtgtttaatgcacagagtttcagcatagaatgatgaaaaagttctggaaatgcataggggtgacggttgcacaacagtgaatgcatataatgtcactgaactatgtacttaaaatggttaaaaacaatttttgttttttattgaacataaattttatgttcagtatattttaccacaataaaaaagaccccatgggtgggaaacatttgctaaaccacagacacacacatgcacaaatagaatttaactataaagaaaactactgataagcttattttatcaaaataagttgatacttgtaaagcactttgagccttacctggcatggagtaagcatcacctaagtattaaaattggtaataccaagagagactgaaacaaactacattgtagcagaagatactctgaatactaactctcaaaagacttgtatctgaaatatccaaaagaaaaatcactaaggaaaatacagaacattttaaaaggccagaaaacttgaacaggcacttgacaacagaaaaactccaagtggccaataaacatatgaactcttcgcctcaagcaatctccctgcttagcctcccaaagtgctgggactacaggtgtgagccaccatgcccagccatccaaaacaaatgaaaagctactcaacctcatcagtatccagggaaatgccaattaaaaccagtgtgcatctacctgacattttagccacagtagaccccaccctgctgggggcaacagttatctagtaaaattaaaggtatctcctgacttagcaattcaactcaatgttctgcaaaggaacttgtgcacatgtgcagaagactgcacaaagaattatgtggaatgaccaaaatcagaaacaataaaaatgaccatcaacaaggctgtatcacttgaggtattattcatacaacagaacaccatatagcattaaaaatgaactccaggacccaacaaggatggattatacaatgctgagtg

SEQ ID NO: 670084 - DNA, 1360 bp, Homo sapiens
ccacacaatccagcaattccactctgggtatatatccaaaagaactgaaagcagagactcaagagagttgtacacccatgttcccagcaacattattgactgtagtgaacaactcagatatccaccaatgcacggatgaataaaacgcagtgtatacatacaacagaatcttagcctttaaaaggcaggaagtctagatacataagctacatcatggatgaacttggaggacatgctgctaagtgagataagccagtcataaaaagacaaatactatgggatttcacttacatgaggcacttacagtatcataggaacagaaggttaggactgtggttgcctggggctggggaaggggagactgacgagttaagtgtttaatgcrcagagtttcagcatagaatgatgaaaaagttctggaaatgcataggggtgacggttgcacaacagtgaatgcatataatgtcactgaactatgtacttaaaatggttaaaaacaatttttgttttttattgaacataaattttatgttcagtatattttaccacaataaaaaagaccccatgggtgggaaacatttgctaaaccacagacacacacatgcacaaatagaatttaactataaagaaaactactgataagcttattttatcaaaataagttgatacttgtaaagcactttgagccttacctggcatggagtaagcatcacctaagtattaaaattggtaataccaagagagactgaaacaaactacattgtagcagaagatactctgaatactaactctcaaaagacttgtatctgaaatatccaaaagaaaaatcactaaggaaaatacagaacattttaaaaggccagaaaacttgaacaggcacttgacaacagaaaaactccaagtggccaataaacatatgaactcttcgcctcaagcaatctccctgcttagcctcccaaagtgctgggactacaggtgtgagccaccatgcccagccatccaaaacaaatgaaaagctactcaacctcatcagtatccagggaaatgccaattaaaaccagtgtgcatctacctgacattttagccacagtagaccccaccctgctgggggcaacagttatctagtaaaattaaaggtatctcctgacttagcaattcaactcaatgttctgcaaaggaacttgtgcacatgtgcagaagactgcacaaagaattatgtggaatgaccaaaatcagaaacaataaaaatgaccatcaacaaggctgtatcacttgaggtattattcatacaacagaacaccatatagcattaaaaatgaactccaggacccaacaaggatggattatacaatgctgagtg

SEQ ID NO: 670085 - DNA, 649 bp, Homo sapiens
ggggaacagagccagtccaggctgttcacataaggaagaagctcgttctcctccctccttcttatctctccctcagtgatcctcactggctgaacctaagtggaaaccargagaaaagggacccctacaggccagctactcagagccgatcacagcttggagaaagaaatagacagacctgcaagagcaagtgaaagagacctcacacagtgtgtttgtcatgggctgctctctgtgtgtgactcatttcaacaatctctgtctttttatgggtgaagtttgctctcctacctttagttagtgactcttatacttaatattatgcttcccattttattttacattgactggttattttcactcagtgctttctcttagttttttttcctcatttttgcccattggtcaaatgattattcactcctttctttttttattttctccttgttaaattggaagtttatgatacatttcctttccactgattgttaccttcccatattcaacacacttgctattagatcttagtactacataaaaacaaaatatcaacttttactcctcctgggtactcacttcccagattgtttctatatctgcttcattggaaacatgaaactttaaaatagttttacttcctttttctcca

SEQ ID NO: 670086 - DNA, 606 bp, Homo sapiens
agatactgacattccaaagatatggtaaacaaaccaacccaccacaatgggtaactggcattttctctttgagatctttttctcttcttgaaacaattagttttcttcaaaaaagtagaaaagttggaattgtattaaattccaagaagaaaattagcattagctcttataatcttaccatataaaaaatcttgattaaactttggtatattttaaaaatcagatcgatatagctaggtagcatttttaactaaattggaattccactatacatacatcgtaaagttttttcccctaagatcatgcattttggaaataaagtgatttcttattgggagttcrcatgtgatcaggatttataactaacgaagatactatccctccgatactatcttattattagaattatcagaatgcccttacaaactggtatactgttgagtttgaaattccagaatcttggcatgtaaccagtatatcattactaagctagcaatgccttggaactatctcttaaaacacattgactttcagcagactttaaacagtttataatatgggatatattgaagttagaaaagtaaaaaagaggcaaactttatgaca

SEQ ID NO: 670087 - DNA, 623 bp, Homo sapiens
agagaacatccctccaaacctaatgcgttaccacagagcctccctcagaacctaatgcgttcccagagaacccccaacagaatctcagtgcattaccagaaaacctccgtcaggacctaatgcggtcccagagaacatccctcagaacctaatgcgttcccagagatcctccctcagaatctaatacgttcgcagagaaactccctcagaacctaatgcattcccaaagaacttcctttaggacctcaatgcgttcccagagaatctccctcacaaagtaatgcatttcgaggcaacctccctcagaacctcagtgcattaccagagaaccttcctaagcacgtaattcattcccagagaacttcccycagaacctaatgcgttcccagagatcctccctcagaatttaatgcgttcccagagaaattccctcagaacctaatgcattcccagagaacctccctcagaatctcagtgcattaccagagaaccaccctcaggacctaatgtggtcccagagaacatccctcagaacctaatgcgttcccaaagatcctccctcaggacctaatgcgttcccaaagatcctccttcagaatctaacacactcacagagaaattcc

SEQ ID NO: 670088 - DNA, 1185 bp, Homo sapiens
gactcaccatcccctgggtagtagcgtgggaggaaaagagaggggaagaaaaggtaaaggaagggaaagaagcggctgacagaggagaaaggacaggtcaagaaggtgggaaggacaacatgcctgtcctcatccccctgcccctgccccatcctccctgtgcaggtggtctcagcggggcatgcagggcctgtcagaatcctgaagtgcacrtgcccggggccatcctcctccagaggcttctctgaatccggtttgctctgtggagccaggcacatgcattttgagaaagcccccccggaacttatatcccaattcccggttaagaaccgctgagtgtgagggggatgagcaggtgtggaccaaatgtcccggcacaaaccttcatgtccagtatcttctgaaaggtttctgtgttgcagtctgtgagaagtttgatgtagttgtcaacaaacaccaccaacggttcatgaggggccatcactacctacagcgggaggagacaggagcaagcccctcaggaaaactaccaccacgggaggagacaggagcgggccctcaagaaaactcactacccaccgcaggaggagacgggagcgggcccttcaggaaaactcactcctcacttgcccgccgagcgctaaatggattctgagaggtttccttaagcagcagcaacccagactagaaacgccccagtggcccatctcatcttcacatgccactacagcaatgtcctaaatttgctgaatcctaaatacacctgcgctgctgtttgaagtatgggtttccggggccctcctctaaagactctaattcagtaggcctggctggagtcccaggtgacttttaaactatcaggaccatccgggaaaccctgcgtgagagggtctcctgttccaggcatttcaccagtacacggtacttgctccttctgccttgacgtactatgattcctgagaaatgggtggcaaaaggagctggtataagtaagtggatttctgcaaaaacaaaaatgccaaagctgcctcaccttttggagacttaaaatctgtaacttcatgtaacgactaacttaaactatcaattaacatacaaacaaaggaaaggaacggcactgcaacccttattcatttccgttttgttctggaatgcagtatctgattttctttccccagccgactg

SEQ ID NO: 670089 - DNA, 1185 bp, Homo sapiens
gactcaccatcccctgggtagtagcgtgggaggaaaagagaggggaagaaaaggtaaaggaagggaaagaagcggctgacagaggagaaaggacaggtcaagaaggtgggaaggacaacatgcctgtcctcatccccctgcccctgccccatcctccctgtgcaggtggtctcagcggggcatgcagggcctgtcagaatcctgaagtgcacgtgcccggggccatcctcctccagaggcttctctgaatccggtttgctctgtggagccaggcacatgcattttgagaaagcccccccggaacttatatcccaattcccggttaagaaccgctgagtgtgagggggatgagcaggtgtggaccaaaygtcccggcacaaaccttcatgtccagtatcttctgaaaggtttctgtgttgcagtctgtgagaagtttgatgtagttgtcaacaaacaccaccaacggttcatgaggggccatcactacctacagcgggaggagacaggagcaagcccctcaggaaaactaccaccacgggaggagacaggagcgggccctcaagaaaactcactacccaccgcaggaggagacgggagcgggcccttcaggaaaactcactcctcacttgcccgccgagcgctaaatggattctgagaggtttccttaagcagcagcaacccagactagaaacgccccagtggcccatctcatcttcacatgccactacagcaatgtcctaaatttgctgaatcctaaatacacctgcgctgctgtttgaagtatgggtttccggggccctcctctaaagactctaattcagtaggcctggctggagtcccaggtgacttttaaactatcaggaccatccgggaaaccctgcgtgagagggtctcctgttccaggcatttcaccagtacacggtacttgctccttctgccttgacgtactatgattcctgagaaatgggtggcaaaaggagctggtataagtaagtggatttctgcaaaaacaaaaatgccaaagctgcctcaccttttggagacttaaaatctgtaacttcatgtaacgactaacttaaactatcaattaacatacaaacaaaggaaaggaacggcactgcaacccttattcatttccgttttgttctggaatgcagtatctgattttctttccccagccgactg

SEQ ID NO: 670090 - DNA, 651 bp, Homo sapiens
tctaacttttaaaatcagcatatcaattcacacacacacactcacacacacacacacacacacacacccctgctgggattctactgtatctatagataaattgatacagtaattaggattgaattctatctatagattaattttggaataatttgccgctttttaaattgttatttattttttattgggcagcctcctcagccagagcaggctcagaaagactccatatgtatttctttttgagtctttcttatcaatgaacatgagctatcctgtcattttaaaggtctttatggattctgtgtcttaatattgtacagttttctgtgtagaagacttgtacatttttaatttactcctaggtatttaatgtttcctgatgttattgtaaatgatttcatttargcctgggagccatggctcacgcctgtaatcgcaccactttgggaggctgaggagggtggagtttgagaccagcctgggagacacagggaggcagaccctatatctaccaaaaaaaaaaaaaaagagccagccaggcatggtagtacattcctgtagtcccagatacttgagaagttgaggcaggaggatggcttgagcccacgaattgagactgcagtgagctatgattgtgccactgtactcact

SEQ ID NO: 670091 - DNA, 614 bp, Homo sapiens
aaaaaaaaaaaaaaaaaaaaaaaaaaaacctaaatcctcagtctgtaatttatttaactcccaagcttatatacatcaaagcaactctgactgtaagtcctgttacctttctagtaatgatttgcataaaacagcatgtttcaggagtgagtttgaggacactgctggtggtgggaagggagccaccaccctcattgctgacaagttacactaatgcaatcaaccaatttargaacagttcagaagctgcaaaaaaactgcaccagccaactattatgtaaatcacaagacagctgatcaaatcaggctcaggagtatattccaaatgaagagtacacagggagggttttccatccaagtggctccctagagtattttttcaggggtgggtggggaagaggagaccttaggaaatcagaatggaagaatagggtagagtgatacctaaaacagaaacaggaaaatgtaaccttctgaaatccagataaggacaagaaaaaacaacaaatataaaataaaactaagagggctaccataatcttaagtgttttactcaaggttcccaaagagtggcagagccaagtcttctggctttcggtcccaggcgagtccca

SEQ ID NO: 670092 - DNA, 644 bp, Homo sapiens
ctctccaggcaataagttagggtaatcatagggttcattcacctcctttgtttgaggtttctctgggttctctgttcttcattgcctgatgtccaatgcccctaaatcattgtttcatatattttgtccattttgtgatttcaggcatgayggtgaatgtaatcccaacttatcactgttgaaagcagatgtcccaaatatcttttgttatttctttctcatttatttttgttgtggccaaaaaacataatctgtattattgtgatactttaaatttattgaaactagttttatgccctatcatgtgatttctcttgatgaatgttccatttacttgaaatgaatgtatcctctgaacattataatgtgtgtaatgttctataaatgtcaattagatcaagctggttgatagggtttttttgtgccttctctacactactgtttgttaagaagacatccttgctgagtcaataagaagttagctaacagcactgttccatcaatcactgagagagaagaattgaaatcctgaatatagtactggatttgtcttatttccccttttaattctttcagttttgcttcatatatttcaagtttctatgttaggtgcatagacaattagtattgctatgtcttcttga

SEQ ID NO: 670093 - DNA, 644 bp, Homo sapiens
ctctccaggcaataagttagggtaatcatagggttcattcacctcctttgtttgaggtttctctgggttctctgttcttcattgcctgatgtccaatgcccctaaatcattgtttcatatattttgtccattttgtgatttcaggcatgacggtgaatgtaatcccaacttatcactgttgaaagcagatgtcccaaatatcttttgttatttctttctcatttatttttgttgtggccaaaaaacataatctgtattattgtgatactttaaatttattgaaactagttttatgycctatcatgtgatttctcttgatgaatgttccatttacttgaaatgaatgtatcctctgaacattataatgtgtgtaatgttctataaatgtcaattagatcaagctggttgatagggtttttttgtgccttctctacactactgtttgttaagaagacatccttgctgagtcaataagaagttagctaacagcactgttccatcaatcactgagagagaagaattgaaatcctgaatatagtactggatttgtcttatttccccttttaattctttcagttttgcttcatatatttcaagtttctatgttaggtgcatagacaattagtattgctatgtcttcttga

SEQ ID NO: 670094 - DNA, 644 bp, Homo sapiens
ctctccaggcaataagttagggtaatcatagggttcattcacctcctttgtttgaggtttctctgggttctctgttcttcattgcctgatgtccaatgcccctaaatcattgtttcatatattttgtccattttgtgatttcaggcatgacggtgaatgtaatcccaacttatcactgttgaaagcagatgtcccaaatatcttttgttatttctttctcatttatttttgttgtggccaaaaaacataatctgtattattgtgatactttaaatttattgaaactagttttatgccctatcatgtgatttctcttgatgaatgttccatttacttgaaatgaatgtatcctctgaacattataatgtgtgtaatgttctataaatgtcaattagatcaagctggttgatagggtttttttgtgccttctctacactactgtttgttaagaagacatccttgctgagtcaayaagaagttagctaacagcactgttccatcaatcactgagagagaagaattgaaatcctgaatatagtactggatttgtcttatttccccttttaattctttcagttttgcttcatatatttcaagtttctatgttaggtgcatagacaattagtattgctatgtcttcttga

SEQ ID NO: 670095 - DNA, 604 bp, Homo sapiens
attaggtttgaatatgtgatatggttttgtggtaaacatcaaaatgatttgctttaatttgaattattcacatgtgttttatagtcaagtaaatcattgtttaattttgcatctttttattttagattttctaatttttaatttttgtttttttttcagacaggttctctctgccacccaggttgcagtgcagtggtgccatggctcaatgcagcctcaacctcctgggctcaagggttcctcctatcccagcctcctgagtagctgggattacaggtgcatgccaccattcccagctaatttttttaatttttttttttttttttgtagagatggagtctcgytatttttccctggctagtcttgaactcctaggctcaagtgatcctccccaccttggcttcccaaagtgctgggattataagtgtgagccaccatgtccagcctatttttacattttctaaatcatttcctaagtcattaaatatatgtctcttctttgctagattttgcccggtgatctaatctaaaagtctttttaaaaaaataggtgcattttacccatttatataaagtgatatgatagatacatttggccttaaac

SEQ ID NO: 670096 - DNA, 1303 bp, Homo sapiens
tttgagactgagtctcactcttgttgcccaggctggagtgcagtggcgygatcttggctcactgcaagctccgcctcccgggttcacaccattctcctgcctcagcctcctgagtagctgggactacaggtgcccgccaccatgcccggttattttttttcacatttttagtagagacggggtttcaccgtgttagccaagatggtctccatctcctgaccttgtgatccccccacctcacccttccaaagcgctgggattacaggcgtgagccactgtgcccggccttgcccattatcttaaaaaaaaaaaaaaaaaaaagatggaagagaacaaatatgtacagatttatttttcaagctaaatttttataatatcttctgaaccacctttttcagaaataatatacaataatattttagtggccatatgaatctaatacaatactctaaatgtcttcctctgtcttgagaattctgaaacatactgtggctgttcttcctgttttaaaaagctgcagaagccccttctctgaccttcaatacacaaaaatacacagactcataaaacacttaacatacacatacttattctagacatgcccaaatagccttattctagacatgcccagatagccttataatagacatccccagataaccttctttccacttttagctgaagtcgggaacagttatgtttttatgtatatttattggaattgattcaagcagaagtccgtattaccagtacatggtaaataggtcaatataacatatgtatataaattcttatttatattaaacatggttaaattttaatctcccatctgtttaaacatgggagattcaacatactcatttagctccctttcccttgaaatgccactaaattgatagcagagtttttattataaaaaggcaaacccacagaaataagaaaatgggagatgcttaacagctaccagttttggaaaatgagaatgcagacagacatttagtaaacttagcaaacctgaggaagctaaatcctaggctggcagtgggaattggagaagcaacctgattagtagctcagaatctccgtaaggcttggtaattgccaactgcaggaacctctggaagtggaggtgaagctaaacacagaagtggttgaaagtctgtttcagaagcagttagagctccttagctccctcagtgctagcccaagactggaggtttgttatttggcgaggatgaaacagagggcctctggactagggaaaacgcagaccttgctgagggtgagctgctgtcatgaaagc

SEQ ID NO: 670097 - DNA, 673 bp, Homo sapiens
gagccctgagcctgtgctcctagcacctgcaaggaggtccagttcctattggccgtttcctcctatccagacctgcacagagctccaggcactccaccagcccagctgggctctggctctgtgcagtcagcttcccctggtctccatgggaggtggggggagtcctctatggctaagggacagtgctcacgtctgtggactacaggtgcargaaagagagattgcaggccttctccaagtccaggtctcctattccaaagagaacgaagtttaggtaaaggtcacctccaaaataagaccatctcccactgcacagcagggctctctggcaaaaccaccaaagtgactgcaaagaggagggggagtgatggccagtggcccctctgataatcatgtagaccatgttgggctctttttcaatcaataaaggaatgtaagtatcaatcatcgtccttttcctgtggggttgcatgggaggaagacctgaaagagaagggaagcagattctattcaggcagcctttgcctatctcattccctagggcctggggaccttcccttcctctgatccctttctcagacatggtctctgatccctccctcaagagtagctgttagcctagcatttcaaggccccgagtacctgccatgcaccagacatcaaaactggagat

SEQ ID NO: 670098 - DNA, 1559 bp, Homo sapiens
ttttggcatgaattccatagaagggctgttacggttctcagttcacggtattagaaggcacttgatagtgattagttccattcctgatgatgttaactctgatcatttggataaagtggcgtctgccaggtttccctactgtgcagttacaatttgctttttgtaattaataaagtgtgtgtgtgtgtgtgtgtggagggggggtgtttttgcttctgaacgcataatatttgagatttttttctaattaaaaagtaattattcaaagagttcagagaactgatactgatcacattctttgaccccacatgcaaatacattataaactagtaataaaacggtaactagaaaaatgttcatatcttttggaattaaaaaagtgtttaactcgtggatcaaagcagaaattctgtaaccattgtcacagcaggttctaacaagcaagtttaaggaggagagaatttcagtcctagagaatttcagtcttattcaaatgctttcctagaaagaggaaacagttcctaactaatttcatgaggctggcataatcttgataacaagtctgataggtaaagtatgaaaggaaaattgcaggtcactcaattatcactcaaatatctacatgaaaaattctaaacaaaattttagcaaacaaaatccaacaatttgtaaaagtgataatacaccacgaccaaggtggttcaagtcaggaattcaacgttgattttggcgttaaaaaatcaatcatcaggcccagtgaggtggctcactcctgtaatcccagactttctggaggctgaaggaggaaagatccttcaggccagaagtttgagtctgcactgagctgtgactgcatcaccgcactctagcctgggtgccagtttgagaccctgtctccaagaaaaaaaaattaatcagtgtaattcaccacagattaagagttcaaaagagaaaaatcacatgatcatctgaatagaggaaaaagcttttgataaagttcaacatccattcataataaggactctcagcaacttagaagtataaaaacacttttggaaatcaacaaagggaatttacagcatgaacaaacagcaagccagcatggtggctcacacctgtaatctcagcacttccagaggccaaggcaggagaatcacttgagcccaggggttagagacaagccttggcaacatagcaagatcctggctctacaaaaaataaaataaaatgaaataaaatttaaaaattagctgggtttggtggtgtgtgcctgtagtcccagctactgggaggctgaggtgagaggatcactggagcccaggaggtgaaggctgcagtgggctaaaaacaaccagaacaaccccccaaccccctccccrcaaaacactataaagaatagcaacacaaggttcaatgtaaactttgatatggtgttttacctctgaggagaggcttattgttaatattctttagccgtgtaaggggttcacagatgttcatacttttgttctttataccttatatgtattctataaatattgtttctactcaatagttaa

SEQ ID NO: 670099 - DNA, 672 bp, Homo sapiens
tgtatactactcaagtgatgggaacaccaaaatctcacaaattaccactaaagaacttatgtaaccaaacaccacctgttcccccaaagcccatggaaataaaatttctggttgccagagcctcagaagggtagaggggccaggccaggggtggggggaagggagactggttaatgggtacaaatatgtagttagataaatgaagatgatctagtatttgatagcacaatagagtatagccaacaataagttattgtacatttaaaaattactaaaagagcataattgctttgtttgtaacacaaagggtaaatgcttgagatgatggataccctgttcatcctgatatgattattatgcattgtatgcctgtatcaaaatatctcacataccccataaatatatacacctactatgtacccacaaaaataaaaaaataaataaaaaaaaacagatcatggaatgctcttgcccaaaaatctgtgatgagtccttgttagccataggrtgaatgaacccactcttagcatgacattctcgggcctttcttgcactgccttagccctatttctgtcctcatccactgttcctctctccaaaacctagccccgggcaacaagatacagatacataccctggcctctcttctcctctgtttgtgctattctcatc

SEQ ID NO: 670100 - DNA, 672 bp, Homo sapiens
tgtatactactcaagtgatgggaacaccaaaatctcacaaattaccactaaagaacttatgtaaccaaacaccacctgttcccccaaagcccatggaaataaaatttctggttgccagagcctcagaagggtagaggggccaggccaggggtggggggaagggagactggttaatgggtacaaatatgtagttagataaatgaagatgatctagtatttgatagcacaatagagtatagccaacaataagttattgtacatttaaaaattactaaaagagcataattgctttgtttgtaacacaaagggtaaatgcttgagatgatggataccctgttcatcctgatatgattattatgcattgtatgcctgtatcaaaatatctcacataccccataaatatatacacctactatgtacccacaaaaataaaaaaataaataaaaaaaaacagatcatggaatgctcttgcccaaaaatctgtgatgagtccttgttagccatagggtgaatgaacccactcttagcatgacattctcgggcctttcttgyactgccttagccctatttctgtcctcatccactgttcctctctccaaaacctagccccgggcaacaagatacagatacataccctggcctctcttctcctctgtttgtgctattctcatc

SEQ ID NO: 670101 - DNA, 1158 bp, Homo sapiens
tgcatatcacaatatattacacatatattaaactgaattgaatgaatgagcgaatgtttaccaaatacaaagtaactaaatgccatctctttaatacatcaaagcatggactgcctcttctgaactattatttctctactcaataaggagatttttaggttttccccacttgaggaacatctccacctgatatgtcaattcctaggttcttcagcactcttaacttttcagatttccattctcccctaatactcaaagaaaagcagagtgctactttgaatgcttgagattactacttccttcttgggctgctgagatatatgactcccatcaggtagaattaaaaagcggtgcaacaactccccacactccctcccaaaaaagtagcaaaaagcttgttagaccctttaatttcaccatgtcttactcaaagagtgccccgggtagcctaattcaatagtatctaacacctctcttcatcatcccatacttctcatatggcatatgctttctctatggtaaagaaacaattgttctgaaacaagtgayttggggtcccaggggcacctgacagcacctagtctgctctttgatgtcatatcaggaattttttaaatccccttcccagggtgacattaagcctgcaaaatacaactgtgtttaaaaacaaaaattaagaaaagaaaataaaagaacataaagaaaacaaccataacgtgaacttccaacctattacagctgactaaatacacgcagttacacacttaaaatatttcattatgcttgtcaatgaaacagtgcagtcccttcacactactgtaatgcttaaaagtacagttttacccccaatattttcccccaagatgcaaagcatcccccaaatgggcagacataaaacattaggtcttcactgctgcttctaaattttgcgagccaataagcaattggtgtaaagtgcaaaatctcagaagagcaagactcgtctgcttttttgtgatatgctgttattcacccttcacctttacttcctttaaaaatcaaaagttacctaatgttcaaggcgatatcaatggaaatttagctaaatactggcaccgcaacggtctatttcccccaaagaatataagattacattaatttcctagtagtttaactcaa

SEQ ID NO: 670102 - DNA, 1398 bp, Homo sapiens
tgtggagtctaattgaagattcataaaggtatttggaaaagagcaatcacatttttttttcctgcccaaattttgagataaatattggagggaataaggacatataaccccactttgggaaaggtgggggtccgtggtttcaggatgtcgtcagcacccatccaatcttagtttgtttcttatcaagaaaggaagcaattttctctacagaggttcacttggctggaaatcatatttgcaaggcatagaagagtcaattaaatagcaagagccaattttctgagaggttaatacctggatctccatctccaaataggatttccagctaggtgaacctctgtgaagaaaattgctaccttaataaaaatcagaccgagactgggtagcatttttgaataagatgacaatggaatacaaagatctaaccccctttttctaatactgtatcctccattaggactggaaatgctgcttcggggctgaaagctaagaaaaatgccgggcacgcaacacgcactttgatggttttttgtttttgttttgtaatctatgggggcagttaggactaaaagtaggtgaatattgagagttgaaccccagattctcttccttagaaagcagtgttgtggccaggcacggtggctcacgcctgtaatcccaggactttgggaggtcaaggcgggtggatcacgaggtcaggagatcgagaccatcctggctaasacggtgaaaccccgtctctactaaaaatacaaaaaaaaattagctgggcgtggtggcgggtgcctgtagtcccagctactcaggaggctgaggcaggagaatcacctgaacccaggaagcagaggttgcagtgagcaaggatcgcaccactgcactccagcctgggcgacagagtgagactctgtctcaacaacaacaacgatgacaacaacaacgacgaccacaacaaaaagcaatgtcgtatgggaatatatgaagttggagatctagaagaatcctgtcctctttaggagtgagagtgagccctggaatagacagggatctttccacatagaattatttttgttgttgtgggtcaacagcattgaaatcaatgccccaggaagcccagcaagctcaaatgtggctctcccagatggaaagctagtaggtagggtggtgacgagaagccgtaccccagctcggaagttgggcagtcacatcatgtacttggagtgattgccaggccaaattggaaaccagacataagaaattggctccacggtttagcagctttgccagacacaaagaagaaattatccagagatgaaattcccctgctggcggtgactactgtccaaacttcttcctcattccccataggcttctggattttttaacggatgtcccaaattt

SEQ ID NO: 670103 - DNA, 1398 bp, Homo sapiens
tgtggagtctaattgaagattcataaaggtatttggaaaagagcaatcacatttttttttcctgcccaaattttgagataaatattggagggaataaggacatataaccccactttgggaaaggtgggggtccgtggtttcaggatgtcgtcagcacccatccaatcttagtttgtttcttatcaagaaaggaagcaattttctctacagaggttcacttggctggaaatcatatttgcaaggcatagaagagtcaattaaatagcaagagccaattttctgagaggttaatacctggatctccatctccaaataggatttccagctaggtgaacctctgtgaagaaaattgctaccttaataaaaatcagaccgagactgggtagcatttttgaataagatgacaatggaatacaaagatctaaccccctttttctaatactgtatcctccattaggactggaaatgctgcttcggggctgaaagctaagaaaaatgccgggcacgcaacacgcactttgatggttttttgtttttgttttgtaatctatgggggcagttaggactaaaagtaggtgaatattgagagttgaaccccagattctcttccttagaaagcagtgttgtggccaggcacggtggctcacgcctgtaatcccaggactttgggaggtcaaggcgggtggatcacgaggtcaggagatcgagaccatcctggctaacayggtgaaaccccgtctctactaaaaatacaaaaaaaaattagctgggcgtggtggcgggtgcctgtagtcccagctactcaggaggctgaggcaggagaatcacctgaacccaggaagcagaggttgcagtgagcaaggatcgcaccactgcactccagcctgggcgacagagtgagactctgtctcaacaacaacaacgatgacaacaacaacgacgaccacaacaaaaagcaatgtcgtatgggaatatatgaagttggagatctagaagaatcctgtcctctttaggagtgagagtgagccctggaatagacagggatctttccacatagaattatttttgttgttgtgggtcaacagcattgaaatcaatgccccaggaagcccagcaagctcaaatgtggctctcccagatggaaagctagtaggtagggtggtgacgagaagccgtaccccagctcggaagttgggcagtcacatcatgtacttggagtgattgccaggccaaattggaaaccagacataagaaattggctccacggtttagcagctttgccagacacaaagaagaaattatccagagatgaaattcccctgctggcggtgactactgtccaaacttcttcctcattccccataggcttctggattttttaacggatgtcccaaattt

SEQ ID NO: 670104 - DNA, 1398 bp, Homo sapiens
tgtggagtctaattgaagattcataaaggtatttggaaaagagcaatcacatttttttttcctgcccaaattttgagataaatattggagggaataaggacatataaccccactttgggaaaggtgggggtccgtggtttcaggatgtcgtcagcacccatccaatcttagtttgtttcttatcaagaaaggaagcaattttctctacagaggttcacttggctggaaatcatatttgcaaggcatagaagagtcaattaaatagcaagagccaattttctgagaggttaatacctggatctccatctccaaataggatttccagctaggtgaacctctgtgaagaaaattgctaccttaataaaaatcagaccgagactgggtagcatttttgaataagatgacaatggaatacaaagatctaaccccctttttctaatactgtatcctccattaggactggaaatgctgcttcggggctgaaagctaagaaaaatgccgggcacgcaacacgcactttgatggttttttgtttttgttttgtaatctatgggggcagttaggactaaaagtaggtgaatattgagagttgaaccccagattctcttccttagaaagcagtgttgtggccaggcacggtggctcacgcctgtaatcccaggactttgggaggtcaaggcgggtggatcacgaggtcaggagatcgagaccatcctggctaacacggtgaaaccccgtctctactaaaaatacaaaaaaaaattagctgggcgtggtggcgggtgcctgtagtcccagctactcaggaggctgaggcaggagaatcacctgaacccaggaagcagaggttgcagtgagcaaggatcgcaccactgcactccagcctgggcgacagagtgagactctgtctcaacaacaacaacgatgacaacaacaacgacgaccacaacaaaaagcaatgtcgtatgggaatatatgaagttggagatctagaagaatcctgtcctctttaggagtgagagtgagccctggaatagacagggatctttccacatagaattatttttgttgttgtgggtcaacagcattgaaatcaatgccccaggaagcccagcaagctcaaatgtggctctcccagatggaaagctagtaggtagggtggtgacgagaagccgtacmccagctcggaagttgggcagtcacatcatgtacttggagtgattgccaggccaaattggaaaccagacataagaaattggctccacggtttagcagctttgccagacacaaagaagaaattatccagagatgaaattcccctgctggcggtgactactgtccaaacttcttcctcattccccataggcttctggattttttaacggatgtcccaaattt

SEQ ID NO: 670105 - DNA, 279 bp, Homo sapiens
ccccactattaaggatgcccagcagtgatcattcatttataaaataccccggctggagcaaacccrccagatcggccgcgtttccttccttgcttgtggtttttctccagcagctgcaatccggtgaagagagcatgggactgagcgtcagacagaccagcctccgaatcccagcccggtcaccggccagctgtgaggcctcgcgcctcacttgcctcctttgtgacactggagtaatgatccccatcctccggcacttccgaagatcaaatgaggcca

SEQ ID NO: 670106 - DNA, 616 bp, Homo sapiens
gtcggccaggctggtctcaaactcctgacctcgtgatctgcccgcctcggcctcccaaagtgctggggttacaggtgtgagccaccgcgcccggccttttttttttttgagacagagtctcgctctgttgcccaggctggaatgcagtggtgcaatcttggctcactgcaccctctgcctcccaggctccagagattctcctgccttagctggagtagctgggattacagacgcataccaccacgcctggctaattttttttttgtatttttagtagagacagggtttcaccatgttggccaggctggtctcgaactcctgacctcaggtgatccacctgcctcagcctcccaaagtgctgggattacaggcctgagccaatgtgcccggctgttttcttagataatttttatcagttttttttttktgtgtgtgcaaataaccagcaaatatgaaacaccccagacaattttaaataaaatgatatatgcatattataaagttaaagcaattgtaaagtacagagaaaataaaaaaatgaataatgtcctaatcataatcctaccatccagaaatatccgttcttaccatttgctaatcgtccagacatcttggc

SEQ ID NO: 670107 - DNA, 596 bp, Homo sapiens
taaaaccctgtctctactaaaaatacaaagattaactgggtttggtggtgggcgcctgtagtcccaggtacttgggaggctgaggcaggagaatcgcttgaacccaggaggcggaggttgcagtgagccaagattgcgccactgcactccagcctgggcgatagagtgagactstgtctcagaaaaaataaaataaaataaaataaatactgaaaagcacaaagggaaaaatcatctgtaccttcagcctcattttgttgtgtatcctttgggatatttttctccgtgggggtgatgcatgccctcagatgcagtcctgtgtctctctatacaaacacattctttatgtttcatggaaacaatgggatcatcttgttcaaaactctatttttctcacttagcaatgcactgtgaatctttgcagtagcatcatgagcacagacctcctcttgtcgtttattgtatgagtgtacccctgtgccttatttacttttcctttcacggttgggtacttcccccattgcttagactttttggcccttaaacagtgctgggacaaacatccttgtacatgtgttcttgtggcatggcccgga

SEQ ID NO: 670108 - DNA, 593 bp, Homo sapiens
acaaagtgagactctgtctcgaaaaaaaaaaaaaaaaaaaaaaaaaaawatatatatatatatatatatatatatatatatatatggcatcacatacagataaaacaggccaatgtggattccaaagtcatgaataaataagagttctagtaattatatgattctgtgtcaaacagattgtgagggaacgccttctcctttttattccaaaaattttgaagaagacttggctgtaaatgacagaagcaagatgcaattaaatccttgctagaaaggcagaccttaatgtttttaccttatgtgataggttaaagatgttacagattctgggaaatcctccacttaagagacggagtccaattcttttccccttgaatctgggctggccttaacaatttgcttgaatgaggagtaagtgacttgggactcagaaggccagttcctaagaagcttgaactgcctacccaggattcttggaatgctctcttgtacccctgaggctcctggggtgtgtggaaattcacactggccaagtatataggctgcatggagagagatggcgaccccacagtcccagccgcagccatgagggc

SEQ ID NO: 670109 - DNA, 1485 bp, Homo sapiens
tgaaccatgaagaatttggccaagaggttgccagtcagataaggctttctctgttggcttccacctcacggctatttgcagggggtgttgttaggagcctcaagaggtgtgcatagggtagaggaggatcttaaggatctacctcagcggtagctctcccctgtctctccaaccaaacattcattcatggagatcaaaggagaacatgaaatgctggtctgtgtatcacttcaactttgtgaatcctagagactgagcttcaaggagtatggtcttgagatcataaagaatgcctcaggctgaggctgggagatggakcaatgcccccaaaccagttgttgcctctgtctgctttctgggcgggaagggagagaggaagacagtgagggacctcattgatccacccttccatttactaaacattcatggagtgcctggcagcccctgtgctggggatactgagctgactgctgctgctgctgctgctgctattactactactactactgtttgttatgaatgataataataccacctgccattcattaagaatcagatactctgataaggagatatatgcattaacccattttcctttacagccttctaaagtaggtgctagcagtaacccctttcacagatggacaaattgagattaagagaatttaagtaatttacccagagttgcagaatttgatagtgttagacagagttaaggttttagcccatgaatatggctttaaagtctgtgcttttaacttttcctctgcagaacatctctagtttgtctcaaggtatggtccctgctctcaagggctcataacctagtgggggatatgggtgtgcatatgaatcaaagaattctgtatgaaagggccagtggaggcatacatgatcaatgatggcagaaatagggagaaacataattaacataattctactgagactggagttgggagatgatccaactgggaagacttcctgtaagaggtgatatttgagctcacccttgaacattctaggaaagatgacaaacatacgtagtcacaggcccagactgggagaaagtctgcagtgttcagaagcccccagaaatctggtgcacttgatgtgtagagcactggtgtatgtgccaggtgaagttgagacggcctggagagatggacagtatgttgtcttggacagtattctgcaaaaacaaaaatcctggagagtaatgagtaagggattaaaataatggactatgttttatctatggccggaaaggagactgggcagaccagaggggaggggctcatccagggagaagtaagaaaggccagaggggaaagagtgcaggcagagggtctcattctttatccctggacagctggtctgtctccatgtagatgtcccctccctggcctttaaaggctgagttctcagacagaccctgtgcgacactctgatacactttgacatgagcttattggccagtttctgaat

SEQ ID NO: 670110 - DNA, 1085 bp, Homo sapiens
tgtcttcttacgtgtctccacctattgattggtagtgcctgcatgggacattatgttgagaggattgtgggtctagtgggaaacagtaccatgatcaactagtaatgtctcctgagtactaggatgaagagtactgatgtttttaaccaccctgcctatccctttttgttgactaacattttcctctagtttcctaaactatattttagctctcttctgagtcaagaacccactgtgacacatagctacatccttctaggctccttcttcaaatggttccattttatttctcatcctccctggcccttggtgggatgctrcttttgggaggacagagtaactgtagctatgactcttctgcttgctaaactacttctgttgctatgatccagcaactacactggagagccttggaacagaggtagacttgacctaccctttgtagcactgcacgttgtggactctggactgatagatttcaaatgccagattttagccaggtgagctccccaatttggaccctaccaatcctaaacctcctttccttaagtctaaactgttgtatcaacctcattatcccaaagtcaaatgcctccttcataatcatctcttttacattgagcaggacacttctctagtgatttggggaaaacataatttcagttaagaagtcacatatatagcaagtgttcttctacacttgagtagttttattaattttccagaaagctcaacatctggggaaccatagtggtaaattaaaatataagagatgtaacttctgcttctgggaagatggagtagatgtacttttcccaatttttcccactaagtacaactaaaaaccctagacaactgtcttagtccctttcccttgatataaagaaatacctgaggctgggtaatttataaagaacagaggttttctggttcacaattctaggatgtacaagaacaatcgtgtcagcatctgcttctggagagggcctcagattgcttccactcatgggaaagggaaagggagctggcctgagcagagaacacgtggctagaaagagtggcagcaagagagagagtggaggagg

SEQ ID NO: 670111 - DNA, 660 bp, Homo sapiens
tagaatctttcttggaagctccttttaggcaattgtcatgatctgtaagaacttaggaagtgcctaccattctgtgaggcatgtggagttcaaaattagaacttctacatcctcccaaaaagtacttgttaacaggtcatctaattgtatttataacatccatcacaggcaatagtctttgcggttaacaacatttctacctgctatttatcctttaaggcccacctcaaattctgttgctttcagagaattttccagatgtcatcccacatctcccccmaaatcagtttatctctgctctccataacatgtatcacactgcctagtatcagagtgattcatttacgtctcttctccccaggacacgtgtggttttccttggggaacagaatacatcttacttggtatttatacattaaagaggcatggttaagaactatgtctgcaaaactatcttggattaattcagccatttcatccatccaaggtgtttgaccccaaccataggcaaagactgtgggagaatgtgaaaagtgggtagcattactaatattctgcctacacattttttttcaaagccttcttgaaccaattcatttttttagcccagggaatctctcaaaggtaacaagtaggctaagataatttcctcttgctcaa

SEQ ID NO: 670112 - DNA, 1205 bp, Homo sapiens
taaaataagtccatgctctggaaagatactctatagtagtctggggtagagtccacaccctctaatttcaccatctgctcacccttaaaacagttcagagtacatctctatgaggccttatttcctccttgtccctcatatcatttctgtagctatctttatcaagacacattacactgtattataattatttgtttcctcaccaaatgcaaagtctcaaaggtaggaattacagttcattcatctatgttagcagctcatagcagggaacctggcccacagtaggcactcaacacccaataccagtctttcccttactccatgcccagtgtataagtaagtgacatatacagtaaacacattcccctgatcattaaacagcaggctgattttagaatgttctgtcttgtttgttctcaaaaaacaatcaaaatatttcagaaactccaacctggcatctctgacacgttttgcaatgtgagtgaacacaatgttttattgtccaaccatgtgtaccattatttttttcattcagagaacgagttcaccaaagtatacgccacgctgccttcaggcattcatgcctaagyggcaggaattaattgtgagaatgttctgcccaattgataccatgctgtggttgctcaatacttatttaaaatatccacaaaacttgcttctttgctttgacatttgaaccagatatataatgttgggcaagtattttgattcccatacatctacatgccaaagctgaaaaataagggacctatttttccctcagaaatgcttcatgcctgtatcaaaataccaagttaccatggtgatagctactcttgtaaatagggcaactctacccccctatagaagcaaatgtaacacaaaagggaggcaaaataagctctgaaataggggacaaaagagcctcggggaaaaatctccaaagagaacgagataaagcctgtttcagataaaagtcttggaaggtgacaggcatcccccattgctcctccttagagaccatagcataagcagacaggggtaggaccttgaatatatgtggcgaggggattatgcagtgcccacacagggaggtggtgtttgctgagcacagagaaactgaagtattaatcatcaccataataactaacattcgctgagggcctattctgggccaagcaccatgctacaggctttatgtgcac

SEQ ID NO: 670113 - DNA, 884 bp, Homo sapiens
atttgcatatgacttttccttcatcattcctgtcacttcatgcaagtgacacagtattttagataagtcatcttaatatttattcttcctggctgattacaaattttctatatttcgttttagggaaatggaaagttattgatattctactaataacaatgataaagatttgaataccaagtatgtattagtactatgcaaaaaaaaaaaaaaaaagaactgacatgcaaaaatgctataggccagtgttctagcagctaccaaatccaccagctacctttttttttttgagatggagtctcgctctgttgcccaggctggagtgcagtggtgcgatcttggcttactgcaacctctgcctcccaggttcaagcaattctcctgcctcagcctcttgagtagctgggattacaggcgtgtgccacgacgcccagctaatttttgtatttttagtagagacggggtttcaccatgttggtcaggctggtctggaactcctgacctcgtgatccatcctccttggcctcccaaagtactgggattacaggcgtaagccaccgcgcccagcctacacatagacttctgcctcagcctcccacctatttttataaataaagtttactggagcatggccatgcaccatgcccattgatgcccattttttatgtgttatctatgactacttttatgctgcagcaacagcagagttgaaacatcgtgacatggactatctggccccmaaatccaaacatattaatatttactatctagaccctacaggaaaagattgttgaacattgttatagacggatttaatcaatggaattctcattggcttttttgtctaaaagttgaatactattaaggttagcatgggaagttta

SEQ ID NO: 670114 - DNA, 1422 bp, Homo sapiens
caacctccacctcccaggttcaagcaattctcctgcctcagcctcctgagtagcggggattacaggtaccagccaccacgcccagctaattttgtatttttagtagagttgaggtttcactacattggccaggctggtctcgaactcctgacgtcaggtgatccgctcacctcagcctctgtaacctacaaacctcttcagaaagtgtaaaatgaaagcatttccccatttctaaagcagtgtccaggtttcatcaggtagctgtcgaacccaaagagactttgaagccaagagtccacaggatcagcttcccagtggccccagaagttacaagatggggccctcccaacaaaaggcatcctcaggcttttacgtaatgctggtgtgcttagcgactgctgaaagttgactgtgcttgtgtcgtgaaagccaagatgaagagacgttattatggttgtgtgttgctttcagctagatactcctcgctggggaaatgtaactgcaaagcagactccaggacactgtcttcctgaaagccggtgcttttgggggacattctggggcccaccagggtcatcctggatgctgactggaactgagaagaggtttgctgggaagatagggacagattctttgtatctatgtcattcaggtaaaccctacatgtgacatgtgacaccatctcttttgacctcagtttcaaatgagatatttgaccaaccttattgctaagggtcaggctagcttgaaataaccctcaagaaatctagataaaaacctaaatgagattataggctttttttttttgcctaagattatttgcttccagaaccctaaggaaacttcacaggaaacatggtaccatattttagtacacatctccatcctatgcatgttctccagaacctcttyacacacactttgaggagagttccatcaaacctccttctcttattccatcttaatgtcatgcattatttctcttcatcctgcctctccttttcagttacaaattgattctgatagaaacaccctaaatgaccttcccagggcagtcagagagttaacttgttgtagggttgcatttggccatctgggcagagggaggaaacagtggtcagtgtccaccctgtgggagggaggcagcacccaccacagctttccaactttgctggcttcacatttcccaggacagggcaagaagaggaagagctcctcagtggctgtggggagagtgcaggaaggagccctagacttgcccatttcttcttgtcccaaaacccaacacagacctaaaactcagccaagcccaagctatgccccgcttctgcaatctcttgcaaggcccctgcttaaacaacctgagctcccagctttagtaggcttgggaacttgatgcttcatttgggacaaactttgtgg

SEQ ID NO: 670115 - DNA, 659 bp, Homo sapiens
tagtttccttatcactgtgtaccaagcagctgctgggggctgcacccatcccgatggaggagcttctttctccccatgcagcctcatgctccctgcttgtttggtgtgctgacggggctgctgaacaggacgggttttcttttccccctgagaagcctcctacattgtggggagaagagtgtggtaggaagagcaatccagagacagtcttgtaggtctttaagaccttctcatcttggtctgcttgttgcgaattggggttatacagagatggtgatggtggtagtgatgacggtggtggggatgatggtcatggttatgaaggtaatgacgacggtggtggggatgatggtcatggttatgaaggtactgatgatggtggtggggatgatggtcatggttatgaaggtactgatgrtggtggtggtggtagtgattcctccttgaccaaataagtctgggaaatgctggcatgtacaaaactaatcaggtgggttaatttgagaataagatatctttgagcctttaatgactctcctgagggatggacagaaatcctctactgttttgagcactgaaggcttttcctcaatactattctgtgaatggatttgggcaacaccaggccattcctggtaccaaaacaaaatgtactctga

SEQ ID NO: 670116 - DNA, 567 bp, Homo sapiens
ttcacccacttcggcctctcagtgtgccgggattataggcatgagccaccactcctggctgcaattagaggacttctgatgcagatgcaatggcaaagacttattccccccacacatacactaaatacatgtaccctaaaacttaaagtataataataataaaataaaataaaaaagaatgaataaaacattttaaaaaggaaaaaaaaaacaagtataattcctggaaatgaagatgaagctaaagacagccaaaggagaactcttaaaggtagtargaggaaggcaaactggtctagggcctctgcattgaaagaagagcacagcaacaggacatcttactataccccatcaccatgacccgaccaaagaaagcaccctaggcctgctgtttcttgacctctgacctagcaaccaagggcagcccagacaggctgaattattttccaggatggaatgggagttcctgtgataacatcaggagagcctggcaccactggtgaggagaatggatgggaagccccattaataagcagcagccatggaagtatcctccttccccaatgc

SEQ ID NO: 670117 - DNA, 567 bp, Homo sapiens
ttcacccacttcggcctctcagtgtgccgggattataggcatgagccaccactcctggctgcaattagaggacttctgatgcagatgcaatggcaaagacttattccccccacacatacactaaatacatgtaccctaaaacttaaagtataataataataaaataaaataaaaaagaatgaataaaacattttaaaaaggaaaaaaaaaacaagtataattcctggaaatgaagatgaagctaaagacagccaaaggagaactcttaaaggtagtaagaggaaggcaaactggtctagggcctctgcattgaaagaagagcacagcaacaggacatcttactataccccatcaccatgacccgaccaaagaaagcaccctaggcctgctgtttcttgacctctgacctagcaaccaagggcagcccagacaggcygaattattttccaggatggaatgggagttcctgtgataacatcaggagagcctggcaccactggtgaggagaatggatgggaagccccattaataagcagcagccatggaagtatcctccttccccaatgc

SEQ ID NO: 670118 - DNA, 1402 bp, Homo sapiens
ccagctactcgggaggctgaggcaggagaatcacttgaacccaggaagtggaggctgcagtgagccaagatcgtgccaccacactccagcctgggtgacagagcgagattccatctcaaaaaaaaaaaaaaaaaaattacactagaacaaattctttcaagtgaacaatctcttttgtcctcacaataatcctgtgagtagtcagggattattattcccatttttcaggtaaagaaattgaggttcagacaatgtaagtcacacgtgaccggcagcaacaacacaggtggaagttacctctcctcactaaggggcaagtgctcttccgtaaagtaagaatttgaattagaagacgtggcataaaggcctggattcctatcatgtttgattttctctaagtcatttaacaactctatgccttagctctcaatctgttgatggaaaatgctatctacttctaccaattcagagagacatctacctggatgactaaaaaagtatccttgtatgtgtggtattaataggtgcacgcatctcaacagatcagaattctcatyggtcctgcagatgggcccagatgtaaatactgacaagaaggtcttacctggcttggccggaggaagttgacgttgatattgggataccgagtgacagggtcgatactgtactggctgaagttcttactcacattctcaggggtggtctgaggcagcaacctgtaaatactttccctgcaataacacaacaatatactcagaatcgggaccagcaccatgaacatctccctctcgtttcatgattgttctgacagcgcagcaagtcacctgacatgcctgacaaatcctcatccttgaccagtcttcttgagtcctacgtcagcccctgctccccacacccacctgcagtgatcccacaggaaccgaccgggtaagagccgaggagagagagcaggcacaaaaccgtgagcgcccacagatgctgcctccaactcaaaaggtcacacatttactcttttattttttcaagcatcccaatatttacttcaattttaaagaaaatcaacacaaaaaagaattatcactatatttagtcagaataccttaaataagagacaaaataagatgatatcaactcccaatttcatctgggaaatcttgtctctctaattcttctggttaaggcattagttctttatcagaaagcaaatcacaggatttttattgcatttgcaaaaatctgcttcaaaatatcccatttaggggtttgagaaacacttataagcagtttggtgttttcctatgaattcaaagctacttttaatttcttctctgtcagtaagaaatttatcttggaaaggagtaagagaagacttagtctaggagactcatctttaggtttctat

SEQ ID NO: 670119 - DNA, 2221 bp, Homo sapiens
tatggatttttgtgtctcaatttcattaagttcttctctaattttagttacttattttcttagctttggggctggttttttcttttctttttctagttcctttagatgaaaagttagattgttaatttcagagttttctaacttccagatgaaggcatttagtgtcataaattttcctcttaacactgttttagctgcatcttcaacttttagttgattttgcctccctctctgaactgcagtctctgactcatcaattcagtgaatctgctgtggtctgctttatttcccattttttgcactgtgatctataatgtgttacctgataaaaagttgagatgattttgggatcatcttgtttgtttcccttaggaatcttagtcttgccatactctctattgtctgmtaatactttgtttcatgtattttgtccggttttatggtttgtttacagctggactgtaagtgtgacacctatttactcatcatggactgatgcacatttcctgcttattatattttactgaaaaaacaatcaacatatttggtagttttttattttaaatagactccatgctggttatctttctattataaaatatttttttcataatgaaggttaaactataggcttattctttaagataggaataatagtttagactttgcctttttcagttataattacattccaattttacatctccatatcatttgaattggaattttaagtattctagatccatcagtaactcatttgcagtcatcttggttacttctttaggtagccagttttgtcattttgaagaaaagaggttatcagtttagctctctaaggatattatttccttacctcctcttaccccctagttctcctgtaaacgagggaagtagtgactcctcagctactttcaaatacattttgtctaagcatctttactgcaaatcttcttaaaccatggtaaagccctcctgtctgagaaatgttttgaaatgtttatgaatgctgtcctagaaactattttcaacacttgagaagaagtaattttgcgtaagtgtctatggttttggatttttattatcagcattcgggaagcaggaaattttaagtttgaactgtcagcaagtttttactgataccccactgtgggtagcatatatgtcattttagaatatgttgcatttttctgttttgtcttccacaaaagcatctggcactccttgatgagtgatttagactgaggtccctgatttctctgccaggaatgcattttaagtctggtgggtctcagaagatcaggaagaaggaccatatgtgttactatatcttatctacaaagaggtaaatcttggagaacagtgacctccttgctgactgagatgtcctagttgactataacaaaccatttggaatttgagggcaagctaatgttgactttcagtggaaaggctcacccttacggggcacctaatacttgatggtactggaaatgaagatggtactggaaatgaagataaagataatcaattaacatacttgattatttttagaaaatattttctaaaattatatcaatttctaattagtttgcattcaaccctgcagacttttccaaactctgttatatgtctttttcagactctattatgtttcttagattgctgtgcaactgcaatataataacctagatttatgatagaacctaatataaatctaaataaatcacttttagtgatttgtatgtcctacctttgcacatccttaaagaattccagaacatttgtcacatacttgcagattagtcagcaatagcgtctgcagaatgctgattgccttttccctgccagattttgctagtttaagtgttctattggcatgtgctttcatttctatactactgtgttccttggcatggctttctaagggtcacattctgagtcatttttgtaagtgacacttcacaaagggtatccactagtacatatcagttctatagttttatacttgagtttcaaaatttgatatctttataattttggtgtgagtctatacctgattccattagttaggtcttctatagatcatatatttactactgttaaatttaggatcctctgtctttactcctttgatgtaaaggtcaaacttctgtagaaaggatagttgcatccgatcaaaatttgagccagatgagatacctttaccatttttgatttaaca

SEQ ID NO: 670120 - DNA, 2221 bp, Homo sapiens
tatggatttttgtgtctcaatttcattaagttcttctctaattttagttacttattttcttagctttggggctggttttttcttttctttttctagttcctttagatgaaaagttagattgttaatttcagagttttctaacttccagatgaaggcatttagtgtcataaattttcctcttaacactgttttagctgcatcttcaacttttagttgattttgcctccctctctgaactgcagtctctgactcatcaattcagtgaatctgctgtggtctgctttatttcccattttttgcactgtgatctataatgtgttacctgataaaaagttgagatgattttgggatcatcttgtttgtttcccttaggaatcttagtcttgccatactctctattgtctgataatactttgtttcatgtattttgtccggttttatggtttgtttacagctggactgtaagtgtgacacctatttactcatcatggactgatgcacatttcctgcttattatattttactgaaaaaacaatcaacatatttggtagttttttattttaaatagactccatgctggttatctttctattataaaatatttttttcataatgaaggttaaactataggcttattctttaagataggaataatagtttagactttgcctttttcagttataattacattccaattttacatctccatatcatttgaattggaattttaagtattctagatccatcagtaactcatttgcagtcatcttggttacttctttaggtagccagttttgtcattttgaagaaaagaggttatcagtttagctctctaaggatattatttccttacctcctcttaccccctagttctcctgtaaacgagggaagtagtgactcctcagctactttcaaatacattttgtctaarcatctttactgcaaatcttcttaaaccatggtaaagccctcctgtctgagaaatgttttgaaatgtttatgaatgctgtcctagaaactattttcaacacttgagaagaagtaattttgcgtaagtgtctatggttttggatttttattatcagcattcgggaagcaggaaattttaagtttgaactgtcagcaagtttttactgataccccactgtgggtagcatatatgtcattttagaatatgttgcatttttctgttttgtcttccacaaaagcatctggcactccttgatgagtgatttagactgaggtccctgatttctctgccaggaatgcattttaagtctggtgggtctcagaagatcaggaagaaggaccatatgtgttactatatcttatctacaaagaggtaaatcttggagaacagtgacctccttgctgactgagatgtcctagttgactataacaaaccatttggaatttgagggcaagctaatgttgactttcagtggaaaggctcacccttacggggcacctaatacttgatggtactggaaatgaagatggtactggaaatgaagataaagataatcaattaacatacttgattatttttagaaaatattttctaaaattatatcaatttctaattagtttgcattcaaccctgcagacttttccaaactctgttatatgtctttttcagactctattatgtttcttagattgctgtgcaactgcaatataataacctagatttatgatagaacctaatataaatctaaataaatcacttttagtgatttgtatgtcctacctttgcacatccttaaagaattccagaacatttgtcacatacttgcagattagtcagcaatagcgtctgcagaatgctgattgccttttccctgccagattttgctagtttaagtgttctattggcatgtgctttcatttctatactactgtgttccttggcatggctttctaagggtcacattctgagtcatttttgtaagtgacacttcacaaagggtatccactagtacatatcagttctatagttttatacttgagtttcaaaatttgatatctttataattttggtgtgagtctatacctgattccattagttaggtcttctatagatcatatatttactactgttaaatttaggatcctctgtctttactcctttgatgtaaaggtcaaacttctgtagaaaggatagttgcatccgatcaaaatttgagccagatgagatacctttaccatttttgatttaaca

SEQ ID NO: 670121 - DNA, 588 bp, Homo sapiens
cctggtgaagcgctatgaatgatgttgaaatgacaacaaaggctttagaatattacctaaacttaattgayagagcaatgacagagtttgagaggatgaacttcaattttaaaagaaatactactgtgggcaaaatgcaatcaaatagcatcacatagtacagcgagcgaaatctttcctgaaaggaaaagtcaattgatgtggcaaacttcattgttgccttattttaagaaattgccacagctaccctaaccttcaggaaccaccaccctgatcagtcagcatccatcaacatcaaggcaagaccctccaccagcaataacattacaactccctgaaggctcagatgattgtcagcatttttagcagtaaagaacttttaaattaaggtctgtataatgctactgcacaattaataataaacataactttatatgcaccaagcaaccaaaaaatttgtgactcactttattgtgatattcacttgattttactcgtctggaaccaaacccacaatatctctgaagtgtgcctgtatgtacttaatatttgttagatttttctatctaatttctgtttggctatcta

SEQ ID NO: 670122 - DNA, 847 bp, Homo sapiens
atgctttctaaagttttcaacaggcaaaaatttagcaacttccaaataagtagaggaaagtgggaataactatcaggaatgccaagtgccaaaactagttggtagatattgctttcagttcttttgttaatcataacattattaataacatttgcaaatgtggagaaaagtttgatgttgtgcatagtcatggcacctctacttgtttaaaccatttaaattccacagaggttattttatctggttccatggraacagtgtatttggtataataataggaatttgaacaaccacaaaccaaatttatgtgcttattctgagatactgattccagggaaaggcctgctgggctaatacgtactttgtagatatttccgcaggtcttaatgagccaacatcaattctggcactgaaatctctacagtattcaaaatgtgttatgggaaacaattattctaagtctgccagattgatgggcaaaacgtattacgcatctgttgggcctaaagttttccaagttttcagtggaatgtcagcttgcagtctagatgaatatagacgaatatattgcttaataataaattacactggaacaggtgtcagggtttgtattttgacaaacggcaaatggatgcaaagataacttgttgtcaactcaaggaatctaagaacttaaacctcattttctttagaatcattcagacttttttttcagtattacggaagtcataaacttgaagagaagagaaacagttgtccctacatgattatcaagattttcaaagtgctcaataaatatatgttggccaatacatgtaaagctcctgataagtaaagagtatcatca

SEQ ID NO: 670123 - DNA, 616 bp, Homo sapiens
ttaattattgtcttacttccacgaataccttttactccttgtgaaattctagtaatttacattttgttattcttgatttatctgccacrtcccttctttttcctcgtggtttcttatatttctgctttttgttttgaagtatttgtcaaatcaaatttggatctcaattcactcactaaattgttgataagagaaatcgtgttttggcctcagaaagtgttggcccctcacattttttttaatagaatttacttttcgtccaagttgtcatctttctcccctcccctctgcatgtcactggtaagtgttcagtttcttctgactgatcattgctgactgctgggcctgctaacaccgaatctttatcactgacgctcaagttgctcctggactccaaatgggagtgttacaggtagttagacagacatgaaccaggcaggagagggctctacccccaacccaccaggaaggtcaggcgaccagcaagtgatggttgggcagttaccacactgactctctaaaaatgagaacttggcagccagtgaggaaagacaatctcctgagggtccacagctgccacactaaagtgttcattgaactcgggcaccagggagag

SEQ ID NO: 670124 - DNA, 616 bp, Homo sapiens
ttaattattgtcttacttccacgaataccttttactccttgtgaaattctagtaatttacattttgttattcttgatttatctgccacatcccttctttttcctcgtggtttcttatatttctgctttttgttttgaagtatttgtcaaatcaaatttggatctcaattcactcactaaattgttgataagagaaatcgtgttttggcctcagaaagtgttggcccctcacattttttttaatagaatttacttttcrtccaagttgtcatctttctcccctcccctctgcatgtcactggtaagtgttcagtttcttctgactgatcattgctgactgctgggcctgctaacaccgaatctttatcactgacgctcaagttgctcctggactccaaatgggagtgttacaggtagttagacagacatgaaccaggcaggagagggctctacccccaacccaccaggaaggtcaggcgaccagcaagtgatggttgggcagttaccacactgactctctaaaaatgagaacttggcagccagtgaggaaagacaatctcctgagggtccacagctgccacactaaagtgttcattgaactcgggcaccagggagag

SEQ ID NO: 670125 - DNA, 616 bp, Homo sapiens
ttaattattgtcttacttccacgaataccttttactccttgtgaaattctagtaatttacattttgttattcttgatttatctgccacatcccttctttttcctcgtggtttcttatatttctgctttttgttttgaagtatttgtcaaatcaaatttggatctcaattcactcactaaattgttgataagagaaatcgtgttttggcctcagaaagtgttggcccctcacattttttttaatagaatttacttttcgtccaagttgtcatctttctcccctcccctctgcatgtcactggtaagtgttcagtttsttctgactgatcattgctgactgctgggcctgctaacaccgaatctttatcactgacgctcaagttgctcctggactccaaatgggagtgttacaggtagttagacagacatgaaccaggcaggagagggctctacccccaacccaccaggaaggtcaggcgaccagcaagtgatggttgggcagttaccacactgactctctaaaaatgagaacttggcagccagtgaggaaagacaatctcctgagggtccacagctgccacactaaagtgttcattgaactcgggcaccagggagag

SEQ ID NO: 670126 - DNA, 616 bp, Homo sapiens
ttaattattgtcttacttccacgaataccttttactccttgtgaaattctagtaatttacattttgttattcttgatttatctgccacatcccttctttttcctcgtggtttcttatatttctgctttttgttttgaagtatttgtcaaatcaaatttggatctcaattcactcactaaattgttgataagagaaatcgtgttttggcctcagaaagtgttggcccctcacattttttttaatagaatttacttttcgtccaagttgtcatctttctcccctcccctctgcatgtcactggtaagtgttcagtttcttctgactgatcattgctgactgctgggcctgctaacaccgaatctttatcactgacgctcaagttgctcctggactccaaatgggagtgttacaggtagttagacagasatgaaccaggcaggagagggctctacccccaacccaccaggaaggtcaggcgaccagcaagtgatggttgggcagttaccacactgactctctaaaaatgagaacttggcagccagtgaggaaagacaatctcctgagggtccacagctgccacactaaagtgttcattgaactcgggcaccagggagag

SEQ ID NO: 670127 - DNA, 1358 bp, Homo sapiens
tagactgcaaaccccttgagggcaaagggtagacttctttatctgcccttccagatcagccagaacagttcctagaacatagtaaatgctcggtaaatgttccttgtgtcagtattgacagacaatgacttcctattacagctcattgctgactctagcccagcaaggggattgtactaactaggcccatgccattatctaggctcctgtagtgtcaggggcatgattacatcataaaaattacaactttgacgttatctttcatagttctatcatcctcattatactagactcaatgaccagaactgtgcatattcatcttggctcactgctcatacagtacctggatactttaggaattcagttcttaattgtgttttgtttgttttttagacacaaggtcttgctctgtcacctacgctggagtacagtggcacaatcaaagctcactgcagccttgaactcctggaatccagtgatcctcagcctcctaagtagctagaactatatgagtgcaccaccatgccaagctcatttttttttctagagatggggtctcactatgttggccaggcaggtctcgagctcctaacctcaggcaatcctcccacttgggcctcccaaagcatggcttgccagttcctaatttttgaaccaagtctgcagcactgtaggtagagaggggaarccagaagccatagtttattatctgagaaatgtatactataagaaattttggaaaaatacaacagatgtatcattttcctgagttagcatggattggaaagggtaagcctataagcagagaccagttagaagtctggtgtgatcatccaggtgacagaggataaatcctaaaccagtcccttggggctttgggacacttgtggataagcagaagctacatctccaacatctgagcacaatggaggagcttgtactaaccttccaatcaatagtaaacatagaagctaggtaaaatacttaaagcaaccaaagttgttaaagaaaaaaacaatccaagtgggacttgaagggaagattgctggaaagaatgtacactagtgcagctatgcaagccccacatttgcctctgcttttgccctcagagcatttgcttagtcctggcatgtgcaacaaagaccaagttgaaaggtagtgggagcttgtagcattctcagtgtcaggcctctgagcccaagctaagccatcatatcccctgtgacctgcatgtatacatccagagggcctgaagcaactgaagaatcacaaaagaagttatatttaaatggcctgttcctgccttaactgaggacattccaccacaaaagaaaacaaaatggcctgtccttgcctta

SEQ ID NO: 670128 - DNA, 665 bp, Homo sapiens
ttggtggaacccaagctcattaccctctgacggtgggatacataacatggccaaaaatctgactttagcttttggctggagtgctaccttaggagactgctaccagagactggatgtttttttctatcaagaaacatgaaagaaaaaagagagattcaaaatatactcttctaatattttttacttgaggaagtaaggcagtgaaatgccttctctgcagacacagatgtacgtgggtgaatgtaaaaggcagaaaaatgaaaagaattgaaataacatcctatctgcagctttaagtgagcaaaaccacaaacagaagttacttctaatctaagttagagttgagtctaacttaatagtagttactatgwtgtagttttaaagaacctcaactctgtattcaggaagactaccctaaaattccaccaattagtatctatgtgaacttgggcatatttcttaacttttctaggcctgaactttcttaacttataaaatgaaaataatatttacagccacttcaatgtgttgctgtgcacaataaatgttttcaaagtgcgtagcctaatgtctggtctgctcatactcagcacaagcatttactcttattcttaccatttgggcatatctaggaaaatgcagctgacaattcattccaagatatc

SEQ ID NO: 670129 - DNA, 1060 bp, Homo sapiens
tttgaaccttagcactggggatttgcaagagatctcagccatcattcagaccggactttttatttcaaatataatgaaatagaggcccagggaaaactgtgttgtgcaaagccacagtcactggaattataacatccttttatatttgttttttcacttgaaaatcttttaatatttttctttattgctaaatattttgctaaagcatgttgttttggcctggacaatattccatcatttggttgtgccagaataattttattaaatatctgtttagtgcatttaagttatattcatgttttcacttctgtaaatactgggataaatatctttatacataagtctttgtacacatttatcattcctgaagataagtttaatgaaaagaaatttctaggtcaaacagtatgcacaytatgaaggatttaatcccagttgccaaattgtcctccagagaggttttaccaatttctaatactcagtgatggatgggagcctgtttccctctcctttgaatattttcattaaaaaacaaacaaatggccaggcatggtggctcacacctgtaatcccagcactttggaaggctgaggcaggtgaatcacctgaggtcaggagtttgagaccagcctggccaatgtgacgaaacctcatctctactaaaaatacaaaaattagctgggcatggtgatgggtgcctataatctcagctactccaggaggctgaggcaggagaatcacttgaactcaggaggccgaggttgcagtgagctgggagattgtgccattgcactccagcctgggcaacaagagtgaaactccatctcaaaaaaacaaaaaacaaaacaaaacaaaaaaacatgatggaaatggagtcctgttttaattcaccttatttattagcaaggttgcacttgttttccttaaatttgatgtgaattgtatttttatgctgttttaattgccatttatcactttttaactgaagtttatatgctattgatttgtagaatttcttaaaaaataaaatagaatccacaaaaccattcctcaataaatg

SEQ ID NO: 670130 - DNA, 1503 bp, Homo sapiens
tcttttgtcatgttcctgtccaattcttctcattttacagaggaagactctgaggcccagagggtgatcatggcttgctttcacaaattgaggatgggaytgaaactggaattgcaaggcctcatgagcccttgctcattgctgcctggggaagacagggaaaggaatctctgcatcttgctgtcttctcttgggaacatcagtattgggcaacacctagatcaggaaagccatttggcagtgaggtgatcaatggtctgtttgaaaattgtcagctcccatatacacagaacttagccactttgaaagagacttctgagcttccttctccttacctgtaacctttgggcagaaaagcctttatcataggattttagtgggaataaattaaatgttgtgtgtaaaagtgtctcagacagtgtccagagcattgtcagtgttcaataaatgttaaccaactctgaattggaacagagttgaacttgtgagcttgcttctcaaacatcccttgccccttagaaataaatcctagctaagtgcatgctgaggaactactaagtctcctaatcctaaacaaagtatagttagaagggtaaatttcttctagaaagaaatacaatgcaggatgtgttcctgactcttctatcagtagcatgtggattacccactgccatgcatgaacgacctccattctttcctcagttcctcagttcctcagttccagtaatcagctcatcaggcctgtgctgtttttctgttctctgagcagtgacgcttacgggaaatgtcattgtcattcctattgtcttctgcagcatctgactcaacctccctttattagggagagaagggacctgtgacaatttcctttagcatgcagatggggaaactgaggcagagattggcttctttagaaaactcgactgagtgagtcagaggcagatacttgaattggattcttctgattcagatctgtcttcagattttactctggagaaagaacgctcacccttggcaacccctgaaatatattagcaaggcatagagtaaagttgatgggaaaaaaaatggcacatataaaaccaggggtcccagctcgagcacctactgatgcagttcactatgctgcctcctgggttgtgatacaaaagtggaggcatctcggcctttgcccgaaagagcttagtgtgggatagggaaagttgggaagtggtctggctgtactcttgaactccacattgagactgcctgggtttaatggcgccgcctacttattacatcctttagacaattattacaactccttatgcttcatctttcttttgtgggcaaaacatggcctacagtggtgtctacccctcagggttgtcggtgggatctcttgagacgctccatgtaagtgtgtggtactgtgcctggcacaccatcagccctcagcagactgcctgagatggaatccctattctgccactttggggttgtcagactgctatgtctcagtaa

SEQ ID NO: 670131 - DNA, 1503 bp, Homo sapiens
tcttttgtcatgttcctgtccaattcttctcattttacagaggaagactctgaggcccagagggtgatcatggcttgctttcacaaattgaggatgggactgaaactggaattgcaaggcctcatgagcccttgctcattgctgcctggggaagacagggaaaggaatctctgcatcttgctgtcttctcttgggaacatcagtattgggcaacacctagatcaggaaagccatttggcagtgaggtgatcaatggtctgtttgaaaattgtcagctcccatatacacagaacttagccactttgaaagagacttctgagcttccttctccttacctgtaacctttgggcagaaaagcctttatcataggattttagtgggaataaattaaatgttgtgtgtaaaagtgtctcagacagtgtccagagcattgtcagtgttcaataaatgttaaccaactctgaattggaacagagttgaacttgtgagcttgcttctcaaacatcccttgccccttagaaataaatcctagctaagtgcatgctgaggaactactaagtctcctaatcctaaacaaagtatagttagaagggtaaatttcttctagaaagaaatacaatgcaggatgtgttcctgactcttctatcagtagcatgtggattacccactgccatgcatgaacgacctccattctttcctcagttcctcagttcctcagttccagtaatcagctcatcaggcctgtgctgtttttctgttctctgagcagtgacgcttacgggaaatgtcattgtcattcctattgtcttctgcagcatctgactcaacctccctttattagggagagaagggacctgtgacaatttcctttagcatgcagatggggaaactgaggcagagattggcttctttagaaaactcgactgagtgagtcagaggcagatacttgaattggattcttctgattcagatctgtcttcagattttactctggagaragaacgctcacccttggcaacccctgaaatatattagcaaggcatagagtaaagttgatgggaaaaaaaatggcacatataaaaccaggggtcccagctcgagcacctactgatgcagttcactatgctgcctcctgggttgtgatacaaaagtggaggcatctcggcctttgcccgaaagagcttagtgtgggatagggaaagttgggaagtggtctggctgtactcttgaactccacattgagactgcctgggtttaatggcgccgcctacttattacatcctttagacaattattacaactccttatgcttcatctttcttttgtgggcaaaacatggcctacagtggtgtctacccctcagggttgtcggtgggatctcttgagacgctccatgtaagtgtgtggtactgtgcctggcacaccatcagccctcagcagactgcctgagatggaatccctattctgccactttggggttgtcagactgctatgtctcagtaa

SEQ ID NO: 670132 - DNA, 1477 bp, Homo sapiens
cacctattgtggggcaggaatgttgactgcatgaaagagtgtgtgtggggccagggagaagatgagagaaacatagaccctcttgtgcccaggaagaaaggaagttaattcagaattgaggagyctgccttctgaattttaagttcccacctgatgcctatagaaactgtttattacttgccagctcacattattctcctactgtcacagtctttaaaaaaaaaaaaaaaaggcatgagaccagagttttggactcattttgaaacagaacttagccaccgagatgggaagttccttgctgctttagttttatttattcctttcttgtctgcccccctccttctccctttcacacacgtctccccaatagcaagacctccacaaagttggggaagggaatgggtgacctttctatgataggagaagagttctgatttcttcatttttgagacaaaaaaagtgttgaattaagtcaaggaaatactcaagagaagcaaattcatcatcaaattggaacatcactggaacacgggagagaagttgggtggagggagggggtctgggcaggaggtgggaaagagcatctctgagcaggggtgacagactggggactccagtccaaagacctaactctgaattttagtcctgctacaacccttagtgttgttacgaataagaattctaaagtcagagccctaggttttgttcctggccctgccacctactagcttacaagtgtaaacttgggcaagttacctaacatttatttgcctcagtctgggctggaggaggactaaatgagtttgttcagaacattccaaaagggtttgctgttatttttactgtgcaactgaagcaagttattttgcctctctgagctttgatttactcactagtaaatgggaattatatttgcctcacaagcaagcatttgtgaggattaaataagctaatgcatggaaaagtgcccagctgctttccagacatatgataggtgctaaataaatgtcagtcaaatcttgatctatccaaggggagaaaggaggagagtgactcttaaaaccctcagagtgttttcagggaaaccaagggaagaggaacaacgcaagtaaagctgttatgtcggcattgggagctgcaggctcctctgcagtggggaatagtccttagtccctaggaggcactctacaaatattaattgagtaaatgaatgaatgaatttcaagtagaaagacaatgaactactaagacaggcagtgtgttctggagacactgcagagaggcagaatccagtgagtattagaatggttaaaaagctggtagaagagctggcatttgagcttgtcttcatcagggctctgcttcctagcacagagtctccagacagctttcctttccagtccactggtctgttctaagccctattaggtgctatgctcacagcatgtgtgcacataggaggaatacaaaggacaaa

SEQ ID NO: 670133 - DNA, 611 bp, Homo sapiens
cccagaaactgcttccatccacttattaccacttgccctgctgcctgtccaaggcaacatggcgtctgacataaagtgatacaatttcctccatcttgctacttccagtcttaccaccacagcagccatcatgatccttttaaaatgcaagtaagaacagttgctcccagagtcccatctcatgttttggagtgctggtcacaggcgtcactgtggcctccagggctctgcaggatctgaatatgccctgagcccagctcatggccagccattctcccatgactcacagctcaccagccaaaccagctgcttygtgctccttgaagtgtgaacacatggacacactcttggccacagtgctagtgtggctcatgcttcatctgctcatgtttcttctttatggaggttttcctcaccacctcatcaaaacgatgcttctgcctatcctctagtcccattttctgttatttttttcacagcagttcttgccacctgacatttttcacatttatttacctatttatttattttctgttttcccaactaaagtgaacgtggtgctttgtggttttgctgtctccagtgcctagctcaatgtctgaaacatagta

SEQ ID NO: 670134 - DNA, 1660 bp, Homo sapiens
gcctgcattttagggagacattagccacccttgacgccagcctgatttggggtttagtcaccactcagggccatgcattccaaccaaaaagttacaggcgtccccatcttaactagcaccaaacccagcagtggggccgatgaacttggccaagcagcctgtgccaggatcctggtagaaagtgggtttgggcagctgcaggtgtgaaacatggcttagcttctctcctgggactggggcaggctccagttcagcagcccacctgaggcacctgcaaacacaggtgagcttttacacacgcccagcccccagagaaggccggggaggccttgccacctctgttttctcagaagggaaggggcttgccagcatcctggggaggcgtctgggtctcctgccttcctgggtggcagcatgtggccgcccaggtaccccagcgccggagagcagctccagcaaggacttcccggctggctctggggcaggcgagcatttcccctttgcctttacacacctgggcttctgcggtttcccaagggctctggtgaggaaacgggcttaggtgctgagaggggggcgcataggagtgggggcatttggccagggtggctgagtcccagcgccaccgttccgcacccggaaaccttggctgtgatgcttctctgtggcttctaacctggaacccgggggacatccccttgccccagtgccttctcaatgccaacggtgacccagcctgagctccccacctgccaaggtccgagttgagctctcagaacccttggcctttccgcagggcctccgagggcgtctggtggatcctgtgcgtgctctgcggcaccccctctaggctttccccactcactggaggccccagcctggcttcagagggactcagtggggcttgaccacgtcccagctgcgtgaccttgagcaggttccttgacctctctgggcctcggctttctcactctgtaaaatgggcacaaacaaggctttgtgaggatgagtgtggctgtcgtgcctgtgagtgcttatgtgattctcactcctgccccaggtcccctccagctcctcccttttgcggtcccgaggtctagcctaagtcccccttgcttctcttgcagggtgtttatttctctcggcttcttcctctccctacgctctcactttgttttatttcatctccgtccctctgccctccccttttcgctatcggtttcaattctccgctgaaacctctgaggaggccctgcccgccccactgtcccgccgaccctccccgcagcacccaccctgcccggcttctccggggcttgccctcctgtagcccaggagttggggctgggggcggctgtgctgacatcactggcgtttatgcactgctccttgcccaacgcaaatctcatcctcgttctctctgaatcaattcacttttattgcctcagctgctcaaaagcartttttcaagaacaaaaaggtcagcacgtccaagactaatcaattctcggagagctcctgccgctgccaggggagccgggctccagcagccccccgcccttcccgccagcccctcccaccagccccatcacttttattgcttcatgatgcctgtcattagtggtgtgtttgagacgccccacggtgttcttacaacata

SEQ ID NO: 670135 - DNA, 381 bp, Homo sapiens
  misc_feature 278, 279, 280, 281, 282, 283, 284, 285, 286, 287, 288, 289,290, 291, 292, 293, 294, 295, 296, 297, 298, 299, 300, 301,302, 303, 304, 305, 306, 307, 308, 309, 310, 311, 312, 313,314, 315, 316, 317, 318, 319, 320, 321, 322, 323, 324: n = A,T,C or G
  misc_feature 325, 326, 327, 328, 329, 330, 331, 332, 333, 334, 335, 336,337, 338, 339, 340, 341, 342, 343, 344, 345, 346, 347, 348,349, 350, 351, 352, 353, 354, 355, 356, 357, 358, 359, 360,361, 362, 363, 364, 365, 366, 367, 368, 369, 370, 371: n = A,T,C or G
  misc_feature 372, 373, 374, 375, 376, 377: n = A,T,C or G
gcctcagtgccaggtgtttgtacccgtcagtcaccccagtcacctgctagggaagatgtgaatgctcctgctctattagaaaaggggagwtcaagacatttattaacctactaagggtcattctttagtaatgtgacaggatcttgagtaaaagtgtattttaactatacaaagggaaactgtctccgttttttaaaaacacacacacacacacacacacaacaaatttttaaacattgctggttttcttatattgtattcatagctttaaatggaannnnnnnnnnnnnnnnnnnnnnnnnnnnnnnnnnnnnnnnnnnnnnnnnnnnnnnnnnnnnnnnnnnnnnnnnnnnnnnnnnnnnnnnnnnnnnnnnnnntttt

SEQ ID NO: 670136 - DNA, 616 bp, Homo sapiens
tgttatccatgagaagcttccaggcctgcctcctcatcccccttctctccgactgccccctcctttttagtgggcgatgcatggcccagaaagggtgcccattggaaacttcgtttgtgaaaaagaaaggagctgcagctgaccctcactagtggcacaaggccagagcctgggcatatgtgacgttgcagggatctggtttagatgcctgcctgcctgtatctcccctctgtctgcatgggcaaggaggcaggaaactggtgttccagggccttccttaacatagccgtaaggccagcagtcctcatcattctttgctgttggtcgtaaaactgtgttgtgacagtggaagattctcactgttctctgtgaactgaatcgaaagggggtgygcatacggttatttacaaaggactgagtccttctttggcttaatttaaaacacacacacacacacacacacacacacacacacacgacctgatggtaggtggcaggctgcagacaccctggataccgtgtgtgggagtctccagacctcatcttctattgcactccctccccttcctcaggggagtgtccagacttcttgggtgatgtggtaataatgatataa

SEQ ID NO: 670137 - DNA, 626 bp, Homo sapiens
  misc_feature 24: n = A,T,C or G
atagattccaataaatatagtatncgatagagacattacctcaaaaaaaggaagggaagataagtcatttaataaaaagtgttctaaaaataaatgcaaagaaggtatcacaaaataaacaaatgattgatttgcctctgcacatattttaaaatacgtcaaaaaatagcaacaagttaagaaaaaaagataaactgggaaaatactttcacaacatattccaaagatatccttaaaatataaagaattgttaaaattaacaagaataactaggaagaacaagaagaagaagcagaagcagcagtagcagcaattaaaaggtaaaaattaatgtggccaataaacacatggaaatgtgctcactttaccagtaatcaaagacaagctgattaaaatattttatatgtaaaacgacaactatatacatrtattttaatcaccgggtattttatcagcaagaaccagtttaaaaatatgctggaaaatttactctcaatagcaactaaagccataaattaccaagttacaatactataaaaatacactctttgaattttctaacacatgcacagatttgattaaatgaagatctatatcatgattctgaatgggaatgttgaacattg

SEQ ID NO: 670138 - DNA, 808 bp, Homo sapiens
tgagatttgggtggggaacagagccaaaccatatcacctcatatccactgcagatatgaagaaggctcccggaagcaaagaaaagaatctgcaaggccccacagagatagaaacagagaaattaaccagcgacttttcacttcccaaaagtccccactaaccctctttcaactggtttccatgaggtttctctgaaataaatccccttttaaatttaagactctttgtatgaatgttggttctgaacaaatagtcccttgactaagcccctaagcaagtctgtgaaccttagttttcmttctggatacactgaattgaagtatggtgggctcctcccactctgcgattctatgtcacatcatcccatgctacacttctgtacttgggagggctttgagaataaaagcctaagggtataactttatacagagcccctggtaaatttcagcttgtgttttggttaatcttccaaaacatctcacattttggaatatgtctggggctttgattagcaaaaagtaaatgaaagaacaattgagagtagtggcttcacacatcttctcagaaacctatcaaagggttgtctctcacatcagatgaattgtcccggaattctatttatagatggcttagcaattcattcattcctcaatttcaccagaggttagctatagactgagggggtgcttttctaacttcaactgaaatatacatgagtggtaggtacaaaggttttggttggttacctgagaaccagacacccacatcttgaaggaccatggaagtggactctggtatgaacccattg

SEQ ID NO: 670139 - DNA, 676 bp, Homo sapiens
ggatgaatatacatctttcaagtgaaatgctgttttgtgtagttatgtgagcatggcatagatgaattatgaaataattttctagattcccctgcctatatccttggctctaactggaatctttcctccaacttcgttcatctctcttctttttttgcgtgtgtatcagtatgaccttgcctaacgttgcactgggaacttaataaatgaagctattcttctgttattcatgatattgtccacccaggttctatcrcttcctgaaataaaaatagtctcttacagtggtctggaggtttattgtctacaaagcactttctgcctatctgatctcattgtggcatctcagtgccctttggcttagagatagagtgaatatcacccctttcttatggattagaagcttgaattgcaagatattttgaggcttgccaggggcaagagagctgatatccatgcccatgtcacttgattcgatgccctctgttcttttccttttgccacactgcttttccccagggacactccttggatgctgcccacttctccccaggtctgtattacggggcttggaatatccacaaacgaatgtgacctgaagtagaattctagcaacaactgccatcccaggtggtgcctgctcttccccttaatggcataattatttgtatctaag

SEQ ID NO: 670140 - DNA, 676 bp, Homo sapiens
ggatgaatatacatctttcaagtgaaatgctgttttgtgtagttatgtgagcatggcatagatgaattatgaaataattttctagattcccctgcctatatccttggctctaactggaatctttcctccaacttcgttcatctctcttctttttttgcgtgtgtatcagtatgaccttgcctaacgttgcactgggaacttaataaatgaagctattcttctgttattcatgatattgtccacccaggttctatcacttcctgaaataaaaatagtctcttacagtggtctggaggtttattgtctacaaagcactttctgcctatctgatctcattgtggcatctcagtgccctttggcttagagatagagtgaatatcacccctttcttatggattagaagcttgaattgcaagatattttgaggcttgccaggggcargagagctgatatccatgcccatgtcacttgattcgatgccctctgttcttttccttttgccacactgcttttccccagggacactccttggatgctgcccacttctccccaggtctgtattacggggcttggaatatccacaaacgaatgtgacctgaagtagaattctagcaacaactgccatcccaggtggtgcctgctcttccccttaatggcataattatttgtatctaag

SEQ ID NO: 670141 - DNA, 676 bp, Homo sapiens
ggatgaatatacatctttcaagtgaaatgctgttttgtgtagttatgtgagcatggcatagatgaattatgaaataattttctagattcccctgcctatatccttggctctaactggaatctttcctccaacttcgttcatctctcttctttttttgcgtgtgtatcagtatgaccttgcctaacgttgcactgggaacttaataaatgaagctattcttctgttattcatgatattgtccacccaggttctatcacttcctgaaataaaaatagtctcttacagtggtctggaggtttattgtctacaaagcactttctgcctatctgatctcattgtggcatctcagtgccctttggcttagagatagagtgaatatcacccctttcttatggattagaagcttgaattgcaagatattttgaggcttgccaggggcaagagagctgatatccatgcccatgtcacttgattmgatgccctctgttcttttccttttgccacactgcttttccccagggacactccttggatgctgcccacttctccccaggtctgtattacggggcttggaatatccacaaacgaatgtgacctgaagtagaattctagcaacaactgccatcccaggtggtgcctgctcttccccttaatggcataattatttgtatctaag

SEQ ID NO: 670142 - DNA, 676 bp, Homo sapiens
ggatgaatatacatctttcaagtgaaatgctgttttgtgtagttatgtgagcatggcatagatgaattatgaaataattttctagattcccctgcctatatccttggctctaactggaatctttcctccaacttcgttcatctctcttctttttttgcgtgtgtatcagtatgaccttgcctaacgttgcactgggaacttaataaatgaagctattcttctgttattcatgatattgtccacccaggttctatcacttcctgaaataaaaatagtctcttacagtggtctggaggtttattgtctacaaagcactttctgcctatctgatctcattgtggcatctcagtgccctttggcttagagatagagtgaatatcacccctttcttatggattagaagcttgaattgcaagatattttgaggcttgccaggggcaagagagctgatatccatgcccatgtcacttgattcgatgccctctgttcttttccttttgccacactgcttttccccagggacactccttggatgctgcccacttctccccaggtctgtattacggggcttggaatatccacaaacgaatgtgacctgaagtagaatyctagcaacaactgccatcccaggtggtgcctgctcttccccttaatggcataattatttgtatctaag

SEQ ID NO: 670143 - DNA, 676 bp, Homo sapiens
ggatgaatatacatctttcaagtgaaatgctgttttgtgtagttatgtgagcatggcatagatgaattatgaaataattttctagattcccctgcctatatccttggctctaactggaatctttcctccaacttcgttcatctctcttctttttttgcgtgtgtatcagtatgaccttgcctaacgttgcactgggaacttaataaatgaagctattcttctgttattcatgatattgtccacccaggttctatcacttcctgaaataaaaatagtctcttacagtggtctggaggtttattgtctacaaagcactttctgcctatctgatctcattgtggcatctcagtgccctttggcttagagatagagtgaatatcacccctttcttatggattagaagcttgaattgcaagatattttgaggcttgccaggggcaagagagctgatatccatgcccatgtcacttgattcgatgccctctgttcttttccttttgccacactgcttttccccagggacactccttggatgctgcccacttctccccaggtctgtattacggggcttggaatatccacaaacgaatgtgacctgaagtagaattctagyaacaactgccatcccaggtggtgcctgctcttccccttaatggcataattatttgtatctaag

SEQ ID NO: 670144 - DNA, 676 bp, Homo sapiens
ggatgaatatacatctttcaagtgaaatgctgttttgtgtagttatgtgagcatggcatagatgaattatgaaataattttctagattcccctgcctatatccttggctctaactggaatctttcctccaacttcgttcatctctcttctttttttgcgtgtgtatcagtatgaccttgcctaacgttgcactgggaacttaataaatgaagctattcttctgttattcatgatattgtccacccaggttctatcacttcctgaaataaaaatagtctcttacagtggtctggaggtttattgtctacaaagcactttctgcctatctgatctcattgtggcatctcagtgccctttggcttagagatagagtgaatatcacccctttcttatggattagaagcttgaattgcaagatattttgaggcttgccaggggcaagagagctgatatccatgcccatgtcacttgattcgatgccctctgttcttttccttttgccacactgcttttccccagggacactccttggatgctgcccacttctccccaggtctgtattacggggcttggaatatccacaaacgaatgtgacctgaagtagaattctagcaacaactgccatcccaggyggtgcctgctcttccccttaatggcataattatttgtatctaag

SEQ ID NO: 670145 - DNA, 766 bp, Homo sapiens
gagctgttgatggactggagctgggccatagaaagtcacctgctggggtgcaagagaaacttcctggagagtgtctgccactgggtctcctgcatgctgctagagccatactttatgggggaaaaacagctaggaagagaaaccctttcctcttctatggcttgcaaggtctctccagctctctctactgacaaagactgacattgtagaagctgacaaagaacaagcgtttacaggattcagctccattatccccatgtagggtagagaggtggatttggagcttggagttaatgcattgataagtagcacgtttgctaaacatacttatactwcttctagtagcttggtcctttccttggtagttttttcagtagtttcttggctgttttttcatgtcgtctcttaataaaataattttactcccatctttctgatatgggtgcccttcacttgttttttctttccttaatgcattggatatgacctctaagagattattttttaaagtagggagaacaaacatcctagccttgccccgatcttaggggtaaagcattcaaacttttaccattaagtatgaggtaagcgacagggttttggagtttttttggtaacatgctctttatcaggttgggatgtttcctttcgttcatagtgtggtaaaagtctttatcatgaatgagtactgaattttgtcaaatgtttttcatgcatctgttgacatcattatatggtttacttcttttgtctgttcatatgatga

SEQ ID NO: 670146 - DNA, 668 bp, Homo sapiens
tatcactgttgcttgattcttcaaagagaaaataaattaattgcaataataaaaaattatgtttaaaaaatccagttcaaataattaaagacttctgaatggatatttttccaaaagtgaaataactgacattcttgtggcatctactgtaaattcagctaaaaagttaactattaagataaaatgaatttattttactattgtcgatatgaccacaatgttttataaaccacaatatagtgctaaaaacaatattttcctattcaataagaaattctagggaggggaggcagagcgagatagcagaatagaaagctccaccaatcatctcccactgcaaggacaccaaggtgacaactatctacacagaaaaaattaacttcctaagaaccaaaaagtaggtgagcactcatagaacctggttttaacttcatgtcgctgaaaraggcactgaagaaacagaaaaaacagtcttgaatcactgatgtcacccatcccacaccctctgcagtagtggtgtgggtgtggagagagcctctgagtgctggaggagggcgaacacagcagttcagaggctttgaacttagtgctgtcctggtagagcagaaaggaaaccaggaccaaacctagctaacatctgcccatggagggagcattaacaccagcct

SEQ ID NO: 670147 - DNA, 641 bp, Homo sapiens
tttggtcaatctcccaagatgttaataaaagagaaaacaataccattcattacaaaaatatggcaaatgtatttaaaaagtcagtgttatattatgaaagtgaaaataagactttcaaaagaaatgaaaatgttacaattagattgaactgtcaaaattgcataatggctaactttagattcatttaattttaaattatttgtagtttgaaaataagacaacatagaattataagtattatattatcaaatcaatgaagctatttttaaaaatcttaaatatttgaccaaaactcttcccaacattttatatcttcatgttttgctatttatttatttatttgagacagagttttgctcttgttgcccaggctggattgcagtggcatgatcttggctcactgcaacctctgcctcttcggttcaagcgattctcctgcctcagcctcccgagtagctggggtcataggcgcccaccaccacgcccagctaatttttgtttttttagtagatacarggtttcaccatgttgtctaggctggtctcaaactcctggcctcaggtaatctgtccgccttggcctcccaaagttctgagattacagacgagagccactgtgcctgtccatattttattattttc

SEQ ID NO: 670148 - DNA, 603 bp, Homo sapiens
ttcataataataatggccagatttaaaagataaaaatgatttttaatgcacttttacagtcataatctttgttcccttccaagtcttatgagatgggtaggggagatagcatcacgatcctatcaatttgcagatgagaaatcaaggtctgcaaatgaaattcaccctgattgatctagattgagaacygggccttctgtctctcagcttattgtccttttcacgtgaaccatgctgtttcctagctacatcatcttggcttatattgaagttgtggcttttgaagtcttctagtctttttgccatgccaatagctgtcaaatcagatttcctcctttcctttagtgcgtatatacttgcttttagaaaaatactacttttagagtatttaaagaaaagaatagaaaaaaagtaaattcaaggttttatatttttgtgtatctgttaagattgatcttttggggaaagaaatctagaactggccttgtggccatctgatagcatggtgcgtttaggtgagcctgtcttcattcaggatagctgaggtcagtgtaggactttccctcactactgtccaattaactctccaggcagaatcagtta

SEQ ID NO: 670149 - DNA, 603 bp, Homo sapiens
ttcataataataatggccagatttaaaagataaaaatgatttttaatgcacttttacagtcataatctttgttcccttccaagtcttatgagatgggtaggggagatagcatcacgatcctatcaatttgcagatgagaaatcaaggtctgcaaatgaaattcaccctgattgatctagattgagaactgggccttctgtctctcagcttattgtccttttcacgtgaaccatgctgtttcctagctacatcatcttggcttatattgaagttgtggcttttgaagtcttctagtytttttgccatgccaatagctgtcaaatcagatttcctcctttcctttagtgcgtatatacttgcttttagaaaaatactacttttagagtatttaaagaaaagaatagaaaaaaagtaaattcaaggttttatatttttgtgtatctgttaagattgatcttttggggaaagaaatctagaactggccttgtggccatctgatagcatggtgcgtttaggtgagcctgtcttcattcaggatagctgaggtcagtgtaggactttccctcactactgtccaattaactctccaggcagaatcagtta

SEQ ID NO: 670150 - DNA, 603 bp, Homo sapiens
ttcataataataatggccagatttaaaagataaaaatgatttttaatgcacttttacagtcataatctttgttcccttccaagtcttatgagatgggtaggggagatagcatcacgatcctatcaatttgcagatgagaaatcaaggtctgcaaatgaaattcaccctgattgatctagattgagaactgggccttctgtctctcagcttattgtccttttcacgtgaaccatgctgtttcctagctacatcatcttggcttatattgaagttgtggcttttgaagtcttctagtctttttgccatgccaatagctgtcaaatcagatttcctcctttcctttagtgcgtatatacttgcttttagaaaaatactacttttagagtatttaaagaaaagaatagaaaaaaagtaaattcaaggttttatatttttgtgtatctgttaagattgatcttttggggamagaaatctagaactggccttgtggccatctgatagcatggtgcgtttaggtgagcctgtcttcattcaggatagctgaggtcagtgtaggactttccctcactactgtccaattaactctccaggcagaatcagtta

SEQ ID NO: 670151 - DNA, 662 bp, Homo sapiens
gtcactcaagaggaattgaagagaacaaaacacagtggaagttaatyttgtaaaacgccagcaaaaacatgctccctgggggtgagggaaaaacaaaaggcaacaactatatcccttatttgcagcaacctaccctcgatttgcaacagtgggcgtggaaatggtaggggcggggtgtcctgtgtggttcagtgaaaccaacagcagggataacacacatgagtcatgtttgtctctgtgaccgccagaattcatctttcaagtataaaaataactaacagtaaataaacatacaagaactcaaggaacattgttcccatgagtcttcctgaggagattaataaaggatgaatctcagccaaccaacttagggaaataacagaaaaaaaaatggctgactatatagaactaaaacataaacaactctaaagtttaaagtagtagactgtaacatgcatgttatattccctgacagtgcagaaaagattcgtttagtagaaatgtggcaggaaagtgagaagaaagcatggaaattaggataaattcattgaatgcttaatccaaaatagccagttctaaaatacagcttagagctaaaaaagtaagtaaattctaaacatccattatagtattaagacaatatgatgaataataatattaat

SEQ ID NO: 670152 - DNA, 1497 bp, Homo sapiens
attgttcatcttaaacttagtgacaaggaggccacagggggctttattgaaagcagtttcaagggattgaaaaatgtaggcagcaratttcagggtgagaaccttaagttttcgcagtgtggtgagaatgactcttcttcacatggggatcaatcttcagaccttagccctacaatttactaagcatgagcttcagcaacatacttaatctttgtattcttcatctgtaacttgagaataataatgatacccatctgctgcgttgatgggagaattagaaataatgagtcccacagatttagctcaaagattctaaataaatggtaacggttgttaaaatttagttaagcttttgcatttaaatttactattctgggccaggcacagtagctcatgcctgtaattccagcactttgggaggccgagacaggtggatcatgaagtcaggagttcgagaccagcctgaccaacatggtgaaacaccatctctactaaaaatacaaaaattaggccaggcacggtggctcacgcctgtaatcccagcactctgggaggccgaggcgggcagatcacgaggtcaggagatcgagaccatcctgactaacacggtgaaaccccgtctgtattaaaaatacaaaaaattagtcgattttttgtattttgtgatggcaggcacctttagtcccagctactctggaggctgggactctggaggtgtgaacccaggaggtggagcttgcagtgagctaagatcatgccactgcactccagcctgggcgacagagcaagattctgtctcaaaaataaataaataaataaaaataaaataaaatacaaaaattagccaggcatggtggtgcactgtagttccagctacttgggaggctgaggcaggagaatcacttgaacccaggaggtggaggttgcaatgagctgagatcacgccactgcactccagcctggcaacagcaagactctgtctccaaaacaaacaaacaaaaaaatttttattattctgtgaaaatagacttaactaaatcaatagatgctgaagcattttttaaaaagcatatcagctacattatgattaaatcaagttactgtcaactcacttgcttttcagttaggtaaaactgataaaaaacaacaatgtgtgtgcatgcacttctgtgtgttttacaggaaagataaaaattttaacagaatgtatatgtatttcacaaagaatttctagaattgtgtcagtagataaatatacaaatgaatcactagtgaaattatagtgctgaaacataatggacaaaacaaaaattctggttctgattgtaggcaaaaatgcttggaccagattagcacattgtcataattcttttctctacttggagcttttatggaagtcattggtgggtaaacttttaaatttcttcctctatgacttgaagtaactttgatgtgcatcacataatatttgatggaaacatctatgttaggttacca

SEQ ID NO: 670153 - DNA, 1497 bp, Homo sapiens
attgttcatcttaaacttagtgacaaggaggccacagggggctttattgaaagcagtttcaagggattgaaaaatgtaggcagcagatttcagggtgagaaccttaagttttcgcagtgtggtgagaatgactcttcttcacatggggatcaatcttcagaccttagccctacaatttactaagcatgagcttcagcaacatacttaatctttgtattcttcatctgtaacttgagaataataatgatacccatctgctgcgttgatgggagaattagaaataatgagtcccacagatttagctcaaagattctaaataaatggtaacggttgttaaaatttagttaagcttttgcatttaaatttactattctgggccaggcacagtagctcatgcctgtaattccagcactttgggaggccgagacaggtggatcatgaagtcaggagttcgagaccagcctgaccaacatggtgaaacaccatctctactaaaaatacaaaaattaggccaggcacggtggctcacgcctgtaatcccagcactctgggaggccgaggcgggcagatcacgaggtcaggagatcgagaccatcctgactaacacggtgaaaccccgtctgtattaaaaatacaaaaaattagtcgattttttgtattttgtgatggcaggcacctttagtcccagctactctggaggctgggactctggaggtgtgaacccaggaggtggagcttgcagtgagctaagatcatgccactgcactccagcctgggcgacagagcaagattctgtctcaaaaataaataaataaataaaaataaaataaaatacaaaaattagccaggcatggtggtgcactgtagttccagctacttgggaggctgaggcaggagaatcacttgaacccaggaggtggaggttgcaatgagctgagatcacgccactgcactccagcctggcaacagcaagactctgtctccaaaacaaacaaacaaaaaaatttttattattctgtgaaaatagacttaactaaatcaatagatgctgaagcattttttaaaaagcayatcagctacattatgattaaatcaagttactgtcaactcacttgcttttcagttaggtaaaactgataaaaaacaacaatgtgtgtgcatgcacttctgtgtgttttacaggaaagataaaaattttaacagaatgtatatgtatttcacaaagaatttctagaattgtgtcagtagataaatatacaaatgaatcactagtgaaattatagtgctgaaacataatggacaaaacaaaaattctggttctgattgtaggcaaaaatgcttggaccagattagcacattgtcataattcttttctctacttggagcttttatggaagtcattggtgggtaaacttttaaatttcttcctctatgacttgaagtaactttgatgtgcatcacataatatttgatggaaacatctatgttaggttacca

SEQ ID NO: 670154 - DNA, 1497 bp, Homo sapiens
attgttcatcttaaacttagtgacaaggaggccacagggggctttattgaaagcagtttcaagggattgaaaaatgtaggcagcagatttcagggtgagaaccttaagttttcgcagtgtggtgagaatgactcttcttcacatggggatcaatcttcagaccttagccctacaatttactaagcatgagcttcagcaacatacttaatctttgtattcttcatctgtaacttgagaataataatgatacccatctgctgcgttgatgggagaattagaaataatgagtcccacagatttagctcaaagattctaaataaatggtaacggttgttaaaatttagttaagcttttgcatttaaatttactattctgggccaggcacagtagctcatgcctgtaattccagcactttgggaggccgagacaggtggatcatgaagtcaggagttcgagaccagcctgaccaacatggtgaaacaccatctctactaaaaatacaaaaattaggccaggcacggtggctcacgcctgtaatcccagcactctgggaggccgaggcgggcagatcacgaggtcaggagatcgagaccatcctgactaacacggtgaaaccccgtctgtattaaaaatacaaaaaattagtcgattttttgtattttgtgatggcaggcacctttagtcccagctactctggaggctgggactctggaggtgtgaacccaggaggtggagcttgcagtgagctaagatcatgccactgcactccagcctgggcgacagagcaagattctgtctcaaaaataaataaataaataaaaataaaataaaatacaaaaattagccaggcatggtggtgcactgtagttccagctacttgggaggctgaggcaggagaatcacttgaacccaggaggtggaggttgcaatgagctgagatcacgccactgcactccagcctggcaacagcaagactctgtctccaaaacaaacaaacaaaaaaatttttattattctgtgaaaatagacttaactaaatcaatagatgctgaagcattttttaaaaagcatatcagctacattatgattaaatcaagttactgtcaactcacttgcttttcagttaggtaaaactgataaaaaacaacaatgtgtgtgcatgcacttctgtgtgttttacaggaaasataaaaattttaacagaatgtatatgtatttcacaaagaatttctagaattgtgtcagtagataaatatacaaatgaatcactagtgaaattatagtgctgaaacataatggacaaaacaaaaattctggttctgattgtaggcaaaaatgcttggaccagattagcacattgtcataattcttttctctacttggagcttttatggaagtcattggtgggtaaacttttaaatttcttcctctatgacttgaagtaactttgatgtgcatcacataatatttgatggaaacatctatgttaggttacca

SEQ ID NO: 670155 - DNA, 1497 bp, Homo sapiens
attgttcatcttaaacttagtgacaaggaggccacagggggctttattgaaagcagtttcaagggattgaaaaatgtaggcagcagatttcagggtgagaaccttaagttttcgcagtgtggtgagaatgactcttcttcacatggggatcaatcttcagaccttagccctacaatttactaagcatgagcttcagcaacatacttaatctttgtattcttcatctgtaacttgagaataataatgatacccatctgctgcgttgatgggagaattagaaataatgagtcccacagatttagctcaaagattctaaataaatggtaacggttgttaaaatttagttaagcttttgcatttaaatttactattctgggccaggcacagtagctcatgcctgtaattccagcactttgggaggccgagacaggtggatcatgaagtcaggagttcgagaccagcctgaccaacatggtgaaacaccatctctactaaaaatacaaaaattaggccaggcacggtggctcacgcctgtaatcccagcactctgggaggccgaggcgggcagatcacgaggtcaggagatcgagaccatcctgactaacacggtgaaaccccgtctgtattaaaaatacaaaaaattagtcgattttttgtattttgtgatggcaggcacctttagtcccagctactctggaggctgggactctggaggtgtgaacccaggaggtggagcttgcagtgagctaagatcatgccactgcactccagcctgggcgacagagcaagattctgtctcaaaaataaataaataaataaaaataaaataaaatacaaaaattagccaggcatggtggtgcactgtagttccagctacttgggaggctgaggcaggagaatcacttgaacccaggaggtggaggttgcaatgagctgagatcacgccactgcactccagcctggcaacagcaagactctgtctccaaaacaaacaaacaaaaaaatttttattattctgtgaaaatagacttaactaaatcaatagatgctgaagcattttttaaaaagcatatcagctacattatgattaaatcaagttactgtcaactcacttgcttttcagttaggtaaaactgataaaaaacaacaatgtgtgtgcatgcacttctgtgtgttttacaggaaagataaaaattttaacagaatgtatatgtatttcacaaagaatttctagaattgtgtcagtagataaatatacaaatgaatcactagtgaaattatagtgctgaaacataatggacaaaacaaaaattctggttctgattgtaggcaaaaatgcttggaccagattagcacattgtcataawtcttttctctacttggagcttttatggaagtcattggtgggtaaacttttaaatttcttcctctatgacttgaagtaactttgatgtgcatcacataatatttgatggaaacatctatgttaggttacca

SEQ ID NO: 670156 - DNA, 647 bp, Homo sapiens
tgatctaagtaaatgattttatttaaaacatttcataaactctgccacactaatttgccagtgggttttaacattgacatcggtaaacccaaagcagttgagagtgcaaagtacttctgaaaacatytgtggaaagattagttggactccacttttggcaggaggtctgtaaacaaacacctaccctcctcttcctgactctcccacttcttggatgactctttattcgtgtttgctcctaagtgtggttttttcatgggttgtcatcagctcccttctcactccccaaggtgatttcatcacttcccataaagtcgtccattactgaagagacctaattctctgtaccttgtctagacctcccagctgaggtatggctggctatatccaactacctaatggacatctattttgaatgtctccaagaaattccaacgaacatgcactctttagctgctcttcctccaacacaccccagttggatgaatgtctgtcttcttcggctggggctaccataacaaaataccacagatttggtggcctgaaggccgagatcacggtgcccccatggtcgggttccggtgaaggctttcttcctggcttgaaggaggctaccttcttgctgtcttcacatggcagagagagag

SEQ ID NO: 670157 - DNA, 1214 bp, Homo sapiens
acttacagtataagaaccttacaacaatatatttctaatttcttcttatcctttgtgctactgtcatatattttatttttacctgttggagatagggtggttcaatttttactaaatgatacaacagagttaaaagccatctaagtaaaggattaacattcaagtaaaccagattaacagaaaaggcttattttcaacttaatatgtacattttttctaataaacttaatttttaatttttcaggatgaaggttaactgaaagagggcaagagattcaatgatcatgtattcttgatcttttcttatgaatttttattctaagattaataatatactgatcattctayattcttaattttagcaagtatttattaagtttttatgttttatttaatacaaactattgctaaatatttgtacacattttgtcttgtgggtcctagttgacaatattgattcccacccatattgaatagcatttcatatcatttattacattattgacatccattgtgttatttcagcaatcttatgaaatatgttatcattttcattacatagattataaatatgaggctcaaagatattgttaagtgacaggctttatcaacaaatgaaaacatcacatcaaaatctgatctctgcaccttactgaatctgagacatgtattacccaagtcatctttgtcccaatgctatattgcattgacatcttatccagtatcagttttgcagccaatctaaccaaattgagttttttatcataacaggttagcagcctatctgcatatgcttaaaaagatctctgtgtgggcatactcgatctactctatatatagtgatacctttctacttttaattcttagggaattaagaatacctccagagaagtccctatatctcaaaaattagataatcatactttaactggatacagtaagatggctatgatttattgatgaatttttagaccacactactccatgctcagtggttttgagcaaactgtgtgaaaatgcaatgactattttatttaatgcagtgattgcaacatcaactgttaaactgaagattattttatagcatattcactgagcatatgatatatgaaagcctgtaaattattagaaattacccatctcactagcatttcaaatgaagatattgcgtctatcatttcaaaataaaggtttgtgaataaccttgtgtatta

SEQ ID NO: 670158 - DNA, 667 bp, Homo sapiens
cctcactaaatattttgtctgtgcaaccatctaaacatacagtaattgcaaccaactaggtataaccactatttttgtggccttttaaaagtattaatccattttgaatacctgcctttctttcagtattttagagcccataatttttaagtctccaatatctttataagttattgaaaagctaataggcctgaggagttgtgtctgtgggagtcaagggataatgccgtcttgccagggcataatttgactattggccatgaagctacctgtctttgagttattcatctagggaaaatgttcaatattttctactacttgtatttaaaaatcttaaaaatktaaacagaactgttttaaatagaagtgaatacagatgtgagagtattgtcaaggtatccatttcttagaacctgttttaagatattatatacactgggtctgggtttaattttgatattttattcaattctttctaaaataatgaaggcatccttattaatcataactgcctaataagtctaccttgactttcccattaattcttacacaatctgttcatttctatacaattccttccatcatccaactgaaattattttcaaaaagtattgttgagataagggctatatcagagagaaagaaaaaataggaataaatttggaaa

SEQ ID NO: 670159 - DNA, 1420 bp, Homo sapiens
aatctctgtcttaaaaacttttcacaccagatgagaagaaagtcttatgaacagatgattttaaaacaatgtaatgattattataactgggtaggcttcatcccctcatacagtgatcttgactacattttttgtcttgtgtacctagmaaccaccaccacacctggcacagatgaggagctcagtaatatttgttaaatgacctgaaacagagatcagagtacttaatttttctacaataaatgggcaaacgccttaaggaaaaagtcaatgttctcctgaatcttgaaaaatcagtgagagttttccagatgaagaagcatgcataaggagaggaactcccatttataacttggtttggaattatgttggaagacaaaataagctatttgtcctccatttgttcatagatcacataacagttatccacatcccaaatgatttagaagactgcttaatgaatatataataaagtaaaatgtatgactatgttttcatcaaagctgctgtaatccatctttattttctatagatacccaggaaaccacaaattcaactgtgctcacagattccacctgggtacatgctctcaaagtgatcttttatctggcttctttaatgtaaaactaattaaaatcaattagagtggcatgtcattgactggcctggttttaccagtgcatcacaaagagacagaagaaaagacttggaggataataatgtgaaacttgtttgtactccttaaattgcagatgtgtatttctaatgggtaaacaactgaaatttcaaggcacttacttgaagcatagccaaatgtctcccataaagcagttgtattagagatttgattaacattccttttttaaaggtgcttgaaagaatttgtccctgttgtttttcatggaatgcattcggtatttcctatccttgaactttgataagacttacagcctctaatcctccccttttgtacttgattatttactctcttgtgttgtgcattgttttatgtatactaaatcatgtatctccagcaagcttgtaggtctaaggccttctattttctttatgatacatgtaaaaggaaagagagaaagcaaaaaaggaagaagaaaagggaagaaagaaaacacggagaggaaaaagaaagaataaatgtgtacatattgaacatctattacgcatgcatggtgctgtgtacctttctagaacatatgccacttaatcttgataagaatcctgaaaaataaatacctttttcccttttagggataaagtaaccgaaacacaaattggtcaccagctgaatggcagaggcaaaatgaaaacccagatatttcctttgtttacttctaattctgcaggaagttgccctaccaaagccactttgcaggggacagcaatgagtagtcatgtttta

SEQ ID NO: 670160 - DNA, 1530 bp, Homo sapiens
accattagctgaaaataaacagagcttactttctgggagaaacatgtatggtatttccgcctagcttctattcaatgattttctaggtaattatcgaagtttttgctgtcagcaatcacattatgaagtcaaatgactcaggtttataaagatatttaacccattgctacaaagtatatctgaacttctcaaaagggagatgtttagtgtccactaactctaaacaaatgcctaccctatgacccagcaatactacactcctaggtttacatgtaagagaaatgagaatttatgtccatcaacagacatgaccaaaaaagtttatagcatctttattcatagcagccccaacttggaacacccaaatgtccatcaatagtagaaaggaaactaaagtgtggcatattcatacaatggaatactctacagcaatgaaaagaaaactgctgatatatgcagcacaagggataactctcccacgtactttggtgaatgaaggaagccagacacagagggtgcatgctgtacatgataaagaattaaaaataactggcgggttgtggtggctcacgcctgtaatcctagtactttgggagattgagacaagcggatcacctgaggtcaggagtttgagaccagcctgaccaacatggagaaaccgcgtctctactaaaaatacaaaaattagccaggcgtggtggcacatgcccgtaatctcagctactcaggaggctgaggcaggagaattgcctgaacctgggaagtggaggttgcggtgagccgagatcgtgccattgcactccagcctgggcaacaagagtgaaactccatctcaaaaaaaaaaaaaaccaaaaactgatggtgatggaaattagaagagcagttattgttatggagtgagggtgggggagtgggccattgacaaggaggaggcatgaaggagcctcctggggtgctagaaatgttctagatcttgatctgggtggttacacaggtgtatacgcttgtaaaactcctttgaatggtacccttttgtatactttacacagcttactgtacatgtgttatacctcagcaaagagcaataaataaatacatccatacacttttacaggggaakaatttttcccactaccaagtacatagccagagagagagcactggtgtccagtgaatctcacagattttgcatggggtcaggatgaagctatggacagatgtccatgggtgggagttagcagaggcaattgtgcttggcactccaagcctcttccctttttaaaaaatgcatattccttatcctctttggccttctagatcatctgggctatgtcatatagaaaaaggatgttaccatggggtgggtcagggagagagaaggggcagaaaaaaaaatgagtttcataagcttcagtgcagagagaacccaaagcacagacaaaaaatgaattgtggtaagacagagctaggtttactcccaagccgacaagataaagatttgccagttaagggagagaacaagagttgaag

SEQ ID NO: 670161 - DNA, 1428 bp, Homo sapiens
cattgtctccagcccagatagcttcaattatcaagttaggcccccacacttatcaccccaaagcccaacccagaggctttgagtggggggaaaaaacaaaaaacaaaaacagcagctagctaggcgatccttggtctattttttctttaaagggtagagtacacaatatagtataatgatcacaatgttatggatttttttgggtgtgtacagtctagaaagtgttgtgtaaaattaaaaagaaaaggtgacatacattaaaacaaatcacccaccagcagctaaagcaatggctcaaaaagctctgaaaattttaactggtttactatgcctgtgtaattttcttttaatgactacttagagggcaaaggaagaacagagattggggcttctaaaagagtattctcaacgattcccttaatagctgactattaccaataaagctataggcagctttagccaacatgaaattataatgttagtagataaaaatagttaccatagttaattttctcccactggaaaaaatttcaactgcctacagctatccctcataggggttttgtaacaaagcacataggcatggttttatctgataacttcaggatgctgtggcatcaatgaaaattaagttggagttgttaaaatacactgtcagggaacttgatgttgctagagctgatatccctatacccatttttttttcttaaaagaaaaaaaaggtatctctcttaaggtgtgtaagcattcagtgatgaatggaaggaattgacaatacagactcctaactcctgataccagcaaacctctgttttgtgcaacttcagagcagtgaaatttcccttcaatgtaattgacaacttatttgaggtaaaaatgacaaaagaaaaaaatcctggtttaaaactgagttgtgatcatttttttttactccatcaagaagtttactaagtgatggcaactggaggatcatggatgtttttcaagtatgtgtttgattcagcacaaggttcctataatggagagttactgacaccaggctatatatttattattattaaaaactggtgaagatattctactgtgaggtcactcaggatataatcactgstttcagagtggtttaattcaaccatttgaaatttggctgatgaatttatattttgtcacaaataataatgcaatttgtttttgtctaataacctcatttacattttcacattgctagaagcctacagaccttatttttaatgtttttctgataacataagtaacaaatgttcattgttgaaaatatgtgaaaaattcaaaaagcccaaagattaaaataaatcatgatgcatactataacccctgagtttaacatgcagacagatctacttccagtttttctgtagacaatataaacatatattcataacatgcact

SEQ ID NO: 670162 - DNA, 1301 bp, Homo sapiens
aaactaaaagggccagatagctaaagagtggtgggtttttgttttgttttgccttaggtgatcaataaaaacaaataaagttcttaaacaagtttcagattttgattatctaggccaggggctggcaaattgtttctgtaaagccaaatagtaaatatttcaggctttgctggccacactgtttctgttcagctccactactggagcacaaaagcagccatagacaatatataaataaattagtgtgactatatttatggatactgaaatgtgttccaataaagttgtacttatggatacgaaaatgtgaatttcatataattttccattgtcattaaatatttttctttggattttttccaaccatctataaatacaaaaaatcattgctagcttgtaggctgcacaaacataggccgcagaccaaatttgacattcatgctagagtttgctgagccctaatctaggtaaattgttctttggaatattgtcagtaccaagaagtgtcctaaacacccacaaaataaagtccaaacatcacaaatagcatgccaaggctttcattatctgaactgaatcttttctcccattaccatgctccaatcatcctctatccaggtgtatccagtttttcatcattcccaggactgtcatatcaccatgcattttcctctcttttcctctaccatttctacatggtaaaaaccaactcatgtcttaaggtacagctccrctgctaagttcttcatgaaaaaagttcctttatgcactccttcccctcattggaactaatttttaatgtctttctggttcgcagccctttatgtatatctcacctgtgagatgtatattgtcatgtatccttatgatattttaaaatctattttctaattaggtggtcatctccttgaggagagaagatgtgtctcattaatagctgtgtattcttcaaaagtcaattctcaactcaatgccttgtacgtaagaagtgttcaataaatatttgttaatgagtatatttattaatgtacgcagacatataatcagaaatatgttcactaacccaaatctaccctcattccccttgagcccttgtgggaagtggatgaggaagagctttcctccgaaaaggagacaattcctgaagagctaccaaacattttgaactacttgcaatctgagcccttattcatgctggcggcaagtgggcacagcttttatgactcctaagatgagagtcatatcacaagggagcacttcagataatcttagcaaggctacagctttaagcaagcttagaa

SEQ ID NO: 670163 - DNA, 590 bp, Homo sapiens
tgatagttttatcagtcactgggatgaatgaactatatcatttgggtttcacaacatttttctcagttgggaagtatcattttccacatttcattgttaaggcttgtagatagaatgaagcaataattcaatccatcatacgtgtttgctcctaaagtcctgtaattagctgtggatgtccaccgcctcctttaggcccttatatgtccaggccaggtggccatgagaatctcttgtatggactcactgcctgtactccctcctagtttatacagacaagcgacgttttccaacagcaaatctgaccatgctattttccaggtaaaaacactttcataaggattatcaatgaactaaggtttaaatttcaatatggaaaccaatcaaccctcatatctgactctgatttagttgtgtagtcttctccctttcatcactgcccagccatgtttcctagtcattgaaatccatggaactttcggaatagatcttgatgttgtaacattctatgtcttcatctatttagttatctttgctgaatttgttctatgctatacattgtaccacctgacwccctttcccacttagaa

SEQ ID NO: 670164 - DNA, 1854 bp, Homo sapiens
taatggaaatataatccctttatccatttctagaggaacagaggcactacagaactgtttataaaatcatctggaaaatagcatcctttcatgatcactagacacctatatgccagaaytggtgccagatataaagaaaatgtccttttgtaaccactgaattttaaagttttaccatgacagatgataactctgggacaactataataacaagagttaaaataaaaagaggtgaagaattctgcttttagtcatgaagaactggatagtatcatcttaatattcacaagaacaacttgataaactaggtgaagtttttaaaaagcatgagttcgaagccaccctagagcaactaagcctgtaagattggaaagaaaaaaggtctaaaaagaagggaagcataggaagataatccaatgtgtaccagttttccaagtggaaatttactaattccttagcagtagccgagaagttgaaaagtagagcagaattatgtaaaagcctgaaaatctaagaataatattcaataatctaacagtaatttaatattctgccaagatacattttgaaggacagaatcttctacgaaagaaaccttagtaaatgtgcaacctttcaaaagctgcttatgtaaagaaagcatgatatgaaaattaaaaagcacttataaaaagactgaatcccagcttcaagtctgataaacctcagactggattaagatgatctacgcctacctcaactatatgaaaaaaaataaaaataaattctaagtgtaggaatataacaccactcagagcctcaaatagtttctaaagtatttcatgacatttaatagaaaacagcaggcatacagaaaccaaaaaaatctaaaattaagaggaaaaaagttgacattagaaaaaaaaatcctcaggagaataaaatatttttatcagacagagaaagaaaaaatgtagtatgttcaagagaatagatgatttgatgggcaatgtcaacagaaaatataaatcaatggaagacagaaatacactgaaattctagaatgtaaaataaaataatcaaaattaagaactcaatatatgagattaacataaattaatgccactgtggagatacttaatgaactgaccaataggtcagtatatcaagactaagatatggaaagaaaataaaaagtaaaaattcagacaaaaaaatgtaagagacatatgagacctagccaatggtctgccatatttgtaattggtgtttctgaataagggaagagagataaaaggagagaagaaatatttaaagatataagattagagagctctcaaaatctaatgaaagatatcaaagcacagacacaagaagtttaaaaacactaagcaggataggtaaaaggaaaacatgacagggatcacagcaaaactgctaaaaactgaagaaatgagaatgttttcaaaggagccaatgtttcctgtttttttgttttgttttgctacatgttactttcaaaggagcaacaagacctctgtgcacaaaactacttattactattaaaataaattacaacctgcaagaatggaagaatttttacatttatgaatgagagggctcagtattttaaaggttcagttttccttaatttgacctatcaactcaatgaagtttcatttaaacagtgaactataaaatcaaagggccaagcaagcaaaaacaattgtgaagaatagagccaattggcacacaccaccaaacaccgccacagtaattaagacaatttggtattggcattcagagagacacatagattaatggaaaagaaagaagagttcagaaataaacctactcttatgcgacatttgaaat

SEQ ID NO: 670165 - DNA, 2571 bp, Homo sapiens
ccagacacattcaaatacatttgatggttgaaataattactgaagtatgctctttaaaataacattgctaacacactgcacagtaacaccggtcaagcacagtgtggcaagttactgaatttgaatataatttgttttctgtgaattctacatattttattttacacatgtgaaaatattgttttaagaaaggatctatagactttatgaaactgccatgggagtccatggcgcaagaagaggttaaaatcccgtactaaaacgcaagctccaagactttttctcttatgttctttgcaattgctcatctcttctgctcaagagtctaccacgtggtgggatttgattaatttcaagaataacctaaggccagataggacttggttatttacatcctctcctcaccctggcattcagctcctcactttccctgagggccacctttcctttattcaccataggtggcatattcattaaaggaattgcatcccttcgaatgactgaagataacattccggaaaatcctgccaacaggtaagggcttttctagacacaatgccaaaccttcaatacgtccctgttaggaggaaacagcattaaaaagcaaaaaccccaaactgaaacattctaacaagaaacaaacctgacaataacaactcatgctttggagacttccatgttgtttttataccccccctcccccaatgaaagaaacatcacattgcattctgaattgacattttcgccgtttaaagaacactgagacaaactaccttctcagaacagatctcaagacttccaaaatgacgaatttttctctactgaaaagtccacccttctggcaccagaggaaggctggaaaacctctggcaccagaggaaggctcttagggcgccccttgctctactagttggattttaaaaaatgtgactacttcctctattgagagaaaaagtcatagaaaaaaacatagttttatacagtgtggttcatttcaagaattgcaaccaaaataaatgaattaacatgctgcagcaagtcttaagtggtgaccacaccactactccagctatgtgtaggctttctaatgtacatgtcatcttcccaacctctagaaaaggcacaataagcacttccaaacagaccaaaaggacccagtaatggcagtactctttttctttctttttgagtcacagtttcactctatcgtccagactggagtgcagtggtatgatcttggctcactgctgcaacctctgcctcccgggttcaagcgattctcctgcctcagcctcctgagtagcttacaggtgcttgccaccacgcctggctaatttttgtatttttagtagagacagggttttaccatgttggccaggctggtctcaaactcctgacttcaagtgatctgcctgcctcggcctcccaaagtgctgggattacaggcgtgagccactatgcccagctggcagtacctagttccttatgatgggaaaaaatgatgggaaaggggcttttctaaagaaaatcacattaaacctgataaatatctgattaatagtgtcctgatatctgattaataaattccctagggtctattttttaaaatacctatattttcttataaacatttcaagaaaagagaactaacatctactgattttgtattacttccaggtggagggcttgttgcctgacaaatatcccatttgaattttcccaacaacccaatgaagggttgcaatattagggagggtcaagcttagaggggttaggtgatctccccaaagtcacatcctttccatcataatatgcagctcgtgagctcatggaatttccccaattttagcatttcataccatctttatgattctattatttgctcaatattattctttaaattggctgacttaaaagatgaaataaatttattcaaaaagcaaactttgcattgttgctagtaatgaagaaataataccacttgccatggattgaaggtaattggaaatgtaaatacaatgaaaagaggaacatgtcagcacattttggccaaatgtggttgtcagtaaatatctggggcccaaggctgactctctgcttaaactggaagcttgcaaggattggaggtataataaagccataattagtaccaaaaagagaggttgtctttggatagtcagaaggattgagagagaagtgaaaagaaaagaactccccaaccatgtaattcaatgttatttaattccatgacccagaaccacctaaaatcatctcctgaaccactggtggtacttgtctcatgcttgggaaaacatgatacaacgtactgtattgtagatagctttgacagatgttgttggcagattcctttggcctatgcaggatgtcatctgaagtttttgtaccattcccttgcatgcagctggcttctgaactcttgaggtctttctgtggcccataagagcctgcgtggctarcatgacggagggccaggcctgaagtggagagttaaatccccaagaacagccatcacatcatgagttggtggataaataccctgcttccttatgc

SEQ ID NO: 670166 - DNA, 627 bp, Homo sapiens
tctaccatagcgagtaactgaaactgttagggcctgcaatgtagcatattttcatttctgtataaaggcatccttactgatatatagtccatacatatttgggtatctcctatactaatcgattaaggcattcttgatacctagaggacataaagaccagcacaatatgcaggacagcggcaatccactagaccagaaagaagctccatattacagacaccaggaaatgtttctaaaccagagatttccctcagtcatctgcaccagaaatccttagagctgctagttaaaatgtaaattcctggggcccaattaaacatgcagaatcagaattcacaggggtgaggtctacaggcctccaatttaacaagatgaccaggtcatttttgtgcatagaaaaatttaaaaatcattgtccaagaaggacttaaattgagtaacaataactaaatcgaataactggatgctttttagaacctgtctttttgaagtgacacagctgacacagtagaatacaaagaggagtaacacaggtaccctctcctcaagaacacagtgtcacragcagagtagagatgagtaggaggagaaacagcagaaaggaaggagggattagctctttaagac

SEQ ID NO: 670167 - DNA, 1202 bp, Homo sapiens
aatagcatagactagatttaacatacactagaaatctttaatttactagaaataatatagactagaggtctgcaaactttttcttcaaagggccagatagtaaacatttttatctttgcaagccatacactatctaactactcaggtctgttgtaataccaaagtagtcatagaaaatatataaacggacaagcacggctgtgttccagtgaaacttgatttacaaaaacagacaatgttctatagttaggtaaccccttttatagaccagagtttgaacacccctacaggcttctttagctgaggtgtcaattgtttgcattattttaatgtaattttagttcatttgtgtatgaactactgttcatacacaaatacgaatgtcatagttaactgaacaaacatttttgaggccccattctgcatcaaataatgtgcccaagctcagaccatgctttaaaccattgtagaggaaaaagcctgtgtcccaaagcttcattaaatttaagtgattcctcagataacacactagagaaatgtctattaggactccaaatgtacataaagatgacctgatggcaacaggaagctgtgttctggttttttttttctgaaagtttggatgtatgcatcccaggatctatattagccactctaaaaactaaccccaaggccttcttttgctttactctattagaagtttactttgcttgtgttgtggtttgtttgttggtttttatatcttaacagaaatatggagatagattcatatataaacttaataaaatttttgtatgattttctcttgaaatgcactattatgatacttttcaaacttgacagtccttattgaggcaagagctagaagcaaaaacactagttacaactgagccttgaaattttattaagccttcagatttgcttgtawgctttgagaagccgtctatcagggttgcttttacactctaatcttgccattcaaatcatgaatgtaaacagacgcagagaaagctatattaagggccaagttgggggaaggagtaattgctttcaacgccattttagaagaatttcttatcaatgataattgtaaacaagaaggtttcagcctttaaataatcaaacacagaagtgtcttctttggatgtataaatagtattgtctcattttaaagataatcttatagctgtaataaggttttg

SEQ ID NO: 670168 - DNA, 1202 bp, Homo sapiens
aatagcatagactagatttaacatacactagaaatctttaatttactagaaataatatagactagaggtctgcaaactttttcttcaaagggccagatagtaaacatttttatctttgcaagccatacactatctaactactcaggtctgttgtaataccaaagtagtcatagaaaatatataaacggacaagcacggctgtgttccagtgaaacttgatttacaaaaacagacaatgttctatagttaggtaaccccttttatagaccagagtttgaacacccctacaggcttctttagctgaggtgtcaattgtttgcattattttaatgtaattttagttcatttgtgtatgaactactgttcatacacaaatacgaatgtcatagttaactgaacaaacatttttgaggccccattctgcatcaaataatgtgcccaagctcagaccatgctttaaaccattgtagaggaaaaagcctgtgtcccaaagcttcattaaatttaagtgattcctcagataacacactagagaaatgtctattaggactccaaatgtacataaagatgacctgatggcaacaggaagctgtgttctggttttttttttctgaaagtttggatgtatgcatcccaggatctatattagccactctaaaaactaaccccaaggccttcttttgctttactctattagaagtttactttgcttgtgttgtggtttgtttgttggtttttatatcttaacagaaatatggagatagattcatatataaacttaataaaatttttgtatgattttctcttgaaatgcactattatgatacttttcaaacttgacagtccttattgaggcaagagctagaagcaaaaacactagttacaactgagccttgaaattttattaagccttcagatttgcttgtatgctttgaraagccgtctatcagggttgcttttacactctaatcttgccattcaaatcatgaatgtaaacagacgcagagaaagctatattaagggccaagttgggggaaggagtaattgctttcaacgccattttagaagaatttcttatcaatgataattgtaaacaagaaggtttcagcctttaaataatcaaacacagaagtgtcttctttggatgtataaatagtattgtctcattttaaagataatcttatagctgtaataaggttttg

SEQ ID NO: 670169 - DNA, 1202 bp, Homo sapiens
aatagcatagactagatttaacatacactagaaatctttaatttactagaaataatatagactagaggtctgcaaactttttcttcaaagggccagatagtaaacatttttatctttgcaagccatacactatctaactactcaggtctgttgtaataccaaagtagtcatagaaaatatataaacggacaagcacggctgtgttccagtgaaacttgatttacaaaaacagacaatgttctatagttaggtaaccccttttatagaccagagtttgaacacccctacaggcttctttagctgaggtgtcaattgtttgcattattttaatgtaattttagttcatttgtgtatgaactactgttcatacacaaatacgaatgtcatagttaactgaacaaacatttttgaggccccattctgcatcaaataatgtgcccaagctcagaccatgctttaaaccattgtagaggaaaaagcctgtgtcccaaagcttcattaaatttaagtgattcctcagataacacactagagaaatgtctattaggactccaaatgtacataaagatgacctgatggcaacaggaagctgtgttctggttttttttttctgaaagtttggatgtatgcatcccaggatctatattagccactctaaaaactaaccccaaggccttcttttgctttactctattagaagtttactttgcttgtgttgtggtttgtttgttggtttttatatcttaacagaaatatggagatagattcatatataaacttaataaaatttttgtatgattttctcttgaaatgcactattatgatacttttcaaacttgacagtccttattgaggcaagagctagaagcaaaaacactagttacaactgagccttgaaattttattaagccttcagatttgcttgtatgctttgagaagccgtctatcaggrttgcttttacactctaatcttgccattcaaatcatgaatgtaaacagacgcagagaaagctatattaagggccaagttgggggaaggagtaattgctttcaacgccattttagaagaatttcttatcaatgataattgtaaacaagaaggtttcagcctttaaataatcaaacacagaagtgtcttctttggatgtataaatagtattgtctcattttaaagataatcttatagctgtaataaggttttg

SEQ ID NO: 670170 - DNA, 1202 bp, Homo sapiens
aatagcatagactagatttaacatacactagaaatctttaatttactagaaataatatagactagaggtctgcaaactttttcttcaaagggccagatagtaaacatttttatctttgcaagccatacactatctaactactcaggtctgttgtaataccaaagtagtcatagaaaatatataaacggacaagcacggctgtgttccagtgaaacttgatttacaaaaacagacaatgttctatagttaggtaaccccttttatagaccagagtttgaacacccctacaggcttctttagctgaggtgtcaattgtttgcattattttaatgtaattttagttcatttgtgtatgaactactgttcatacacaaatacgaatgtcatagttaactgaacaaacatttttgaggccccattctgcatcaaataatgtgcccaagctcagaccatgctttaaaccattgtagaggaaaaagcctgtgtcccaaagcttcattaaatttaagtgattcctcagataacacactagagaaatgtctattaggactccaaatgtacataaagatgacctgatggcaacaggaagctgtgttctggttttttttttctgaaagtttggatgtatgcatcccaggatctatattagccactctaaaaactaaccccaaggccttcttttgctttactctattagaagtttactttgcttgtgttgtggtttgtttgttggtttttatatcttaacagaaatatggagatagattcatatataaacttaataaaatttttgtatgattttctcttgaaatgcactattatgatacttttcaaacttgacagtccttattgaggcaagagctagaagcaaaaacactagttacaactgagccttgaaattttattaagccttcagatttgcttgtatgctttgagaagccgtctatcagggttgcttttacactctaatcttgccattcaaatcatgaatgtaaacagacgcagagaaagctatattaagggccaagttgggggaaggagtaattgytttcaacgccattttagaagaatttcttatcaatgataattgtaaacaagaaggtttcagcctttaaataatcaaacacagaagtgtcttctttggatgtataaatagtattgtctcattttaaagataatcttatagctgtaataaggttttg

SEQ ID NO: 670171 - DNA, 1581 bp, Homo sapiens
ttttatcaacaataggataagaccctagagttcaggttctttctctgttaaaggattcataaatctgtatggacagcatggaccacagacatactggtttccattgtctcataatagtgaaaataatagtgactgacatttattgagttccaagcacttgcaatgggaactttatagtattacattttttacctcattgaagtatattatgcatatagaaaagtacatattataattgtacagtttgatgaaatgtatagtatacatattataattgtacagtttgataaaatgtacagtatacatattataattatacagtttgatgaaatttcagaggttgaactcacctataaccagcattracatccagaaacagaactttgctaacaattctcaagcccccatcatgcctctttatattaataatttctacccccaaggacatatttgataaaacaaccccataatgtaagtatcattatctcctgtttaattaaaatatagaaaagtcggctggccgcagtggcttatgcttataatcccagcactttgggaggcctaggtaggtggattgcttcaggtcagaggtttaagaccagcttagccaacgtggcaaggccccaactttactaaaaatacaaaaaagaaattagccaggcatggtggcgggcgcctgtagtcccagttacttgggaggctgaggcaggagaatcgcttgaactgaggaggcagaggttgcagtaagccgagatcgtaccactgcactccagtctgggtgacagagccagactccatctcaaaaaaataataaaaataaaaaatatatagaaaggtaaaaaaaaaaaatgctgaatagctgggccagtattttcacccccactatgttgaccctctatttcatagtaaaaattggtcatttattgaatacctatcatgtgctccatttctcacaaacctaaggcatgagatttatgaggaatggcactgaacaactcaggtaactgaacaattgacctaggtatcaatatggagttttctcttccacttaccagcctcccctactctaactccatctatccatgagccctgcctctaaaatatatgtcaaatcaacgcatatatccctatctacctacctacactagcataagccactgttgtctctcaccactgtgactgcaataatctcatctggtctccattcattcttgctcttttatacagtacgaacccttcaacatgtaattcaaatatcattccttccctgataaaaaacattccagtagcttcccactaaactcagaataaaatccaagttatttaacttggcctataagattctgcgtgatctggaacctgtctccatctttgttatccagtcttgtcacgcttccctaattcacttcatttcagccaactaatcacttttctgttcctaagtaaaccttattcttccattctttgcatttgctgttccctctttctagaatattttgcccacagcattcacatggctagttacatgtcacttcaggccccagaggtactctttcccattaactcttaagtagctaccaa

SEQ ID NO: 670172 - DNA, 1352 bp, Homo sapiens
tacttttctggtaagtagtaccctttacaaacacattaaaaactgtacttgtcgtgtacccaaggcctttgctaaagtcattttctgtagtgtcagagggccagaattttgttcttggcagtggtgaaatagtaccacaggctctagttctttgaatgttcctgtcagaattgtaatggaattattgaaagttcaataatttttcttcttttatgtgctgtagcttatttttattacaaggaaattttaagttacagaagcaaaaatatgatattaaatactatcaacaaataataaagtcattgagactgctatatgtttttgccttggcacatacatctttttttacttcaaaaacttgaccaggttctattgaattcttccacagagataagttaattttacatagtgtttaggatatcaacaatttttgtggcccttgtaattcttggttatagtttaaaaaaagagagactgtgttacttgagatayttacttctacattttaaaataagggatgagtatcttgatgttattactggtaattttgagaaaagaaaaatatatgttcaaactttattaaataaacaggaatactagttccctctacctctcaagttacttttaattggaaagtattctccttatataattttactctgaactgtcctttaggtcttgtgataatggtcactgtatgctgaatggaacacatggtccatcttcagagaagaaatcaaacatccctgacttaagcatatatttaaagggtacgtatagaatataatttcctttgtgatgtacatcttaatggtcagaatttaaaggcaaaatttcatgccattgtactgaaaatacattaaggttttgtgttatcctctaggagatgtttttgattcagcctctgatcccgtgccattaccacctgccaggcctccaactcgggacaatccaaagcatggttcttcactcaacaggacgccctctgattatgatcttctcatccctccattaggttgaaacctttaaaaaagttttgaacaacccacccctccttcttttaatttcagaattttcagaattcagagttcagtataacacagactcactgggttgtgaatttgcctgaaatttgaatgggttctccaggtgccggtgactcccaagttcacgagaccattactccatgtagatgattaaggtagtagtgtagtagttgggcatcagtcaggttttaagcaagttgttttgtccatactaaatgtagtctaaaaacacatgagagctttgtgctctagtagttttgaagtgatgacttgaagtgttgagattttctttaagtataataattc

SEQ ID NO: 670173 - DNA, 631 bp, Homo sapiens
gaagtttatttttatttacctgttgtgtaacatattttaatgatagcttcccaatacttaaaggcttttctgatgtgattggtggtgatagtaactactgtgagttttttgatattataaaatatgatgatttaattttcataatacattgaatcaatatacttcaaatgactaatgcatgggggaagatccattcaaagtgtaagatacaccaatggattttaatgaaacagatttgaaaagttcactgatacagtttcaggttctactttgcgactaacccttaatacattaccccttgtagagttttggtgtagtatcaaagaagaatagccacaaagctattaaaattcttcctccctttttcaactaaatatatatgtgaagtcaacttttcttcatatatttcagcctaaacaatgtatcacagcagattgactgcagaggcagatatgagaatacagctgtctcatattaagctggccattaaacaaatgtacmgaaatgtaaaataatgccactctttttactatttttttcttggaaaatataattgttttccataaaatactatttcaggtaaatatataataggttttgttgttattttaaataaatagataaatactta

SEQ ID NO: 670174 - DNA, 590 bp, Homo sapiens
tgccattggagagggtggggttatcctcagtggccatagctggtagaaaacacaggtctgtctcatactccaccactaccagtggtagcctgagcctagctcaggccctagccctggctacaggagtgtccacccagctggcatccatgtctcagtgtcaacttgcatcctgcttgtgtctcagtctctgtcctagcagtgcttgcttcctggcagtggccgctacagcccacacctcacttgcttcttagccttggctgtaggaacattctcggcttgctcctcagtcccatcagggacagcccaagtttccctaacacctcagactcaacgctgcygcaccccaggacaacagaaagcctgtcaaaagctaggtttaaaaatggcaccttgctgtagccacttaggtctcagaaagggtgtgggacccagtgcaagctccctccctggagcagttccttctttctgcagtctattggcaactccctatgatagtttcaggggttgagaataataaggggttctcctatagtcaggactgcataattccatgatagtgatgtgggccattggatgtgtcttgctcacct

SEQ ID NO: 670175 - DNA, 590 bp, Homo sapiens
tgccattggagagggtggggttatcctcagtggccatagctggtagaaaacacaggtctgtctcatactccaccactaccagtggtagcctgagcctagctcaggccctagccctggctacaggagtgtccacccagctggcatccatgtctcagtgtcaacttgcatcctgcttgtgtctcagtctctgtcctagcagtgcttgcttcctggcagtggccgctacagcccacacctcacttgcttcttagccttggctgtaggaacattctcggcttgctcctcagtcccatcagggacagcccaagtttccctaacacctcagactcaacgctgctgcaccccaggacaacagaaagcctgtcaaaagctaggtttaaaaatggcaccttgctgtagccacttaggtctcagaaagggtgtgggacccagtgcaagctccctccctggagcagttccttctttctgcagtctattggcarctccctatgatagtttcaggggttgagaataataaggggttctcctatagtcaggactgcataattccatgatagtgatgtgggccattggatgtgtcttgctcacct

SEQ ID NO: 670176 - DNA, 1267 bp, Homo sapiens
tatatatacatacatattatatgtattataatatatacatatatgattatgtattcatatatacaatatatacatatatattatttatacatatatactatatatacacatatatacrattatatattatcatatatgtgtatatacctgtatatgtacgtatatatatacctgtatatgtacgtatatatatacctgtatatgtacgtatatatacacctgtatacatatacatatatatgcatacatgtgtatatatatatgcatacatatatacacacacacacacacacacacatatatatacctgttcatccaccaaaatataaactctgatgaaaaggttcatatcttatttatccttgtatccctcagtgtctggcctagtgcctggcatatgtgtagaatttgcctcatctggttctttaggaaattgctccaacttgtgtgtgtgtgtgtgtgtgtgtgtgtgtgtgtgtgtgtgtataaatagcatttagaatttcggaagacactgctactagcctgggctcagaagtttaattcaagagattaaagtgtcagctaaaaaaaattcacttgaaaagaatattcatataactcagacaacccttgagataaatgatccctgattctgtgtgtgggattgatgggaatacagatattttagaaatgatcatattggcagtaaaacaacacagtttcaggcataatggcatatgggctttggctagtaaaatagaaagtaatagactggcctgagaaacatagttgacagtaccagaaaaataagtttataggttagatggaagaataaaaagaatgtgaattttaagcttataatgtggcaaattgaagtatcttctctgctaagaaaccatgtaattatctgaaggtcaatcagaatggtcctattaagccaagtccttcctacaaatattcctgggtatggtactttctatcaacccataatgacagctgtcatttaaaaagtgcaaaactgcactacacaattatactaagtgcttgcaagtatgaataattgcctaagaatatggtgatttaagggtaggtaagtctgaaggcagaagagagaccaaatgacttgtaatggtcttctttatcctcattgagacactgctattatcatttttaatagacaaaaacaacataagctatttttataaagataatatcatattcacatttgccatagtctggtaaattctcttttttgaaaggaattaaagttcttattctccacttt

SEQ ID NO: 670177 - DNA, 1267 bp, Homo sapiens
tatatatacatacatattatatgtattataatatatacatatatgattatgtattcatatatacaatatatacatatatattatttatacatatatactatatatacacatatatacgattatatattatcatatatgtgtatatacctgtatatgtacgtatatatatacctgtatatgtacgtatatatatacctgtatatgtacgtatatatacacctgtatacatatacatatatatgcatacatgtgtatatatatatgcatacatatatayacacacacacacacacacacatatatatacctgttcatccaccaaaatataaactctgatgaaaaggttcatatcttatttatccttgtatccctcagtgtctggcctagtgcctggcatatgtgtagaatttgcctcatctggttctttaggaaattgctccaacttgtgtgtgtgtgtgtgtgtgtgtgtgtgtgtgtgtgtgtgtataaatagcatttagaatttcggaagacactgctactagcctgggctcagaagtttaattcaagagattaaagtgtcagctaaaaaaaattcacttgaaaagaatattcatataactcagacaacccttgagataaatgatccctgattctgtgtgtgggattgatgggaatacagatattttagaaatgatcatattggcagtaaaacaacacagtttcaggcataatggcatatgggctttggctagtaaaatagaaagtaatagactggcctgagaaacatagttgacagtaccagaaaaataagtttataggttagatggaagaataaaaagaatgtgaattttaagcttataatgtggcaaattgaagtatcttctctgctaagaaaccatgtaattatctgaaggtcaatcagaatggtcctattaagccaagtccttcctacaaatattcctgggtatggtactttctatcaacccataatgacagctgtcatttaaaaagtgcaaaactgcactacacaattatactaagtgcttgcaagtatgaataattgcctaagaatatggtgatttaagggtaggtaagtctgaaggcagaagagagaccaaatgacttgtaatggtcttctttatcctcattgagacactgctattatcatttttaatagacaaaaacaacataagctatttttataaagataatatcatattcacatttgccatagtctggtaaattctcttttttgaaaggaattaaagttcttattctccacttt

SEQ ID NO: 670178 - DNA, 675 bp, Homo sapiens
tgccggcgaatataaagcaggcagaaaaaagtgaaaggagagactggcctagcctcccagcctacgtctttctcccatgctgaatgcttcctgtccttgaacatcggactccaggttcttcagttttgggactcagactggctctccttgctcctcagcttgcagacagcctactgtgggaccttgctatcatgtaaattaatacttaataaactcatatatatatatatatatatatayacacacacatatatacacacacacacacacactcccatgtatatgtgtatatacacacacacacacacacacatatatatcctattagttctgtccctctagagaaccctgactaatacaagtgtaaatatttattttcctatcttttcaaatagcttgaagtgctacaagcatctgtttcttgtagtgcttcaaactatttgaagataaaaaatttatatataaaatccaccaatcaatctggatttatactgatttggaagggggaatatctccatgataaagtttttgaatttttttctttagcaattggtctgtgttctcaaggatcagtttcactcatttctattttcctagaaaaatactgatttcgtgtaggatttaaaatttatttttataatgttgaaaaaactaaccttatgcaattcttttaat

SEQ ID NO: 670179 - DNA, 656 bp, Homo sapiens
ctccatacaaattgcatgagtatctagatcctcaacccttctagcaggagactgaagattaaactttccacatctctagagatgaatttttagtttgaaatagcttctctaatttagagttactgagaagcgctttactacatggggttccatagaatagttcttgggtattcacaccttcctgggaatgcatgtcttctcttatccttccttaaaggacaaaccatcattccggagatgtagccttaacttttggacaatctgtatgattatgtagccatgttcacaggcaactggaacatcacctatgataggacgatcttggatatgatccctgacctagacttatcatttcttttgtttttttttttgagatggaatttcgttcttgttgctcaggctggagtgctattttggctcaccgcaacytccatctcccaggttcaagtgattctcctgcctgagcctgccaagtagctgggattacaggcaggtgcaaccatgcctggctaattttgtatttttagtagattccgggtttctccatgttggtcaggctggtcttgaactcccgacctcaggcgatccgtgtgccttggcctcccaaagttctgggattacaggtgtgagccactgtgcctggcctagactcatca

SEQ ID NO: 670180 - DNA, 656 bp, Homo sapiens
ctccatacaaattgcatgagtatctagatcctcaacccttctagcaggagactgaagattaaactttccacatctctagagatgaatttttagtttgaaatagcttctctaatttagagttactgagaagcgctttactacatggggttccatagaatagttcttgggtattcacaccttcctgggaatgcatgtcttctcttatccttccttaaaggacaaaccatcattccggagatgtagccttaacttttggacaatctgtatgattatgtagccatgttcacaggcaactggaacatcacctatgataggacgatcttggatatgatccctgacctagacttatcatttcttttgtttttttttttgagatggaatttcgttcttgttgctcaggctggagtgctattttggctcaccgcaacctccatctcccaggttcaagtgattctcctgcctgagcctgccaartagctgggattacaggcaggtgcaaccatgcctggctaattttgtatttttagtagattccgggtttctccatgttggtcaggctggtcttgaactcccgacctcaggcgatccgtgtgccttggcctcccaaagttctgggattacaggtgtgagccactgtgcctggcctagactcatca

SEQ ID NO: 670181 - DNA, 583 bp, Homo sapiens
ccaattaggaaatggaatctattcccctgaaacacactctatctccttagaatctggcctggccctgtgacttgatttgattatgagtacctcctcattatagccagtggtacacaaagtgtggtcactggagcagcagtttgaatatcacctgaaaagcacatattttgaggagctatcccagacctaccaaataagaaactctgggagtagggcacagtgagcattttttgacaagtctttgaggtgatgttgatgcatgctaaagttttagaatagctgtccaagccaatggcagttggtccaagggggtggttagataaactaagcaggatatttgagtcttttgctatgattatataaaccctaggaggaagaagctctcattttctgatggcattgctaagctagtataatataacctggagctattggcagccactttctgtctctttgcagaaaaagtgcccctagagtaggacagaataagactgacacatagacargagaaagcccagacaactttgtgtgaacccttaatcccattgtgcctaaagtccctgattagccgttgacttctcag

SEQ ID NO: 670182 - DNA, 583 bp, Homo sapiens
ccaattaggaaatggaatctattcccctgaaacacactctatctccttagaatctggcctggccctgtgacttgatttgattatgagtacctcctcattatagccagtggtacacaaagtgtggtcactggagcagcagtttgaatatcacctgaaaagcacatattttgaggagctatcccagacctaccaaataagaaactctgggagtagggcacagtgagcattttttgacaagtctttgaggtgatgttgatgcatgctaaagttttagaatagctgtccaagccaatggcagttggtccaagggggtggttagataaactaagcaggatatttgagtcttttgctatgattatataaaccctaggaggaagaagctctcattttctgatggcattgctaagctagtataatataacctggagctattggcagccactttctgtctctttgcagaaaaagtgcccctagagtaggacagaataagactgacacatagacaggagaaagcccagacaactttgtgtgaacccttaatcccattgtgcctaaagtccctgattagccrttgacttctcag

SEQ ID NO: 670183 - DNA, 1278 bp, Homo sapiens
tggatctcatgtaagaaagaattcagggcgggtctgcagtgcaaagtgaaagcaagtttattaagaaagtaaatgagtaaaagaatggctactccatagacagagctgccccaagggcagctggttgcccatttttatggtttttttttaaatgatattgctaaacaaggggtggattattcatgcctcccctttttaggccatatagggtaacttcttgacattgccatgacatttgtaaactgtcatggtgctggtgggagtgtagcagtgacaacgaccagaggtcactcttgtggccattttggttttggtggctttgggctggttcctttagggcaaactgttttatcagcaaggtctttatgagctttattttgtgctgacgtcctgtctcatcctgtgacttagaatgccttagcyatctgggaatgcagcccagtgggtttcagccttattttacccagctcctgtttaagatggagttgctctggttcacacgcctctgacatttgcatccactgttgtatgtatttcctgacctaatgacaatgaggaccaaactgagaacaccaaaactgtgaccactagatacagaaatcctgccccaggcttgcctgaggacatctttgaaataacactgtgcctgtaaagttatctgtgagtgaatagttctgtttttgtttttcgtgttagtaacttagggttactgttagggtgctgcaaacgtacttttggatcaggcagaaacggggtaaatgaagttaacattgtaaaatactaacttttcaattgcagaggttaatttacaagttgatgttcaattttgttttatttagttttggttgttttcctcaaccgttcatgtatggaaacattctggctctgtccacccaggaacccagaattcttcaccctctgaacccctggatttgtttttaaaataatctgtgcatacctgctgtttgttttgttcttaacttcattgtattatggggctttataaacagaaagatgagttaaaaatataacaaaacaaattgttcaccaaggctgcttttgccctttgtctgtgtgggaattcaccatgatcctcagctgagcagcttttaaaatccagtgagcaccctcttttcttttcttttttctcttttcctttcctttcctttcttttctttcttttctctttcctttcctttcttttcttccttttctctttccttttcttcctttcctttctcttcttccttttctctttccttttcttcctttcctttc

SEQ ID NO: 670184 - DNA, 1704 bp, Homo sapiens
gcatatgtatatagaccaaaactttattttatagcaaattcttgtacctagcatgaattatgtaccacatataggttttttatcaaaactgacagagaagggtaataaatcacatttaccttaaaaacccaactcacccatttaattttgtgttctttcttcttatacttaacaataaagtggttaataaacaataaaagagatggactttggttttaaaaaatgaagctttctataatttaaagaagttttatagaagacatgtttcctaacttcctagatttcccctctggtttattaaaaaacatgacataaaaaacatgataaaagccgaacaattattagtcactttctatcatttcagttgaattataaaattttttttctccagacgcttgtaaataatgtctgtttttctatatttgtctactatagacgttgtggagaaaatataataaagggaaaatgagaatggggggaaagcagaaaaaataacaccactctcaaatatgggagcagctgcttctcagatgtatggtggagtttccttggaatcaagcagaatttgagaaagtctgcctctgtctcttgttacatggctcttgtcatgaaggataaacaaaaaatgaactcagtgcagctcaagagaagagtttccttttcttttcttttcttatcctacttaccttttctgagttaaagccagcagatagtaactcagattaaaacccactctctagatataaacaacagtgctgattaaatggatcactttgccaagggagatgcagccagagtgcccatttttcattcaaatgttccaggcttgtagaagtagcttccagctctaaatatattgaatcaccattaacctactggagaaaataggaatacgaacacacgctttcttattagatgagcatggcaggttttctgataatgcaaacaattaaatggaagaatttatatctctcagagtcttgacaaaattccttctgtcagtgaatcacaattcctctcccttagagcagcctaactggaatcttgaggtgggaatcctttggagtttagggatgtgtgctgatttgtttgttttggatattggttagagtgctcaataaggagtaaatgttacaagtaggtccctgtcactcaaagaatgatcagaaccaccagtatccagtattatgtggcatttgttatagctgcagaatcttgagttcctactgaactagaatctgaatttttaaagatccccaggtgatttgtatgcacattaaagtttgaaaagcactgttctagcagtggttcttatactttaccatgcatcagaatctcttgaagggcttgttaaaatgtagactgctgatccctatccatagagattctgattcaataggtttggggtgggatttgtgtttctcatatgttcccaggtgatattgatgctgctggtctagagactacactgagagccattgctctagggcaatgctgcctgatggaattataagagccacatatgcaattaacagttttctttatttttccttttttttttttgagacggagttttactcttgtttcccgggctggagtgtaatggtgcactctaggctcgctgcaacctccgcctcccgggttcaagcgattcttctgtctcagcctctgagtagctgggattacaggcatgctccaccrcgc

SEQ ID NO: 670185 - DNA, 1262 bp, Homo sapiens
cagttccctaattatcaaaatgatgtaaacttattaatgtaacaatgaaacaatcatccatagtgtcatttcccaggaataaccactgctactactttaatttttttctttccaaatggaaygaatgtgtaatttttggttttgtttttaaacatcagcattgtagggggtctatgatctgacgtttgctcccgactggttcagtgtcattacatccgaagtgggtcttacttttcttggggctttttaatcctaaaacctacttagagaagtggagtgcaattattattaattcatctcctttcttatgcttaggaagataaacctgcaccaataataaaagtcaaaatgttccttagccaagtcatgttgatacatgaaagttttctctaatttatttactcaaagcagagctttatagactaaaacatgttcattatgactaatagtcttttcctaaggcaagataatcacaacagtgtccttaggaaatcctctatataattggggtcaaactcatattcagttttgtgtcagtgttttcactaaactttgcattaccagcattttccatgtcaataaatatttttcaaaaacattatttttaattgcttcaaataccattatttacttaatgaccttccagtttttggatatttgggttgtttgcatgttttaaacacttttttttgcttttataacactgtggcaaaaacacttgaatataaacctttcaccttaagatgatttccttgagaatatatgccttaaggatccagtaacctcttaattggcctctattacttcagagtttatctcctgcccgttgctgccagatgaatcttcctaaaacattaattatgttgtatcatttcttgctcaacagcccacaatgacttctcattgcctagggaaagaaacttccaaattctttagcttggggattgaggtacttgacagtcttgtttctttcaatttctataatcgattttacccaaagtaactgggctctttggatggctttgctctcacctagaacccacctagaggactttcactgttatcttcaaccttgcctcccttattttctgttccaaatcaaacacataatacagcttcatctccaatgctgatgtatgggttacactgcctatcagaaaataaaatattttaattcattcttaaacatctcagttatttccccaaagtttctctccttttagttgatgccacatctatttctttttcttttcttttttttt

SEQ ID NO: 670186 - DNA, 1262 bp, Homo sapiens
cagttccctaattatcaaaatgatgtaaacttattaatgtaacaatgaaacaatcatccatagtgtcatttcccaggaataaccactgctactactttaatttttttctttccaaatggaatgaatgtgtaatttttggttttgtttttaaacatcagcattgtagggggtctatgatctgacgtttgctcccgactggttcagtgtcattacatccgaagtgggtcttacttttcttggggctttttaatcctaaaacctacttagagaagtggagtgcaattattattaattcatctcctttcttatgcttaggaagataaacctgcaccaataataaaagtcaaaatgttccttagccaagtcatgttgatacatgaaagttttctctaatttatttactcaaagcagagctttatagactaaaacatgttcattatgactaatagtcttttcctaaggcaagataatcacaacagtgtccttaggaaatcctctatataattggggtcaaactcatattcagttttgtgtcagtgttttcactaaactttgcattaccagcattttccatgtcaataaatatttttcaaaaacattatttttaatkgcttcaaataccattatttacttaatgaccttccagtttttggatatttgggttgtttgcatgttttaaacacttttttttgcttttataacactgtggcaaaaacacttgaatataaacctttcaccttaagatgatttccttgagaatatatgccttaaggatccagtaacctcttaattggcctctattacttcagagtttatctcctgcccgttgctgccagatgaatcttcctaaaacattaattatgttgtatcatttcttgctcaacagcccacaatgacttctcattgcctagggaaagaaacttccaaattctttagcttggggattgaggtacttgacagtcttgtttctttcaatttctataatcgattttacccaaagtaactgggctctttggatggctttgctctcacctagaacccacctagaggactttcactgttatcttcaaccttgcctcccttattttctgttccaaatcaaacacataatacagcttcatctccaatgctgatgtatgggttacactgcctatcagaaaataaaatattttaattcattcttaaacatctcagttatttccccaaagtttctctccttttagttgatgccacatctatttctttttcttttcttttttttt

SEQ ID NO: 670187 - DNA, 1262 bp, Homo sapiens
cagttccctaattatcaaaatgatgtaaacttattaatgtaacaatgaaacaatcatccatagtgtcatttcccaggaataaccactgctactactttaatttttttctttccaaatggaatgaatgtgtaatttttggttttgtttttaaacatcagcattgtagggggtctatgatctgacgtttgctcccgactggttcagtgtcattacatccgaagtgggtcttacttttcttggggctttttaatcctaaaacctacttagagaagtggagtgcaattattattaattcatctcctttcttatgcttaggaagataaacctgcaccaataataaaagtcaaaatgttccttagccaagtcatgttgatacatgaaagttttctctaatttatttactcaaagcagagctttatagactaaaacatgttcattatgactaatagtcttttcctaaggcaagataatcacaacagtgtccttaggaaatcctctatataattggggtcaaactcatattcagttttgtgtcagtgttttcactaaactttgcattaccagcattttccatgtcaataaatatttttcaaaaacattatttttaattgcttcaaataccattatttacttaatgaccttccagtttttggatatttgggttgtttgcatgttttaaacacttttttttgcttttataacactgtggcaaaaacacttgaatataaacctttcaccttaagatgatttccttgagaatatatgccttaaggatccagtaacctcttaattggcctctattacttcagagtttatctcctgcccgttgctgccagatgaatcttcctaaaacattaattatgttgtatcatttcttgctcaacarcccacaatgacttctcattgcctagggaaagaaacttccaaattctttagcttggggattgaggtacttgacagtcttgtttctttcaatttctataatcgattttacccaaagtaactgggctctttggatggctttgctctcacctagaacccacctagaggactttcactgttatcttcaaccttgcctcccttattttctgttccaaatcaaacacataatacagcttcatctccaatgctgatgtatgggttacactgcctatcagaaaataaaatattttaattcattcttaaacatctcagttatttccccaaagtttctctccttttagttgatgccacatctatttctttttcttttcttttttttt

SEQ ID NO: 670188 - DNA, 620 bp, Homo sapiens
ccaaatagggttacattcgtgggtaccgggggttcagatgtgagcaagtctttttggggggaaacatttaacccacgacagtcayccttccctgaaggcaatgggaaaaaagaagcccagcagaggcagctggaatcccagctcacttgcttcctggctgggtgacctgaagctctgagtcttagtttcttcacctggaaaatggatcatgccacaccgtggatgtgtgaattaacggagatggcacatagaaagccagcagtgttgaacttggccacgtagtaaggcctcgataaccggcaatgcagaattacgtttccctaccaattagtggccgaccacagtctacccaaccagcagacagcaacgcgtgaggacttggagggcaacggaaatgtgctaaaggggcaatgagagtcctttctgaatacgcaccccccagttggaggactgggtggatcagaggagagtccaggggacttccaggctggagatggcctgcggttaacccctcgtgccccatcgggcaggaggcgggcccttctcccatctctccctccctctctcctgtttatcgggactgtgggtgccagcccagacgacatcatccgctgagttcc

SEQ ID NO: 670189 - DNA, 620 bp, Homo sapiens
ccaaatagggttacattcgtgggtaccgggggttcagatgtgagcaagtctttttggggggaaacatttaacccacgacagtcacccttccctgaaggcaatgggaaaaaagaagcccagcagaggcagctggaatcccagctcacttgcttcctggctgggtgacctgaagctctgagtcttagtttcttcacctggaaaatggatcatgccacaccgtggatgtgtgaattaacggagatggcacatagaaagccagcagtgttgaacttggccacgtagtaaggcctcgataaccggcaatgcagaattacgtttccctaccaattagtggccgaccacagtctacccaaccagcagacagsaacgcgtgaggacttggagggcaacggaaatgtgctaaaggggcaatgagagtcctttctgaatacgcaccccccagttggaggactgggtggatcagaggagagtccaggggacttccaggctggagatggcctgcggttaacccctcgtgccccatcgggcaggaggcgggcccttctcccatctctccctccctctctcctgtttatcgggactgtgggtgccagcccagacgacatcatccgctgagttcc

SEQ ID NO: 670190 - DNA, 1438 bp, Homo sapiens
cctgcaccctgctaggattccctctcctttaaattgtaagccagacttattttgaagcaatcctgatcaacaaatgttcagatttaaatgagggcactacgttgcttttcaaatttaagattcttcactttgccaaaggatcaccatagagtctctttaaagaaaaaataaccttgtgcaataaaatttgactagtaaaaagtaatgtgtactcacatttttaggaatacttttctgcattgtgtgaggcagacttttaacactgtctagtgtaatagtatgtcttgactgaagagaggaggagattgacccacagaggtcatttaaaatcacctggtaatttatagtgtgtgtgtgtgtgtgtgtgtgtgtgtgtgtgcgcgtgcatgtgtgttttcccttatccacattttgcaaggttttcaatctcatgatggaaaacagcaaagtataaagttaggaaatctcaaaatcaaatcttagctatgctgtttattagctataatttgcctaagtgatgttttgaagctttaatttacaataattatttccaataatacctcctttataggcatatggataggactcttttggtttccagtttacagaaaacctaattccaactgacttcagctaaagaaaaaaaagaaaggaagttgatttgctcatgtaaatgacaagtccaggttatagaaggggctttaagcccagtttgttatccaacatcatcacaacttgctgtctcttcccctcttacccctacctacttctctcctggcctcaatctgaggctcaggtggggtaagatggctgtagcagtaccggcagtacattttctttggggaagagaatgtgcatctgtcttagcagcccaagcacaagtctctttgcatctcattggctcatttggtcatgtgcccgtcttgaagcaattattgtcgccgggagaatgtgatgcactctttggctttagttttggtcatatgcccagcccactgctgggtgtgtcagcatctttcccccaaccaaaatcacttggtcctagagtaggggatagatgattctgcagagaaaagttggagcaaagttatgagacaaggaagagtgactgctagaaggaagcaaaaatatcagctgtcttcttcagccagtttgtgggaagattaaatgagttcatrtatataaaaaaagcacagaacataaacaatcagtaaatgattgaaagtaggtgatcaggttaagtaaatctcaagaaatgaaactcagaagcaatttagggcaagtttgagattacacatacaaggaaccttatctacttggaattagttgagttcactaaacaatttcttcagcatctgtgatgtgccaagtgttgtataaagggctgagggtattgagataaaaaaaggagttgatctcggccaggtgtggtggctca

SEQ ID NO: 670191 - DNA, 1087 bp, Homo sapiens
taaaaacatcttaagcaattcttaaataaaagctttatgattctaacatcagagatcctatccaaaagaataacagaagtgctaattaattattaaacataaatcctatcctattctaacatcagaaatcctatctgtagaaacaatcakggatgcaaatggttagcatctagtgccacctgactttcggtaataagaaagtcggccaaaatatagcctgattagtgcttagttaaaactctatttctgtccagaattcttgtaaagcctgtgaggatgtcactgctcttctactagatcttgacacttccacaaactgctaggatgataaacccaggtctttatcatgtcagaacccacagtctctcttccctctgctcttgcatcctggaaagttttcctactctgagagaagagctccattctccttcttgcttttctaagacactctggttatagcttcgaatccatttcttcattttatttccataaaaatgattagaaattgcctaaatgactcagcattttaaaaacaaatccagaaagacttgcagactaccttggtttttacccctttcaggtgccttccttgaagaggtagagtagggagcaattctccccacttaatccagggaaagattaaaagtaaaaggaaaacaacataaagcaaagccacaagaagttttttcttacagcactgaggagcgataaaaatttttaagctgatggctaatatgattaaattggggttaaggagaaaaatcgaaggacagtatggagaagatcttcctagaagcagggacaccaccagtgaggaagcccttagaataatccagaacagaggtaactcatagaatgttagtaaagattgagagtaaggagtggttaagagagagattaagggagcatgaaactaacttttacagggtttacaatttatttaaggagattataagtatgatagctagatttattgagcacttattacattccggtttctcttgataagtgtttgcatgcaataatttttaaaaatctcattattaattttcatattgattataagttgaaataggaatattttgca

SEQ ID NO: 670192 - DNA, 1087 bp, Homo sapiens
taaaaacatcttaagcaattcttaaataaaagctttatgattctaacatcagagatcctatccaaaagaataacagaagtgctaattaattattaaacataaatcctatcctattctaacatcagaaatcctatctgtagaaacaatcagggatgcaaatggttagcatctagtgccacctgactttcggtaataagaaagtcggccaaartatagcctgattagtgcttagttaaaactctatttctgtccagaattcttgtaaagcctgtgaggatgtcactgctcttctactagatcttgacacttccacaaactgctaggatgataaacccaggtctttatcatgtcagaacccacagtctctcttccctctgctcttgcatcctggaaagttttcctactctgagagaagagctccattctccttcttgcttttctaagacactctggttatagcttcgaatccatttcttcattttatttccataaaaatgattagaaattgcctaaatgactcagcattttaaaaacaaatccagaaagacttgcagactaccttggtttttacccctttcaggtgccttccttgaagaggtagagtagggagcaattctccccacttaatccagggaaagattaaaagtaaaaggaaaacaacataaagcaaagccacaagaagttttttcttacagcactgaggagcgataaaaatttttaagctgatggctaatatgattaaattggggttaaggagaaaaatcgaaggacagtatggagaagatcttcctagaagcagggacaccaccagtgaggaagcccttagaataatccagaacagaggtaactcatagaatgttagtaaagattgagagtaaggagtggttaagagagagattaagggagcatgaaactaacttttacagggtttacaatttatttaaggagattataagtatgatagctagatttattgagcacttattacattccggtttctcttgataagtgtttgcatgcaataatttttaaaaatctcattattaattttcatattgattataagttgaaataggaatattttgca

SEQ ID NO: 670193 - DNA, 1087 bp, Homo sapiens
taaaaacatcttaagcaattcttaaataaaagctttatgattctaacatcagagatcctatccaaaagaataacagaagtgctaattaattattaaacataaatcctatcctattctaacatcagaaatcctatctgtagaaacaatcagggatgcaaatggttagcatctagtgccacctgactttcggtaataagaaagtcggccaaaatatagcctgattagtgcttagttaaaactctatttctgtccagaattcttgtaaagcctgtgaggatgtcactgctcttctactagatcttgacacttccacaaactgctaggatgataaacccaggtctttatcatgtcagaacccacagtctctcttccctctgctcttgcatcctggaaagttttcctactctgagagaagagctccattctccttcttgcttttctaagacactctggttatagcttcraatccatttcttcattttatttccataaaaatgattagaaattgcctaaatgactcagcattttaaaaacaaatccagaaagacttgcagactaccttggtttttacccctttcaggtgccttccttgaagaggtagagtagggagcaattctccccacttaatccagggaaagattaaaagtaaaaggaaaacaacataaagcaaagccacaagaagttttttcttacagcactgaggagcgataaaaatttttaagctgatggctaatatgattaaattggggttaaggagaaaaatcgaaggacagtatggagaagatcttcctagaagcagggacaccaccagtgaggaagcccttagaataatccagaacagaggtaactcatagaatgttagtaaagattgagagtaaggagtggttaagagagagattaagggagcatgaaactaacttttacagggtttacaatttatttaaggagattataagtatgatagctagatttattgagcacttattacattccggtttctcttgataagtgtttgcatgcaataatttttaaaaatctcattattaattttcatattgattataagttgaaataggaatattttgca

SEQ ID NO: 670194 - DNA, 1087 bp, Homo sapiens
taaaaacatcttaagcaattcttaaataaaagctttatgattctaacatcagagatcctatccaaaagaataacagaagtgctaattaattattaaacataaatcctatcctattctaacatcagaaatcctatctgtagaaacaatcagggatgcaaatggttagcatctagtgccacctgactttcggtaataagaaagtcggccaaaatatagcctgattagtgcttagttaaaactctatttctgtccagaattcttgtaaagcctgtgaggatgtcactgctcttctactagatcttgacacttccacaaactgctaggatgataaacccaggtctttatcatgtcagaacccacagtctctcttccctctgctcttgcatcctggaaagttttcctactctgagagaagagctccattctccttcttgcttttctaagacactctggttatagcttcgaatccatttcttcattttatttccataaaaatgattagaaattgcctaaatgactcagcattttaaaaacaaatccagaaagacttgcagactaccttggtttttacccctttcaggtgccttccttgaagaggtagagtagggagcaattctccccacttaatccagggaaagattaaaagtaaaaggaaaacaacataaagcaaagccacaagaagttttttcttacagcactgaggagcgataaaaatttttaagctgatggctaatatgattaaattggggttaaggagaaaaatcgaaggacagtatggagaagatcttcctagaagcagggacaccaccagtgaggaagcccttagaataatccagaacagaggtaactcatagaatgttagtaaagattgagagtaaggagtggttaagagagagattaagggagcatgaaactaacttttacagggtttacaatttatttaaggagattataagtatgatagctagatttattgagcacttattacattccrgtttctcttgataagtgtttgcatgcaataatttttaaaaatctcattattaattttcatattgattataagttgaaataggaatattttgca

SEQ ID NO: 670195 - DNA, 587 bp, Homo sapiens
ataagcgggtgggaagaggtgttcctagtaagaatgttctgggtgttcctctgggtgcacatgcacactagctatagatgcttgctcataaatgacatgtctcattagcatcttcaatctccacccaggggtgtgtttcttactattataatgagcaaagggtagtcttaaggacaggtaaaatcaaaatacacatgctccctacagggacaattccttactggagatagttttgtttgcatgagctggactacaatgcaaatactggggcctatggtgttgactatatagtcaccaggatcatcgcatcccgaggayacggttacttcctttattacctaccttgcctcaggaagacccctgtctctacaaaaaaaaatttaaaaaaattagccagacatggtggcatgtgcctgtagtcccagctactagggaggccaaggtgagaccatagcatacgccttggaagttgaggctgcagtgagctgtggttgtaccactgtactacagcctggtgacagagggagactttgcctgaaaaaaaaaaaaaagttgcacaggcttcagtttttcataaaacactttca

SEQ ID NO: 670196 - DNA, 596 bp, Homo sapiens
gactctgcttctatagtctatcttctttcacttctggtcataaaaatgagcttcatgatattgttttactttcacaaagaataaaaattacaacaaagttcttatctttatataaatagcctgaagtgaatagttaatcaattctttctgtttggggggttaacattacttattttgatataacatcttaaataaaatatcagaaacaaayaaacaaaaaaatctactttgatgctgtaagaaaattcacaaatttaagtgatatttgttgactccttcatggagtcttttcaaaattttacctgacagatatatcttcttataataccaccaaaaagaaattggttggctgcatgtagttaaatacaacccagagggaaagaaaaagtcaacattttgaatgctagttatgattgacaaatatgttttaagattatttaatcctcattaaattcaagtttacttaaatactaccagaattaggttaaagtttttctttctttcctttttgaaaacaatttttaaggctgaaataaggttagagaaaaatcttaaaggatttaaaaagtaaagcggatttctaagaaattctgtgg

SEQ ID NO: 670197 - DNA, 637 bp, Homo sapiens
tatattgcctccttcatttctataaagaggataaaaattcccacctcacaggcttgttgagaggaattaatgggaatttgtaaagtgtctaatatgcagtaggagctcaatcaatatcaaaccctctgctttactctgcacaacttatgttactgtgtagacaagtgctgtgggatctgtcctctaactaaaaactctccccaaatcctctattaacccaagcaccctgcagctgctgccccatttttcttgcttcccttcatagygaaattactctgtactgaagagatgtctgtacttcctttcctcatctcccgtttggtcttgatcccagaaaaatgagacttctgcttctcctctcttctgaaactgctcttagcaagataaccaaatacacccaacaagttcaatccaacagctctttcctgtttcctttttttttaacctcatagcatcattcaacagagccaatcactccctctttcttaaagcttcttctcaaaactccctgattttgttttacttccctggatgctccttctttgtcccctttgctagttctgttacctctgttctaagtctaaatgttgaagtatcaaagtatcccaggcctcaacatatatatatatatatatat

SEQ ID NO: 670198 - DNA, 1291 bp, Homo sapiens
tgtagcaaaataattaacccatagtacatgtcttgggctcgataagcaatgaaaaggttgatttttatgtgcataaacacctctgggttgcttttgagtgtgtatgtaagtagagagtcatagaatgtcaggtaatctattctactaaaaaaattttcttttaagtaacaaaaggacccttactgtgcttaggctataaccatctaaatgtgtgctactagtctgggtaatattttagttataatcccatatgttagaattcaatgtctgtcacttgtcagatttttttctgtagaatgcccaagaaatctttaagctgtgaacatgtagcatcagaacgtcagtgttgaatgagcctctgtgtgcaaagccctgccttatatgccatgtgtgaggagtgggcagggcaggagaaagagcagacaccaaatagaccatcacaagaaaggtttttttttgcttcaggagtttaccacattgctgggtgaacaggaaatgcacacaaacccatcatctctcaacacctatggtatatatggttgtttactcattcttagcttttcagtaaccccaaagaaggtgttttgaggctgttactatttgttttctggaatcaaggaaagataaatgaagtttccttaatggaactggtatctatctgcatgactgtattttacacacacacacacacacacacacrcacacacacacgcacacacggttttttttggttaaggtggatcccctttggccttggccttggtttgtcacattctttcacacaaacctgactactaaagatatcaggtttttctgacagctcctggcacccaacagctttcagcaggcgtggtttcaatttatatttagtctcttagacgcccttagcaggcttattcgcaccatgaggtgaatgagggtggaatggccaggccataaatcatcttcctgaacatgttctcaaagagtcacttctaaaggagcaggatcaggcgacctgtgtactactttctactaacaagttcaaagctcttgtagacaaaggccaattgatctcagcacactttctctttggaggaagatagggtatcccatttagagagagggaaactgagacacagaggtgaagttactttcctgaggtcatggggagctcgtggcagaaaggaatagaagcttccatctggctggcttctctgttacagccccctgcctcagcttgggtacagtgaagctaattttgattcagatcggattcccctgatctactctttatccaacaatgggagtg

SEQ ID NO: 670199 - DNA, 445 bp, Homo sapiens
tgagaccatcctgagcaacgtagcaagaccctgtctctgmaaaaaagaaatgtgaaaattagccaggtatggtgatgtgcatctgtggtcccagtctcatttgggaggctgagatgggaggattgcttgaacctgggaggtcaaggctgcaatgagccatgactacaccattgcactccagcctggtcaacggagtgagtcccccatctcaaataaataaaaaataaaggttttacctcttaaactgtttaattgcaattaaacagatatttttgccaacagcaatcaaatttgttttcaaggggttagggggtgcatacatataccttatatttttgggggggggttgactgttttataataaatattatatcataattactaatcaatggggtaactattatcatccccattttataggtgagaaaaccaaaggcttaaaaat

SEQ ID NO: 670200 - DNA, 1661 bp, Homo sapiens
aaagcactgtgaattctccttggcttgttctctcattcctatagcaagaagtaaagaactcttgagatggctaaactgcaataaagaagcctgaagttgcaatatagaggtctaaattatcactatggaagctgtcctagatttccttcattgaggaagaaccacaaagaagagccaactgactttcaaaatacagtgaagtgagtgaaaacaaaaattttgtgttaactccctgtctatcacaattagtgcaacatagcacagcctaactaataaaggggaaaagccaaaaatcagttattctaaaccgggggtggatttggcacctcaaggggatattgacattgtatggagaccttttttgctcatcaaaactggaagtatactaactgcatctgattggtagagaccagggatgctgctaagcatcctccaatgtgtaggactgcccctcacagcaaaaatttatgtggctcgaaatgttgacaatgtttaggttggggcctgctttaaatctatcatatttgcaggaaatattttcccagtttaccttagactcttaaactttctttatagaaggttttctgaagtacataaacattttccaatatagtttgtgtgtgtgtgttaatttgtttccattgtaagaacaacatatggtcataatagactatttgggaaatagaggacatccttgctagatgagcctgcataattgggtgacaaaagctgatctttatgaccaaattggggaaaataaggaaaatctttctgcagaacttgaactaagaaatagtttcaaatagatggtatgaatttcagactgataaaaagtcacctagggacaacgccattcttaccaagagaaatggtgctgtgtggtaggaaatgagtaaacgacatcctgggaaacaccgtcaatactttctaagttggaaaaaactgcaggggaaaggggaagactttgttaaagtattttttttttctctgaagacaatttcattcagaggttgctttagccaaggagtctcatcaaatttaaagtctctggcagtgctcttactaagagccatgtcctcatcagtcatttagcatcatcctgatgtagagaaacacttygctgaattagattctcccaacctagaagggcaagtattggaggtgagtgcaagctacaggacagaaaggaaccattccccagagagccacttttaccttgcatttggaaataatacagtaactgattaataaaacacacatagcaattacaagttgaaagcatacaggatgtgttctagatatgtaatgctaagttacaaaccaccccattgtttttagcttagaacatttattcagctcatgaatttgcaatctgggcagggttcagtagagagagcctgtctctgctccatacagcattagctgggattgctccaaggctaggggctggaatgagctgaaggtttgctcactcctgtgtctggcagttgatgctggaaatacagaaactgtcagggactgaaacaggagtgtcctggtatctatcagccctgagtgacatctgggagctgtttagttacagctttctggtttgttttccccatattgccataatttctccatacacatgtatagtttactcccatgcaggtttctgaagc

SEQ ID NO: 670201 - DNA, 1661 bp, Homo sapiens
aaagcactgtgaattctccttggcttgttctctcattcctatagcaagaagtaaagaactcttgagatggctaaactgcaataaagaagcctgaagttgcaatatagaggtctaaattatcactatggaagctgtcctagatttccttcattgaggaagaaccacaaagaagagccaactgactttcaaaatacagtgaagtgagtgaaaacaaaaattttgtgttaactccctgtctatcacaattagtgcaacatagcacagcctaactaataaaggggaaaagccaaaaatcagttattctaaaccgggggtggatttggcacctcaaggggatattgacattgtatggagaccttttttgctcatcaaaactggaagtatactaactgcatctgattggtagagaccagggatgctgctaagcatcctccaatgtgtaggactgcccctcacagcaaaaatttatgtggctcgaaatgttgacaatgtttaggttggggcctgctttaaatctatcatatttgcaggaaatattttcccagtttaccttagactcttaaactttctttatagaaggttttctgaagtacataaacattttccaatatagtttgtgtgtgtgtgttaatttgtttccattgtaagaacaacatatggtcataatagactatttgggaaatagaggacatccttgctagatgagcctgcataattgggtgacaaaagctgatctttatgaccaaattggggaaaataaggaaaatctttctgcagaacttgaactaagaaatagtttcaaatagatggtatgaatttcagactgataaaaagtcacctagggacaacgccattcttaccaagagaaatggtgctgtgtggtaggaaatgagtaaacgacatcctgggaaacaccgtcaatactttctaagttggaaaaaactgcaggggaaaggggaagactttgttaaagtattttttttttctctgaagacaatttcattcagaggttgctttagccaaggagtctcatcaaatttaaagtctctggcagtgctcttactaagagccatgtcctcatcagtcatttagcatcatcctgatgtagagaaacactttgctgaattagattctcccaacctagaagggcaagtattggaggtgagtgcaagctacagkacagaaaggaaccattccccagagagccacttttaccttgcatttggaaataatacagtaactgattaataaaacacacatagcaattacaagttgaaagcatacaggatgtgttctagatatgtaatgctaagttacaaaccaccccattgtttttagcttagaacatttattcagctcatgaatttgcaatctgggcagggttcagtagagagagcctgtctctgctccatacagcattagctgggattgctccaaggctaggggctggaatgagctgaaggtttgctcactcctgtgtctggcagttgatgctggaaatacagaaactgtcagggactgaaacaggagtgtcctggtatctatcagccctgagtgacatctgggagctgtttagttacagctttctggtttgttttccccatattgccataatttctccatacacatgtatagtttactcccatgcaggtttctgaagc

SEQ ID NO: 670202 - DNA, 653 bp, Homo sapiens
ttcatttattcaacatctatgtattgaagctctcctagatgccaggcactgaactcatggactgcaatatcacaactaaaaaggttctcctaaccacactctttgctcttatgtagtttgcattctggtagaatgacacagaagagaaaaccagtcaataaataaatgagtagcatagtttcagatagtggtgaatactgtggagaagataaagcaagagatggacacaagaataagggaacacgcctcgacaaggaatgatatctgcgttgagctctgaatgacaagaaggagccaggcttggagagttcaaggtgaaggattttctggctgcttctctggcaaatatcacaaggtaggaataagttgctaaattcaaatcagaaagccrgtttgcctggatcatagtgaggaatggggaggagagagacaagtggctgtgtcaggtatgggcaatggttgtgtaaggtatagctctgtaaatcaggccaagcgttttgggtttcattctttgttcagtgggaaaccactggaaagctttaagcagggaagtaaagtgatatatttatttttaaaagattactctagctgtccaaggagaaagtagttcattgggtttggcatgtgagaaatataggtaagaggctatgcta

SEQ ID NO: 670203 - DNA, 543 bp, Homo sapiens
agcatataaacatggttttcattagctttctctctcttaaaaaaaaamacacacacacacacacacacagaaaggaggggagagggagagggaggtaaaagaaagaatctgagcaaaattaataagatgtcaattaactccataaatgcagatgccttttttgccgactggctagaacatgctgatgagcagtaccagaaaagcactggttcatctctcctgaaatgctaagaaaatgaaatggggtagagaaaggtaaaaattttatcctacatgaacaaaggaatgaaagaaaaataaagagagaaaagaatattcttttttgaatcttgctgttaggagaactatttcaaacaggccatgagagtggcccctcggaccaaatagccagccctgggttcttctggaattatgggcacttcacagaggaccaacctatttgaccaggatcacagtgcagcctctgcctccacttccctgccttttgtgtgtgtgtgtgtgtgtgtgagagagagagagagagagagaaagagagagagagat

SEQ ID NO: 670204 - DNA, 596 bp, Homo sapiens
tgccgtggctcatgcctgtaatcccagcactttgggaggctgaggcaggtggatcatgaggtcaggagttcgagaccagcctggccaacatggtgaaaccccgtctctactaraaatacaaaaattacccgggcgtggtggtgtgtgcctgtaatctcagctactcaggaggctgaggcaggagaatcgcttgaacctgggaggcagaggttgcagtgagcccagatcataccactgcactccagcatgggggacagagcgagactccatctcaaaaaaaaaaaaaagaaaaaaaaagaaaatgaggcccctggccatgaagctggacttctgaggcttcctgaaggcttcagaaacccatttacatgccccatgcttgtgtttctccttaagtagcagctgggatgataactttgttagtatttctctgaagaggtcttgtttttacaggcaggtcactgccacaataatgagagaacctgggacaccaactcgaagtctgttgctctccatttatctctgtggataattaaccaattcttgccatttgaaggttcaatacaggaaagggtttccagggaggaacaaaatgagct

SEQ ID NO: 670205 - DNA, 596 bp, Homo sapiens
cagcaagggtttcagcctgaagaatcaagcacttagcaggagttcaccaggagggacaggcctggccctgacttgctgagcgaccctgaggaggacacctgtcccccaaagaccctcaaagtcccatccactgcagaatactttcctccatggatgccctcaacactggcttcagttagagaccaagtgctccaccaaacacagcaaaagaagaaaaacaggacaagggtcagcagaaccttcctgctgctttatgtcttttctggcagttacgaccagcaaatcactcaggaaaatctgctgggtttaaaatttcatggtagcataaaccactcatttgagtagattctgattaataccctttaacaccaaaagggtcctgtggcaaggagaacagcctgaggaagaagtcctccagggtctgatgaagatggatggaaagaagraacagacaacagcgtgtatactgggccagaaaggcttgtcttttccccatgggataaaatcattttctggtggtcagattgggtggagtgaggaactgttatcaatattatgataaaattatgttctttgctgaaagcatgcagcctgta

SEQ ID NO: 670206 - DNA, 1255 bp, Homo sapiens
actgtttataccttggagggagaggacaggaaatagcagtggatactttgcccagtgacggggcatcctggggatgtcctgcaatgctaatgtggccaacaggacataccaacctcaaaacgcaataagcacatcacccttagcacagtggtctgctgcctaccacgatgcccagtggtgcccagtgtagattttctcatggtgattaacataaaagcagcattattttgtttgcacagacttccaagaatattaaaatgcataaacattgccataggaagtatttctggccccaagtttgcaagggaataagacaaatatgctcttagctatactgcaaagcagaaggtgacaagtgtctcagatgtagagggtgcatggggacaggtgctcacctctcatgggacaccaggaagaatcacttttctctggggctgcttcaaggacagaccttgtttttccagagaactttccctgtggaggatgtccccrccctgactcctcaggtgtgaccccagtgtgacctatgtgctcctcttttgtgccctgcccaggggcactgcatagcctggtgacctgcaggacccccaagaatctacaccataatttccaacttctctcaaaaatcaattctgaattttgttccattaaggataattgaaaatgatttagagcaggttcatttggaagagagcatcagtgacactcttcatggtctcagcaggcacccatgactgaagagtaaatcataactgaaatagtgcagggagaaggaagggaagccaatgttcctggaatagctatgctgggccaggcaccatgccaggcactgctacatacataaccccactcaattctcataacaaccctgcgaagaagtttgtcttttttttaagcaaacaaacaaacaaaacctcaagggagtagggttttatttgctgagaggtttcttatttttcataattacccaaggcaacaatcctgaaaagagaagaacccactataaatatgtaggggagaatgaaaaagcacaaaagcaaaaagtattatacaattgttaagttgtaaaagggcttagatatttatttagtggagcaagtctcaaaggaagaggaaggaagagaaatggattggggttggggtggggctttattaaaccactctgcagattctggtacatctcctcagaagtttattctctgtcatcaccacctccaaagctaccaccaccatgaccgtggccaccccacttctc

SEQ ID NO: 670207 - DNA, 999 bp, Homo sapiens
gacactttgcagtcattttctgctcctacccatggccctggtgatatggtttggctgtgtccccacccaaatctcatctwgaattataactcccacaattcccatgtgtcataggaggagcctagtggtaggtgattgaattacgggggtgggtctttcctgctctgttctcgtgataatgaatgagtctcatgagatctgatggtttttaaaaaggaagtttccctacacaaatgctctctttgagtgctgacatccatataagatgtaacttgctcctacctgtcttccaccatgattataaggcttccccagccatgtggaactgtgagtccaataaacctctttctttagtaaattgcccagtctcaggtatgcctttatcagcagcatgaaaacatactaatacacctaggcagtcactgatctgctttctctatctataatattgctttcttccaggaattttaaatatcttggcatcccctgtgcatataaaaacaaaataatatatccctaaaactcataaacctgtatttcaaaaccacagtagatagttgtccccagtatcaacggagggcaaaataagaagacacatatttatccaggaggaattttattcacataaaaataacttcctaacccctagtgaaatattttagagcattatatatgattattaagaaatatttattaaaaatatgtcagtaggccgggcacggtgactcacatctgtaatcccagcactttgggatgctgaggagggtggatcatgaggtcaggagtttgagaccagcctggccaatatggtgaaaccccgactctactaaaagaagtacaaaaactagctggacatggtggtgcatgcctttagtcccagctattcaggaggctgaggcaggagaatcacttgaacctgggaggaaaaaacaaaggaaaaaaaatgttagttatatatttttaaaggctgaaaaataatcacatctcaaatcagagttc

SEQ ID NO: 670208 - DNA, 678 bp, Homo sapiens
taaagattccttaaaacttcagtgatacaatagaggctatataatcaatcttgtctgggacatttccaggaaaaagcaatgttctttcaaacctatctgggtcttaagatgtgactgtactgtgcgctttcccttcaccactcacgtctggaaagataatgaactccctcagccccacttccttayctcccattcacttgcagacttaatcagtcatgcttcagctttcttctctcccagttgaagctggtgaatgtttaactcttgggatggggaaggatgtgagaagggaacaccctgatttgtagcattgtagcatttgctgatttcaagtaattccaccatcactgatctaaagctgatgtcattgaatgcagagctgggcttggatgtgcacaagagactctcctgagtaggtatgagctccagtgcacaagggcctctgctgagtaggtgtgagatccagcacacctctctctaatccctctattgaaactgctcttacctaggcatggtacagatcccagtgacctcctaaggaaaaatctagtttgcttctctacttgactaacaggcagcatgagccactcccttattggtgagccattctcctctttggttctcttcctatttccctggcaatttcttgcctttctgtgctacgtacaacctctgccc

SEQ ID NO: 670209 - DNA, 428 bp, Homo sapiens
atagtataatggcatagaggtgccctgctggagattacatttgctattaggcagttgctcttccggatttagccagtgagagggctsctaaaaagtctgcttgattacccaagtggggacattactttttaaagtgctgaagtgtcttttctgtcttttagagattgcataaataatgctattatccagaaaatggaatacatgaacactgtatatttaggcttattaggcaaatatgccagatttggaaggggtaggagggagctgaagtgccttgggatgttttctttaaggagaacgagaagatagccatgttatctaagagacggttataacaaggtcttgggttagatggtatagaaacttggggtgggagaagacggtcagggtggtcaatagtagcctatttgcttatgctaatggtccga

SEQ ID NO: 670210 - DNA, 662 bp, Homo sapiens
gctgagcattgtgtcaactattaacttggccatctcctcgatcccatgttcaagtatgtsatattatcttcattcatcattcacaactgattcttaaacatttattatttgtcatgcacctctggcaaaaaaaaagataagaataataaaagaaatggacctgggtcttgttctcatataaacatatgggaatctacaaatattcttaagaatatctaaatatttgtaatacagaaactcatactgttccttaaatcagtttcttatagtcttctctttccaaagttaaatactttcacattatttatgaagagacacaaattaacagtcatctacactatagcactagacattctatattaaagctttaaaaagtgttagatgacttattgaagaaatataatttaaaccatctctgcttgctagcacagaaccatgtaaaccaaagcctcaaataaattagtttatgagcatataaagaattgctttaaatggagacaagaataatttgtttgtactttctcattatcatcaaaaacattttcactgttagcagtatggatagtatagttaaatgttattaggaaatatgaaaaatcttctctgacttcttatggcatattaactaacaggggtggcataaggctgagaagatggctggg

SEQ ID NO: 670211 - DNA, 1783 bp, Homo sapiens
gtccctttttgatggtggggcctggaggaccggaggtggctggctctggatgggtgagaggcggggagtgccttcaggaagtttggaaccccagggctcagggccaggtcctgacaccccataataccccagcatgctcacaccaacagcagaggccatgtggtaggatgggacaratcatggaatttggaattggaagacaagggtttaaaattgcctcttagtagatgtatgaccttggtcataccctttctggagaatttcttcacctctaaaatgggtataacagtaccaaactcagaacttagtaattgtaagaattaagtgagataatgtacagaaggcattaaaacagtgtctggcatggagttcaggaaagggaagttgtggcttctggaagaagtaaatgaggatgcagatgtccttcaacaacagcgaagtggtccgttaaaaaatggtgtcggctggacgcagtgcctcacacctgcaatcccagcactttgggaggctgaggcaggcagatcacaaggtcaagacatggagaccttcctggccaacatggtgaaaccccatctctactaaaaatacaaaaaattagctgggcatggtggcatgcgcctgtagtcccagctactcaggaggctgaggcaggaggatcacttgaacccgggaggtggaggttgcagtgagctgagattgcgccactgcactctggcctggtgacagagtgagtctccatctcaaaaaaaaaaaaaaaaaaaaaaggtttctctcaatatcatcatcatttagcccagagcaggtgagggtgtattatctgggactcaccaccccaaacctctacagcaaatagcgggtgtgaatcaggctgaacatgtgggctgacagccacgggctctctcactgaggccaggacatttctgtgaagatgggggcagacagcccgtcctgggagcctactctcaagtggataggcccaaaggccattcttgagcacacagaagtcaggggagatgtacagcaagcccctcctctcatgtaacagctgagccccttccccccaaagctgccatctcacgaccctcactctcccacccccatcagagcggcagaggaatggacagagtgtgtcttggggtcgaagacttagcaaccagagccttggtttccctattcatgagatgaaggaacagctcttgggatggccccctggggattagggagcctgtgtttagaaaacagaatgcctgtcacatcgatcatccaagacatggtcaccccattcagcctctgtgtcacacctgagcaaggtcagggttgtgcagttcagtgtaggagactgtggggcagccggggctcgtcccaggccttgatttacccacattccctgtgcatatggaaagatctgagatggaatctggggttttgcccaagaagggggaaatcctgaattcaggcccagctggaaggtggggtttccccaggacagcagactctgcccctgggcctctgtgaaatgaagccctgcccagcacacacatgcacagagcttgcaacccaaggttaatgcctgcatcctgggagctcagaaagtgagcccaggacacacgctcctaacagaggaacaggcaccaaggctgctatcccagagaggccacaagagagggacagcctgggaaccagtacagggctagagagaggaggaggccatggcaatgctggttgagaaagcacctcctgtactgaaggatagagtggcttcccatcacctctccaggacaca

SEQ ID NO: 670212 - DNA, 1298 bp, Homo sapiens
tgcaaactgctgagtcctgggctccagctcgctagtccactctgcaaaaggaccggttcacttggtaccttgaggtcccaggtacttttccaggtgacctgctatacagaaaggaacttgtgtcattcaattcccatgacaaccttgtcaagtaggtatgatggccattttacatatgaggaaactgagccttggagaggagaaataatttgcccaaaggccactctaacagtaaatggcaaagcaggtgttgagacccagtctgtgtggctcccggcttttcctcccactccaagctggcttccaagccccactcctcagcagagtgtctgaggccctcacatctagctctcttccctgctcccaatctagccagattcacgcattcccatccagcctctggaagcacacaccccatcttcacttatgtgctttccccacgggagtcaaagagccagaatagaaaggagagagggaaaggcttcagggaagaggggagctggagggtaaaggatgctgacggggaacaaggctgctgctcatcgatctgggaggcttctctggctcatcctacagctgtctccagcttggcttctgtcttccccattccacaggaaggaaacggtgagaggagctttgggcacaggagggccaagccggaggctggtgagaggcctacagaagctccagctgctctgaatgtgttcaagccacttggccgggacacacatctagggaacagggaacatgcaaatgaggctcagaacagctgtagattcctgatctcatgggaatcctgacaggatcctggcaagcactagggcggctgggaggcctccagtgggccacacagtcctcactaccagaaaggggtctgaggtgggttttgcaaaccacagaratgaactcaatgtgcctcctgcagagactctaaacgaaggctagtgggcatttgagaagggcagctgagatcaccagtagacagcgtgtgtttggtagcaaagtcctgtcaggcaaagcgcatctcctccactgacaggagatgttggtagacaagggaaatggggtttgcccatcaagcagatcttaaatgaaacatccgacaagctcttcatgaaatcattgtgtataagctagaaagaggaagctggaaggcagtagcattagtgggacatatagctggttgcacagttgtaccccaagggggcttagcaatggatcctggccgcctgcagggaagtgtccaggggccatgctgcagagctccaacccacaccaccccattcaacctcttagca

SEQ ID NO: 670213 - DNA, 592 bp, Homo sapiens
aactaaactgtacaatcttgaagacatgcatagtaatgtcctttcaatagatgatgaataatgataatagcttcatgccatagagccttccctgaacagagaaaaacaaatatatatgtatctaatacatagtattacatacataaaatatatttcatcaytgattacatgttcatcattttatctgtcgtatcaagagcaattcgaaaacacacttttttatcttctttatatctccggaaattgtcatcacagtgtttatcacatagtagatgctcaataggttttatgaaaaataaatgaatggttaaatgcattcattttcatctgattaatgagtgtctttatggctatgaggtgtggtgacctctacacaaatcaaagataaacaataacacaaatttaattttagaacttcattttctttaagtaatggctcatctacaggcttctggtaggatatgatgatttaataggtaaaaatgtcatgagactaagaggtttctgagactctgaatcaagtccaggcaaacataaataacaatgaaatgataatacagtgcatgacctgtttgatattcttattactgct

SEQ ID NO: 670214 - DNA, 613 bp, Homo sapiens
acccataaattattacttgaaaaataatgattattgctctaaaggaataaaagaccggggagttacgaaggattagtacacataggtgtgtgtctccttaagcaaggtggccagtgaaggttttgcagaggcaataccatttaatggggtgtctgaatggagagaaagagccactcacaagaactgacatgggaagagactactagagagaaggaccagcttgcacaaatgtcctggggtaggaaatactttggtttttgggaggaactycaagaaaacctgtgtgagggataatgatgttctatcgggccatatgctctcggataaggagctcggattctgtcctcaatgtagtagcaatccactgtggagcttggagcagcagagctatatgctttatttctttatattaatctgggattgaaaaggaaagagggaaagttggaaaatcagaacagatgccattccatggcccaggcgataggatgtcagaagtaaagatgggtagaaatagacggatgtgatttttatgtttgagatggacctcatcaggactgctttgagatgaggactctaaggagcgaggtagagagcagaatgggatatgactccc

SEQ ID NO: 670215 - DNA, 615 bp, Homo sapiens
aaatcaggtaataaaagtaaggacggggtaacacagaggttggcttaacaaaaataacagaagctgattcgaagctggtcctaatactgtacctaattcattcaagtgtgcctgggcccaagcccagcccagaacagagtgctccgatgtttaatgtgtggtacagcaagtagggcagaagttgggaacagaacaccaaccttacgtctttgtgtttattaagctgtatcgcatttcacctccctaaacggtgtgcttggtgtgtcatgggatactgtgatgtgtaaaagaaggtagcagaggtagattcaatcactcccaccaacaaagacttctttcttaagccctttgaaagggtctttggacacagtttccttgtgtaacaatcactaaatcctattctctcggaatggtgatacgcctttgctcccagctaccctttgagtcacttctcctctttcactgtgtggtaggtgacctattttacaggactttcaccaaatgttgccccagttacctccaaatttaattctaacaagagyaaggccatcttgtgggaatcaaagtacttatcaggaagccttgtgcaggggtatgcctgcttacgaaagactg

SEQ ID NO: 670216 - DNA, 595 bp, Homo sapiens
tggatttcaggttctactctacactaacaagcgatgtgacttttagaaaatctctcggcctcaggccttcctyacctgttaaagtaatataaagtttcaactaaatgacctctcacaatgtttttggcacagacatgctgtgaggtaaatgtgttttattcatatccttgagtttggaacaatattatcttcttgagcagtggaaaattgagctagtctttatgtagccaaagagaacctggggctgcctgttgcctttaatccaatcaggaagcagttggacacaaactcctgggagcataaaagataaagtagctaataatgatgtgacaaccatagtgtatgaccaattactaagtgccaggtgatatgcggtgttcagatattatcttatttattcttaccacaacactgtgaagcagatttttacatgtgaggaaattgaggtctagagagcttaataacttgccaaagatcatgagcctgataattgcctgaaccagaattcaaattcaggttcggcctgagtctaacagccgactttgatctcttaagctccactgcctctatctgcaaaactctcttcttcaattaa

SEQ ID NO: 670217 - DNA, 2100 bp, Homo sapiens
ttcttgtcctcctcccgctcaatagtattatagtttttttacgagataaggtacttgattccattcatttcttaaattttcttttttcaaggaacctcatgtgtaatatttacctggcaggagagatcccatgatcacaaaggtggttttcccagagtgaggcttaaccattgcctccgaggtgctgattcctgatattcccccaaatgtgagacgctggagtgcataatttatggtagtgggggcctgagtttgcactctcccctaatgtttttgatataaaaaaagaaacttcatgtcttcaaatctttggggattcctaaaatatctatttactaattgcatgctattatttttattcaaaacctttcagacaaagactgattgaggaagttaactttttctaggataatgttaggttatcttgaccttgaattcaacttcagctaattttttttctttactagagagccttatcattaatcccatatcccattaagagctgctttgatccccagtcagcctgcctaatctaatgttttggaaaagatattctgctctctgttctgggagacttattttcctacatttggtcagaaaaaaaaaatgtcaaaggtttgagagactgagaaaagtgctgaatgaagctctaggtccacattgtggttctgacagtctggttattttttggggtgtctgcatttggtttgcacgactcctccctccatttcactcttggttcactgtctttgaaaaaggaatcagaatcccaccttgtgccatgagcaagatttgctctgttggattttgacctttgggaaagagttttgttatctagtcttggacatggagttgtcaacttttaaaaaatcatcttaaatgggagtgagcatttctgacccttgggagggaaaaacaactttagatatcttggtaaatgggaacaagcataagrttgagatgaaggagaaatgcttccctggacacagtgcagattgtttctaccagcaatcgctggtggtggctccagctgagcaggatggggcaggcacccttgtgccactactacaggcgttctttctgatacatgcagctctttctgcaacaactaatcctcttcatctggactcttcagcctgattcatggccctcttttctgcctcatttttaaaaagtgttggcaatgatacagcagagaatgaaagtcactgatatctcattggggttctaaatagaaagtggcagaaaactgtgaggccctgaacaaatcatttccttttcttgacatcagttttttttaacctataatgactggctgaaaaaaaaaaaaaaagcatgaactctaagagccttccagctctggcattctttcctttttaaatattttttttctgaagacctcaagcacattatatttgtaattgttatttttaagctatatacacgcggcacacaaacatatacagtttaaatctctctgttagtgaactgtgcaaccagtgccaaatgtaagatagccttcacatttgacgggatatgcctttactactccagaccctcagttaacagagcaggtgatgaacattgcagttgcaacccaagagcataaagaacactccaacctccaacaacagtctaaaatgtcagactgctgggcatttagcagcatctgctttataaattaccatgtttatgtggtgttctcagaagggttcccattgttatttactcctcaatgtttggtgctaaacatcaaaagaacccgagcaccaaaatgtcaagcccagggaggaaatgtttcaagagaatttatttttgtaccaatttaatttttctctgaatttcaagaacaagggtgtggacctgacatcggaccattctgccaaatgggattcatccagttctaattactactccctttcacaggcccaaggatgccactctatgcttggcacatggaagttactggctggacagattgtactaaacaaaaaaaactccctaattacaaatgattagaaataaaaataaaatctgcactccaagtctgaaatttgtattactttatcctgaggtgtaaaggatttgagagaaggaaga

SEQ ID NO: 670218 - DNA, 2100 bp, Homo sapiens
ttcttgtcctcctcccgctcaatagtattatagtttttttacgagataaggtacttgattccattcatttcttaaattttcttttttcaaggaacctcatgtgtaatatttacctggcaggagagatcccatgatcacaaaggtggttttcccagagtgaggcttaaccattgcctccgaggtgctgattcctgatattcccccaaatgtgagacgctggagtgcataatttatggtagtgggggcctgagtttgcactctcccctaatgtttttgatataaaaaaagaaacttcatgtcttcaaatctttggggattcctaaaatatctatttactaattgcatgctattatttttattcaaaacctttcagacaaagactgattgaggaagttaactttttctaggataatgttaggttatcttgaccttgaattcaacttcagctaattttttttctttactagagagccttatcattaatcccatatcccattaagagctgctttgatccccagtcagcctgcctaatctaatgttttggaaaagatattctgctctctgttctgggagacttattttcctacatttggtcagaaaaaaaaaatgtcaaaggtttgagagactgagaaaagtgctgaatgaagctctaggtccacattgtggttctgacagtctggttattttttggggtgtctgcatttggtttgcacgactcctccctccatttcactcttggttcactgtctttgaaaaaggaatcagaatcccaccttgtgccatgagcaagatttgctctgttggattttgacctttgggaaagagttttgttatctagtcttggacatggagttgtcaacttttaaaaaatcatcttaaatgggagtgagcatttctgacccttgggagggaaaaacaactttagatatcttggtaaatgggaacaagcataaggttgagatgaaggagaaatgcttccctggacacagtgcagattgtttctaccagcaatcgctggtggtggctccagctgagcaggatggggcaggcacccttgtgccactactacaggcgttctttytgatacatgcagctctttctgcaacaactaatcctcttcatctggactcttcagcctgattcatggccctcttttctgcctcatttttaaaaagtgttggcaatgatacagcagagaatgaaagtcactgatatctcattggggttctaaatagaaagtggcagaaaactgtgaggccctgaacaaatcatttccttttcttgacatcagttttttttaacctataatgactggctgaaaaaaaaaaaaaaagcatgaactctaagagccttccagctctggcattctttcctttttaaatattttttttctgaagacctcaagcacattatatttgtaattgttatttttaagctatatacacgcggcacacaaacatatacagtttaaatctctctgttagtgaactgtgcaaccagtgccaaatgtaagatagccttcacatttgacgggatatgcctttactactccagaccctcagttaacagagcaggtgatgaacattgcagttgcaacccaagagcataaagaacactccaacctccaacaacagtctaaaatgtcagactgctgggcatttagcagcatctgctttataaattaccatgtttatgtggtgttctcagaagggttcccattgttatttactcctcaatgtttggtgctaaacatcaaaagaacccgagcaccaaaatgtcaagcccagggaggaaatgtttcaagagaatttatttttgtaccaatttaatttttctctgaatttcaagaacaagggtgtggacctgacatcggaccattctgccaaatgggattcatccagttctaattactactccctttcacaggcccaaggatgccactctatgcttggcacatggaagttactggctggacagattgtactaaacaaaaaaaactccctaattacaaatgattagaaataaaaataaaatctgcactccaagtctgaaatttgtattactttatcctgaggtgtaaaggatttgagagaaggaaga

SEQ ID NO: 670219 - DNA, 511 bp, Homo sapiens
cctcctcattggaaactggactgatcacaaactctaggattgggtttgtgactccagatatgaagaattagaggcaccccatgcaggcatctaagcaggttattgcatcagaaagctactccacattgaccacagctcggattttaattcatgtgagaaatggacagaaaaagttaacttttccaccgcattactacattctaatcatatatttgcacataagaaagcaaaataatttgtttaggaaactagataaaccctggtcattgtctctattgaccaagtgaaaaaactatgtacaatcagttttatcatctccactaagctggttttacctattttcacatttggtatcaaagtaaaggtatacatttttcttatacattktataccagttgtacaaggcccttggttttcttgttttgttttatgtttagtggtttccatttatgtaacatatttctattgataaaagaaaaacttcagctgaattaatctaaagaagtttaat

SEQ ID NO: 670220 - DNA, 1839 bp, Homo sapiens
tgtttctctctcttcctctctcatattttctttaatggaaatccaattaggtagaaatcaatttattcacaataaaaatggaatgtctaaaaaaggagtaataaaaacatatagaattgatttattgtgctcagtttgaagaaaaaaatccctcagactggttgaatttaacaaagttaatttaagcaagaaaagtttcaagaactgggcaccacctaagacccacgatgattcagaaatgccccccacctcctatgtgttaagctatatttataaccagaaaacagaaaatgagagacagcgattacctgattggtacagtcaggcatttgccttatttgggcataatttggcagctttcctggaactcagctgcttgattaagaaggtgtatacttctaggttaagttgcaacttgtttacacatcaagcacatcaagctagggtacagttcactatgtacagggccactttgggccaaagttaatttagtaagtgcttttatctaataaactcttcattgctctccttttaatggtggagaaacagattgtacaacagggtccagctgtagcgaacgtgtttacaagaaaacccagtagcctcagaggaggctgcactttgtagggaaggaagggaacatctgagcatgggagaactgtgaagctaaggttaggtagccctgccatcttcccatgtcatcaaatttagccccatctgagaaagattccttaatacataccacacagtgatggctaatactgtcaacttgattgtattgaaggatgcaaagtattgatcctggatgtgtctgtgagggtgttgccaaaggagattaacattcgcatcagtgggctgggaaaggcagacccacacttaatctgggtgggcaccatctaaacagctgccagtgcagcagctagaatataaagcaggcagcaaaacttgaaaagactagactggcctagcctcccatcctacatctttctcccatgctggatgcttcctgcctttgaacatcggactccaagttcttcagttttgggactcagactggctctccttactcctcagcttgcagatagcctattgtggaaccttgtgattctgtgagttaatacttaataaactacyctgtatatatataggtgtatatatatgtgtgtgtatgtgtatatatatatatatatacatcctattagttctgtccctctagagaaccctgactaatacacacactacacaggtaaaatagaagagtaccttccttcccagccctaatagttcatgttttctggacagaccctaatactcacccagagttgcatgaggtttcaaatgagaattttgaggctgaccagttttatactgagcctttatccaacatttccctgtccagtgtggttaactataatatataactggaattttctctaccaatttctaaacctctttggaaacagaatccatgtcacctttggattctctacatagggatttttggttgtatttcagaagatggtatgtttcaatctgaactagttctaggtaaaattgtaaagtacacaatttaatttctctaatctcttagcctcctggttgtggataatttcttctttttttctggctatttttagattcccagtgtcctcgtattttctccttcaacccgacgtttaaaaaaaggggggtatccctgtaaaaaatcctgataaattcatttacactagataagaatgtactgtttctttaaaatgttcctctcactctcttctaaggagattttgcattatacctagtccaagagggattccagtggaaggaaaacaatgcctagga

SEQ ID NO: 670221 - DNA, 1839 bp, Homo sapiens
tgtttctctctcttcctctctcatattttctttaatggaaatccaattaggtagaaatcaatttattcacaataaaaatggaatgtctaaaaaaggagtaataaaaacatatagaattgatttattgtgctcagtttgaagaaaaaaatccctcagactggttgaatttaacaaagttaatttaagcaagaaaagtttcaagaactgggcaccacctaagacccacgatgattcagaaatgccccccacctcctatgtgttaagctatatttataaccagaaaacagaaaatgagagacagcgattacctgattggtacagtcaggcatttgccttatttgggcataatttggcagctttcctggaactcagctgcttgattaagaaggtgtatacttctaggttaagttgcaacttgtttacacatcaagcacatcaagctagggtacagttcactatgtacagggccactttgggccaaagttaatttagtaagtgcttttatctaataaactcttcattgctctccttttaatggtggagaaacagattgtacaacagggtccagctgtagcgaacgtgtttacaagaaaacccagtagcctcagaggaggctgcactttgtagggaaggaagggaacatctgagcatgggagaactgtgaagctaaggttaggtagccctgccatcttcccatgtcatcaaatttagccccatctgagaaagattccttaatacataccacacagtgatggctaatactgtcaacttgattgtattgaaggatgcaaagtattgatcctggatgtgtctgtgagggtgttgccaaaggagattaacattcgcatcagtgggctgggaaaggcagacccacacttaatctgggtgggcaccatctaaacagctgccagtgcagcagctagaatataaagcaggcagcaaaacttgaaaagactagactggcctagcctcccatcctacatctttctcccatgctggatgcttcctgcctttgaacatcggactccaagttcttcagttttgggactcagactggctctccttactcctcagcttgcagatagcctattgtggaaccttgtgattctgtgagttaatacttaataaactaccctrtatatatataggtgtatatatatgtgtgtgtatgtgtatatatatatatatatacatcctattagttctgtccctctagagaaccctgactaatacacacactacacaggtaaaatagaagagtaccttccttcccagccctaatagttcatgttttctggacagaccctaatactcacccagagttgcatgaggtttcaaatgagaattttgaggctgaccagttttatactgagcctttatccaacatttccctgtccagtgtggttaactataatatataactggaattttctctaccaatttctaaacctctttggaaacagaatccatgtcacctttggattctctacatagggatttttggttgtatttcagaagatggtatgtttcaatctgaactagttctaggtaaaattgtaaagtacacaatttaatttctctaatctcttagcctcctggttgtggataatttcttctttttttctggctatttttagattcccagtgtcctcgtattttctccttcaacccgacgtttaaaaaaaggggggtatccctgtaaaaaatcctgataaattcatttacactagataagaatgtactgtttctttaaaatgttcctctcactctcttctaaggagattttgcattatacctagtccaagagggattccagtggaaggaaaacaatgcctagga

SEQ ID NO: 670222 - DNA, 1988 bp, Homo sapiens
ggagtagaagatctgtgagcagtgtattagcctgttttcatgctgctaataaagacataactgagactgggtaatctataaaggaaagaggtttaattgactcacagtccaacatggctggggaggcctcacaatcatggtggaaggcaaaggaagagcaaagtcacatcttacatggcagcaggcaagagagcttgggtaggggaactcccctttttaaaaccatcagctctcatgagacatatgcattatcacaagaacagcacaggaaagacccacccccatgattcaattacctcccactgagtcactcccaccacacatgggaattatgggagctacagctcaagatgagatttgggtggggacacagtcaaaccatattaaagcagtgattcggggaaataaagaaaccaagagttaggacgaggatgaatgaagacttatgaggtagctgggagatgggtgagtgctcagaggaggagtaaaaggacagaacatttcctgtgttttcacaaattggtgtctctccccatttcatttgtttctgtcattacttctgttttttgaatgactatttctgattcaacctaggatgctcctcttccgctcccaagggggagccaagaattttaatgtctctatttgattatatcagtgtcaccttactctggataatatatttttaatatttttatttcttcatctcaaaraatacttttcaacatttctgttttctttttaatttttaaaaggcatggattcttttcctttaacagaaacataatagcattatttcatttaaaaataataattctttaatgtcatcaaatatctggctagttcaacctttccttttgcttttgtgactcatctattccttattttggcaatacatcagccctgactttttattatttacagacttggtttacttccttctgccaaagataaaagacaaaaattggggttttcataaaggttctcttactcctttagggagttaaacaaaataccagtaactaaaatcatctgaaacaaccagtttctatgatcttaaaaatgtaaacatgtcatcaaaatcaaatgtctcatatatatgtagcccaaaggtattaaaccttaatatcttaaggtttaaagtattaaagtaaatgccagagtgtccctgctttctaagagaggaaagggcattgcaagttcatgacagaatgaaagacttcagaaatttgaatatatttcccagagccagagggctgaaagttggttatacaagacttgtacaagcctccaggttatgaaagataaatattttagaagatagaaacagatatcttcccaccaagaaaagtggccaatgaaaaataatatctactgtgtagtagtcactgtattaggaactcttcatatgtgaaataattctcacagtaaccatgtagaggagagattatctagaccacattgcagacttgtaaagcaaaatttaaagaagttatctaatctgtccaagatcacatagttacaaaataaatatgttttcaggcctgttagactccaaaaccatggtctgttcatgataatagcaggttgacttctctgagcgtagttaaggtatgttagaatgtgctatgtctgcttaaagatgaggaaaaacaaatttgtatcacacctatgtaagcgtagtgctgaactaaactccatgaaaaggatctgtcctgtgaaccacaatgtcaaaggaagagaaatgtgcagtgttagagcagctgtaccacttgctgaaatttgatcataggtgactttcttatgaatgtacatttaattaaagtttccctttaaactgacccccctcccatatcagtcagagtttagtcaggaaaatagagccaccataagagttgcacaaataatgtatttttatgacattaactagattagttacttatagtaattagaccttacaataatgcgcaacaagcaggggaagtgaa

SEQ ID NO: 670223 - DNA, 1141 bp, Homo sapiens
  misc_feature 590, 591, 592, 593, 594, 595, 596, 597, 598, 599, 600, 601,602, 603, 604, 605, 606, 607, 608, 609, 610, 611, 612, 613,614, 615, 616, 617, 618, 619, 620, 621, 622, 623, 624, 625,626, 627, 628, 629, 630, 631, 632, 633, 634, 635, 636: n = A,T,C or G
  misc_feature 637, 638, 639, 640, 641, 642, 643, 644, 645, 646, 647, 648,649, 650, 651, 652, 653, 654, 655, 656, 657, 658, 659, 660,661, 662, 663, 664, 665, 666, 667, 668, 669, 670, 671, 672,673, 674, 675, 676, 677, 678, 679, 680, 681, 682, 683: n = A,T,C or G
  misc_feature 684, 685, 686, 687, 688, 689: n = A,T,C or G
tggaaactatcaaagttagttaatagactaaacctaatatttcagaaggttattcagcttcctttagagacctcctgactctctttttatctttttttctaattacaaatccttgacttcctccaacaccatacctatattttcagggctcagaggggcaactggggtgattataaactcttcaattccagtggcttttctacagacctaggaacccccttcatatagagatttactgagctagctctggatctgttcatttcatgggctctgaccatgaatttagatttcagcaacaatgagaatggcctcaataacagaakgatgacaggttttattaatgggcagatacaaagcaatgaagaacctaattatacagaaaatatacaatccttttagattgaagaagagaaaaattcagtaagttaattatgaactcaaagattaagaaagtaatttaaagaattaaaacatatcatttagaaattgtgctggttcagaaaatataggagatattagattttttacacaaactaaattctctaaagtattaatactttaccattacagtacttttaaaacagaaggannnnnnnnnnnnnnnnnnnnnnnnnnnnnnnnnnnnnnnnnnnnnnnnnnnnnnnnnnnnnnnnnnnnnnnnnnnnnnnnnnnnnnnnnnnnnnnnnnnnacaattgatctagatttgggtggggcatagatccaaacaatatcaccctacaaggtggatttggcacttgattaaattcttgagtttttgtttatttctatgattttcttattctccttatagctgaatcagattctaactacacacacacacacacacacacacacacacacatagcttaacactttttcttttatttctctgcttcctttttctttacttttatgtctttggtagcttttttttttttacaagtgaaacactgaacatcagagaggcactaagcagaatgtaatgtttcagtattaattttgaggtgcatgaagcaagaaaataatagtattgatattgacttatattgaaaagtttagagtgcattttcacggtacaaatgcacatatatgaagtgaatttaaggtcttaaagcaggggataacagaagattcgacata

SEQ ID NO: 670224 - DNA, 1613 bp, Homo sapiens
tgttcaccactgtttccccaggacctagaggagttgactagcagaatcttaagaaatactttgaataattgaagtgaaaacaagtcattttttaatattaatatgataaaaattagtgtatatttttattgagttctagtatatctttgaacttttctgatttttaccctaataaagcctgaagaaaatgcttttcatttgagatagtaagtaccttgatggtagggtctattttattttgttttctctttgcttattttatctttatatattacatagttactacaacagtgagtaaatgagatcaagtaggatgttaaacattttaacaaaataaaatgtgtaaagattatatattacagaaatatgtattcttcagtgaccaataaagtggccctgagggaaatttcaaaaaagagatgtgttagatcgttcttggattgctataaagaaatacctgagactggataatttataaagaaaagaggtttaactggttcatggttctgcaggctgcacaggaagcatgacgctggtatcttcttggcttctggggaggccccaggaaacttacattcatggtggaaggtgaagggggagcaggcatatcacatggccagagcaggagcaggagaggggaagtgaggaagtgccacacactttaaaaacaaccagaactcatgagaacacactcactgtcagaacaacagcactaaagggatggtactaaaccattcatgagaaatccacccccatgatccagtcattttccactaggccccaccttcaacactgggaataacaattcaatatgagatttgggcagggattttcaaaaataagcataattggaaaaagaccatggtattgacagagacagggcattatcaagagcacaaactctagaatcagatggcctgggtttaaattctagatcggctattgagagttttaaatgattgaatttttctgtgcctcagtttcctcatctgcaacctggggatgataataatagtgcccatgtcctaggattattgtgagattaaatgaggtgatacatgtcrcatgctgggaacagtgcctggctggcatatggtaagcactcactagataatagtgattgttatttcctgttagtctaaagtttgaaaggatagtactcatttaaatgtatatattatattctgcatatataggaggttatagaacactaggcggatttaacctaaagaagactacctcaaggtatttaataatcaaactcacaaatatcagggataaagaaaggatctcaaaagcagcaagagaaaagaaacaaataacatgcaatggacctcaatacatctggcagcagacttttcagtggaagccttacgggccagaagagagtggcatgacatattgaaagtgctgaaggaaaaaaaaaatttaccccagaatagtatatctggtgaaaatatccttcaaacatgaaggagaaataaagactttcccagacaaacaaaagctaagggatttcatcaacatctgacctgtcctatgagaaatgctaaagggggttcttcaatcagaaatgaaagggcattaatgaggaataagaaaccatctgaaca

SEQ ID NO: 670225 - DNA, 1613 bp, Homo sapiens
tgttcaccactgtttccccaggacctagaggagttgactagcagaatcttaagaaatactttgaataattgaagtgaaaacaagtcattttttaatattaatatgataaaaattagtgtatatttttattgagttctagtatatctttgaacttttctgatttttaccctaataaagcctgaagaaaatgcttttcatttgagatagtaagtaccttgatggtagggtctattttattttgttttctctttgcttattttatctttatatattacatagttactacaacagtgagtaaatgagatcaagtaggatgttaaacattttaacaaaataaaatgtgtaaagattatatattacagaaatatgtattcttcagtgaccaataaagtggccctgagggaaatttcaaaaaagagatgtgttagatcgttcttggattgctataaagaaatacctgagactggataatttataaagaaaagaggtttaactggttcatggttctgcaggctgcacaggaagcatgacgctggtatcttcttggcttctggggaggccccaggaaacttacattcatggtggaaggtgaagggggagcaggcatatcacatggccagagcaggagcaggagaggggaagtgaggaagtgccacacactttaaaaacaaccagaactcatgagaacacactcactgtcagaacaacagcactaaagggatggtactaaaccattcatgagaaatccacccccatgatccagtcattttccactaggccccaccttcaacactgggaataacaattcaatatgagatttgggcagggattttcaaaaataagcataattggaaaaagaccatggtattgacagagacagggcattatcaagagcacaaactctagaatcagatggcctgggtttaaattctagatcggctattgagagttttaaatgattgaatttttctgtgcctcagtttcctcatctgcaacctggggatgataataatagtgcccatgtcctaggattattgtgagattaaatgaggtgatacatgtcacatgctgggaacagtgcctggctggcatatggtaagcactcactagataatagtgattgttatttcctgttagtctaaagtttgaaaggatagtactcatttaaatgtatatattatattctgcatatataggaggttatagaacactaggcggatttaacctaaagaagactacctcaaggtatttaataatcaaactcacaaatatcagggataaagaaaggatctcaaaagcagcaagagaaaagaaacaaataacatgyaatggacctcaatacatctggcagcagacttttcagtggaagccttacgggccagaagagagtggcatgacatattgaaagtgctgaaggaaaaaaaaaatttaccccagaatagtatatctggtgaaaatatccttcaaacatgaaggagaaataaagactttcccagacaaacaaaagctaagggatttcatcaacatctgacctgtcctatgagaaatgctaaagggggttcttcaatcagaaatgaaagggcattaatgaggaataagaaaccatctgaaca

SEQ ID NO: 670226 - DNA, 426 bp, Homo sapiens
atatgtatacacatatataaattatttttaggtattctgttgcatcagggtttttgtacaagaattttttttctttttcttgcataaaacaaacttctcatatctacttatttgtctgacagattatgaccactgagtttttggcttactaaaccttttcaccaataattctttcttgactcgtaaagtttgggcaaggcctatctcttctactttatttcatttctcataatatgcaactcacytaattgtaattctctgtattcctcaggagcagtggttaatgattgattagttatacgtaaagtaattatttgtaaaggttttatttgcttccaaaataaaggggcctaaagcaaaggaaaaaaaaaaggcaaatactgcatgatctcacttatatgtggaatctaaaaaaaggtaagctca

SEQ ID NO: 670227 - DNA, 636 bp, Homo sapiens
gatcatcatgtagctattamtttatagtgctttgcatattctggtcataagcccattttcagataactgtcttgcaaatatcttgtctcactctgttaattacctattcagtctcttcaggtggttttggtgaataaaaatctctaagttttcatatttcctaagttattactgtttttctttaccattagctccctgtagtattaggaatctttagaaatctttgcatactcaaaggtcagcaaaataattttctgtgttttcttttcaaaattttacttcttatgtcactgttttaaatgaatttcaagattttttaaaaaatttgtattgttctggtattttactctaaactgttattgtttagattgcaatccatgtggaattgatttttgtatatggcatgaggtaaaggtcaagatattttttttcatatagaaatctaatctagcattattaatttaaagacattgattctcactgcccatagtatctcctttgtcacaaattagttaattctaattccaaactcttttttattccattgccttagttatctattcttgtgtcattactatctgcattattattattatcactttttaataggttttaataattgatagtataagtctt

SEQ ID NO: 670228 - DNA, 636 bp, Homo sapiens
gatcatcatgtagctattaatttatagtgctttgcatattctggtcataagcccattttcagataactgtcttgcaaatatcttgtctcactctgttaattacctattcagtctcttcaggtgkttttggtgaataaaaatctctaagttttcatatttcctaagttattactgtttttctttaccattagctccctgtagtattaggaatctttagaaatctttgcatactcaaaggtcagcaaaataattttctgtgttttcttttcaaaattttacttcttatgtcactgttttaaatgaatttcaagattttttaaaaaatttgtattgttctggtattttactctaaactgttattgtttagattgcaatccatgtggaattgatttttgtatatggcatgaggtaaaggtcaagatattttttttcatatagaaatctaatctagcattattaatttaaagacattgattctcactgcccatagtatctcctttgtcacaaattagttaattctaattccaaactcttttttattccattgccttagttatctattcttgtgtcattactatctgcattattattattatcactttttaataggttttaataattgatagtataagtctt

SEQ ID NO: 670229 - DNA, 636 bp, Homo sapiens
gatcatcatgtagctattaatttatagtgctttgcatattctggtcataagcccattttcagataactgtcttgcaaatatcttgtctcactctgttaattacctattcagtctcttcaggtggttttggtgaataaaaatctctwagttttcatatttcctaagttattactgtttttctttaccattagctccctgtagtattaggaatctttagaaatctttgcatactcaaaggtcagcaaaataattttctgtgttttcttttcaaaattttacttcttatgtcactgttttaaatgaatttcaagattttttaaaaaatttgtattgttctggtattttactctaaactgttattgtttagattgcaatccatgtggaattgatttttgtatatggcatgaggtaaaggtcaagatattttttttcatatagaaatctaatctagcattattaatttaaagacattgattctcactgcccatagtatctcctttgtcacaaattagttaattctaattccaaactcttttttattccattgccttagttatctattcttgtgtcattactatctgcattattattattatcactttttaataggttttaataattgatagtataagtctt

SEQ ID NO: 670230 - DNA, 636 bp, Homo sapiens
gatcatcatgtagctattaatttatagtgctttgcatattctggtcataagcccattttcagataactgtcttgcaaatatcttgtctcactctgttaattacctattcagtctcttcaggtggttttggtgaataaaaatctctaagttttcatatttcctaagttattactgtttttctttaccattagctccctgtagtattaggaatctttagaaatctttgcatactcaaaggtcagcaaaataattttctgtgttttcttttcaaaattttacttcttatgtcactgttttaaatgaatttcaagattttttaaaaaatttgtattgttctggtattttactctaaactgttattgtttagattgcaatccatgtggaattgatttttgtatatggcatgaggtaaaggtcaagatattttttttcatatagaaatctaatctagcattattwatttaaagacattgattctcactgcccatagtatctcctttgtcacaaattagttaattctaattccaaactcttttttattccattgccttagttatctattcttgtgtcattactatctgcattattattattatcactttttaataggttttaataattgatagtataagtctt

SEQ ID NO: 670231 - DNA, 1187 bp, Homo sapiens
  misc_feature 351, 352, 353, 354, 355, 356, 357, 358, 359, 360, 361, 362,363, 364, 365, 366, 367, 368, 369, 370, 371, 372, 373, 374,375, 376, 377, 378, 379, 380, 381, 382, 383, 384, 385, 386,387, 388, 389, 390, 391, 392, 393, 394, 395, 396, 397: n = A,T,C or G
  misc_feature 398, 399, 400, 401, 402, 403, 404, 405, 406, 407, 408, 409,410, 411, 412, 413, 414, 415, 416, 417, 418, 419, 420, 421,422, 423, 424, 425, 426, 427, 428, 429, 430, 431, 432, 433,434, 435, 436, 437, 438, 439, 440, 441, 442, 443, 444: n = A,T,C or G
  misc_feature 445, 446, 447, 448, 449, 450: n = A,T,C or G
gggaaattgaagctcaagaagaaaaagatgcttattatttctggaaataaatccaccaccatttatatttctagtctttcaaatttgtctattcaaaattttaatattttatatattcaaagaaataacgtaatatcacagatagatgatagataagcaggtcaacagataaaygatagatagaaatatagatttaagattctagaaaaggctgaataatcccagaatttcataaaagaacagaggggaatggcgaaaattacatcaatcctcaatggaaacaaggcagcttcagtgccatgccctgaccttggaacgatgctgatcctgaaagttagatctgcagtcaannnnnnnnnnnnnnnnnnnnnnnnnnnnnnnnnnnnnnnnnnnnnnnnnnnnnnnnnnnnnnnnnnnnnnnnnnnnnnnnnnnnnnnnnnnnnnnnnnnnagctccttattccttttctgttaattagatggtattctatttcagtaaagtacttcctattctctcacatttactcatttctgtaagtatggactcataggttcttatttattcagtaggtatagtttgtgatttatgcagatgctcaaattgccccagatttggccattggagaccctgtcaagtgggttcccttgcttttgaaatgtccccatgtttctttcagcacttttttactttctagaataacaaaattttccaaacttgtcttgtactttttctctcacatcctcgaattagccatttcttcacagctctagtttttttggtgaacaatagtatttagaagtcgatatgtaggtgttaagtgttctttttgcttctaggccctgtcagtggatggaactctggtttacacacacacatacacacacacacacacacacacacacacacacacttattcccatacctctttatctacctgcctgtctatgacattaaatactatgggtttatattggtaccttcaattccaacccaacttttctgtgtttgcatttactttgaatatactgtgaagatcttgtggctatctgaaatatttgtgttcaagaacatttttatggtaatgaaaagcctacaagttctatatattttcattaaaagaactttttaatgtagttcttgtatatacataggtgtctgaaataattattcaattaaaatcccgctca

SEQ ID NO: 670232 - DNA, 700 bp, Homo sapiens
agacaacattgagtggcctagaaaatagatttaaaagataatgtgaaaaatgtgacccagaaagacaaagagatagaaaataggaaaaagaaattaagagccagagcagagagtggggaaagccaacaattatttagttatagttttagaaggagataatagaatgaaaatgagccaatatttaatgacattatgtttgacaattatccagacccacgaaggacaccagttctcagatccaagaagcccaattaattcgaaaaagaataaatatgaaataaacttcacacaaagacatattatagtgaagccatgagcatcaaagaaaaatagtccttaaagccagtagacagcacsaacacatcacataaatatcaattaaacagacgactcatttcacattagtatatatggacatgagaagacaatgcaatgccctgaatgttatgcccaatgcaattattttttcaagaatgagaataaaattaaaacattttttggcatgataaaatatgaagtataccaccaacatgtctacactaaaggaaattctaaaagaaagaaaagaagaagcaggaaagaatagtgagcaaagaaattatgaatagtgagttaatccaaacaaatactatgtcaaagtaatcatgtttaatttgtggggaaatacaactaaaatatgggacaacagctagatattagt

SEQ ID NO: 670233 - DNA, 613 bp, Homo sapiens
gaattttgtcaaaggccttttctgcaactactgaaataatcgcgtggtttttgtcattggttctgtttatgtgatgggttatgtttattgatttgcgtatgttgaaccagccttgcatcccaggtatgaagccgacttgatcgtggtggataagctttttatgtgctgctggattcggtttgccagtattttattgaagatttttgcatcgatgttcatcagggatattggcttaaaattttctttttttgttgtgtctctgccagattttggtatcaggatgatgctggcctcataaaatgagttagggaggattcctgctttttccattgtttggaatcatttcagaaggagtggtaccagctcctctttgtacctttggtagaattcagctgtgaatccgttaaaatttcaattcaytgttttcaagtttgtattactctttttgataagttagcagttttccttactgtattactgttgctcatttgaaggtaaaatgtatttttttgggctgcctttaagatgtccttctgtcttctgttttcagtagttttactattctgtgcctgcatttttgtgtgtttgttagcttatttatctgtttagggtt

SEQ ID NO: 670234 - DNA, 632 bp, Homo sapiens
atatccattattatatttcaataacgtattcttacrgtgtctaatcaacttacaccctgggaactgattccaaaattccatattgcattaatttacaaaatttacagtgacctcactttcccttcagtgtatctgcccttccttctagattccattatcactagactaaaagaatcaaaccactgttttgtaataataatcccaattctcaccaacacagttagtacaagtaaacaaaaagaaagcatttgcaaacagatgtcaggacgctattatttgctgaagatctagctcagaagataactagattttttggtatatgaggaactataaaatttgcaacctttaagaaaattttcatattgaaatagcaaaacctacatttctaagatgccagatataatagcattcaagaggaatggattattttaaatatttctttcagtgttctgattcaagaaagtcttaatacgaaaaaaatgtgctactatattaaattattcaagtaaaatatggaacacaaaaaagacaatttttctcccaattatatcattcagctcattcagccatgggctttcttaaaaataacagtagacactcttgcatgtctctagtcttgatagcataaaagc

SEQ ID NO: 670235 - DNA, 632 bp, Homo sapiens
atatccattattatatttcaataacgtattcttacggtgtctaatcaacttacaccctgggaactgattccaaaattccatattgcattaatttacaaaatttacagtgacctcactttcccttcagtgtatctgcccttccttctagattccattatcactagactaaaagaatcaaaccactgttttgtaataataatcccaattctcaccaacacagttagtacaagtaaacaaaaagaaagcatttgcaaacagatgtcaggacgctattatttgctgaagatctagctcagaagataactagattttttggtatatgaggaactataaaatttgcaamctttaagaaaattttcatattgaaatagcaaaacctacatttctaagatgccagatataatagcattcaagaggaatggattattttaaatatttctttcagtgttctgattcaagaaagtcttaatacgaaaaaaatgtgctactatattaaattattcaagtaaaatatggaacacaaaaaagacaatttttctcccaattatatcattcagctcattcagccatgggctttcttaaaaataacagtagacactcttgcatgtctctagtcttgatagcataaaagc

SEQ ID NO: 670236 - DNA, 686 bp, Homo sapiens
tgagggtgtgccctacactctgcccactaggagggctggcccaccatcctgtcgctagcccacccctgcccactggagctggtgtcctgggcaggagcccctgcaggaggaatggacaaatggctccaccttacccccratcacaagctcacctgtcaaacagtggcttctccccacagtcgaaggaatcctgcaggtccctcaccaggttggcctggcctggcatgcggaacagcccctcctcagtgagcccgcgctcccggatgaagtccacacactgctccaccagcaggggcgccaggcgggggccatacttccgctcgtggtggactgtttcctctaggcgctgcccaaagatccctgagcacagagaggagctagtcacaccctccaccacccagctcagtgttgggtgctcaggacaatggagggcaggcgcactgttagggctaaaggtggctcctcctcaggaagcaaattacacactgggaggatgcataccagaaggctgtgccctggccgcccggacacatgctgggaggatgcacaccaggaggctgggccctgggctgcctgtggacagacagcaggagggagcagtgagatggtggtgtgacctggccatggagcttgcccaagccaggagcaaatggcccttgggagcgttcattatgcctgtcattgat

SEQ ID NO: 670237 - DNA, 686 bp, Homo sapiens
tgagggtgtgccctacactctgcccactaggagggctggcccaccatcctgtcgctagcccacccctgcccactggagctggtgtcctgggcaggagcccctgcaggaggaatggacaaatggctccaccttacccccgatcacaagctcacctgtcaaacagtggcttctccccacagtcgaaggaatcctgcaggtccctcaccaggttggcctggccyggcatgcggaacagcccctcctcagtgagcccgcgctcccggatgaagtccacacactgctccaccagcaggggcgccaggcgggggccatacttccgctcgtggtggactgtttcctctaggcgctgcccaaagatccctgagcacagagaggagctagtcacaccctccaccacccagctcagtgttgggtgctcaggacaatggagggcaggcgcactgttagggctaaaggtggctcctcctcaggaagcaaattacacactgggaggatgcataccagaaggctgtgccctggccgcccggacacatgctgggaggatgcacaccaggaggctgggccctgggctgcctgtggacagacagcaggagggagcagtgagatggtggtgtgacctggccatggagcttgcccaagccaggagcaaatggcccttgggagcgttcattatgcctgtcattgat

SEQ ID NO: 670238 - DNA, 644 bp, Homo sapiens
aacaggtcaaacgcatctgtgctgttaggccgggacatggttcccttggtgggtcagtgactggaaggggctcaaaggcttctggggtcctggtaacactgtgtctctcccccagcactgcttacccagttatgttcctcttgagaaaattcactgaactgtacacttatgacttgtatgcwtttctgcatgttactcttaaataacattagcaaaaagaaagaaaagaaatcagagagagaatgatctaaaacaatacatgacaagacaccaaatgaggaatagagggagagaggaaggaggcagaggaacttctgagaaaatctatgaaaactaaatatatcactaggctaagaggttcctggcagcccaggcaaagaagggaaggagttgagatccataaagctgtctacaccacggcacagtaactggagaaacagacttgtgccagcccctaagctctacaaggtgcgtgcctgactctttggagtgtctgacattattcacacccactgtgcagagaccttccctgcagggtggcttgtggggtgttccaggggcaagatgccaaagctccatgtccaggcttgggacttctcagagacctgggcactgagccagctaaaagtggggctccatttgtc

SEQ ID NO: 670239 - DNA, 661 bp, Homo sapiens
ttgtatgttacagcttttcaaagtccttactcttcaaagcatcttgtttaccagccttttctccagagctttaggttagtctattttttgctccaactattatccaccacctgaggcagcagtgagtaaaacattttcctctaaatgtttttgacaaaattccacagatatctgctttagcattggaagagttctgkgttaggtgagatgaaggcaagcctttgaaccagcttttgggtaactaccaaataggtcaaaacaaataattttagctatttgcagatgaagtccattgtgcttcctacagtaatgatactgtcaccagggctgtcatttgcaagactcttgcttattggagagctggaatgggactagggtaagttaaattgcaacaaaccttgctgttcttactgagactcagctgggttttcctgattaagcattcccctggctgatgcaagctgttggttagtttctagattccaaaacactgatttgtcacttttttgttgttgttgctgctgctgctacaggagacagaattttgaaatgtcttactctgccattttaactgacaccattttcctcagctatttattttaaaaatgagtgttctgtattatatttagcatgctgagtatggggcttttttcataagggg

SEQ ID NO: 670240 - DNA, 661 bp, Homo sapiens
ttgtatgttacagcttttcaaagtccttactcttcaaagcatcttgtttaccagccttttctccagagctttaggttagtctattttttgctccaactattatccaccacctgaggcagcagtgagtaaaacattttcctctaaatgtttttgacaaaattccacagatatctgctttagcattggaagagttctgtgttaggtgagatgaaggcaagcctttgaaccagcttttgggtaactaccaaataggtcaaaacaaataattttagctatttgcagatgaagtccattgtgcttcctacagtaatgatactgtcaccagggctgtcatttgcaagactcttgcttaytggagagctggaatgggactagggtaagttaaattgcaacaaaccttgctgttcttactgagactcagctgggttttcctgattaagcattcccctggctgatgcaagctgttggttagtttctagattccaaaacactgatttgtcacttttttgttgttgttgctgctgctgctacaggagacagaattttgaaatgtcttactctgccattttaactgacaccattttcctcagctatttattttaaaaatgagtgttctgtattatatttagcatgctgagtatggggcttttttcataagggg

SEQ ID NO: 670241 - DNA, 661 bp, Homo sapiens
ttgtatgttacagcttttcaaagtccttactcttcaaagcatcttgtttaccagccttttctccagagctttaggttagtctattttttgctccaactattatccaccacctgaggcagcagtgagtaaaacattttcctctaaatgtttttgacaaaattccacagatatctgctttagcattggaagagttctgtgttaggtgagatgaaggcaagcctttgaaccagcttttgggtaactaccaaataggtcaaaacaaataattttagctatttgcagatgaagtccattgtgcttcctacagtaatgatactgtcaccagggctgtcatttgcaagactcttgcttattggagagctggaatgggactagggtaagttaaattgcaacaaaccttgctgttcttactgagactcagctgggttttcctgattaagcattcccctggctgatgcaagctgttggttagtttctagattccaaaacactgatttgtcacttttttgttgttgttgytgctgctgctacaggagacagaattttgaaatgtcttactctgccattttaactgacaccattttcctcagctatttattttaaaaatgagtgttctgtattatatttagcatgctgagtatggggcttttttcataagggg

SEQ ID NO: 670242 - DNA, 638 bp, Homo sapiens
agcacatgtgcacgagactctcacaaaggccaaaggtgtacactgagatgggagctggattttgaaacagatgaggacaaaaaaaaggttgggagaaaagaagtgttggtcagaggtaggagggcatcatccagcagcaccttctggtgagctgagattactatcggtcctaaccaaaagtccagggttttgaaggacgacctgtggtttccagcctgagacatacagtgatgaggctgacagtataactggggagatagggaaggaaatgccatcagtgagagaatggaaaagtgggggactgcaccatctgtgccaatttaaaaggattaggaagtgagagaggagaacaggaatggggaacatggcagagaggcataatgtgggcatcagttagaattctgtgggttgtgagtcacagaaaggaaatccaaatcagctaaagccagaaaagagaatttattggaaaaatcctttgtaagctggaggaccaggttagaaaatggacagaatgatagtggctacagagagyctaaaagcaggaagcacaagtatagtcttcttgcaggaagagcctggggaggacacccctgcagagtgccacctgtggaaaagcctcatcatcacagcaggtgtca

SEQ ID NO: 670243 - DNA, 2311 bp, Homo sapiens
tcagtcatgaatatgcaggatagcaagactcttcttttgaagaggtgttcaaaatattttaaaccgcaagtgcatcagcctgagtttcctacttgagagaagtatttgggttgagaatccttagaaaagtggccaagggagtccaaggaggggcttaggtgatgcaggggaagggccactgtcaagggatggagcttggatgttgtaaaaagatggggctggccttggagttctagagcctaagagaaggaagacctgagcgatataggcaatcagagctccatagagaggcaagattagagagatgtaagaccaagagctgagcctcagtctcccgctgaccccgcacctctagcagtggcacagtgcgagaaagcagagctgacagctgcgcaggcgcagcgtgtactcttcaggtgtgccaggacgactgcttccagaagacaccgcgggcccagaggacgctgggaaagacgactagatgctttctgcagatgctagtgcttcattgcccgctgcaactgccttctcctgggtattgggatcagacagtggtgagtcaatagatgactgcatctacgagtaaataaacacacagggctgatagtctgatggcatcttcagaggcacaggtgcaaaaaggcacctggctggcctcaggcttgtccacctggatccctgaggtgcaggtggaatagagaaagcctcagaggctgaagaaggtgatctgctgaaaagaccaatttttattttattttgttatatgataaacccatatgacgtaaaacagcattctatccattttaaaggatacactttaaaataaaatttttattttattttattttattgttgaaataaatttcaacaataaaaaacatttattgatgtcttactgtgttatggtgcaacattatgaataaaattcagagtccttatcctggcttacaatgagttactctgaccttcctgcaggattggaaagtactccttcttcaaaatagtatctgttcagtttaatttgcatttcatttccctggtgattagtgatgttgagcattttttcacgtttgttggccatttgtttatcttcttttgagaaatgtctgttcacctcatttgcccactttttaatgggattggtttttccttgctgactttttttgagtgcccagtagattttggatattrgtcctttattggagtatagtttgcaaatattttttcctattctgtaggttacttattttctctgttaattcttttgctgtccagaagcttttttgtttaatttggtcccatttattcatttttgtttttgttgtctttgtttttgggggcttgttggtcaccagttggtctaggtgcagcagagagcatatcactcagcccagagaaagggtgagaatgccttttacaaagggtagttgcatcttgttaggaataaggtattgcatggaaatttacattatgtgtaaaaggatgagtagccaaaaagtgaacagtgcagacttttaaactatggctcttagcagccaatttgcaggaatctcaaagggcagaggaatatttgaagtttgtcatgtgtcagcaaaaccaggcggtaggagatgctgcgattgttatgacgaaactttagacaaattaaattgagcaaactttgggtaaagaatgattcatgaactgtgcagcctacagaaccagaacaggttcagagtgactccggggctgccacgtgataagacaacatttatgtgcagaagatggaagtgagaaatagctgaattggttattgcttggtgtttgccttatgtcaacatgattttaacagttggcagcctatgattggccaaaaccctgtaattggtacaagagtaccaattatacatccagttagattattctcactatgtatggagagacgtttaggccaaacttaaataagaaggcagctttagtctaaaattaacaagataaagacctaaaggaagagaagcaacatgcatggcaggggaatatctaggggttaggggaatgtgaattccaggaaacaagtgcaagttccctgagacagaaacatcctaatgtgtttgagaaagagccaggaggttaattttatggggagggagtaagcaagagggagcatgagagcacttgcatgccacggaaaagattttggattttgttttgaatgagccagaaagtcatttaatggtttttccccaccccactctcctttggggtgaggagaaagtggacagcgatgtagatcaaacataaatggccacaattgttgatgccgatgatgaga

SEQ ID NO: 670244 - DNA, 647 bp, Homo sapiens
cctcacaagtttctattgctccctattccatattatcttaaagcttccacttttagagcttattgcaacaggaacattccttccaggcagagcagggggcaaattaactctctcttagcgtcaccmcaaaactaaccgccttggaaaggcggactcacactgcttcaagtcagcagaggggtggagtttgaagcgcctggttttcttaaagggcccaagtcatggttaagcttaagaatgtagtggccttcagtggaatttggaggaaatttgcattttgacatgggacttgtaggtagtaatcgtggttagaagactttagggagaaagccatcttctaaagcttccctgctaatacagatgggaataaactggagaatattttttcaccgcggtttttattgttattgcaaagcagaagcgtgtctaattttctacttcttgtaaaagtgatttcccttataaacagatcatttatcacaacactggttccgtaatagcattacaatggaaacaccagttacaaaaccaataatatcattataaaattccttctcagctttctaggggaaatgaatcacaagaacaaatggtagtatgtgctgcctggaggaagaagggacagatttaggtaatcacctcctttg

SEQ ID NO: 670245 - DNA, 647 bp, Homo sapiens
cctcacaagtttctattgctccctattccatattatcttaaagcttccacttttagagcttattgcaacaggaacattccttccaggcagagcagggggcaaattaactctctcttagcgtcaccacaaaactaaccgccttggaaaggcggactcacactgcttcaagtcagcagaggggtggagtttgaagcgcctggttttcttaaagggcccaagtcatggttaagcttaagaatgtagtggccttcagtggaatttggaggaaatttgcattttgacatgggacttgtaggtagtaatcgtggttagaagactttagggagaaagccatcttctaaagcttccctgctratacagatgggaataaactggagaatattttttcaccgcggtttttattgttattgcaaagcagaagcgtgtctaattttctacttcttgtaaaagtgatttcccttataaacagatcatttatcacaacactggttccgtaatagcattacaatggaaacaccagttacaaaaccaataatatcattataaaattccttctcagctttctaggggaaatgaatcacaagaacaaatggtagtatgtgctgcctggaggaagaagggacagatttaggtaatcacctcctttg

SEQ ID NO: 670246 - DNA, 607 bp, Homo sapiens
gagaccaagaaagagaggaaagcacaaattcacaacatttataaagttaaagaattcttcgagatggcctaattcaatgcttccttgtccatacataattaagtggaaaggccagagaggttatgaggtgcacagggttatagacccacactagaactcccaagttcttgacttgctatatacatcccactacgctgtgctactggttccctgcaagctctcagaactcttcttatccatgcttcatactcggagagagtgaggcaagggcagatcttaaggccagctgaatgaagttctttacattgccactagtaggattcagaagaatcaggaatacacagaaaatgcagagttaggaaacgtcgtctagagagggagaatggaacaggatttggaagtaatggaaggtcaagactgatgagagagggaaaggcattccaggtagataaaactgatatttgaagtctccatgcaaagaaagaatgagatatgttggtgaggagcacaataacaaaagtgataaaaatatggaatactagctcaggccaacaatactcagataatggagcgcatttcatmtaacactaattttcctcctctagca

SEQ ID NO: 670247 - DNA, 1303 bp, Homo sapiens
atttctgcagtgtttccttacccaaggaccagctcctctctctctcttgcagatagttataaagtctctgccccattctccctcttcctctcttttcacagtgcccctctgattctagggaagtaaaacgaagaattggactctacattctttgccatcagaacagctaagttgataaagcagaatgaggagaaaggaggctagctgcattttggggctaagggttttaagactggggagaccaatatttgtattttaaacccagatgatatttaaaaaatggttctgtaattgcaatgaggccctctaggccgtgaattaatgtgtcataactcacgcccaagcactgcgcaaacattctgcgtgtgaattattgcacaataaattcatgccctgttgtgtcttacagcttaattagtacatgaagctacatgagttagacgaacccaaatgggattatgtcatgtggtgcgtaaaaaagcaaaatgttgggaggtatttggagctttttctggggggaaagcagggttgatttttctatgatgtccttcagtgtcagtttctgtgatgtttgggctgcaacaggtgacatgttccctgacatgtgacttctgagctttggttggctggttaaataatggatttagtaaatatttattgtatatcatgttctaggcattatgaaacgatagcacatgtaatgaagtatggcccctgcccttaaggagcttatattctaatacaaaaagtaaggtatagccgcaatacaaagtagaaagtgataagtgccataagtaacatatgagtaaataaagggtcttgggaattcagagtggaggatgatccttttgggttggcacagtggtgagggttgattggtgaaatcagagacattttttggaggaatggcatttgagttggctctcttaaaggacagataggatttcaccacctgggcaggtttggcggggggtgctggtctgggcagtggattctaggcagagggagtaatgctagggaaagcacaggaaagtgaagcagtgtcctgagcacaccgagcgggctgtgttgcttgaggcttggctgtgtgaaggggcaamatggacaggcggattggagccagagctttcctgtgcatacaaagcacttgggctttaagcccactaacccctgggattggttcttctactgggtgatatctgtactcttggacttgaatttttctctactattgtcttctttggtctacctgctcagagagtacacagctgagggccaggtgtcctgggttctagtcttgtct

SEQ ID NO: 670248 - DNA, 561 bp, Homo sapiens
atatttattcttacactgagacaaagaaactacccgtagagcaaatgtcctcaagtaggatagctggaatctgcctttaaagttagccaccaagcatagctatagactaaccatgttaattcactgatcctatcagttagttctctcacttgaaactaagggtggtaaattgaacttcaccacactattgaaaagataacaaaggaatgtggcacctgccaggtgactcagcatgagtcactcaagacacctacttgtccactaaaggtaacgaggaagccttaatcaaaaatatgcaataatactgtagagctattcaagaagagttgatacttgagaaaatatcaaaattcagcaagtggtttagtttcatctcaaaacttcacctcagcaaaaatagctctgagctaattatctgcaacaggaactgtcagtctttttttctggcagcaaggctacakatatttgattcagatcaattaagaatctgtggttcataaaacttccaaactcttgagttttcttcttcttagtcaacctccttagagctaaaacgaaaga

SEQ ID NO: 670249 - DNA, 1276 bp, Homo sapiens
tggctctctcctcccttcctgaaggcctctgctcaagtgtcacccgatggacaactcttccgaaacagtttacctgccctaacgctattctccttaggcagctgttcatccttccagccactctgccagatgcattttatatgtacttatcatctgtgcctccaatagaatgtaagttccctgacggcagaggcttgatttttgctcactgcagaatcccctatgtctagaacagtgcctggaacatatcagaggctcgttaaactttttttttttttccacaacctggcatgtggagcatctctggttcacacagcaaaatgcacatgatcattgataatctccaagggtctgtttagcctctctcttgagggatgtgtcacagggaaatacttatcaatgtcttcatgttcattaggggacagcatttctctgacaggagaactcaaacacacttggttcactatcccatcctctggtctcaactgattgaaacagtgcaaagccaggaagacatatcacagcaaaagaaacttgaggctggggtcagggttgagagatggaagagtggagagaacagggcttcttctaggtttaggattatttctacccagatctgtttagggatgtattactgtccccagttaacagataaaaagattgaagttaatcaaaataaaggtctgccagctaggctgtaccaatatcaggatctgaacccaggcctgtcttctctaaagcctccaactccacctgcctgctcccacctcagacgccctacagacttgactggcctcagaaacagcattgtttctccaagccgtaagtctcacttgtcaatgaggaggccagagacaggctgtgcagcctctgatgggtaccygcctggggacccttggctgccaccttcttctggaggtttgggcctaaaggagaggggctgcccacaaccagagcttggctgcttgggtgatggaaccctcactgactccagtaaggggaccttctttcctttcactctttgggaaaataacccacctgcagagaagctgaatcttgcacattctggtacatctgcatatcctctctaacttacagggcataacacagaaaatggattcattcaaatttcaccatagtggacagaataacctacaagttaacacattagggttgcatacattccagagcagccttgatagcttataatttattcagttatctggacttttgctggacttcagtttcctcaacagtaaaatgggaacagcaccat

SEQ ID NO: 670250 - DNA, 3427 bp, Homo sapiens
  misc_feature 870: n = A,T,C or G
cacaaaattttaaaacgtcttttacattttccaattttaatgtgaaaaaggagtggtacagttatgcaattatgacatggtctgtcatatcaacccacattttttcatccttttgtgtaccagaatgttaaatattgagcatactttagatgccagagactctccatattttcatacataattgatgcttacagcaatcccatgaaataatttgttatctttattttacaaatgagaaaattaaagctgacaaagctattgtagagcactaggctggttcacgctttcaaataccgggcttctagaggtatttttgttttgctttgttttgttgcttgttctactattatctttgtctcaagaaaacagctcttttactaaatatgtgtcatattcttgtttaatcccaattcaaatattatttccttcaaatcactaaagtttgttgattttgactattgctttttgcatattttttcaaggagaatgagagtatttatcttgtatatagtagaaataaggtaaatatatattttaaatgtgtgtgagtttttttctaaataataagaaaatttagtacaataaatgtttttctgagtcagaacttcactcatttctttaatttgccactaagaaactttgtaattgtaggaaattcattggactctcttggtcctagtttccttatctgctgaaggacaaggataaatgaaggatatcacattgtttgtgtagctcttagggtttatgaatcactgatttttatcattcaattactgttaccctgtaaatcataaaaaatattacaagagaacgtgcatttctgaggagttaataaaattgccatttactgtctacattataacatcntacattttcttctgaatcttcatttgtcaaataaacataattcatatgtattgtttctatgtttgtatcagtctaggacatacctagaagtctcaagataaatgatcctccaattacatatttttctgtatacaatgaaaggtggtttataaaaaatctatacctacaagctgaattttgtaaccgtaaaaggaatttttattttgtacatacatcatactaataaattaaatttttaaaattctaaatmaattcagtaactttcagtaggcatttgttagaaatagatttttttaaatatgcacaatataaaaatttgaattaaacaattcatttgtatttaaatatgggacactgttatatttaacaactttttaacaagactactattcaatgaacaagatacaaaatacattttaagagagctgaaaataatcaaaatttgactgaatttaggtaaatagattggaatacatttcaaataaattttccttataatctccctaaaataaaattgtatgatcttaattgtcctttgaccatattattcacacatacacagatgtcttcactttcttatttataatgtttctataatatagaaacaaactgtcatacactgaggggtgtgtgtgtgtgtgtgtgtaaaaataattattgaggttttctttcaaagggtaaaggtatatttacatatattgttatatattatatatctatctatattagatagatataaaatgtatctgttatatagaaagaacagtccctttgacctgtttgatacctgactctccagacatatcgttaagcatatttggttgatatcataactactcactcatttatatttaagtaaatctgtcatttgttttctgaggttctgttttatgggattttagactataaaagcaaaacaacaagcagtgaggtgaaccacaaataacattatatacgtgggtaaggtcttacgagtcaattggagaagttgctttcttgctcttcataaccactttaaagcattttaaagctctgttgtcacttgaaagtaaaatgtttacttggtaaaacaaagctttttaaagaaaaaaataaacctagctgaatatcttctgaccttctttgtttcacagaaataagccttagcatttatcttaaaattatatcctgaatatcacgtatcaggaatgatgcaaacagatcaaaatggattacatttttttttaaaggggaatgaagcttccatttgagatatcatgcattttacatttctttatttttgttcataatgatcctgatgagtatttatcagggcatttgtcaaggatgtactcttaactaataatatcttactgtattttacaaatgctgtataaactctctgtgactcagtgtcctcaaccataaaatggcgagaccagttcttacctcattgatgtgttgcaaggattacatgaccaaactatgtaaataacttagaatagagggctctctaataacaatgaaaataatggaatcttaaaatattcgtgatcaggtggcagttcttgaccaccagaagacagtgtctccaattatcatagtgagtgaataggtgggagtggcagctaagaaagttgaccagagagatgcttggagatgcttaaataaaaatggcatccttaagcctaagtaagaatggtataactctatgtatataataaaataaataaagcccatatcttcaaaatcaatggactgtaagtaaatcctggtcaccagcgagaatgacccagcaatgtcacaggaagcctgtaatggaaatgatttgcccagacctcccctctggtgtcatacagctatttaattgagtaaccaaatgatatgaaaacaggaatattttgtcttttttgtacttaaaatatatttttaatgaggtaaatataacataaaaccattttcaatattctatgtgtatagttcactataataaataataatatatataataaataataataataaatataataagtacatttatatttttgtggaatcattattactatccatacccagtactatttcatcttctcaagttaaaattatgtaaccattaaacgataattcccaatttgtccctcctccaatctcctagttaccactatcttactttctgtctctaagatttttgactactacgggtgcaatcataaaaatgaaatcatacactctttgtctttttgtctctggcttattttagcataatatcttcaaggttcatctatgttgtaacaagtgtcaaaatttaattcccatgttaggcttaatactattctgttttttgtacataccagagggttatagaaaattaaaatatatatatatatatttctggcctcacactggggcacttgtccttgtgataaatgaccacatgtccacaactaagcgaccaacagtaatttataaaaagatggaagttgtacatgtaggcttaggcatgaatagcccaaagggcacaagcgagctgtatgataaaatatcctagaccccaaagtcatcatcactgttgcac

SEQ ID NO: 670251 - DNA, 3427 bp, Homo sapiens
  misc_feature 870: n = A,T,C or G
cacaaaattttaaaacgtcttttacattttccaattttaatgtgaaaaaggagtggtacagttatgcaattatgacatggtctgtcatatcaacccacattttttcatccttttgtgtaccagaatgttaaatattgagcatactttagatgccagagactctccatattttcatacataattgatgcttacagcaatcccatgaaataatttgttatctttattttacaaatgagaaaattaaagctgacaaagctattgtagagcactaggctggttcacgctttcaaataccgggcttctagaggtatttttgttttgctttgttttgttgcttgttctactattatctttgtctcaagaaaacagctcttttactaaatatgtgtcatattcttgtttaatcccaattcaaatattatttccttcaaatcactaaagtttgttgattttgactattgctttttgcatattttttcaaggagaatgagagtatttatcttgtatatagtagaaataaggtaaatatatattttaaatgtgtgtgagtttttttctaaataataagaaaatttagtacaataaatgtttttctgagtcagaacttcactcatttctttaatttgccactaagaaactttgtaattgtaggaaattcattggactctcttggtcctagtttccttatctgctgaaggacaaggataaatgaaggatatcacattgtttgtgtagctcttagggtttatgaatcactgatttttatcattcaattactgttaccctgtaaatcataaaaaatattacaagagaacgtgcatttctgaggagttaataaaattgccatttactgtctacattataacatcntacattttcttctgaatcttcatttgtcaaataaacataattcatatgtattgtttctatgtttgtatcagtctaggacatacctagaagtctcaagataaatgatcctccaattacatatttttctgtatacaatgaaaggtggtttataaaaaatctatacctacaagctgaattttgtaaccgtaaaaggaatttttattttgtacatacatcatactaataaattaaatttttaaaattctaaatcaattcagtaactttcagtaggcatttgttagaaatagatttttttaaatatgcacaatataaaaatttgaattaaacaattcatttgtatttaaatatgggacactgttatatttaacaactttttaacaagactactattcaatgaacaagatacaaaatacattttaagagagctgaaaataatcaaaatttgactgaatttaggtaaatagattggaayacatttcaaataaattttccttataatctccctaaaataaaattgtatgatcttaattgtcctttgaccatattattcacacatacacagatgtcttcactttcttatttataatgtttctataatatagaaacaaactgtcatacactgaggggtgtgtgtgtgtgtgtgtgtaaaaataattattgaggttttctttcaaagggtaaaggtatatttacatatattgttatatattatatatctatctatattagatagatataaaatgtatctgttatatagaaagaacagtccctttgacctgtttgatacctgactctccagacatatcgttaagcatatttggttgatatcataactactcactcatttatatttaagtaaatctgtcatttgttttctgaggttctgttttatgggattttagactataaaagcaaaacaacaagcagtgaggtgaaccacaaataacattatatacgtgggtaaggtcttacgagtcaattggagaagttgctttcttgctcttcataaccactttaaagcattttaaagctctgttgtcacttgaaagtaaaatgtttacttggtaaaacaaagctttttaaagaaaaaaataaacctagctgaatatcttctgaccttctttgtttcacagaaataagccttagcatttatcttaaaattatatcctgaatatcacgtatcaggaatgatgcaaacagatcaaaatggattacatttttttttaaaggggaatgaagcttccatttgagatatcatgcattttacatttctttatttttgttcataatgatcctgatgagtatttatcagggcatttgtcaaggatgtactcttaactaataatatcttactgtattttacaaatgctgtataaactctctgtgactcagtgtcctcaaccataaaatggcgagaccagttcttacctcattgatgtgttgcaaggattacatgaccaaactatgtaaataacttagaatagagggctctctaataacaatgaaaataatggaatcttaaaatattcgtgatcaggtggcagttcttgaccaccagaagacagtgtctccaattatcatagtgagtgaataggtgggagtggcagctaagaaagttgaccagagagatgcttggagatgcttaaataaaaatggcatccttaagcctaagtaagaatggtataactctatgtatataataaaataaataaagcccatatcttcaaaatcaatggactgtaagtaaatcctggtcaccagcgagaatgacccagcaatgtcacaggaagcctgtaatggaaatgatttgcccagacctcccctctggtgtcatacagctatttaattgagtaaccaaatgatatgaaaacaggaatattttgtcttttttgtacttaaaatatatttttaatgaggtaaatataacataaaaccattttcaatattctatgtgtatagttcactataataaataataatatatataataaataataataataaatataataagtacatttatatttttgtggaatcattattactatccatacccagtactatttcatcttctcaagttaaaattatgtaaccattaaacgataattcccaatttgtccctcctccaatctcctagttaccactatcttactttctgtctctaagatttttgactactacgggtgcaatcataaaaatgaaatcatacactctttgtctttttgtctctggcttattttagcataatatcttcaaggttcatctatgttgtaacaagtgtcaaaatttaattcccatgttaggcttaatactattctgttttttgtacataccagagggttatagaaaattaaaatatatatatatatatttctggcctcacactggggcacttgtccttgtgataaatgaccacatgtccacaactaagcgaccaacagtaatttataaaaagatggaagttgtacatgtaggcttaggcatgaatagcccaaagggcacaagcgagctgtatgataaaatatcctagaccccaaagtcatcatcactgttgcac

SEQ ID NO: 670252 - DNA, 596 bp, Homo sapiens
taatacgaggttgctaaagcctctactcctaaggaatatctggaggcattartggggagtatttattgtattgcaatttgttcagattatagacttttgtcattggggtccccattgaagatgggctgatttttgagtaacagcattataggtttaagtaaaatttgtaaacaaggaatgtgctacttccagaacccaaaaaggcctaaaaggtgttgttttttctttaatgttgtgggtactgacaggatcaatagctgtttgttgacagtgtcacagatgcagtgacccttggttgagcaaacaattttcaagaattaaactgaagtagcaaggccatttattgtttgtagtatgtatgtgacaatggccaatcccctttatttaaactcatttgtaagtatctgtatattcttaataagtgtatcagatgaatctccttggaggaggatgtaatcaatgtaaagtcatacctgtgctctaggaacaaattgaatgtaattaagatcttggtgcaaagattatgtgtgatggcaggaattgagataacccaccacgggtagcagggtaaaggtgtattgagtcttttagaagtt

SEQ ID NO: 670253 - DNA, 596 bp, Homo sapiens
taatacgaggttgctaaagcctctactcctaaggaatatctggaggcattagtggggagtatttattgtattgcaatttgttcagattatagacttttgtcattggggtccccattgaagatgggctgatttttgagtaacagcattataggtttaagtaaaatttgtaaacaaggaatgtgctacttccagaacccaaaaaggcctaaaaggtgttgktttttctttaatgttgtgggtactgacaggatcaatagctgtttgttgacagtgtcacagatgcagtgacccttggttgagcaaacaattttcaagaattaaactgaagtagcaaggccatttattgtttgtagtatgtatgtgacaatggccaatcccctttatttaaactcatttgtaagtatctgtatattcttaataagtgtatcagatgaatctccttggaggaggatgtaatcaatgtaaagtcatacctgtgctctaggaacaaattgaatgtaattaagatcttggtgcaaagattatgtgtgatggcaggaattgagataacccaccacgggtagcagggtaaaggtgtattgagtcttttagaagtt

SEQ ID NO: 670254 - DNA, 596 bp, Homo sapiens
taatacgaggttgctaaagcctctactcctaaggaatatctggaggcattagtggggagtatttattgtattgcaatttgttcagattatagacttttgtcattggggtccccattgaagatgggctgatttttgagtaacagcattataggtttaagtaaaatttgtaaacaaggaatgtgctacttccagaacccaaaaaggcctaaaaggtgttgttttttctttaatgttgtgggtactgacaggatcaatagctgtttgttgacagtgtcacagatgcagtgacccttggttgagcaaacaattttcaagaattaaactgaagtagcaaggccatttattgtttgtagtatgtatgtgacaatggccaatcccctttatttaaactcatttgtaagtatctgtatattcttaatragtgtatcagatgaatctccttggaggaggatgtaatcaatgtaaagtcatacctgtgctctaggaacaaattgaatgtaattaagatcttggtgcaaagattatgtgtgatggcaggaattgagataacccaccacgggtagcagggtaaaggtgtattgagtcttttagaagtt

SEQ ID NO: 670255 - DNA, 824 bp, Homo sapiens
aatggtcactgacataaccagtttgttggctaataattatttcgttcttaaggcctgagttcttacagtcagccatggggctgaagccaaaagaaaggcaagggaagaggccagtgcctaaggagaggaggatgttttctattttacccaaacttcctcatgcatggacctaaraacttgctcccagtcagggccagcttcatggtgtgggaactgtgcggttgcacagagctctgctttgagaagggcctcatgtttgttgcatgctctgttgtcaccatcttgaaaattttaatactttttgaacaaggagctctacattttcatttttactctgagtccctcaaattatgtagcctgttcttctcctgggttatagatggcttgggctctctgctttcttctcactcttctctcccagtcatgcccctgagccaggctcaggaccatgctcagtgctggactcgccattgtcatgtcctctggagaaggaagcttatagggagtcaactttcagtaatccttctgtggattttgtggattatttgtcatctcagttgcttttttttttgtttttgtttgtttttgttttttgtttttttggccatcccatggacctctagttggtttggactttcaagaaaagtcaggtaatttcaacagtcatgcaagctgaacatgaggagggaggtaaatatgttgcccaggaaaaatcccacaatgccaaagctcaatgaaaattacatttcatttgtaattttatactcatcagtgataaaccagtaaacaggtacaaaaccaatttacatttggagtttacatta

SEQ ID NO: 670256 - DNA, 824 bp, Homo sapiens
aatggtcactgacataaccagtttgttggctaataattatttcgttcttaaggcctgagttcttacagtcagccatggggctgaagccaaaagaaaggcaagggaagaggccagtgcctaaggagaggaggatgttttctattttacccaaacttcctcatgcatggacctaagaacttgctcccagtcagggccagcttcatggtgtgggaactgtgcggttgcacagagctctgctttgaraagggcctcatgtttgttgcatgctctgttgtcaccatcttgaaaattttaatactttttgaacaaggagctctacattttcatttttactctgagtccctcaaattatgtagcctgttcttctcctgggttatagatggcttgggctctctgctttcttctcactcttctctcccagtcatgcccctgagccaggctcaggaccatgctcagtgctggactcgccattgtcatgtcctctggagaaggaagcttatagggagtcaactttcagtaatccttctgtggattttgtggattatttgtcatctcagttgcttttttttttgtttttgtttgtttttgttttttgtttttttggccatcccatggacctctagttggtttggactttcaagaaaagtcaggtaatttcaacagtcatgcaagctgaacatgaggagggaggtaaatatgttgcccaggaaaaatcccacaatgccaaagctcaatgaaaattacatttcatttgtaattttatactcatcagtgataaaccagtaaacaggtacaaaaccaatttacatttggagtttacatta

SEQ ID NO: 670257 - DNA, 614 bp, Homo sapiens
tttttgggtcaacatgacatgcctccctcttccattttgaatgtttttcattgaaaaaaaaaaaacaggttttatttgtggcagtttttaggaactctgacataaataagaacacacacatccaggacagctatttacacacagtgtcagaaaatatttcattgtagtggcttctcttgaatagaggccaaagcctgagttggaattggctaaaaagaaaaaaaaagctttacaagtaagtttctctaaaacagatttagtacacatttctgtgcaagagctttaaacacatttccattctaattaaaaatataattggcaacatacatctttaagctatgaatattttggtagaggaaattcaaaggccagcaattatatacatctctaaaaagcttaattattcactaaaggagaaaaacaagtttttaaacaaacaaaaagagctgtaatattaactgttgacatytaattctccaactttggtgacttaccattataaatgatgctgtaagctgaaatcaaagacaaaactcctactctagccactagtgtaaccctcaactctggctgccccaccttgtccagtgaccactcactagtgattctgactt

SEQ ID NO: 670258 - DNA, 633 bp, Homo sapiens
taaaaaaggagcaacaagagatttctgagatttaggtaatgttctgtttcttgctctggatgctagttacagtggtatgttttctttgtgaaaattcaacaagctgtatacttatattgtttttacgtatatattgttttttaaatttaaagaagctttgaaaagcagtgcctccatcgtggtatgttcaaaacaaatatttgttatgctcaaatgacaactcttagaaactccaagtgaagcagggamggttcttggcttccctcaggaagaaattcaagagcaagctggcgtagaaaaaaacagctttattgaggtgggcagcagtgttacagctctgtgagctcctgcagagcaaggctactccataggcagtcatatttatacccttttatggacatgttaattaaggggctggttattcagaaaaagctagaaagtaggcagtaacttccaggtgttgccatggcaatggcaaactgtcatggcgctggtggacattccttataaaaacatactttcagttcctctttccagtttctgccagtctccaatctagtccccaatcgagtctcacctacctcctgcctaaaaatgaggggaacaatcacttccgactgaggcaatgggcaa

SEQ ID NO: 670259 - DNA, 758 bp, Homo sapiens
tgtgacacagtagcccctactctccataggggatgaaatgattataaacagggagtactactccaggggtgtttgtagatatgcaaggaagactcttcaggccgttttcattttgggggagtagaaaaataaagcaaagccataaaacgatggctatgtgaaaagatggactaaagagaggagatggcataactgaaaaaaaaagttgcctttttgaatacatctaaaacgcaatggctgaggggcatcttcctagtccgtctccttgtgccatttgtgtacctcccacaaaaaaggaaaaaaaaaaaaagaaagaaaaaccaggatggttttcagttgactgcaatcccttatgcccttccgcagatmctgaaccacacacaagcctctcttggttagtgtgatatgttaagcatgtgaccaattatcacataacaatcctcacaaccacacactggaaaaaatgatcatcactagttttataaatgacttaagatttttttttgaatggatgctcactaatgtactaaatcccacacccaccagcaccataacagttctgggaacattcgtatttggtgtaaaaatgagtgacaccatggttctgagaaatcttcacttttttccagaaatctttttgaatattctaccctttggttaaagaaacctgtaaagataggaaccccaaacttgagtatgtccgaactcccttttcttgagtgtgtattttagctttgctgttaattcccatactttca

SEQ ID NO: 670260 - DNA, 1199 bp, Homo sapiens
tttaaatgaacttatagaattaaaaatcaaataatatgaaagcatttaaaaggtgaaataaatgctacaaaataagattacatttatagtcttgtggaatagacttgttcaatgaaaatatgaggggaatgtcaaatattaaaaaattttatatatgataaataaaattagtagaattatggacccaaattatgttgagctttgtaatatgagacagaagtctaattcaaaatactttcttgggctatactatataaaatttggactcctttttgctccccaaagcacccatattcttaccctattttattctttttagcacataccattacctaatccactttaaatagttacttttatatcttcttcatttatctctccaccagaatgtgaaatctttaaggtcacgaattggtctttcttatttgtagctatatttccattatctgaaagagtagcttaacaaatcataggcaccaaataaatatttattaaaaaataaatgtatagatggcttgagcaaaaaggatatcactatagcttagctagaaggatactgagtgcagttaatgaaataattatataaataattatgaacaaaattaattcctcagtagcaggaattaagcaattattagtgtctttaaaacaatacctctttgtccatttattaacagtgcatatctctgctgaactgttttttttcttgtgtrtgtgtgtgtgtgtaagtatgttggtctcctgtctttctccatgcaattgaaaaggcggctactggtagcttcagaaatatatcatctcctagcaatttcagagggaaaagaatgcttcttcctcctgaataactcaaatcagtttctcagaaagattgtgattgggtcgtttgcttgctttataagaattactaaagtaacgtggacaggtaatataattagaaggcttagaactcattctcattcatgaagttgaagagggaggggaataggtgtacttcatagtatcaagattgaatctgcatccaaatgaaaagagagaggtagttttaaaagttaaaggacactagacaaaaaatatgcatactatgggtcaaacttcacttctaaacaaggcaaaattctgcatcctatggttagctaaggttaaccaataaatacattgttttctcacagaacttaaatgtggccttagaatttatctca

SEQ ID NO: 670261 - DNA, 2004 bp, Homo sapiens
  misc_feature 1387: n = A,T,C or G
tccttgcttttcccaggacttccttgggaaggggcaagccctcttctccgcatgcaacttcattgctaagctctcacttgtgtctcagggagggaggaaccctgtactggatctcttctgcagatcttggggaacccatggcctctgattaccctccagtcctggaagcatgcttgctgtggttattagtccaagggagggagctgcagtggggtgggggtgggatcagagaggcggggcctgtgtaaacccagctccccaggactcctacagtcacctgtttctctctttatggttgttatctccctcaagaccaccagttatgtatacatggggtctttcttgtctgccttgaatatttttattttttctctaatttattttttttccatttcaacgtgttcagttttctcataacctattcgcattgtccctgtctggatattagctttgtcagctctctttgtggacatacctctgtcctgtgcatatatctctactttaggctaaagcgtagtctggaagaatgaggtttctgtcatcttgcgtggtatagcaagtggggaagtgctctgggttaaatatggagaacacagccactttagagtaggagatgctttaaggcaggggttcccaaaccccaggctgtggaccagtaccagttcgtggcctgttaggaacctggccgcacagcaggaggtgagtggcaggcgagtgagcattactgcccgagctccacctcctgtcagataagcggcagcattagattctcatagggatgtgagccctactgagaactgcaggcggggatcctcaaaccaccctcccactcccgcaccttccatagaaacattgtcttccccaaaactggtccctagtaccaaaaaggttggggaccgctgctttaatttatattccaaattgtgtaaaactcctttctgcaaaggtaaatcaccagattgattagctcatttgtactttttttttttttttctttgagacggagtcttgctctgtggcccaggctaaagtgcagtgacacaatcttggctcactgtaagctctgcctcttgggttcaagcgattcctgcctcagcctcccgagtagctgggactacaggcacccgccaccaggcctggctaatttttgtatttttagtagagatggggttccgccatgttggccaggctggtctggaactcctgacctcaagtgatctgcctgccccggcctcccaaagtactaggattacaggcctgagccactgtgcctggcccatatatactttccatatggaaaagtacagttcttcataatttgtctctcccttacccctgttgccaccaactaaaatgatgagcacattccccaaccacagaacactgngaagaaacataacaaaaatgtcatattgttttcaattcacctctcattatattcaaaactcctcattggttttaaccttccctagctccaaagtctcatttcttactacccttttttcccctgaataataggattggctactgatttagccagaccttgttcactttcaagtgacaggaaccaactcaaagcagattaagcaaaaggagatgctttagtaattcattatctccaggagtctgatcttgaactcagcatccagggattcaaatggcagcattaagattgtttcccatctcttagatctcttttgagttggcttcgccctgaggcaggtttttcagaagcaagggcacaagtggctaggcttacatcacccctcagcttgtgagctcagaggggcgagaatctgtctgaatgtcctggaaggatgctgactgaacttctgaaccagtcactgtgtctggcctgaatcctgtgcactcaggaaaggaaggcagccctatactaaggtcttttaaaggtgggaagaggctgtttctaaagggaaaggatacagaacaaagggrttagaaaccaagcaaacgaagagaatcttagtgaccactatcaagacc

SEQ ID NO: 670262 - DNA, 1329 bp, Homo sapiens
tgcaattttattcaaaataacactgaacatgaaacaagttattttccttagactaagaagtgccctgctttccaatagataatatgtttacagcagccaactcgaagtacaaatacttttcagacaaatattggccatttataaccataacaaataatttttcattgcatgaatattgctgagactgaggccatacttataaaacctccaggtatcaacrtgtccgcctctcctaaatactgggggaggggtaatggagcatcctcagagccaagaaatgtgctgatattcaccagaggaactcagcttagcttaagacttagcccctgccaccccctgctccatgtcaggtgggctttgcgagtggctttcagcaggagaatatgggtagaggtgtcagcttgcagcttctgaacttaagacctccacaggcttcatgtttctgcaccctctccctggaacttccaatatacagcaggaaaagaacagattccagggagctgccagctctccagtcccagcaggaaacccgtggagcacccctgcagaactgttctgccctatggtacatgcacacacaacattactaggtaagatcaaaccatttttcaaataattcaaacaaattatactcccaccaatagggtgtgaattcaggctaatccacatcctcaccaatgcttgctaatgttggacttagacatttttgtccatgcagtaactaatataatagtatctaatttgggggtgggtgggtttgttttcatctttcctcattttcttaaccgttcatattgtgaaacctaacacacatacacaaaaagtgcacaaagcaaacatattcagttcaatgatttatcattaagcaagcacccaccggcccatggccatgttcctaaaaggccttccatgcctcattccctgtcattcctcccacttgctgcacctaaaagctcaccacattccttactttttaaataatcacttctaggcttccacctttatacatttaccactatagtttagtttcacctggttttctaacttgatacaaatagaatcatacaatatttttagtatttggcatctttcattcaaaattacaagattcatctaccttactgcatataaatataggtgatcatgttcactggtggatattacattgtgtgaatatgcctgcatttatatatctattctcttgtaacgggaccgttggattggtgctaattttttgcataagataatgctggtggaattctgactaagctgctggacctacctgggcatattctcttggtacaaatacctattgtcaaagctgctggg

SEQ ID NO: 670263 - DNA, 601 bp, Homo sapiens
ctcatgatagtagagagtagaattgtgattattagaagctaggaaagggagagggtgggaaagattaggaaatatttgttaacagatacaaagctacagctagatgaccagaatgagttcttgtgttttaccrcactataggttgaatatgattacccatagtttattatatattttcaaaagtctggaagacagaattttgaacgtccagtccacaaaacagtacatgtttgaggtaatggatatgctaattaccctcatttgatcattataattgtatacacatgtggaaatatcaatctatattccataaatatgcacaattgttatgtgtcaatcaaaaataaaaggaaaaaataaataagaggagtacattagctatgccctcgccccctccttggcccccacgctcaccatttgccacagtaaagaatttgctctgggcaagagaaatattttcactaactacaaattttaacatcttcttaataaaaactcacaccaattccattttttccacccagaggataaagtaagcatctcttttcatattaaaagttcgggcaggggagtgagtttgtccgaaggcaaagataatttc

SEQ ID NO: 670264 - DNA, 688 bp, Homo sapiens
aaactcaggatcagatatgtgcttttgggcatcaccagaatatagttggctttttgaagctttgaatttggataagattgcccagagagaatatgcagcatgtacagatcaaagccaaggacacaccccaatatttattaggtatagaaagataggaccttagaataagaatgaaaatgagtaactagagaaaaaaaaataaagagtggttcccaaaagaacccaaagaagataacatttcaaggagggttgctggtccagagaagtcatataaaagaaccataagcatatattggatttgttgaacaggaagtcatttgggacctttcagaagtgtagtatcctgaaacaccaagcaaattcagaccttcatgctgaggtgaatttgtaaagggtcattgggcstaccctttgggagaactgatacggccttcagacctgtaagttatatttgtttcatatgtaaaatgataatacaccatggtgtttttattataaagattatgtatggtaatatgagagaaagtattttgtaaactctgtaaagttttttggaagtttacagaattgtgattagtttttttgtgaaatctctatataatttaaggtaaggaaatgggagggaggattttaggtaaaaacagaagataataaagatatataatggcagaatactacggattctgga

SEQ ID NO: 670265 - DNA, 619 bp, Homo sapiens
tttccttttcacaaaataagaaaatataaattttcagcattcactgtagacattaaaggttgagaaaacatttctattaaaaaccatgcattttctcttgcttctaacwtgcttaaaaatttattttttgtttaaaagttctatgtttcagctggacccgaaggagaaatattttacccttttggaaaggctgctttaaagcaattcagcctttcatgggttacaagaactaccttagaactgtagaagaaaaaaagctgccatcatacctctcccccaagaagcttccttatcaagtgaactgcacaacaataattaacacttaaaaacttccaatttcaaaaagggaaaattcctgacaatatagactatggaaaatggtctgcacactaagctctccagaccccaaaaggctgatcagtgaagttgtgtgaataatgctttgtgaagcatagtgaaacatatcaggctgaaaactaccagctccaaacacgagaaacagactgaaagctctttaaaaaaagtcatgtcgcagtggcttacgcctgtaatcccagcactctgggaggccgaggcgggcggatcaccagaggttggaagttcaagaccagcctgacca

SEQ ID NO: 670266 - DNA, 619 bp, Homo sapiens
tttccttttcacaaaataagaaaatataaattttcagcattcactgtagacattaaaggttgagaaaacatttctattaaaaaccatgcattttctcttgcttctaacttgcttaaaaatttattttttgtttaaaagttctatgtttcagctggacccgaaggagaaataktttacccttttggaaaggctgctttaaagcaattcagcctttcatgggttacaagaactaccttagaactgtagaagaaaaaaagctgccatcatacctctcccccaagaagcttccttatcaagtgaactgcacaacaataattaacacttaaaaacttccaatttcaaaaagggaaaattcctgacaatatagactatggaaaatggtctgcacactaagctctccagaccccaaaaggctgatcagtgaagttgtgtgaataatgctttgtgaagcatagtgaaacatatcaggctgaaaactaccagctccaaacacgagaaacagactgaaagctctttaaaaaaagtcatgtcgcagtggcttacgcctgtaatcccagcactctgggaggccgaggcgggcggatcaccagaggttggaagttcaagaccagcctgacca

SEQ ID NO: 670267 - DNA, 669 bp, Homo sapiens
gctaaagggaactttaagataattaaagtatttagtgaaaaagatgggcacatgcatgaacagatggggaatttcagcaaaaggaagctgtattaataagaatcaaatggaaatgcctgaaagaacacaacataagaaataaacatttctttgacagccttatcagaagctggatacagtatgggaaagaatataagaacttgaaattaaggcagcagaaattacccaaaatgaaacacaaagaaaataagaataacagactatcacagatctgtggaaacatatcaaacatatagttggattttcagaaagacacagtgagagaagggggcagaagagataatggttattaactttacaaaattagtgaaacacaacaacacagaccaaagaagctcaaagaacttcaagcaggataaatgcatgcatgtgtgcacatgcgtgygcacacactcacacacattctctctctctctctcacccctatacataccatagttagattgctgaaaaccaaagccaaagagaaaatgttaaagacatcaaaaaatttttgaagtactaaaacaaaagtgtatcccccccaatggcaacaatatttcacatttgtgagacttgaaaactacaaacaataaaagcaacaacagatattgtacttactaatcacta

SEQ ID NO: 670268 - DNA, 621 bp, Homo sapiens
tacttcagacaggtctttcttcagcaagccattcgtaaaagatgttaattagaaggtaaatgaccatattaattgcataatttatctaaacatatattttataatgtcaaagataaatacatacaagctttctacattttaaaaataatgtttaatatatgccactagagaaaattatttgattatcagatatttttatgtcaaatgttaaggataattttaatcaagtttaatgaaagtaattattaattaaaaatcatattttgaagacagcaaaatcaacatattttacatgtaaaaacaaaaatgaacagattatcaaacaaaattgtatacataattatgccaattaaaattataaattctgtcacaaaaaggaaaggaaggtaagatgctattttttccttaaatgcttgcacagattgtcaccatagtaactaacggacacatcaggagaaaatcattcatttatatattcttgcaggtgactctcactctcccaatctttytttcagctgcctccataacttattattagaaccaaaacaaatattagtggaaaaacagacgttcacctgaaaagcgttgcttttcaagtagaattagcttgtaaattgtgca

SEQ ID NO: 670269 - DNA, 611 bp, Homo sapiens
acaaaaaataatagcaataaaaaggacagatattgagacatgcaacaacatgagatgratctcaaaattattattctcagtgaaagaagacacacacaaaactccacatgctgcatgattccattcatttgaaatactaaaaaagcaaaactacagtgacagagaacagattatgtgttacctggtaatggaggtggaaagaggggcctcactgcaaaggatgatgaaaaagatttatatcatgatggtggttttaaaattcaacagcatagtaaaatcaaatatattccattgtatcttttacaaaacatatagagagagatctacacacacaaagacacacacacacacacatacacacacacttcttcctctctccttactcacttgtctgactgaagaattaaaaagggggagaattagcatgtgtgttcagggcccttcctctcttttctccctattggaagtgagctgcccagcagacagggccctgttttacctactgagaaagaaaaaatgtttgttcctgtggtgaaagatctgctcaggccctgcactgcctaaccttggagttcgcgtcgtggagctcattgtataaactacattcattc

SEQ ID NO: 670270 - DNA, 611 bp, Homo sapiens
acaaaaaataatagcaataaaaaggacagatattgagacatgcaacaacatgagatgaatctcaaaattattattctcagtgaaagaagacacacacaaaactccacatgctgcatgattccattcatttgaaatactaaaaaagcaaaactacagtgacagagaacagattatgtgttacctggtaatggaggtggaaagaggggcctcactgcaaaggatgatgaaaaagatttatatcatgatggtggttttaaaattcaacagcayagtaaaatcaaatatattccattgtatcttttacaaaacatatagagagagatctacacacacaaagacacacacacacacacatacacacacacttcttcctctctccttactcacttgtctgactgaagaattaaaaagggggagaattagcatgtgtgttcagggcccttcctctcttttctccctattggaagtgagctgcccagcagacagggccctgttttacctactgagaaagaaaaaatgtttgttcctgtggtgaaagatctgctcaggccctgcactgcctaaccttggagttcgcgtcgtggagctcattgtataaactacattcattc

SEQ ID NO: 670271 - DNA, 686 bp, Homo sapiens
  misc_feature 2, 3, 4, 5, 6, 7, 8, 9, 10, 11, 12, 13, 14, 15, 16, 17, 18,19, 20, 21, 22, 23, 24, 25, 26, 27, 28, 29, 30, 31, 32,33, 34, 35, 36, 37, 38, 39, 40, 41, 42, 43, 44, 45, 46,47, 48, 49, 50, 51, 52, 53, 54, 55, 56, 57, 58, 59, 60,61: n = A,T,C or G
  misc_feature 62, 63, 64, 65, 66, 67, 68, 69, 70, 71, 72, 73, 74, 75, 76,77, 78, 79, 80, 81, 82, 83, 84, 85, 86, 87, 88, 89, 90,91, 92, 93, 94, 95, 96, 97, 98, 99, 100, 101: n = A,T,C or G
annnnnnnnnnnnnnnnnnnnnnnnnnnnnnnnnnnnnnnnnnnnnnnnnnnnnnnnnnnnnnnnnnnnnnnnnnnnnnnnnnnnnnnnnnnnnnnnnnnncactattttgcatttccttatgtaagcaataatatattttaacaggtctgagtgtagtatattcatgccatgatatatcattgtgacctgtagaatatatggcaagaaacttaggaaagataaaggttgcaggttttcttctgctgtgatgctgaagctcaatattcaaagaaaccggtattgattttagaggcttttccaggttacccaaagtggataaaagaaattttaataaaaatgatccataattatttatatattatttatttgtttatttatttttattttatatattttttgagacggaatctcactctgtcacccaggctggagtacagtggcatgatcttggctcactgaaacctccaccaccgggttcgactgattcttctgcctcagcctccttagtagctgggactacaggcacatgccatcatgcctggctaatttttgtattttcagtagagatggggtttcaccatattggacaggctggtctcgaactcctgacctcgtgacccgcccacctcggccaccgaaagtgctgggattayaggcatgagccactgtgcctggcctaatttt

SEQ ID NO: 670272 - DNA, 1851 bp, Homo sapiens
gtttagtttataaatacacacacacctgtgataaagtataatttataaattaggcacagtaagagagaataataactaataagatggaacaattaaaactatatactgtaatggaggttatgtgaatgtggtctctcactctctgaaaatattttattatactgtactcacctatttttggaccttggttgactacaagtaattgaaactttggaaagcaaaacagtggataagagaggactactgtattcaaaacagtggttctcaaccctggccactttaacaggatgccctggcccctccccctagttatttttatttagttagactgggctatggccttattatcaacatttttacaaatctctctaagtgattctcaagtacagccaaggttaaatgccattattttaataaatgaaaggtttttatagtaaacaaaagcagtaactttgattgtgacccagtatctgtttattttacatctcccttttgtcatctcacatggatggtcactagttagtaaatgaaatacatgacaggctttgttagtctgaacaggcacaaaggaaaaagcagcatcatttaataacttatggtgtgaatatcagcattagacatcagcattaaatggcatattacacaaacagtgtatttatgcatatcatgcagagagaaattggagacgttttagggctttactttggaattgactcacaagcatgttcccatcaaaacaacaagaacaaaagaaactccaggaaatcactttgcttctaaattgaaaacaaggagagaatggcattgatggagatgaagctgggcttaatacccttatgaggaggagtaaaaggactgtacctacctgtcatagtctgttcaggctgccttagcaaagtaccatacrgtgggtagcttaagcaatatacactgatttctcacagcagttctggagctgggaaatccaagaccaaggcacagatggattcagtgtctggtgagggttcttttccagttcatggatggtgccttctctctgtgtcctcacatggcagaagaagcaaagggtctctcttgggcctctattataagcccactaatcccatttatttaaggccctgcccatgacctaactatctcccaaaagccccatctccaactaccatcacactgggaatttcatcatatgaattttgggtggacccacatattcagaccacagcaccactggtccttaagcattcctcctaaaacatgttgtcacatcaggtggtggctgttcactgtctctcctctgtacctgaattgacctgtaacaggagaaagaaactcaccgtgggtgagccctcctttgtcctgggtactttcaacttgtttgtctttattgttcatcccaacaacctcacaaggaaggtaccatatcgtgcacccattttgcagataaggaaacaaggcctcagaaatgctaaccaactttccaaataaacccagctagtaaatggtgcatacagggtttgaaccagtctcaagttccaaatgcccctttttccctgtcaccctgccacctccctggcatgatactaatcaagaaaggatgtgaccaggaagccagttgatgagaagtatctctgagaggaggaagttttccaggtgggacactccaaagcctagggttactcacactcctattcccgtgcgttccagatgatacaagccaccacaaggtgatttgagctaggcaaggagttggtaggcatactagaacccctaatagagcaaggcaggaagtaggggcttgagatgacagtggcgatggcgggggttgcatattagcatctgagtctagaactc

SEQ ID NO: 670273 - DNA, 1851 bp, Homo sapiens
gtttagtttataaatacacacacacctgtgataaagtataatttataaattaggcacagtaagagagaataataactaataagatggaacaattaaaactatatactgtaatggaggttatgtgaatgtggtctctcactctctgaaaatattttattatactgtactcacctatttttggaccttggttgactacaagtaattgaaactttggaaagcaaaacagtggataagagaggactactgtattcaaaacagtggttctcaaccctggccactttaacaggatgccctggcccctccccctagttatttttatttagttagactgggctatggccttattatcaacatttttacaaatctctctaagtgattctcaagtacagccaaggttaaatgccattattttaataaatgaaaggtttttatagtaaacaaaagcagtaactttgattgtgacccagtatctgtttattttacatctcccttttgtcatctcacatggatggtcactagttagtaaatgaaatacatgacaggctttgttagtctgaacaggcacaaaggaaaaagcagcatcatttaataacttatggtgtgaatatcagcattagacatcagcattaaatggcatattacacaaacagtgtatttatgcatatcatgcagagagaaattggagacgttttagggctttactttggaattgactcacaagcatgttcccatcaaaacaacaagaacaaaagaaactccaggaaatcactttgcttctaaattgaaaacaaggagagaatggcattgatggagatgaagctgggcttaatacccttatgaggaggagtaaaaggactgtacctacctgtcatagtctgttcaggctgccttagcaaagtaccatacagtgggtagcttaagcaatatacactgatttctcacagcagttctggagctgggaaatccaagaccaaggcacagatggattcagtgtctggtgagggttcttttccagttcatggatggtgccttctctctgtgtcctcacatggcagaagaagcaaagggtctctcttgggcctctattataagcccactaatcccatttatttaaggccctgcccatgacctaactatctcccaaaagccccatctccaactaccatcacactgggaatttcatcatatgaattttgggtggacccacatattcagaccacagcaccactggtccttaagcattcctcctaaaacatgttgtcacatcaggtggtggctgttcactgtctctcctctgtacctgaattgacctgtaacaggagaaagaaactcaccgtggrtgagccctcctttgtcctgggtactttcaacttgtttgtctttattgttcatcccaacaacctcacaaggaaggtaccatatcgtgcacccattttgcagataaggaaacaaggcctcagaaatgctaaccaactttccaaataaacccagctagtaaatggtgcatacagggtttgaaccagtctcaagttccaaatgcccctttttccctgtcaccctgccacctccctggcatgatactaatcaagaaaggatgtgaccaggaagccagttgatgagaagtatctctgagaggaggaagttttccaggtgggacactccaaagcctagggttactcacactcctattcccgtgcgttccagatgatacaagccaccacaaggtgatttgagctaggcaaggagttggtaggcatactagaacccctaatagagcaaggcaggaagtaggggcttgagatgacagtggcgatggcgggggttgcatattagcatctgagtctagaactc

SEQ ID NO: 670274 - DNA, 2403 bp, Homo sapiens
caccctcatgaaaaggaataatgtctacaaatggtgggggaagagtcctttagggctctttttttccccagcttactcaggacaaaatgtaataacgacagcagaggagggtgtatcatataactaacgaggcctaagtttcaggtttcctgaattgcaccagctcctttcaaggctctctagctaattttatatttctatatgttttctttttcttaaggaaggcctcccagattaaataaatttcagtgggcaaaatatggtttggcccctgagtgtgccaggtagagattctgtagcagagttacacaggtaggccactctgatgtgagtcatggatgaaatgcttaaatgtgcttcttttactttgatgtgcaagaaggaccatatgtattttttataaatcaacctgatttccatttggaagccccactctgctaggtggtacacacacacacatgcacatgcacacacacacacyactcccaggatggctgctctgcccatgcttgagactcagcaattgctgctggcactgagaactccagagcatgtgtcctcgtctcttccagcacagcatgcaaccatctcctttgagcattagctgcttccttgagctcttagaatgaaaggcacattctctgcttgacattcataaacctcttctgctatgggagaataatctcctcttctctaacagtatcctccaagtcactcgcctcttctgtcaaccttatcctctttcttattcttttacgataatcttttggtgtattatcccatagtatgatgattaacaaatcaaatattggtttgtctttccatgtggcagaaggccctgatcagcaaactctccccaaaagagaggagactttacattaagttcttttagtgcagacaaaaaagagaggggaaagcaaacagtatgatagttccataagatagaatgattatttttaaaaggccacacgtcatcgtttgtagctaatcttgcctcatcagttctccaaccactgggagaaaaggctgttttaaggcagaagagaaagcctctgatgaatttagatggtgtggggggatattgcaatggaagactacagttcacacaaaaggaagtgctcatttctaggcttgatcctggggccagtgaaaaactctctaagggagtattccccttgctatatatggttggcccaaatataaaccaggcttgtttttcagcttcatacttagtgagtcaatatttgcaaaaatgctgcaaatatcaccttatggaaatgttattacagtgttcttgtggtttacttttattgtttgcttgttgtttttctactccaagtttattataaggcctctttcaggcagtttttcagcctaatgtagaatggtatggttcagtgcataaacagccatacacaccctctcatgtccagaattgatcaagtaaactctgacttctcatttccttagacaggattgccccagtcccaaagggaaggaaagctggcacagtaggtatttacccagtgtggtatgcaggggtagtgcaaccatactgtgcaaaggccccagcacaaaaaagaaaagtgcactctttctacaaattggggccagttctctgttgtttctgttctgtttgtttttggcgcagtttcctgattcagatgaatccattttgcattaacagaacaaacaagtgcatagaagggacttgtgctcaaagatgtgatgtttagattcagtgatgaattaaatcttttagggaaaatgagcctctcttagggttcctcctgagggctatataaactctgtgatactaatctagcagggtgtctatactcctgaggattgatagcttcctgttcaggtttgtgtgccaccaactcgcccaaacaactctcttgctaataatgttttagattcccctaataatacccagcttaggcctgagcataccagataaattgaaacaatagttatcagttgattctacctctctatattcagcttgtaactaacaccccagaagagaaattcctcctgcattaacctgctgacactggccacgatttcaagcatactttgagttttctatcactctcattgttttgtatctcagaaacccactggtgcctgtctctacatttaatcatctgacatttgtaagccttcagtaatagcaccatcaagtttacccaggatgcttaccatcagttactcatcacagtacacctgcagggcaggtagctgttgggactgcattttataggacaggaaacataccccaaatgatgaacacacagggaatctgaggcagcaccatgatccaaattctagatactaaagctgtacctgacccaatacagtaaatgctaatgcgttaggtggattttcatcactgta

SEQ ID NO: 670275 - DNA, 627 bp, Homo sapiens
tatatatatatatatatacacacacacactcttttctgatgtaaaaatattggaaaacataattcaaatgagtaagtttaaaagcaacaaagaaacgtgagttgaactgagtctactattacttttgtcttccgaccaagtatacccatatccaaagttttctagttacatttttctcttctaatttaytgaagcatccagagattctatcataccttcaaccttgagaagaaatatctgagcagctagcctagatgtaaaatacaacagggtgcaaactgtactcttcactgggagtacctcaattctggagaaaatttttaaatgtatttgtaaaagtgtttatgcgaggttaaatgctaaggaagaaaagcagttagcattaaaatcactcagctcatgtttgatatttctgtaataaaggatgattatccttgactttagattacgtatcatgattataactttcataatataactattcacaaaattctccaaattagccaggcttctcaaacaaatctaaaatttgaatctatattgccttctcttgcttgaatgtcctgattacaatcagcaaatctcaaatactttcctcagttctaagttgaatgctacatacatttt

SEQ ID NO: 670276 - DNA, 627 bp, Homo sapiens
tatatatatatatatatacacacacacactcttttctgatgtaaaaatattggaaaacataattcaaatgagtaagtttaaaagcaacaaagaaacgtgagttgaactgagtctactattacttttgtcttccgaccaagtatacccatatccaaagttttctagttacatttttctcttctaatttattgaagcatccagagattctatcataccttcaaccttgagaagaaatatctgagcagctagcctagatgtaaaatacaacagggtgcaaactgtactcttcactgggagtacctcaattctggrgaaaatttttaaatgtatttgtaaaagtgtttatgcgaggttaaatgctaaggaagaaaagcagttagcattaaaatcactcagctcatgtttgatatttctgtaataaaggatgattatccttgactttagattacgtatcatgattataactttcataatataactattcacaaaattctccaaattagccaggcttctcaaacaaatctaaaatttgaatctatattgccttctcttgcttgaatgtcctgattacaatcagcaaatctcaaatactttcctcagttctaagttgaatgctacatacatttt

SEQ ID NO: 670277 - DNA, 598 bp, Homo sapiens
tctactcacagtttctaccacttccagtaacttggtagctttttctctgaatcattgtctctacaaaaccttagctcattgttaaccaatgttaggcaagaatttactaaatattcactcgtcaatacctccatgaaatctttaacaaactaaccttaaatcctgattactccttgccatagtaatgtctaacagaaatttgaaagtagtcttcaccaagcaaagttttcattatctcaagcccatgctatctaaaatctagctgtatgtgaagatgaagactaaatatcataagttaagaacatccagtagtagaaataacaagaaaagaaaatgaaagaaatcaaattaaggtgcaacacaatctatgtaatttgactataatttgactatgtgtgtgtgtgtatatatatayacatacatacatcctcatgaaaaacataaaagaatgtgtcagaacatgatttttttgttgttgtttttttttttgagacagagttttgctcttgttgcccaggctggagtgcagtggcacaatctcggctcactgcaacctccgccttccggtttcaagcgattctcctgcctcagcctcctg

SEQ ID NO: 670278 - DNA, 598 bp, Homo sapiens
tctactcacagtttctaccacttccagtaacttggtagctttttctctgaatcattgtctctacaaaaccttagctcattgttaaccaatgttaggcaagaatttactaaatattcactcgtcaatacctccatgaaatctttaacaaactaaccttaaatcctgattactccttgccatagtaatgtctaacagaaatttgaaagtagtcttcaccaagcaaagttttcattatctcaagcccatgctatctaaaatctagctgtatgtgaagatgaagactaaatatcataagttaagaacatccagtagtagaaataacaagaaaagaaaatgaaagaaatcaaattaaggtgcaacacaatctatgtaatttgactataatttgactatgtgtgtgtgtgtatatatatacacatacatacatcctcatgaaaaacataaaagaatgtgtcagaacatgatttttttkttgttgtttttttttttgagacagagttttgctcttgttgcccaggctggagtgcagtggcacaatctcggctcactgcaacctccgccttccggtttcaagcgattctcctgcctcagcctcctg

SEQ ID NO: 670279 - DNA, 598 bp, Homo sapiens
ttgtatatgatgtactattttattttatgtaatattttatgtatatatttatttacacataatttatatacttttaagactgtgtccatttttcatttattcttggtctccggtttgaacaacgctgctttatggcattacactgataattctctctactctttagttctcttccttatcgcttattcatgtgtatctyattccatgctataatgtaatgtaccatacatgtgttgaattttaaaacaaaattagcagaatttcaatgctttcctatattactcaacataaatattctctatatagaatgaattggaacaagctatttgtgaatctgaaaggataatcagtgattctaccaatcatagtggtaaactcattcaaactcagcctgttaaaatgagacgctctgccctatatcactgaaaacctcttgatttgccagatttttcccttctttacaaatgaaaatgcttagtgttttctgagttcctttgcactatctcccactggattcaggtcattgatttcatcttcagaacacttggaaagtttattttgtggtgtttatgagctaatttatttttattgcaatgtt

SEQ ID NO: 670280 - DNA, 598 bp, Homo sapiens
ttgtatatgatgtactattttattttatgtaatattttatgtatatatttatttacacataatttatatacttttaagactgtgtccatttttcatttattcttggtctccggtttgaacaacgctgctttatggcattacactgataattctctctactctttagttctcttccttatcgcttattcatgtgtatcttattccatgctataatgtaatgtaccatacatgtgttgaattttaaaamaaaattagcagaatttcaatgctttcctatattactcaacataaatattctctatatagaatgaattggaacaagctatttgtgaatctgaaaggataatcagtgattctaccaatcatagtggtaaactcattcaaactcagcctgttaaaatgagacgctctgccctatatcactgaaaacctcttgatttgccagatttttcccttctttacaaatgaaaatgcttagtgttttctgagttcctttgcactatctcccactggattcaggtcattgatttcatcttcagaacacttggaaagtttattttgtggtgtttatgagctaatttatttttattgcaatgtt

SEQ ID NO: 670281 - DNA, 638 bp, Homo sapiens
ctacacattcaccaaaaatacagtggcaaaacaggaataatgtctctagacattcctgttgaaaaaaatgggaaaatgcacagactaaaagaatgattggtccaccacattttaaaatcccagtggtaaatgttgcaagtcatttgattatattcaacgcctgtgaataattattcatgcctctcatctctgacctctaggctcttcgttctgccttttgagttattcttttttttttttccatgaaatacagctggtacttgcaatagtacttgggtgttgaacttgttaagagtgcatatcctttttttcagatccatctatcatttcctagttgtatgtggttgtgtgggttatttctcctcttttacattgattttctcacctgcaagtgaataatagtaacactttatgagcagggttattgcaagtagcaaggagaaaatatatatttaccatttgccacaatccctggggaagtgcagtcaatacattggaaagggtcctcataagagtttgatgatcattctcagaaakctagccagagaaagtctaaatggtaaaggttccagctcattatcttcttcccttttctcaagttttctctccatctgacatgtgagctcagtatttaccat

SEQ ID NO: 670282 - DNA, 626 bp, Homo sapiens
gggagtttagatttctgaaaataaagggggaaaataaactggtttctgctcattgttgttgtcaccaggcctttggaagtttgaatgttaattcagaagatgaaacaaagtttccaggtcaggattattgaacctggtatccaacaacaagaatttgtaattattagaaagtctttgagagaagtactagagattaaatagaaaaaaaaaaaacagtgrtagaaaacttttgttaagtatctgatggccaagcgctttatatctgcatgcttagatttggactccaaggctcagatgagtgtgtgtgtgtgtgtgtgtgtgtgtgtgtacacagtcatgaatcacttaatggggatacttctgagaaatgcattgtttggcaattttgtcactgtgcaaatatcatagggtgtacttacacaaacctacatgggatagcctgctacacacctaggctatatggattgcacctatgctacaaacctgtacagcatgttactacacttaatactgtaggccactgtgtatctaaacatacaaaaggtacactaaaaatacagtagaatatataaaaaatgatatacctgtataggcacttaccatgagtagaacttccaggactgaaa

SEQ ID NO: 670283 - DNA, 1552 bp, Homo sapiens
tcatattttctaaacagattctaaatgcataattttttcagagagattatgacaggaggcaatggtaaaaaaataaactaaatcagtagtatttaagatgagaagaattactcttatttcttgagaatgagggtaagaaagagacagaagtgttcaattcctgggttagttttgaattctggagatagaaggaaatttaataatgcaatgagtcctggacaatgttttctcacatgcattatttttgagtgcttttcaaaaagcttatcacagtgacttaaaattttgaaatgggataatttccaaaaagtactgaaaatataaatacatttgaatgtagtgtgtatttggcttatatttcaaattttcccttccagtgaaataactcggggggtactcttgaagtgtttcttcttctaggtttaatttttagtgaagtaaatgttgggatttcttttataatatattgcctaaatatattttcaagggatttgaagttattaggcatgtctgatttaatttgttcatgtatgttaaaacctatatttatttgtgactagtgtaaatgtatggttaaatgtagctgacaccagatgtgagccatataacatattgctataaaaatagaaaaataattatgttccactttgtaaatacttttaaacaatttttacataagtgaaaatctcacataatgccagacacacagtatgaggtagtggaagattaggtaaactaaattattcatgtcaaccattttaagaaaattacttaaactaatgcttagttttcaacttattataactgaaagaacaaaattgtactttattctgataaattatttacacacaactcacaaagtgtaatatcaaaatattaagtagattgaataagataatgaaatagtagctcatgtatattttttgatgtgaaggaaatgaacatttatccatcaatttatgtcatttattgtaatacgtcaaaaacgtagcttgtgataattcagttgaactacaaaaaagctcagtgataaaaatttccatttatttaaagctatttattatagctgtaaaagtgaaagtatagatagttgtcctaataaaatggaaatgcaaatgtataaaaaatagaaattaattgctagactctttagtctatgttgttcttcacagtatccttatgtacttctatttttttatttaaaaagtcaagtacaatatctttatttagttaaaagtaagtaaaaaaaataaaatttttcatcatttgttgatatgtttaaaatatataaaaatactatttaaatatattcctttttttgtttctgtgagaaattaaccactartttcccacatctacaatcattatctttttcttttgtaatgtttattattgttaaactatagtataaatcattttatgttaatatctgtattcttcatattcattagtgactattaacataataaagagaaaataaaatgctgaagtcaatttatatgatgaaaaaatagatttaatattgagtaataaaaaatataatcctccttca

SEQ ID NO: 670284 - DNA, 1475 bp, Homo sapiens
tgacttttatttttagtagagatgaggtttccctgtgttgcccaggctggtctcaaactcttgggctcaagggatcctcctgcctcagcctcccaaagtgctaggattacaggtttgagccactgtgcttgttctggaacagtatcttgtttatgatggtggttacttgaatttatatatctaataaaattgcacagaaccacatgcatgtgcacacacacacacacacacacaaatgaatgcatgtaaaaactgctaacatgtgaatcaggcctggagtctagttaacrtatttatatcaatatcaatctcctggtttcaatattgtgccatagcaaagctacataagatgttgccattgccttaattttaaaaaattgttaccattggagaaagcttggtgaagggtactcaagactcaacaatttttgcaatttcctgggagtttatatgactgtttcaaaataaaacaaaaatttgtaaagcagctttaaaaaaacaacatttattttaaaatgaagttgggttgtcgaaataaataaatgtgtgtgaaacagagtttcagagattcaactggtatcagctcacatcaaatgacaatgaaacagaagacttaaaaaaatttctgtagctttgagtatcagaacaactatcttcaacaaatcaaaattgaatgatgccattagctgtgccatccaaagtaaataaggactaaaatcatgaataagaaaacttggaataataggtgataaagctaacattaatgtaacatggtagtccgactagaaacaataagtgccaatataacgaattcccccgcaaaacatccccaccaccaagttagttttcattataaagatgattaaaacaaactaaagcagccacagacaggaacaccgggcctgcctcctggtgcagccgtgtgagcttcccaccttaggacagcagtgggaagcaggatggtggggcccaagtcaggagctaagtccccctactgtgcctggggaaggatgcaaggctcctgaggcacctcagggagaggaagcagagagggttgtagtcgatgagctgagtctggaggccagagggagccgagggtctaggagcacgtggtgagtggcagagatgctggtaggttccctgtgtgtttttcagggagtaataaatacaagcccagaaactaccagaagccaggcattagagatatgaggatggactgctgtgaactgtctaggaacaaaatagctgaaagggcactgtggaagaaggtgtcagaaaattaacttctgaaaggaaaggagagagggctaggaaggccttgggcagccaagttcatacagagacgtgtgtgtgtgcatgtgtgtgtgtgtgtgtgtgcgtgatgtaaggagaaaggaggaaagaagtgggggtaaaagtgaaattttctgagctattctgtggtttttttctctgacatgaccaaaataggaaga

SEQ ID NO: 670285 - DNA, 1475 bp, Homo sapiens
tgacttttatttttagtagagatgaggtttccctgtgttgcccaggctggtctcaaactcttgggctcaagggatcctcctgcctcagcctcccaaagtgctaggattacaggtttgagccactgtgcttgttctggaacagtatcttgtttatgatggtggttacttgaatttatatatctaataaaattgcacagaaccacatgcatgtgcacacacacacacacacacacaaatgaatgcatgtaaaaactgctaacatgtgaatcaggcctggagtctagttaacgtatttatatcaatatcaatctcctggtttcaatattgtgccatagcaaagctacataagatgttgccattgccttaattttaaaaaattgttaccattggagaaagcttggtgaagggtactcaagactcaacaatttttgcaatttcctgggagtttatatgactgtttcaaaataaaacaaaaatttgtaaagcagctttaaaaaaacaacatttattttaaaatgaagttgggttgtcgaaataaataaatgtgtgtgaaacagagtttcagagattcaactggtatcagctcacatcaaatgacaatgaaacagaagacttaaaaaaatttctgtagctttgagtatcagaacaactatcttcaacaaatcaaaattgaatgatgccattagctgtgccatccaaagtaaataaggactaaaatcatgaataagaaaacttggaataataggtgataaagctaacattaatgtaacatggtagtccgactagaaacaataagtgccaatataacgaattcccccgcaaaacatccccaccaccaagttagttttcattataaagatgattaaaacaaactaaagcagccacagacaggaacaccgggcctgcctcctggtgcagccgtgtgagcttcccaccttaggacagcagtgggaagcaggatggtggggcccaagtcaggagctaagtccccctactgtgcctggggaaggatgcaaggctcctgaggcacctcagggagaggaagcagagagggttgtagtcgatgagctgagtctggaggccagagggagccgagggtctaggagcacgtggtgagtggcagagatgctggtaggytccctgtgtgtttttcagggagtaataaatacaagcccagaaactaccagaagccaggcattagagatatgaggatggactgctgtgaactgtctaggaacaaaatagctgaaagggcactgtggaagaaggtgtcagaaaattaacttctgaaaggaaaggagagagggctaggaaggccttgggcagccaagttcatacagagacgtgtgtgtgtgcatgtgtgtgtgtgtgtgtgtgcgtgatgtaaggagaaaggaggaaagaagtgggggtaaaagtgaaattttctgagctattctgtggtttttttctctgacatgaccaaaataggaaga

SEQ ID NO: 670286 - DNA, 1475 bp, Homo sapiens
tgacttttatttttagtagagatgaggtttccctgtgttgcccaggctggtctcaaactcttgggctcaagggatcctcctgcctcagcctcccaaagtgctaggattacaggtttgagccactgtgcttgttctggaacagtatcttgtttatgatggtggttacttgaatttatatatctaataaaattgcacagaaccacatgcatgtgcacacacacacacacacacacaaatgaatgcatgtaaaaactgctaacatgtgaatcaggcctggagtctagttaacgtatttatatcaatatcaatctcctggtttcaatattgtgccatagcaaagctacataagatgttgccattgccttaattttaaaaaattgttaccattggagaaagcttggtgaagggtactcaagactcaacaatttttgcaatttcctgggagtttatatgactgtttcaaaataaaacaaaaatttgtaaagcagctttaaaaaaacaacatttattttaaaatgaagttgggttgtcgaaataaataaatgtgtgtgaaacagagtttcagagattcaactggtatcagctcacatcaaatgacaatgaaacagaagacttaaaaaaatttctgtagctttgagtatcagaacaactatcttcaacaaatcaaaattgaatgatgccattagctgtgccatccaaagtaaataaggactaaaatcatgaataagaaaacttggaataataggtgataaagctaacattaatgtaacatggtagtccgactagaaacaataagtgccaatataacgaattcccccgcaaaacatccccaccaccaagttagttttcattataaagatgattaaaacaaactaaagcagccacagacaggaacaccgggcctgcctcctggtgcagccgtgtgagcttcccaccttaggacagcagtgggaagcaggatggtggggcccaagtcaggagctaagtccccctactgtgcctggggaaggatgcaaggctcctgaggcacctcagggagaggaagcagagagggttgtagtcgatgagctgagtctggaggccagagggagccgagggtctaggagcacgtggtgagtggcagagatgctggtaggttccctgtgtgtttttcagggagtaataaatacaagcccagaaactaccagragccaggcattagagatatgaggatggactgctgtgaactgtctaggaacaaaatagctgaaagggcactgtggaagaaggtgtcagaaaattaacttctgaaaggaaaggagagagggctaggaaggccttgggcagccaagttcatacagagacgtgtgtgtgtgcatgtgtgtgtgtgtgtgtgtgcgtgatgtaaggagaaaggaggaaagaagtgggggtaaaagtgaaattttctgagctattctgtggtttttttctctgacatgaccaaaataggaaga

SEQ ID NO: 670287 - DNA, 1475 bp, Homo sapiens
tgacttttatttttagtagagatgaggtttccctgtgttgcccaggctggtctcaaactcttgggctcaagggatcctcctgcctcagcctcccaaagtgctaggattacaggtttgagccactgtgcttgttctggaacagtatcttgtttatgatggtggttacttgaatttatatatctaataaaattgcacagaaccacatgcatgtgcacacacacacacacacacacaaatgaatgcatgtaaaaactgctaacatgtgaatcaggcctggagtctagttaacgtatttatatcaatatcaatctcctggtttcaatattgtgccatagcaaagctacataagatgttgccattgccttaattttaaaaaattgttaccattggagaaagcttggtgaagggtactcaagactcaacaatttttgcaatttcctgggagtttatatgactgtttcaaaataaaacaaaaatttgtaaagcagctttaaaaaaacaacatttattttaaaatgaagttgggttgtcgaaataaataaatgtgtgtgaaacagagtttcagagattcaactggtatcagctcacatcaaatgacaatgaaacagaagacttaaaaaaatttctgtagctttgagtatcagaacaactatcttcaacaaatcaaaattgaatgatgccattagctgtgccatccaaagtaaataaggactaaaatcatgaataagaaaacttggaataataggtgataaagctaacattaatgtaacatggtagtccgactagaaacaataagtgccaatataacgaattcccccgcaaaacatccccaccaccaagttagttttcattataaagatgattaaaacaaactaaagcagccacagacaggaacaccgggcctgcctcctggtgcagccgtgtgagcttcccaccttaggacagcagtgggaagcaggatggtggggcccaagtcaggagctaagtccccctactgtgcctggggaaggatgcaaggctcctgaggcacctcagggagaggaagcagagagggttgtagtcgatgagctgagtctggaggccagagggagccgagggtctaggagcacgtggtgagtggcagagatgctggtaggttccctgtgtgtttttcagggagtaataaatacaagcccagaaactaccagaagccaggcattagagatatgaggatggactgctgtgaactgtctaggaacaaaatagctgaaagggcactgtggaagaaggtgtcagaaaattaacttctgaaaggaaaggagagagggctaggaaggccttgggcagccaagttcatacagagacgtgtgtgtgtgcatgtgtgtgtgtgtgtgtgygcgtgatgtaaggagaaaggaggaaagaagtgggggtaaaagtgaaattttctgagctattctgtggtttttttctctgacatgaccaaaataggaaga

SEQ ID NO: 670288 - DNA, 661 bp, Homo sapiens
ttcagaatccaggctggggccaagggagcaactgactgtccgtcatgtctgcagggctggcccaggcagtgggtttgtccatccacattaattctggccatagcagctttgctgttgatcttgactttggtaacttccctagtgggcctcgcaaggcccagaagatttttgctggtccctgcatgaagcaggaatgaagcaagactcacattttttattttgagttgtakttatagaaatccttctggaatgatctacatgcctggtttcttatgaccttcagaatatgggaggcagttcatggggcaggagtttaagccaatgtgtgttcctgacctggtgagaactaaacttaaatcagactagtggtccaacttctcagaatcccaactcagaaaaaaaaaaaagtaagataatgagttttaaagggaagggatgtgaaaatggaaactctttaaaaatagggcagtggcaggattgtgtgggggtgtggatttgtagttgctggaagactctatgggaggttatcaaatgcactcatcctcatggcctagatggctggtggccttccgaagtccattcttccttttcaaataacactgctgcctcgctgaaaagacttcatgtcccagcctcccttgcagctaggtgaggtgatctg

SEQ ID NO: 670289 - DNA, 661 bp, Homo sapiens
ttcagaatccaggctggggccaagggagcaactgactgtccgtcatgtctgcagggctggcccaggcagtgggtttgtccatccacattaattctggccatagcagctttgctgttgatcttgactttggtaacttccctagtgggcctcgcaaggcccagaagatttttgctggtccctgcatgaagcaggaatgaagcaagactcacattttttattttgagttgtatttatagaaatccttctggaatgatctacatgcctggtttcttatgaccttcagaatatgggaggcagttcatggggcaggagtttaagccaatgtgtgttcctgacctggtgagaactaaacttaaatcagactagtggtccaayttctcagaatcccaactcagaaaaaaaaaaaagtaagataatgagttttaaagggaagggatgtgaaaatggaaactctttaaaaatagggcagtggcaggattgtgtgggggtgtggatttgtagttgctggaagactctatgggaggttatcaaatgcactcatcctcatggcctagatggctggtggccttccgaagtccattcttccttttcaaataacactgctgcctcgctgaaaagacttcatgtcccagcctcccttgcagctaggtgaggtgatctg

SEQ ID NO: 670290 - DNA, 676 bp, Homo sapiens
tgaagcccaccctgaattacgttcaactggacatacttccttatttaaaccctttggcactgatattctatctttaatcattattattattttagaacatgtcaccttcccatgttttccaagtcataaaagtagtacatgtccatcacagacaaatggggagtgcagaaaagcacaaagaataaaacaggtaagacccaggtaacagcaggcgccagcatttggggaggattatgtgcaggtgctcttccagatctttacctgtgttaatccagctcattttcacagccactcctcgagggcggtattgtttcaatccccattttccgtataasgaaatgaagctccaggaggtaatggtgatggatctcagatggtaggtggggtcctgtgcgacctggagatctgattaaacatggttgtcctagttccatggctgtgtgagttggagatctctctgagcccctggggtttctctctgttcctccctggcccctgcatgcagcctggggtcttaagtgggcatctactcctccttggtggatgctgtcgggagactgtaactttccgaagctgcctctgttttattttagaagtcaggttttaactgtgggcataaaaagagcaagaagtaataactgcagccagcatttatggagtgctttacacgtgccaa

SEQ ID NO: 670291 - DNA, 583 bp, Homo sapiens
ggaaggccagtcgtcagaccaggagagttgtccactacctacgcctctggcaaatgcatctgcctgcctgccacagccccgcttgcagtcagtcaacagctcgtactgagcccttctgtctgtggggccctgtgggcgcaygaggagatggaggaggagacattgctgttgtttccagcacggggttcagggctggcttctgggagattgtttatttcttctgaggaattttgctggcaattaggccaggttgcttatgggaaaacacaagtatgttggtgatggtctgaacagtcatgcttcttatgggtgtggccactcattgtacttgcacagccatgcacacccacgcacacacacacgtggacacatacacatgcaaccataccccctgcatgcaggtactcatgtgcacacacgtgtgtacctacatgcaagctgcacacatgcacaaatgctctcatgcacaagcgcgagtgcacactcacacaaacatgcacatatgtggacacacactcaccatgcccctctttaattaagcagaggaatacaaacatcaaacaacagcttatttatagaaaca

SEQ ID NO: 670292 - DNA, 1885 bp, Homo sapiens
tcacctaacctactattcctttattattccccactaaaatatgagttgaatagttctaattcataagtcagtaattatttcttatgtatgagttgacagaaagtaaattttgacttgcttttccccaaaggattccttctgctttgatcgctgagctagtttgctagggctgctgtaaccaaataccgcagcctaggtggcctaaacaacagcagtttcttttctctctgttctggaggctgaaagtccaggatgaaggtgttggcaggctggggttcttcagaggcgcctctccttggctggtagatggctgccttctcactgtgttcttcccatggtgtttctttgtgtatacaaatttcctctttttttttttttttttttttttgagatggagtctctgtcacccaggttagagtgcaatagtgtaatctgggctcactgctacgtctgcctctcgggttcaagcaattctcctgcctcagcctcccaagtagctgggattacaggtgcacaccaccacacctggctaatttttgtatttttagtacagatggggtttcaccatgttggccaggctggtctcgaactcctgacctcaggtgatctgcctacctcagcctcccaaagtgctgggattacaggtgtgagctaccacacctggccacaaatttcttcttcttataaggacacgagttagggtggaataagcctcatccaacagctttattttaccttagtcacctctttaaagaccttatctccaaatagaatcacattttaaggtactaggggttgaagattcagcatatgaattttggggggacaaattcagcccatcacactcatttatttcatttctttttttttcaattccctctattttaggctgtgctattaattggtgaacaaggaacagccaaaacagtaataattaaaggatttatgtcaaaatatgatcctgaatgtcacatgatcaagagtctgaatttttcttctgcaaccaccccactgatgttccaggtactggctctttggtatggctcagtaagcccaattttgtgataaactttggaggctcaaatctctactattctgcttcaattgaatctcatctgaattttcatagccatgataaatcacccacgtacgtcttccattctttcaattattcaactgcaatagtttccctagttagaatataacatcttaaattatggaaacattaaaagcttatataaggtgctataggcctcaatgcggtttaaaatatctatgtagaaaatactgtgaacaygcaaaatccaaaactgaaagaaaatcatttattccccacctaaacctacttcctttccctagagtctgcttgcctgaaggtgttcctaatactcttttaggctaggcactttgtaataatctttaatgcgtccctgttgctcaggtctcaaaggctgttacagtaccaaaagaaatgcatttcacatctatttctttatcttcatgctcctggtttacctctaggtaatccacttctgcatgattgcgtaccaggttattggcatggaagaatccccagctatgattggttcaagttgaattctctttcagtctagcttttataccttccactccttacttcctagaatgccactttaatcttgttccccgacttaacattccaccctagctcccatgctcaattgcaacaaggtataaaatcttagacccttagatatgaaatattttgctctatgtatcacagaagtgtgagagaaaaaaaacccctcaagtttgcgttgtttatttttttttcccaatgaaaccaccaggaatgacctagatttgcagtggcttaaatagttctttttctcctggtcctaaattg

SEQ ID NO: 670293 - DNA, 927 bp, Homo sapiens
  misc_feature 438: n = A,T,C or G
aaagacagagaggattacataaataataaactaacaaactgctttcccaaggtctaggaggtgtgatttaaagactgtcaattgcatgacacttagcattaagccagagaaaggcttttgtgaaaatgtcagatgttattagcagcctgttttataaatgaggaaattgaggcctcacaaagcagtggcttgtatgagttctggcaactggtttgttaagaggtcgggataaaaatccaggaattttgactctacatatcctgctcttgtcatcgataggcacacagcaaggccacttggaaagaacttatgtcaagttatagtctgtctaaagcaagaaggtatgcacaggtataacagtgtcagaagaattagaacaaacaacaatcgtctagaatgtccatgttccctaagtgtggaagtttcccattaagtggntgagactgctccagagttgtattcagcatgggcctgtcggctgatactgtggacctgcctgtcaggaagaaatcctcttcttctcccagaaatcctgcacctgtagcaacaggtgccatttgcagagggtgccactgccttcamaatccctttctaggcactatttcctttatttttgccctgatatggcaacccaaaagtcatgcatttttattatttgtttttcttaaaaatcacttccatggaaagtacagaagtgtttttttgtttgggtttgtttgttttaacatagagtcctgaagggaaacactcagaaagttgcagtgcctagaaaggtacttcagacacaggccgttaacaagaattcacactaagaagggttgacccatcaaggctgaggaccactgtagtgtttttatacctgataaggcatgacttgccttcaacgaatgctgcatttttcctcattgctgtatcagcgtactcatt

SEQ ID NO: 670294 - DNA, 927 bp, Homo sapiens
  misc_feature 438: n = A,T,C or G
aaagacagagaggattacataaataataaactaacaaactgctttcccaaggtctaggaggtgtgatttaaagactgtcaattgcatgacacttagcattaagccagagaaaggcttttgtgaaaatgtcagatgttattagcagcctgttttataaatgaggaaattgaggcctcacaaagcagtggcttgtatgagttctggcaactggtttgttaagaggtcgggataaaaatccaggaattttgactctacatatcctgctcttgtcatcgataggcacacagcaaggccacttggaaagaacttatgtcaagttatagtctgtctaaagcaagaaggtatgcacaggtataacagtgtcagaagaattagaacaaacaacaatcgtctagaatgtccatgttccctaagtgtggaagtttcccattaagtggntgagactgctccagagttgtattcagcatgggcctgtcggctgatactgtggacctgcctgtcaggaagaaatcctcttcttctcccagaaatcctgcacctgtagcaacaggtgccatttgcagagggtgccactgccttcacaatccctttctaggcactatttcctttatttttgccctgatatggcaacccaaaagtcatgcatttttattatttgtttttcttaaaaatcacttccatggaaagtacagaagtgtttttttgtttgggtttgtttgttttaacatagagtcctgaagggaaacactcagaaagttgcagtgcctagaaaggtacttcagacacaggccgttaacaagaattcacactaagaagggttgacccatcaaggctgaggaccactgtagtgtttttatacctgataaggcatgacttgccttcmacgaatgctgcatttttcctcattgctgtatcagcgtactcatt

SEQ ID NO: 670295 - DNA, 663 bp, Homo sapiens
ttagcaaaatacatacttttttcttttttaggatgttatcaaacagcaaggacttgctttcttagttatagatatgctaggctctgtgtacccccttagtattagtttattaaagctagtaagcctgaatttggtttattctgacaggtataaaagaacataaattcattatagagaatttgaaaaatatagaaagttctgaagaatatccaagagattatctctatagactttttgatgcacgttcttccaggcttttacggacttttacacatttcatatatatacatattacaattaaaacacaattgtagagatgctgtgttgctcaggctggtctccaactactggtctcaagtgatcctctcacctcggcctcttttttttttttttgagacagagtctcactctgtcacccaggctggagtgtagtggtgcgatctcggctcactgcaagctccaccacccgggttcaygccattctcctgcctcagcctcccaagtagctgggactacaggcgcccgccaccacgcccagctaatttttttgtatttttagtagagacagggtttcaccgtgttagccaggatggtctcgatctcctgaccttgtgatccgcccacctcggcctcccaaagtgctgggattacaggcgtgagcca

SEQ ID NO: 670296 - DNA, 663 bp, Homo sapiens
ttagcaaaatacatacttttttcttttttaggatgttatcaaacagcaaggacttgctttcttagttatagatatgctaggctctgtgtacccccttagtattagtttattaaagctagtaagcctgaatttggtttattctgacaggtataaaagaacataaattcattatagagaatttgaaaaatatagaaagttctgaagaatatccaagagattatctctatagactttttgatgcacgttcttccaggcttttacggacttttacacatttcatatatatacatattacaattaaaacacaattgtagagatgctgtgttgctcaggctggtctccaactactggtctcaagtgatcctctcacctcggcctcttttttttttttttgagacagagtctcactctgtcacccaggctggagtgtagtggtgcgatctcggctcactgcaagctccaccacccgggttcacgccattctcctgcctcagcctcccaagtagctgggactacaggcgcccgccaccacgcccagctaatttttttgtayttttagtagagacagggtttcaccgtgttagccaggatggtctcgatctcctgaccttgtgatccgcccacctcggcctcccaaagtgctgggattacaggcgtgagcca

SEQ ID NO: 670297 - DNA, 601 bp, Homo sapiens
tggtgggaggtaattgaatgatggggtcagttacccccatgctattcttgtgatagtgaatgagttctcacaagagctgttggttttataaagggcttccccccacccttcactctgcacttctccttgctactgccatgtgaagaaggatgtgtttgcttccccttccwccatgattataagttttctgaggcctccccaatgatgcagacatgtgagtcaattaaacttctttccttcataaattacccagtcttgggtatttcttcatagcagtgtgagaacaaactaatacactaaataaagttaaaattaaaaacattaagcaaatctaagtcttaaaaatggtaaggcctcgcccatctcaaatatagatatttgttacagcagcatggttttcatttttgtcttttggtcttttccagttggagaggtttgattaatgttatgttaaatgcctaatattatgtaataaattaagttactcatgctgtgcctagccccttcgcacctacttctagcagcaaaaggtagctgaggataaacaactccatgaggggaaattcactatacatatgttcaaacaaatatatccatggta

SEQ ID NO: 670298 - DNA, 837 bp, Homo sapiens
tgctgtaagtttacatgtggaatgattaaatgaagctaattaacatatgtggcatatatacacaaaacaatactatttagctgtaacaaagatggaaattctgtcatttgcaacaacatggatgaacctggatgaccgtatgctgagtgaaataagctaggcacaggaagacaaatgctgcatgatgtcacttatatgtgggacctgaaaagtcaaactcatggaagtagagaatagaatggcagttactagaagctgggagaagaaggtagtaaaaggtggtaataggggacggtcaaagggtataaagtttcaattagacaaggagaaatawgttttagagatctgttgcacagcatggtgactatagttaataataatgtactgtatatttcaaaattgcttaaaaaatagactgtaaatgttctcaatgctactttctgaccttgggtttcactgattttaaaaagcttttcctggtaaacctaatcaagacctctgctttctggaaatcaataacactattttgtgtgggaattgagcatgataagttgcagccctttacaataatttcccagattctttcagtaagatctaaatttcctcgaatgtaggggaaattttggttctcctgactccttcctgatttcatcaggcaattaagcaatacgtatgcgattgaactaaactgaaaaacaggtagagggataggaatgatgtaatatggagtacgaagttggatattgagctgacagaacaccagagagtcagaagaggacttcagcagctggctgtgaagacttggcagattgtggaacggggcagataaatgaacgc

SEQ ID NO: 670299 - DNA, 1156 bp, Homo sapiens
tgcaacctagatccctcacatgcgcatttcacaatagtattygtgttcctatgagaatctaatgccaccgctgatctgacaggaggcagaacttagatggtaatacttgttcgtctgccattcacctcctgctgtgtggccaggttcctaacaggccatggctcagttcctaacagaccacagactggtaccagtctgcagcctgggggttggggacccccgccctaatggaagaagcttgtttatttttaatgaggaagaatgtacgccctatcttttggataaataaaacataaacagttttcattcctaccattattatgcatttaacaaatgattaaaacataaacagacatgcacacataccttttcaaagaagtagtgttgtgaaaagctttggaatactggtagctgtcttgctttgaaatttaagtaaaacttgaacttttaaaatttgtgaaatatttgcttgaattttctacttcttcgaagaatgtagaaaggaataatttatcagaccttaattattcaaattatgaattatgcctttattctaaatgtatgattgcctttcctttgaaaaactagggaaattttgattatggtttagtaattttactcatgaacatataaatttagtgatttcaactatatttttaaaatcagttcctgattaaatcatttagggaagtatgtttaaatggattttatttttgaaagacgtattttactggcttttttttgccccaaactattcatattttactgacggataaatatgcatactaattaataaacataataaagtttgaaattataaggagaacaggaagttatttgtgtccactatatgccttaatgattttattgtaaaaagtaattttagaaagtaaattcaatttttgtgcagaaccatttggagtgatatattgcagtatccatgtatagagtctgtaaattggacactgggattgtatatgttattggcatttttgtctaaaatgtcatacaagtaagaagttgattactattggcatttgtgaaatatgaagtatattttattatgtaagagtatttggatatttggttcaaactttggatctattgtcctcctttcaataaactctctgtgggatttgtggcttatgttaaggag

SEQ ID NO: 670300 - DNA, 1736 bp, Homo sapiens
tgatacattaaatctgactaatattgttttcatgaatgtggagtaattgctagggggattacaaatcattatagatactgtgtgttaggcccatctttcattgctataaatacttgagactgggtaatttataaagaaaagaggtttaattggcttgcaggtctgcaggctttgcaggaagcatgatgctggcatctgctcagcttctgggaaggtctcatgaaggctaagggggagcaggagcaagagagagggagatgccacacacttttaaacagccagagaacagaactcactgtcatgaggacagcactcatcaccaaggggatggtgcactcatcaccaaggggatggtgctaaaccattcatgagaaatccaccccagtgatctagtcacctccaccatccaatcacctycactgggccccacctccaatatagggattacaattccacgtgagatttaggcagggatgaatatacaaactatcacacagccactatcgataggaagcatcatggcaccgaagagaaaagttttatatatgtggactcaattattctgtatttcttctcttattatgtatcttagagaaattattgcacatttgtaccagtacacatatgtaagaatgtccatagcatcattgttcctaatagcagaaacataaaaacaactcaaatgtctgatagtagaatagataaaatgtatatttgtgcaatgaaatactatattgtagtgaaaatgagttatatacattttatatatacaacataaatgaattgcaaaaaatagtattgagcaaaaaaaaaaaacacacaggtcttaaaatagtgttaatccatgcatatgcaatttaaagagaagtaaactgtttagatttctgtgtgtgtgtgttacatttaaaggtgataaaactataaagaaaagccaaaatatgattatctcaaatatctgggtagttacttttagtacttttttttttttttttttgagacagaattttgctcttattgtccaggctggagtgcaatggcgcgatcttggctcactgcaacctctgcctcccgggttcaagcaattctgcatcagcctcctgagtagctgggattacaggcacgcaccaccatgcccagctaattttttgtgtttttagtagagagggggtttcaccatgttggccaggctggtctcaaactcctgatctctggtgatccacccacctcagcctcccaaagtgctgggattgcaggcgtgagccactgcacctggcagttgttatctttgggaggggaatgtatggggtttcaaaagtgttttttaacctagctggtggtagttacacaggcatttgctctattattatttttctttaatgtggaagtatatgtgatataattcacagtaaagtaaatggtgaatcagagagagtcaaagggcaatgagttagtgaagatggaatacaggagttttctcaggtggatcagagaaatgggatggtattggaaggccacatggaaagattgttgcattttctagggaaagatatttctagtcctgattagtcttattaacgtctatgcatgatccctattaacaactgagacttgagcatctcattgttctccccctagtggcatcattctcccagtcatccaggcttgaaaccttcttgttatgcctgtatgttgtcaccatatcatgattttttcctttgaaaaatttttcatgtatc

SEQ ID NO: 670301 - DNA, 597 bp, Homo sapiens
tgattagcataggctgaagaaagaatgagaggatcttatttatcttgtgctttctattttttcccacctattttatatttttttctcctcttttgctttcctttagttcagttattttttatccttcttctttcccctctactaaatttaaggttatacactgctttctattaatagttaccttaaaataacaacatcaatgtgtgatgttgatctggacaacataaggacctttggacattttaattccaagaccttcgtctgactttttttttcccctttggtctgggattttagttctttttttttttkgcttgttttattttttttaattggggtctcactctgtgacaaccaggctggagtgcagtggtgcagtcttggctcactgcaacctctgcctccctggttcaagtgattttcccaccacagcctcccaagaagctggaattacaggcgcccacaaccatgcctggccaatttttatgtttttagtagagacggggtttcaccatgttagccaggcaggtctcgaattcctgacctcaagtgatctgcccacctcgacccccgcaaagtgttgggattacagatgtg

SEQ ID NO: 670302 - DNA, 636 bp, Homo sapiens
aaagttagttggtttccttggtaagggctagggtagagacagaagattttgttcatagcctatggccaagytcctgtaggatttccaaagcaactgtttaaataaatggctgggcaagaagagaggctgtcctggctgctttcattatcttctttggggcaaaaattattggcccttcgtgacatcacttataaatttttaagtttccgtggtgtacatgggtcaattccttcctaaattatttatagtgatatatatatgtgcatgtgtgtatatatcagtatctatatatctatatctcaaaagaacaagcaagcaagagttctcaacagacaagcattgagcagagtctttgcagacatttggtgttcttttcctttggggaagacatgaagcctatctttctggaagaagcacagagaccttggtaatatcttgcttgagaaaggtggatagtttgttaatccgtttcctttctatgagaagggaaaaactagcttcaggagtgctgagacctaactagggagattttaccaagaatgtctcataacatgctgtcattgaagtagcacgagttacccaaagtctggaaagtacaaagtaagggggaaaagtaagattttagggataaatcca

SEQ ID NO: 670303 - DNA, 626 bp, Homo sapiens
acagattatctaataaatattttggtgctcaattttatttatttatgttttttgagttagaatcttgctctgtcgccctggctggagtatagtggcgtgatctcagttccagggttcaagctattctcataccttggcctcccaagtagctgagactacagatgcctgttaaatttttgtatttttagtagagacagggtttcaccatattggccaggctgatcttgaactcccgacctcaagtgatctgcccacctcagccttccaaaatgctgggattacaggtgtgagccaccaygtctgggtggtggtcaatattcaattaagtaaatgtagtgcacaaactagatgatgatgataatgacaatggtagcagctaactctgattaagcctttgctatgtgctgagcagtcttctaaatgctttgcatgtattcaaccaatttaatccttacagtgaccatacaaagcaggtactactaatattcccagtttataggacctataatataggtaagaaaactggggcacagaaaaattaagtaacctacctagtaaatgatgatgccagacattctggcttcagacccacattttaaatctgtatactaagaagcccatgtgag

SEQ ID NO: 670304 - DNA, 1105 bp, Homo sapiens
  misc_feature 584, 806: n = A,T,C or G
ttactttcaactgggcatggtggctcacgcctgtaatcctaccactttgagaggccaagataggaggattgccgcagctcaagagttcagcatcagtctgggaagcatgagatgctgtctgtacaaaatttagaagacaaaaaaaaaaaaactgggtgttgtggtgttgtggcccatgcctgtggtcccaactacttgggaggctgaggtgggaggatcacttgagactgggagatggaggctgcagtgagccagttataccactgcactccagcctgtgccacagagcaagacctgtttccaaaaaaaaaawaaaaatcttctgggaaagagaaagtgagtgagttcttcctgccattatatgcagggggccttcacgttgtactgggccatatttttaccgattagcccactgccactggctatggagcttaggagaacctcatgcaaacaggacttctgatgcctgcccttatctcctccttccttgggtgaatggacatctcaacagtactttgattctcaaggctcatgggacttcagtggcaaaagggaccttggaaaaaaagtccagttccttccangtttggatgaagttcaaggatgttaaatgatgtggccaagaatacaaccattgtctgtagaaatctccaccattaagtctaggaataatgaggatgtctccctttttgtagttggctttcaatcactgctttacatgctttcatcaggggagaagtgaggagataaaaggaatccctgattggtcattcttggtagttgttcacaacttggatctaagtttntgtggtgaaggaagttgaattcatgactaaaatgaataatttttttaagactctatatctgctccacagtctcccattctcatggatatttaagagtagacagggccgggcgcggtggctcacgcctgtaatcccagcactttgggaggccgaggcgggcggatcacgagatcaggagatcgagaccatcctggccgggcgtggcggcgggcgcctgtagtcccagctactcgggaggctgaggcgggagaatagcgtgaactcggaaggtggagcttgcagtgagccgagttcgcgcc

SEQ ID NO: 670305 - DNA, 879 bp, Homo sapiens
ttctggctgataagaaattttcaaatatggttaagtaagcataaatcctacacgttttcaaggtgacccctatagggacctctctatatacagtcctggtataaatgcatgaaaatacagttcatttgaatttatattgacttggggcttaaaaaattacaaactacactcactcttgccaaccttttcaaagatgacttttaaaggagcaggggatgggatattaccaatttatatttgaaaatacagtaaatctttttcaattttcttaaaatattccactagattatgagttatttgaaggaaaaggcttctctctgtatctactacagtacttatacaaattcaagtttgacccttagcagaatagtagttacaatggaaagagggctagactaggattcagaaataatcttagggcttatagttttccgtatctcaattttctcatctgtaaaatgcctacgtgtacctacttcactgtgytgatataagcttaaaaattaagttaacagatacaaaataattttgaaaaattaaatgaaagcatacttattaggctatcccccaaaataagagtgaaaaaaaaaaggattatgatcctatttttatttcaggtagattatttttaaaattacaacagaatttcaaaatctttgttaagtttgtatattaaagtaaatcttataccttttctaagtcttcaatttctgaactgaagtttttaccctcatccatcatttcctcttcttcaagagttctttcatcatcatagtcatggaccaacatctcagcagtggggtcaaaatcatgatcctcagaagacaaagacccaactggaataaaacaaactgaatcactttacacatttacaaggct

SEQ ID NO: 670306 - DNA, 879 bp, Homo sapiens
ttctggctgataagaaattttcaaatatggttaagtaagcataaatcctacacgttttcaaggtgacccctatagggacctctctatatacagtcctggtataaatgcatgaaaatacagttcatttgaatttatattgacttggggcttaaaaaattacaaactacactcactcttgccaaccttttcaaagatgacttttaaaggagcaggggatgggatattaccaatttatatttgaaaatacagtaaatctttttcaattttcttaaaatattccactagattatgagttatttgaaggaaaaggcttctctctgtatctactacagtacttatacaaattcaagtttgacccttagcagaatagtagttacaatggaaagagggctagactaggattcagaaataatcttagggcttatagttttccgtatctcaattttctcatctgtaaaatgcctacgtgtacctacttcactgtgttgatataagcttaaaaattaagttaacagatacaaaataattttgaaaaattaaatgaaagcatacttattaggctatcccccaaaataagagtgaaaaaaaaaaggattatgatcctatttttatttcaggtagattatttttaaaattacaacagaatttcaaaatctttgttaagtttgtatattaaagtaaatcttataccttttctaagtcttcaatttcygaactgaagtttttaccctcatccatcatttcctcttcttcaagagttctttcatcatcatagtcatggaccaacatctcagcagtggggtcaaaatcatgatcctcagaagacaaagacccaactggaataaaacaaactgaatcactttacacatttacaaggct

SEQ ID NO: 670307 - DNA, 652 bp, Homo sapiens
acactaagatgcacacttcaggataatataaattttactcaaattctaaccctcaaataaagacagaaaacacaacaaaaatctgctttataaaacaaatataagtttctgtgaagcagctatacagccattcagcttttaaaagcattgtatcactttacatttctctaacagtacttcaagttccctagcattaatcagacaagcattaaactgtaagactttgctttactttggattactaacaaagttcttaggattatgtgtagggaatacagaaaatcacatctgaaggttttggaagatatatccattgcaagttgttttggataattcatacttgtttataaaactataatatcttttaatagcaaayatgaagtcaataggaaactccaaaaaccaagagaagaaatgactaaaatccataatcccaaagaaatgaaatcaaatttataaaaaaacaggattttctccacttgttttactctagtatccaattcaattagacccgtaaccctcagagcaaggaaggaaagtatcagaaactgaggttgggggaaggaagaagtggatggaagcatactcaacataaaaagtttaatctgttcttagtcaagctactgaatattttaaaatttcaaacatttca

SEQ ID NO: 670308 - DNA, 934 bp, Homo sapiens
ccataggtattcagactatagtctataattcacatatggcatatttcaacttatttgtattttgacaatattgtacaatctttcaggtcagagtctagccagaactttaaggatattcttttctttaactgtaacaattattcttctctattgcaaagagaagaccgcagataagaggtataaactcaagagaagcmgcatctccattagtctcacagattatctcagcatggaatggccaactgggaacagaaataccagaaagctgaaacaaaaagctgcaatagctttccaagtcttcaaaagttccttttgagttgttctaacatcttgcaacattataaatacccttatttaagcagtcagcacaatgtccattttccaatttataacaccccctcagccaccaccacatatattcttccccttctctcccccaggaagataaatcctgctgtctgcatccctagagagccctttttggctggcttccagttgggtttggccaataaacagcaccagtagaacaggtggaggatggcatcacatctctggcaatagctgcctttcatggagacctcagctcctgccaggaaatctttccttaatcttctaactctgagatccaagaaacacaatattttcctcttgtccttcttcccacattactgctacagaggcaataatggctccaggatgttgctagtcttaagtgtctcaccagtgcttgctgcttctttaccgctgcccatattgttaggcaattctttcatgaacttttcctttgaatcatatctggtgaattctatttcctgccagaaccctgaacaattcaccagcctaaaatctttttcacacatattatgcacggcaattcccccctccagcagtctgtagcccctttcctgtttttatcatctctccttgctagaag

SEQ ID NO: 670309 - DNA, 912 bp, Homo sapiens
ggagggtaaatcatcagcctcattttacagatgaaaaaactgtggcactgaaagattatattactagaaatagctgaaatataaattcaagaccatttggtgccagagttcacaggattagctactatatttaacacactctccagagtctcagtttccaaaagtgtgacacayatttcatgggttgattcaattaattcgaaacaatataaactccgtatgtcaggttttcatcttcatggcttcaatgatcctcaagagaattgaaaactaaccacaatattcatgtttttctagaaaacaatcctccatattcattcattcattcagtagacatcgagtcactataatattcatcaggcatcactgtgctaaaatagagataaagaaatgaatcatctttccctgtacctgtttcctcattcatcttccaacctgcattagtgaaattaggttgagagatatgaaattatcattattcaattgttcctgacctacaaaaccagcaatcttgtatagttcaatcaaatgaaataaaacaaacaaaaaacctttggtggctttccaacctatacagggcaaagctgagtcttcagagaatgccagaatgtggtccttgcttccctattcaggtccatttcttgctatgttgcctgccttctcattttcactcttcctcctatagggccagtctcatgtgcctaccccttcaagagggctttctcctgctcactctttcttaggagatacttgctgatcaatttctcatccccctacaccttttgctgagtattcccagaatacaaattcctgaccaccctttacttggtccatttctcagggttgtgtttgcagtgagtaaccttcagagacaaggtaatgtctccctcaggggcaacaagcaagcttgtt

SEQ ID NO: 670310 - DNA, 920 bp, Homo sapiens
ttgtctgtaacaccatgttgatctgatttctgcaaattgctgaggaacaactggtttatggtgcgtataaaaagattttttcaaagatcttatgcttcaagattttaaaatgtaaaaataccttctctatgccacacaacttcatttctctgtactttttttttaatgccttatgccagacttgcatttattttgggcatatatcatcagctacggaatatgcaaatgattttaattcatcctgtaagcaatgagtggaaaatgagctgtacctgatgcagcttctcaaatacaacattgaaaaagcctgaaaatgaaggcactacataagtagaatatgcataaaaaggaaaaaaaaaaacacccaggaaaaatggaggcagattcctccgctcctgctctaaagcttcccctctgttctgcccttttggtagagtatgaagtgtcacatgaatgttagggggtagacacattttttaaacttttattgtatatacatcgtatgcgtttctttcatggtaagagcacttaaaatctactcttagcaaatttataatatgataactgtagtsatgctatgcactagacctattggttaattttgtaacctaggcaaatttgatttaaattcttttaaatgtattgaaattgtcttccataaacacaacacttttatgcaaaatacgctttgatggagacacgtggacataatttactaaggctccacgaaggcagggctctggttctctgctgtagctcagctctgagagccctgccggccatgcagcaggtgcacagtgactaggagtttgatgaatgagtaaggaggaattgctgggagtaagctaaacacctaaaagtattgctgagaatttttaaagtggtagagtgcagctggattgcagcatctcccttctcaa

SEQ ID NO: 670311 - DNA, 1644 bp, Homo sapiens
catcattctaagtgctttacaacgattagcttctttaatcctcataactccaggaggtgcgttgctatccccattttgcagatagaaaaccaaggcacagagaggctaagtaatttgctcaagggttatataaagatcacacgtacatacaggtataatgtctgcttggaaaagacgttctgtgctaggcgaaagtaacagaggagaaggaacatttcttctactagacatgataaataattggctttccttaatacttacaataaccgtgtgatgtaagtattttcctgatcttatagagggggagactgaaacttagcgaggttcaatagcttgcgcacggaccccatggctagatggagtgaccccaaagcatgaacatgtcctacgtgccatacaactttcatctgggcctgtgattgagaatcgtggccttagcacatctcttgccaccccagggaaggatctgcctagccacctggcctccgcctgggcaccacaagggacagggaccccacagtgggtggccaaacacgtaagagcctgctctgcccttcactagccatgttacagggtacagggctgaccggtccctgccgagtttcctaatctgtaaaatgggatgaatttccatttactttatagggtggatgtaaagcttgtgcaaagaagatggcagagtgctggaaacacagtcagtacccaacataaatcttagtttaggtaaaattttatcattgttcttaagccaatccgtcccattattggacacttactatttaaaaagggcttccccttcctctgtctctgtctcattcattcattgcttccagttctcaccagttatatatactttctcctgtgtcttccacatgaaaccctttaaaaagtattattctatttgtgatcactcaattgacatatcattaaattaacacatgcattgggagaaaattagaatattcaaaaaaacaagaagagcttttaggataaaataaaacccacctataattctcacaacaggaatagccaagtttaacatattagtgtgtttctatctgccttctagtcttttttctgtgcatataacacacacacacacacacacacccttcctctcatctcccatcacagcaagggagaagctatgtctgtgttaggtccaggacagtggggagtgtgtttgctgtgtgtcaggggtgtacatgtgcatgaatattctaatgtctgttgacacagactgctgagctctcctctggaaaggctctactcatgaatacccacagctgcagggtatggtggtggctgcacagccaccctggaggtatccaaagtgtgatttcctccctatacagtgcagtgttcagttctcttggtgagtgaaattcagaaaccctggagcacatcatcaactggcttgcagggctgctcttcatctgaaggtttagccarctttgctctattgataccaggccttgtctttgggactgtcacctccaacctgaacagggaccttcctaagccaccttctttggatggacatcccaagaactttgcttgcttcgacttgagtcacagagaaaagatgccagatttgggaagcgggtgccagacttttccagggaaggctgacagctgatcaca

SEQ ID NO: 670312 - DNA, 1249 bp, Homo sapiens
tcaatatactatgcaggatacaatacctgtgtagcrgcaaatgagtttgtgcatcagtttccatgttgactgaggacagcaatgttcagggtagtatgcatgaggctatctcatttgtttttcaaaagcaatgatccctcaaatctgattttactcacacacgtggtatacgtaaatagatcagatagatgcatagatacatagacatagggacatagacacagacacagacacagacatagacatagacaccatagacatagagagcagaatggaaaaatacccattaggttcttaacatatattgggcatggggtgtaaagagagaagtggggagagtgagtgaagagatagaagagaggagggggagaaacaagcaaaaaaaaaatgagaacctaaatgagcatttaaaatgaagtctacagtaaatgcagcacaatcccacttgtgtaaatgttatgtgtgtgtgtacacagatatgtgtgtgcatgaggacatacacaaaatcatgatggttggaagggttaatggtgaccctgccaggaggtctgatttcacgggcttgccccatcccccttttttctttatactgttatgtattgttttatttttcccccaacaaacatgtattatttatataacgggggagagaaaaaagtcaatttccactatggaaataaaagagcccatttatcacttttatgtgctttatgtattggagtctcaagtgaagaagatttcattaaaaaaaaaaaaagagttacaccacaaaaaatgtttgccaaactctgctctagacaataccaactttctccctcaccctcaagcctatggaattgcagaatagattagtatctctgtttgcaggagaaaaatgaaatttgcaaaaatgaataataagcaaatgcttgttgaattaaaacacattgcaaatgacaatttacaagacaggctgaaactggcagccagaggctcatccagctcacagatgagtctgttaggcccacaccgtgctacaaaaaatgaattcattaataacatacaaagttagtagagtccactctttttactttttatttgtattatattatattttattttattttgagacagaatctctctctgtcgccaggctggggtgcagtggtgccatcttggctcactgcaacctccgcctcctgggttcaagtgattctcctgcctcagccccttgagtagctgggattacagacacatgccaccacaccca

SEQ ID NO: 670313 - DNA, 1249 bp, Homo sapiens
tcaatatactatgcaggatacaatacctgtgtagcagcaaatgagtttgtgcatcagtttccatgttgactgaggacagcaatgttcagggtagtatgcatgaggctatctcatttgtttttcaaaagcaatgatccctcaaatctgattttactcacacwcgtggtatacgtaaatagatcagatagatgcatagatacatagacatagggacatagacacagacacagacacagacatagacatagacaccatagacatagagagcagaatggaaaaatacccattaggttcttaacatatattgggcatggggtgtaaagagagaagtggggagagtgagtgaagagatagaagagaggagggggagaaacaagcaaaaaaaaaatgagaacctaaatgagcatttaaaatgaagtctacagtaaatgcagcacaatcccacttgtgtaaatgttatgtgtgtgtgtacacagatatgtgtgtgcatgaggacatacacaaaatcatgatggttggaagggttaatggtgaccctgccaggaggtctgatttcacgggcttgccccatcccccttttttctttatactgttatgtattgttttatttttcccccaacaaacatgtattatttatataacgggggagagaaaaaagtcaatttccactatggaaataaaagagcccatttatcacttttatgtgctttatgtattggagtctcaagtgaagaagatttcattaaaaaaaaaaaaagagttacaccacaaaaaatgtttgccaaactctgctctagacaataccaactttctccctcaccctcaagcctatggaattgcagaatagattagtatctctgtttgcaggagaaaaatgaaatttgcaaaaatgaataataagcaaatgcttgttgaattaaaacacattgcaaatgacaatttacaagacaggctgaaactggcagccagaggctcatccagctcacagatgagtctgttaggcccacaccgtgctacaaaaaatgaattcattaataacatacaaagttagtagagtccactctttttactttttatttgtattatattatattttattttattttgagacagaatctctctctgtcgccaggctggggtgcagtggtgccatcttggctcactgcaacctccgcctcctgggttcaagtgattctcctgcctcagccccttgagtagctgggattacagacacatgccaccacaccca

SEQ ID NO: 670314 - DNA, 660 bp, Homo sapiens
ttgttgcagcagcccaaatgaactgaaacaactcctctgacagctacacccaatccacagtgctggtcaaagcagtgtgtgagtcctttgctccaaggctgctcgcccatgtcctacacaagaggccagcaggagcctgaggaacacaccccccacctcactgtgtgtgtgtgcctggcaaagcaccctgcccagaaccctctccgccagggccttgggaggagaggggacgtccagcctcttctcttactgatcttacctttgtaagttcctcctttccaaaataaagcctattcctaaacttgtgctgggtgatgtggaattcatttgaggagrccctgttgccagacagcggcagcattggtctcgcaatccctcctccttggggaattcttgtcctctcacccaggggaggttcagacagtagctctgttcatggcccttggcttattgcatcacccttgttctgaatgactcttcttccacccacgtcatctgctcctgcttcccaagctggcctaatgggctggcagcatcagaactgatcatttggtgacagagcattctcagccttttgctcagcacatgagctaagtatgatctgatccaagaacagaaactgcctcggccgtgtaggtttccccagctgaatttctcttg

SEQ ID NO: 670315 - DNA, 603 bp, Homo sapiens
ataacaacccttttttcccctccctcactctgtcacacaggctggactgcagtggtgcaatcatagctctttgcagccatgwactcctgggttcaagtgatcctcctgcttcagcctcctgagtagctggaactacaggcactcaccaccatgcctggctaattttttttttctttttagttgaggcagagatctcactttgttgcccaggctgttcttgaactccttgtttcaagcggtcttcctgcttcaccctcccagagtgctagcattacaagtgcgagccaccaggtctggcctaaaaattctttaaaatgtggatctgtttactactctgggatttgaagagtgagaaaattctaagtatggctttccatgcagagttaataatcgtctcctcctttggacatttaacagatctccattttgaagttttcttccatcttcattgtattctctcatcatttttgtataactgtggattcaggaacacccctcctttttttaatttccttgcatttgtgttatctttttttattataggaaatgtaagcttaatataaaaccatgaccatcatcagtggtccatgcagctaaaacaga

SEQ ID NO: 670316 - DNA, 603 bp, Homo sapiens
ataacaacccttttttcccctccctcactctgtcacacaggctggactgcagtggtgcaatcatagctctttgcagccatgaactcctgggttcaagtgatcctcctgcttcagcctcctgagtagctggaactacaggcactcaccaccatgcctggctaattttttttttctttttagttgaggcagagatctcactttgttgcccaggctgttcttgaactccttgtttcaagcggtcttcctgcttcaccctcccagagtgctagcattacaagtgcgagccaccaggtctggcctaaaaattctttaaaatgtggatctgtttactactctgggatttgaagagtgagaaaattctaagtatggctttccatgcagagttaataatcgtctcctcctttggacatttaacagatctccattttgaagttttcttccatcttcattgtattctctcatcatttttgtataactgtggattcaggaacacccctcctttttttaatttccttgcatttgtgttatctttttttattataggaaawgtaagcttaatataaaaccatgaccatcatcagtggtccatgcagctaaaacaga

SEQ ID NO: 670317 - DNA, 444 bp, Homo sapiens
gctgcatgtctccatttgtttaagcattctgttatatatatcttagtaaagtttttagtctgtttcatatatatgtatgtaggtatacacatgcatatacctattaattgaggttattctagttatagactgagtatcccttgcccaaaatgcttgggatcagaagtatttgggatttctttcagattttggaatatttgcatatacgtaatgagatgtcttagggatggttctcaagactaaatgtgaaatttatctgtgtttcataaacattttatrcacatagcctgaaggtaattttatacaatattttaaacaattttatgcattaaaatggttttttaagtactgtgtttggaattttccgcttgtgtcatattggtgctcaaaaagtttccaattttggagcgttgcaaatttcagatttttggattagcaatgctc

SEQ ID NO: 670318 - DNA, 594 bp, Homo sapiens
ttggacccaatggatccaaatcttttgtataattctttttgttaaatggtttagtttataaaatgtgttgattatctatagagaaaattacaaataaaattctrcttgaatctatttggtttatgagaaatcccatgaaaagttaatatgaaagtttcctaatagttaatcctgaagttttgtctaccagcaagttaatggacagactcaaacatgagacctagttttaaaaagtcataaatctttaaaattaattttgaaagctttggtccacctatcatcttttaatatgaatggttttcaaatagttttaaatagctctgaaacatttttaaaaatcaaactgagccaggtgcagtgatgtgcacccgtagtaccagctactcagaaggctgaagctggaggattgcttgagtgacacctcatctcttaaaaaacaaacaaagaatcaaactgagatgcttgacactgagaacagtatagaaactatgagaaatatatattaggaaagaactatttgaaggttcttgccttctttttgtaaacccagtgactatttaaaggaagtatctcaaactttgaatctgtttctct

SEQ ID NO: 670319 - DNA, 2005 bp, Homo sapiens
acttgggctgtggtaataaccacatacctggaatccctttcggtttattttctgtgttgacccaagtaatcattcttaaaaaaaacaacaacacacatttaggactgggaacagtgactcacacctgtaatttcgacactttgggaggccaaggcgggtrgatcacctgaggtcaggagttcaagactatcctggtcaacatgggtgaaaccctgtctctacaaaaaataccaaaattagccgggcatggtggcgggcgcttgtaatcccagctacgtgggaggctgaggcaggagaattgctggaacccaggaggtggagattgcagtgagcctagatggtgccactatactccagcctgggggacagagcgagactgtctcaaaaaaataaaataaaataaaaaacaaatttagttaaatgctttacttgaaaaccgatctcatgctatctacaacattttcattgctaactccccccatatatttcctgtgttccagcgatctcaggctacttgtgattactcactgtatgctcacccatgcctccctgttaggcaggagtgaaggaggaataagagcctggagggatttattcagctttgtctgtgggtaattatactcatcctgcatcttgaaagatgagtttattttgacagtcctcttagctgcttctgtctctctccaattccataccccattccaagttttggacagaagagtatgattggaccagcacattcatgtttttgatacaggcttcactggtcacaggtctgctggatacctgtggatgcacacatttgccgtagtctgcggtgttggagatggggacagaacagtatcacatatgtgaaacagagccagtgcttcccttcccaacagtcgtaggccaggcaatgtggactgtgggttgacatcactggagactgtttcagaatcagaataaagaccaataataaaccttttttttttttttctatttatggaatatgggagctgtggaagagaggtattactaggctggttgtttgcttcagggatctgcttctcatctttccaggacttaattcagctactacctctgttaaaatttttctttgatgctgtgcaacttactgaataagattttacctgctgatctgtgatgtcactattgccatatacaaaagtcccatgactatttctggttttaaaattctgtattaacaattcgtgttttgatatggaatagggcaaatatgcattaaatatgctgtttctcaaagttttttcttctagataaatgttagaattaatatatcacataagcatacaaaacaaacacgtaagaaaaatcctagtaggattttcattgggattgcatttggtttatgggttaattttggcagaattacatttatcctttctactcaggagcaagtctgtcttttcatatattcagggtttttttgtgtgtgtctatcagtagcattttacatacacagacacccatatgtaaatatgaatgttatattacatgaagtattttaaacttgcgtttgctattgtgactatatttccgtttcaatttctaactggtgattaataatatataaaaaaactgtcaatttttggccgggcgcggtggctcatgcctgtaatcccagcactttgggaggccaaggtgggcggatcacgagatcaggagatcaagaccatcctggctaacacggtgaaaccctgtctctactaaaaataaaaaaaaaattagccaggcgtggtggtgggtgcctggagtcccagctactcaggaggctgagacaggagaatggcgtgaacccgggaggcggagcttgcagtgagcagagttcacgccactgcactccagcctgggtgacagagcgagactctgtctcccaaaaaaaaaaaaaacaaaaaaaaacctgtctatttttattatttacttggtatcgaagtatttttgtgaattctccctctggttggatatttttcaaatgattcct

SEQ ID NO: 670320 - DNA, 625 bp, Homo sapiens
tctcaaagccagagtcatctgaactcaaacatgcagtatcatatgccaccttaactcctgccttctacccccaaaattcaccagaagtgaaagaactgaaagatttctgttaaaattttaaacatcagctggtcttggtattgtactgtaatgactatggaaagtgcttatagtattttattatatagtcacagactatttctgccacccttcacatgaaacagatcattaggtattcatgagaattatgaagacatctcttctcaatgtccctgttatttggacaaataacaaaactataaaaggaactgctgtactcctacagatgttttcattcatttggacataatagtttctgaatttaatttttataaaaaggaaaatatagccaaattctataattctcaaaagctgtcaataaaaatatattgaaaacttttcaagagaaaatcaattatacacatgatttttttaattaaaaaaataaaaaatgtagaaagtagaaatactacaggcatacctgsttttgttgcactttgctttattgtgttttttacaaattggaggtgtatttgtctgttctcacactgctaataaagatatacccaagactgggtaatttatg

SEQ ID NO: 670321 - DNA, 670 bp, Homo sapiens
tgttactgtgtctgtgtggaaagaggtagacatgggagactccattttgttctgtactaagaaaaattcttctgccttgggatcctgttgatctgtgamcttacccccaaccccgtgctctctgaaacatgtgctgtgtccactcagggttaaatggattaagggcggtgcaagatgtgctttgttaaacagatgcttgaaggcagcatgctccttaagagtcatcaccaatccctaatctcaagtacccagggacacaaacactgcggaaggccgcaggtcctgtgcctaggaaaactagagacccttgttcacatgtttatctgctgaccttccctccactattgtcctatgaccctgccaaatccccctctccgagaaacacccaagaatgatcaacaaatactattaaaaaaaaaaggtgaaatcaaagctggtgtcaagctcagatcccctgaggtgccacagttctctctctacccccaggtgcatcccaccctgagttaataggtaaaaccctggtcgtgaggtggtaactgctaaaattgtgcctaattcagctgatggacacagaaaggccacctctttaatgtatgagtgatgatcccaaaacacaactagaatgggagggatgactcggtgtctgcttcctgaatttttttcttttttt

SEQ ID NO: 670322 - DNA, 1693 bp, Homo sapiens
tgccatcccacattcagcatgatgttgcaataaaatgacttcttccggcaacttgccttgtaatttgggtgaattacaattggttctgccggtaaaataatgtgatgcctgttggtgacctaaaaacttaatagcaccattcacttgcttcccggccctgaaaataaatggttagtcaccaaatttgtaatttcagaagggcctgactaccactatttgagtcactactgcacacagtagctctggtaatactgacatcaaaatatctagggcaaattttgaaaacaagatgagtttcatccaacgtctcttccttttggagcttcgttaactgcactaacactcatttaatagggcttattagtcagaaggggatttcagtcttagttatcaatttcatgcagactcctttcaagagatttccttccacctttggcatttgtcttatttgcaaactctaccctctattgcttgtaaatctgcattcccaaaagaaaaataatgaaattcatatcctatatttgtatgaggtagcacaggagttcaactgctttctgaaactagtagaatattagagatactccttatcatatgagaagagactcccaatattctccaagggaactccagtaaagaagaaataaaaatcttttaaaatactgttatgttctaaaacaaatgaatagtctgaaatagaaagtagacagttaaaaaattatttgcattggatatcataaatttaaaggaataacaataaatgatatctgtgatggtgattattagataagtattttcctgcctccacttgccctctaaattttctgcattatttctgtttattttaaaaatacgtatttttaaatgctgacattgaggagttactttaaatgacagtcaatatactttgtctgaagcaaacaattagaaaaagtcatacccaaattagtatgaaataaaatgtatctgctaatggaaagcaagagaagtaggtaacttttgtcaggtagaaaattgccatcttcaggattatgagtaatgtgatacctaacattctttgggtccaccacaagaaaatgactcacatgtatttcctgtattcgaacttactaaagtagagaatggaaaaggaatccaattgaagaaataatttcatgtgtagtttggaggtccatttatatagacatgtgctggggaagtaggagggggcatctatctatctcttgatatcattggttgtcaaaggaagaaagtaggaacattgtttttctggctttatcrtatgctctaagcatcaaagcagacagcctagggcagtcagaaccagaatcaagaccaccagtgcaatagactaaaagagtggtttctaaccaggttgtcctacaggggtcatttggcaatgtctggagacatttttgatcagcataattggaagattctactggactctagtggagagaggccaaggatgcttctaaatatcctacaatgcacaagacagcccccatgataaagagttaactggccctaaatgtgccaaggttgagaaaccctggcctagggaaatacctaggagtataaaagatacactgcttaaaattcggaccacaatatattaatcaagctgaataagatttacttagaagtcaaaggcacataaaaactaactgggctatagtttaattgttgatttgta

SEQ ID NO: 670323 - DNA, 616 bp, Homo sapiens
aaaaaaaaaaaaaaaaaattagccaggcgtggtggcacatgcttgtaatcccagctacttgggaggctaaggcaggagaatcgcttgaacccgggaggtggaggttgcggtgagccgagatcacgccattgcactccagcctgggtgacagaacgagactcccatctcaaaaaaaawttttttttttaaatatactgtataccctactagattataaagtttttatgagcaaagcctgtgttttatttttgtaacctcaaacacagctatgcaccttacacataacaggcacaaaataaatttttatccatttggattacagcatgaagtattcctatgtatgtctcctgcagagattctgtaaacaagtgtgtattctctatagatattgcaataattgtttaggtactaccttttcaaactgaagttttacttaggcttatttttaaagattatgctaatttttattttaatgttgtgtttttgttgtttgtacaattttactagtgcctagttcacaatccaaatacaaatctaggtgatttttgaataatagatgatacttgttaaactcttactatatcactactgttccaagcactgtgagatattttcc

SEQ ID NO: 670324 - DNA, 596 bp, Homo sapiens
cttccaatgcctaagctaaggcttacaccatcagcctttcacctcctgctgctgattctgtgatgtgagatgcctctggaatccactcactgttcacatatgcacaactcggaagtgtaaggatatcactatcctgcagggaagatacttggtaagtgggaactgggaaatgatggagaaatggtgataaaatgtttcccttagcatttcccagacagactgctcaaagacacattccatatagttctcagatagtctcctggtatctagcaagcagtcacccytagtgttggccaaattaataatgcattatattcttgtattagttcttccttattctttgaattgctcccatgtttctcctagctgcttcctgaatcaaattctcccctgaatcacccacatttaagttttgtctcagattctgctttctgtggaaacctctaatgtcttccagcacatgagaaatactatccaagctactttccctgacttataaaactccacatgttctggcttaatttccagttatctttttttttttttttttgagacggagtctcgctctgtcacccaggctggagtgcagtggcggg

SEQ ID NO: 670325 - DNA, 753 bp, Homo sapiens
gttttaatttcgtgttggttacaagatgatacccatgtcataaattgtactaaagacatgccatattttttcattttcaaaataatataaaattggaagtgcgtactcctagaatatttggtgagattcacttttaaaaacaacctttccctgatgtggaaaatcctacatcactgattccattttcttaacactatggaggattttgattgtttcttaaatctgatttgatttttttttctagattgcatccatttctcctaaacttcaagtttatcaatgtaaagttattcatagtattcttttaatatttttaaaatctgtagttttgtccctttccattatttatamtttggaactgtccaagttattattacccttgacagctcttatagattcaactactttttccaaataacttactatttgtgttatcatactgctttatttcatgtttgcttactagattaataagtgctatcctttcatttctaattacctttcttttacatgtgaatttattctcttccttttctaaattctgacattggatatatacataatttcatatatgcatataaaattattgcatatattaaaaactgttgtttatatgtattgcatattttcgtatatgtagtattctcatttagttctaagtgtttgctgatttcttcttgaaactatgaatagaaattatattttgtttccaaatgtataaccttttaaatgttgttatttgtgcaattcaat

SEQ ID NO: 670326 - DNA, 1387 bp, Homo sapiens
  misc_feature 159: n = A,T,C or G
ccctgatgtagactcccgcttttcctaagcagtggcctcctgcaagcaaaatgcagtgaatatgtctctctctgggtctagccactcggtaagtaagtctacctgactacaggctggtactgggtgttgtctgcacagagtcctgtgatatgaatcgtntatgggccttccagacgtggataccagcacctgttctggtggaggtggttggggggtgcaatggactctgtgacggttcttagctttggtggtttaatgctttgtttttgtgctgcttggacttctgccaggaggtggcgctttccagagagcaccagctgtggtagtatggagaggaactggtggtgggtggggccctagaactcccaagattatatgctctttgtcttcagctaccagggtgggtagggaaggagcatcaggtgggggcagtgggaggcgtgtctgaactcagactctccttgggcaggtgttgctgcagctgctgtgggggatgggggtgagattcccaggtcattggagttgtctacctaagaggattatggctgtctctgctgagtcatgcaggttgtcagggaagtggggcaaagccggcagtcacaggctttgcccagctctcatgcaaaccaaagggccagtcacactcccactgtgccccctaacagcccccagtctgtttccaggcagagggcaagccaggcttgaaaacctgccccaggctacctgcctcccagctgggaaagaacaaggcttggttcttttcctgcctgtggagtctgcacactggatttgcgccctcccctgagttctggccaggaggcttctcgccccattcaaattgttatacagttcagctagagatttctttctttctgtggagttttacctcctgctcctcyggctgccctctcgacggatccttgtggtgcccagcaggaagggcctgtttggggacccagcgagctcccaaggcctttctgctgcttcctctacccctgtatttcgctaggctctctaaattgactctgctccaggtaaggtctgaagcttctcctgcaaacagacctttagtttctccagtaggggtgtgtgtttgggagaggagggtctccctttcccactaccgcagttggggcactcatagtacttgggatgtctcccgagtcctgcaggagcagtccgcttccttcagagggtctgtgggtcctctcgggatttctggtttgttcttgcagtcgatctggagctaaaattcataatgcgagtctctgcatgctgctctgtgtggagctgcaatccagtcctgcctcccgtccaccatgatgatccttgcctcctcttacatattttcatttattaatatgggatcatgtagtctgcagatttt

SEQ ID NO: 670327 - DNA, 1082 bp, Homo sapiens
aaactctatttcccagctcagacctggtcaggggtcagaaagggatggggcatctccttttgcaccacgattccacttttctcttctcctctccagtataccctactctctgtgccacttctggctccaccagggccaggaaaaagtctaggcattcaagtaagacagcaaggtccaacctgaatggggctaccgtaatctggtatcaacatttttggaagttgcccaaatgctggctctttggctcttggggcacgttcaaggtctcctctctgcctaccaccacccactcgattctgcatccccaggatcccctgaacagtactcatctctgacaggtgacagactctccagctgacctcctctctgctcctgacctttgggttaaggctgctccaccctcaagggagtcgtcttgggaaagatcctttaaagatggctctggtttggcagcactgggcagcatgcctgtcctggaatggtgctgggataggggtcatagaactaagtctgctctaccatggcatgtccagaatggatggggaagcacctctcttgaaaatgtgatggtgagtcttaatatgtcagctttgaggcttcagcagagacttaagacaaaaagagaagtaccatttatgctstcattatttcaagacaaatagaatcaaatacatagaaccagaaagtttttattcaatttggctggtacatcctactcccttgcattagcatcgaggtcatttttttctgacctacttattcagtttgttcatttctgatgaggaaacagggatctggtttgctgcattacttatctaaggagctatcatgttttagtacctgctagtacataaacttcctgatataaacctcacagcagccctacaagataggtgctcttatctccatgtgacagataagacacattgaggtcaggtcacttgtccatagcaacactgttaggatggagcaaatccagatttcaccccatgctggctccaaagtctgtgtttttcctgatatttcacacttgcctgtccacagctgaatttaggcatcctggctactgatggccttctagc

SEQ ID NO: 670328 - DNA, 1082 bp, Homo sapiens
aaactctatttcccagctcagacctggtcaggggtcagaaagggatggggcatctccttttgcaccacgattccacttttctcttctcctctccagtataccctactctctgtgccacttctggctccaccagggccaggaaaaagtctaggcattcaagtaagacagcaaggtccaacctgaatggggctaccgtaatctggtatcaacatttttggaagttgcccaaatgctggctctttggctcttggggcacgttcaaggtctcctctctgcctaccaccacccactcgattctgcatccccaggatcccctgaacagtactcatctctgacaggtgacagactctccagctgacctcctctctgctcctgacctttgggttaaggctgctccaccctcaagggagtcgtcttgggaaagatcctttaaagatggctctggtttggcagcactgggcagcatgcctgtcctggaatggtgctgggataggggtcatagaactaagtctgctctaccatggcatgtccagaatggatggggaagcacctctcttgaaaatgtgatggtgagtcttaatatgtcagctttgaggcttcagcagagacttaagacaaaaagagaagtaccatttatgctgtcattatttcaagacaaatagaatcaaatacatagaaccagaaagtttttattcaatttggctggtacatcctactcccttgcattagcatcgaggtcatttttttctgacctacttattcagtttgttcatttctgatgaggaaacagggatctggtttgctgcattacttatctaaggagctatcatgttttagtacctgctagtacataaacttcctgatataaacctcacagcagccctacaagataggtgctcttatctccatgtgacagataagacacattgaggtcaggtcacttgtccatagcaacactgttaggatggagcaaatccagatttcaccccatgctggctccaaagtctgtgtttttcctgatatttcacacttgcctgtscacagctgaatttaggcatcctggctactgatggccttctagc

SEQ ID NO: 670329 - DNA, 696 bp, Homo sapiens
ctcaggtgatccgcccacctaggtctcccaaagtgctggaattacaggtgtgagccactgcacccagccacactggttgtatttgtatgtttgttgaaaatcagttgttcatatatgtgtaagtctatttctggactctatcctttttcattgacctatttgtctatctttttgccaatgccacatgtaataatcagcatgtcaatttctttaataaaagcctgctaggattttgactgggattgtattggatctacaggtcaagttggggaaaattcactttttaataatattgaatcctctgacccttgaggaaggcatatcgttctggctttttgggcctttcaaaaactttcttttagcaatattttaaaattttcagtgtgtcagtgtactgttaatcattgtgaaataaacttcttatccttggcaatattctttattctgcaatttactttgatatatctatatctatatgtgtgtgtgtgtgtgtgtgtgtgtgtgtgtgtgtgtgtgtgtgtgtgaatttagaaacaytgctctgttgcccaggctggagtacagtggcatgatcattagttcactgtagctgtgaactcctgagctcaagtgatcctaccacctcagcttctggagtagctgggactacaggcatgtgccaccatgttcagctattttttttattttttgtaaaga

SEQ ID NO: 670330 - DNA, 611 bp, Homo sapiens
tttcctctggataaactctgaaaaagcctctaacaatttaagaaaaacattataatcatgcagcaataatacagcatgagatatatattctgggataattttttccaggtggaaaacaaaatagaaaaggatgaaacaaagaagcatatttcacaaataagaacaggcaaactatggataattggccaaatatggctggccacctatttttgtcaacaaaagttttactggaacacagtcacacccaatcagttacaaattgcctatggctgctttctggctgcaatggtatagttgtatagttgcaacagagaccttatagttcacaaactctaaaatagtgttactctttgcagacccctatcttaaagaaacatcaggtggggcacagaggctcaaacctgtaatcccagccctttgggaggctaagacaggtggactgcaaaaccccatctctactaaaaatacaaaamttagctgggcgtggtggcatgcgcctatggtcccagctcctcaggaggctgaggcaggagaatcgcttgaacctgggaggcagaggttgcagtgagcccaggttgcaccactgcgctccagcttggggggcagagtga

SEQ ID NO: 670331 - DNA, 620 bp, Homo sapiens
cccatcagcccaggtatataagttttacctgcacatttctacctctttggaaatagaaggcatgtaagcacagttatgacctgaaccctactgcagaatgatttgtaaagaactaggaaataaagtttagaaattaggaggtacctagcttayaatttcaatgaattattatttttttcactgaggacatcttgagccagatcaacaattaatttttaatgtaaaagaagaattacagaaagatgtgataaaccataccattacactttcccactcttcaattttaaaacacaaagtaaaaattttatttcctcttgtgcaaaccctacttgtcttcgtttctgtttatataaactttatctataagaccatttaggtaataatatttataattaaacaccttttaaaagttttcaaagaattttgctttaaaaaaacaaaatctgactttagttagctgcatctccagtaattgccttttgtcaaccctgtgctctgcgcaaactatttctctcagttccccaaatgtgtggtgcacatccacaatttccttactgcacacccaggtgcttggaatgttctttcttgtgttttctgtcctactgtcctcccactcaact

SEQ ID NO: 670332 - DNA, 594 bp, Homo sapiens
gagggtggctcatacactctctcccaggtatgctagcagatccctgagctctgggtagaacaccctttcccttttgctcctccaaacatctttagaatcaacgccccacattaaatccctttcagtttgaatgatctaaaattatttctgtcttcccgactgggcactgactaacacatttccagtattcttatcatcctcctagaatgaccttttgtcctacagcagcatttcaaagcatgtccttgcaagataaayattcttagaccttgcatccctaagaatatcttcattttgccccttgcatttcagtgataatgtatctgggtataaaacccaggagcaaaattctcgtgctttggaagtatggctgcactgtctccttgcatccggtgttgctattgagaagtgtgatgacagcttattcttgttcctttcaaggtcatttgctcttgctctcaggaatcttcttttaagttcttaaatttcctgataatgtaatgtatctaggtgttgatttttttttcttatctctactgtacaacactggcgaaaccccttcaatctaaagcttttatctgtatttctatgtag

SEQ ID NO: 670333 - DNA, 594 bp, Homo sapiens
gagggtggctcatacactctctcccaggtatgctagcagatccctgagctctgggtagaacaccctttcccttttgctcctccaaacatctttagaatcaacgccccacattaaatccctttcagtttgaatgatctaaaattatttctgtcttcccgactgggcactgactaacacatttccagtattcttatcatcctcctagaatgaccttttgtcctacagcagcatttcaaagcatgtccttgcaagataaacattcttagaccttgcatccctaagaatatcttcattttgccccttgcatttcagtgataatgtatctgggtataaaacccaggagcaaaattctcgtgctttggaagtatggctgcactgtctccttgcatccggtgttgctattgagaagtgtgatgacagcttattcttgttcctttcaaggtcatttgctcttgctctcaggaatcttcttttaagttcttaaatttcctgataatgtaatgtatctaggtgttgatttttttttcttatctctactgtacaacacyggcgaaaccccttcaatctaaagcttttatctgtatttctatgtag

SEQ ID NO: 670334 - DNA, 456 bp, Homo sapiens
ccctgcttcaacccccttggcagaaagatgaaatatgaattgtatcttcatcaagcttatgctacctttatacagttgtagaaaatacaggttagtaaatagtaattttaggtaacagtatcaaataggaagaagtaaataaaaaagaaaggacagtgtctttccattaaaaatgtaaaaaagtttggttaaataagatgaagttatctttaagatttttatttgtaactatatttatggtgggttttgtttcttagtgttttaaaggctttttaattgatttttggcaagaggatayattgtaagcagtgcattgctttgacttactgagtcttgacaatctgattttgtgcctattaaattatagaatatgcttagggtagtatgtttttcacagctaattaagaacttcaggcatttggacaactctcttttttttacatatttctcagacct

SEQ ID NO: 670335 - DNA, 649 bp, Homo sapiens
aaagggcaggaggagaaaaagctagtgaattagccagctcctgcaaatgcattaggatggtaagaagtaatcgtggcttaaactaagatgccagcactaaaggtagagagaaatgacacatttggcaaaatgtcataagaagaagttgatttgagaataccagcaaatcaataaatcattatggacttgttgagtttggcatgccaccgagacactaaggaaaaatgaaaggaggaaattggccacataggagtaccattcaaaagagaggctggagttacaattttaggactcataaacacacagatggctctaaagacaggagtgtggatgtctcayagaaagaacataaggagaatagaataggagaatagggctctggactaagcccggtccaggtagagagtaagaaaagaagactgagcagtatgggcctgagaggcaaaaagaaaaacaaacagacagataataacaaaaggccataaataaagcctttagaatgagcctgaagaatgaggtcacataaatcaagagaagaaaatgtttccagaaaggagaattgaatagtattcagtgctgctgagtttaatgaaaaatgaaggacccaaatagcaaaaagggataatacaaatgccatttttgattacat

SEQ ID NO: 670336 - DNA, 612 bp, Homo sapiens
tctattttttttcttcaattgattggacgaaactggcccacattttgtaagaaaatctgcttttctcaaagtctactgatttaaatcttaaccttatctctaaaatacatacaaagaaacatctaaaaatatgtttgggaaaaagctagtactgtgtcccagtcaagttgaccatacaattaacaatcacaaacatgtgtcatgagtcactctttgcattgttgctgaatatttaaagatgaaaataataaaacaaaacataggcttacatagcctagtatagaaacaaacaacaaatgatttcaacatacaatttttgtgctaatggagatatttgcaaggaagagagcaggaaagggattcacttaattgttacttaggagataagcagggaagctttcctaataggcagagagtttagcttggaacttcaaagatgggtggggacttcccaagcaaacaaacagaaaacaggacttcccagtcagaggaaatgtttgtggagaaaaagagatttgayggaatgcttcctactggggaagctacggataattttatatatatatatataatatatatataatatatattatatatatactatatataata

SEQ ID NO: 670337 - DNA, 612 bp, Homo sapiens
tctattttttttcttcaattgattggacgaaactggcccacattttgtaagaaaatctgcttttctcaaagtctactgatttaaatcttaaccttatctctaaaatacatacaaagaaacatctaaaaatatgtttgggaaaaagctagtactgtgtcccagtcaagttgaccatacaattaacaatcacaaacatgtgtcatgagtcactctttgcattgttgctgaatatttaaagatgaaaataataaaacaaaacataggcttacatagcctagtatagaaacaaacaacaaatgatttcaacatacaatttttgtgctaatggagatatttgcaaggaagagagcaggaaagggattcacttaattgttacttaggagataagcagggaagctttcctaataggcagagagtttagcttggaacttcaaagatgggtggggacttcccaagcaaacaaacagaaaacaggacttcccagtcagaggaaatgtttgtggagaaaaagagatttgacggaatgcttcctactggggaagctacggataattttatatatatatatataatatatatataatatatatwatatatatactatatataata

SEQ ID NO: 670338 - DNA, 655 bp, Homo sapiens
ttgtgaacttttttcctgagccagattaaagaggactaggaggcctatcttcattcgcataggtaactgagcccaacacagactacatgagcttgttcatataatttcagataggaagcaggaaatagattctcaggtctgaggcaactacttgcttctgttacatgaacttttaaacattgtttccttagaaattacaagtttatctgaaacatttaattctatctatgtgttgtggattgatatgcaaattgtagtcacatttagaatggatttaccccygtcctgtaatgtacttccccagtgcttaaaaacactgctatccaaagtgaagaagaaaggaagcaccgaaaaaggcctcagataatgccactaaattgtgataaagagaatttggttagttcatttgaaaaaaattgggattcatttaaaggaatgattagtactctgccatgagaactattgtactattgttggaaaacaattaggttcatcctgtcacaggtgaatcaactttttactctaaattatttatcatttaatattaattcccagtctttaaaaaatattgaaatattgcacttaagttagcagaaattttttcagtttgaagatgttattttaaaaacatatatattatttttaatatttacta

SEQ ID NO: 670339 - DNA, 674 bp, Homo sapiens
gggacatttggtgatgtctggggacatttttcattctcacaaccttggagggtgtgcaccgctggcatctattaggcacagggcagggacgctgctgagcatcctgcaatgcataggacagaacccacaacaaaaaattatccagcccaaaatggcaacagtctttttgagaggttgagaaagctgctctagggtaatataattacttgattttatttttaaaactaccctttatttaaaaatagtaataaaacaacagataagctaaaatgattacatactttgtttattattatactttaagttctagggtacatgtgcacaacgtgcaggtttgttacatatgtatacatgtgccatgttggtgtgctgcacccattaactcatcatttacattaygtatatctcctaatgctgtccctctcccctccccccaccccacaacaggccctggtgtgtgatgctacccaccctgtgtccaagtattctcattgttcaattcccacctatgagtgagaacatgcggtgtttgattttctgtccttgcgatagtttgctcagaatgatggtttccagcttcatccatgtctctacaaaggatatgaactcatccttattttatggctgcatagtattccatggtgtatatgtgtcacattttcctaatccagtct

SEQ ID NO: 670340 - DNA, 617 bp, Homo sapiens
ccagtatttatataaaatttcaaaatacatataacagtaaaatattgtttatgtatacatatataggaaataaacatattaaaacataacccagaaggatacagacgagaatcgtaatactggttgcctctggggtggaagggaggggattgggctgaaaaggaaaatggggtgagggtgagggatagtatttaacttcatctgtaatgttttcatcttatttttttaaataagcaaaaatgacaaaatgtttacattgtaaaattagagtagtggatgttgttgtttattaaactcatttttaatgtaagcttttaaaactttctaaaaacaaatgattgaaaaaaagcatatcaatggttccatagacatttaggatttttttgtttctgtgaagaatgtcattggtgtttgatacagattgcattgaatctgtagattgcttagggtagcaytgtcattttaacaatatcaatttttctaatctgtgagcatggaatagctttccatttgtttgtatcctcgcctatttctttaatcagagtttcatagtgtttttgtattttcagtggttattattcagcagtgagattacagttcagtttttattttcatct

SEQ ID NO: 670341 - DNA, 1054 bp, Homo sapiens
ttaacttattaggacataaatacttattaagttgctttaatctatttaataaatggaactattggtatttcttttggcctaggggcactgtaaaaaattagagagacacaaatggtactgtgaactgagaaagaataggaacctgtggccctcactttggatcccaaagtgggatccaaaccttctcaaacctaatgtgactgtcacttctctgatgtgcagcatagtagtggaaagcacagactgctccattttttttggtgtcaaattttggctttcccagctgtgtgamtttggggaagttacttcatctatttgtgccagtttttatttagctatcaaacaaaaataaaaatacctaagtcataggtttattatgggaactcagtaagttaacacatatgaaatacttagcacagtgtctggcacaggtacctgctttttaaataaataaataaataaataaataataaataaatttaacctgtcagtttgatcttcccagtcagcttttttttcagtaaaaaactttaaattaatttttttattgtgataaaaacatatggtactgtgtttttaaaacacaattgcccatctttaagtgtacagttcagtgtgttaagtatattcacattattgtgaaacagatgtccagaactttttcattttgcaaaacagaaactctatacccattaaacaacaatgcccccttttccccctcccctcaacccctggtaaccagcattctactttctgtttctatgaatttgacaactttagataccccatctaagtggaatcctacaatatatatctttttgttactgactggtttcacttacataatgtcctcaaggttcatccgtgtcgtagcatgtgacaagatttccttctttttttcaggctgaataatgttccagtgtatgggtatctacatttttttttctccattcatccataagtggacatctggattgcttccacctcttagagtttgtgaatagtgcatctatgaagatgagtgtgcaaatatctcttcaagaccccgctttca

SEQ ID NO: 670342 - DNA, 1625 bp, Homo sapiens
tcccgcatgaatggctttgagtgtaatgagtggtaagtagttcacgtgagatctggtttttaagaaaagcctggcaccttctcccttctctcttgcttcycttcttgccatgtgacacacttgctccccactctgacttccaccatgagtaaaagcttcctgaggcctcggcagaagctgagcagatgctgatgccattcttgtaaagactgtagagctgtgagccaaataagcctcttttctttataaattacccagtctcaggtattcctttatagcaatacaaagggacaaacacagacagggtcttgctgtgttgcccaggctggtcacaaactcctgaccttaagcaatcctcccacctgggcctcccaaagtgatggaattgcaggcgtgagccactatatccaacctaatttgttatttttaaagatgtaataggcacctgcaaaaccaccacccaaacaaaacttctgacagtgacccccatttcaccatattgttccccttcccctacccatccccttgcctctctccactcaaagtggtcatcatcctgaattctgtgtacaaggtgcaaccgtgctttcctttttatatggttttattgcatctctctatattttctttttctttttttttcttttttttctttttttctgagacggagtctcgctctgtcgcccaggctggagtgcagtggcatgatctcggctcagtgcaacgtccgcctcccgggttcacgccattctcctgcctcagcttccgagtagctgggactacaggcacccaccaccaagcccggataacttttttgcatttttaatagagacagggtttcaccgtgttggccaggatggtctcgatctcctgacctcgtgatctgcccaccccggcctcccaaagtgctaggattacaggcgtgaaccacagcgcccagcccgcatctctctatattttcaaaaattatagacatatttttatattagctgtctttaccttcattaaaagggtatcattctctacataaccttttgggacttaagtttttggcttaattgtatcttgctaagattcatcgacattgtttcagttgctgtggctcatgtgcttagcctgcttaggatattctgttgtgtgaatattgccattgattcattcatgagccatggaatcttagtgggaaaggagagaagtaaaggcaggaggggttgatggatggagaaggagtgaaggtaccaacggactggagagctccatgaggacagagagctgtggcagggcacccaggccaggaagcaaatgggcttgggggtgatatatagtcgaaggagagaatttctgatttcagaaggagtgaggctttctggtgactgtaaagttttcagggataaacgaatagctaaggccagaattctttgagatgagggtgaaggaagccagaggtcagagtgcggacataggtccctccatttttctaggatactggcaggaggtggagtggagaagaggaggttggagctggagtttccagtgcatgggagctgggagctgacagggagaggagggagggcaacatagcaggaggcaggagtgtcagtggcgcagggttttataagaggttg

SEQ ID NO: 670343 - DNA, 1625 bp, Homo sapiens
tcccgcatgaatggctttgagtgtaatgagtggtaagtagttcacgtgagatctggtttttaagaaaagcctggcaccttctcccttctctcttgcttcccttcttgccatgtgacacacttgctccccactctgacttccaccatgagtaaaagcttcctgaggcctcggcagaagctgagcagatgctgatgccattcttgtaaagactgtagagctgtgagccaaataagcctcttttctttataaattacccagtctcaggtattcctttatagcaatacaaagggacaaacacagacagggtcttgctgtgttgcccaggctggtcacaaactcctgaccttaagcaatcctcccacctgggcctcccaaagtgatggaattgcaggcgtgagccactatatccaacctaatttgttatttttaaagatgtaataggcacctgcaaaaccaccacccaaacaaaacttctgacagtgacccccatttcaccatattgttccccttcccctacccatccccttgcctctctccactcaaagtggtcatcatcctgaattctgtgtacaaggtgcaaccgtgctttcctttttatatggttttattgcatctctctatattttctttttctttttttttcttttttttctttttttctgagacggagtctcgctctgtcgcccaggctggagtgcagtggcatgatctcggctcagtgcaacgtccgcctcccgggttcacgccattctcctgcctcagcttccgagtagctgggactacaggcacccaccaccaagcccggataacttttttgcatttttaatagagacagggtttcaccgtgttggccaggatggtctcgatctcctgacctcgtgatctgcccaccccggcctcccaaagtgctaggattacaggcgtgaaccacagcgcccagcccgcatctctctatattttcaaaaattatagacatatttttatattagctgtctttaccttcattaaaagggtatcattctctacataaccttttgggacttaagtttttggcttaattgtatcttgctaagattcatcgacattgtttcagttgctgtggctcatgtgcttagcctgcttaggatattctgttgtgtgaatattgccmttgattcattcatgagccatggaatcttagtgggaaaggagagaagtaaaggcaggaggggttgatggatggagaaggagtgaaggtaccaacggactggagagctccatgaggacagagagctgtggcagggcacccaggccaggaagcaaatgggcttgggggtgatatatagtcgaaggagagaatttctgatttcagaaggagtgaggctttctggtgactgtaaagttttcagggataaacgaatagctaaggccagaattctttgagatgagggtgaaggaagccagaggtcagagtgcggacataggtccctccatttttctaggatactggcaggaggtggagtggagaagaggaggttggagctggagtttccagtgcatgggagctgggagctgacagggagaggagggagggcaacatagcaggaggcaggagtgtcagtggcgcagggttttataagaggttg

SEQ ID NO: 670344 - DNA, 616 bp, Homo sapiens
tgggccttcccagataatccatgataatctccccatcttaagacccttaacagaattacatctacaagtcccttttgcctttgaggtgacattcacaggttctagggattaggatgtggacatcttcagggggccattattctaacaaagaggacaatcacagacagactggcaaaarggggtgacattcctattccccccatggtttcacccattgaggacccgcattcctgctgaagagcccgctggccctggagggctttcccctgtgctttccctcatggccactgcctttctccccgacacgggtgagccagccatgggcatgcatttcccccactgcagctctctacctgcctcccacaatactggccctggagtgagcagctcttggcaccaggaactagggctcactggctgggtaaagggtcattgtcctcgcttcctaccctcccagcagcccgtggccaggcaccagctatgaccccagctcacaccaagcccttgagcccctaaacccctgagcctccctcatccccacccaaccggctccacatctagcccccgccagacctcaggcttgtgtccactctccctgaacgctcctctctggctc

SEQ ID NO: 670345 - DNA, 616 bp, Homo sapiens
tgggccttcccagataatccatgataatctccccatcttaagacccttaacagaattacatctacaagtcccttttgcctttgaggtgacattcacaggttctagggattaggatgtggacatcttcagggggccattattctaacaaagaggacaatcacagacagactggcaaaaaggggtgacattcctattccccccatggtttcacccattgaggacccgcattcctgctgaagagcccgctggccctggagggctttcccctgtgctttccctcatggccactgcctttctccccgacacgggtgagccagccatgggcatgcatttcccccactgcagctctctacctgcctcccacaatactggccctggagtgagcagctcttggcaccaggaactagggctcactggctgggtaaagggtcattgtcctcgcttcytaccctcccagcagcccgtggccaggcaccagctatgaccccagctcacaccaagcccttgagcccctaaacccctgagcctccctcatccccacccaaccggctccacatctagcccccgccagacctcaggcttgtgtccactctccctgaacgctcctctctggctc

SEQ ID NO: 670346 - DNA, 1569 bp, Homo sapiens
aaagtaacatagtacaaacagtacattttagaaacacctggtctagtctcagaaaggtttctaacagcagtagccagggctggcaatacagagccagcaaggagaacagaaagtctaaacatctggcggcttgctgtcatcagagaggcatgcagaacacctgaaaatcagaaatgtcaccacatattaggaatcatttatttttcctaaatctttttttttttttttgaggcggagtcttgctttatcacccaggctggagtgcgctggtgcaatctcggctcactgcaacctccacctccagggttcaagcgattctcgtgcttcagcctcccaagtaactgggaccataggcgtgcaccaccgtgcctggctaatttttgtatttttagtagaggcggggtttccactgtgcctgacctattttttccaaatcttatcctcctaacacaataaggtttagtgacaatcactaataagtgtaagaaaacaattcattttccttttcaaatagagaatgactgtttttatttttaccatttctttccatttatcttgcaataccactttcagtgctttaataattttaaaggccaaatttctgcatcaggctcaacaataaacttctccagctacttctagctgctttcataaaaactcttttatacacaggtatatgctccacctacaccaccaactttcattcattaagtatctcctttgcgaagygcctgccctgcattgaaggagcttgttcacacagagaaaacagacatgcatattagtaagtgaccactgacttgctgggacccagcataaaaatgcaaatacagtacaaataatatagggatcagggaaggcttttggatgtgacaaaatctgaactgaattttgaaggatgatggatgaataggagtttccaataggctaagtacagagaaaggaaagaaagccaggtgtactttgaaaagcatttcaaaaagaaggaaggtggccaaggttaggtcagggcacactccgagggtgtggaagggctgtgcagatagggtgtatatcccagagcatcagaaccaaggctggcgagctggaaaaggaacaccacgtgccagaagccagccacagcagacactcaagagaagctcctctcactggttcaacttgaaatataaatgaagaaagaaaacaaaatcacacactcacatatgcagcatccatactacccaacatgagcacttgaaacaatatttggttctggaagaagtgtccgtgggaatgactttttaaacactcaatacacaattgacacttgtggcttctctttttcaccttggaatcccattgcctaggacaattcctgccactggataaacaggtgagcagtgaatcagtgcatgaatctcaaggaaatagtgaagaattccccttctggaagcgactgcatatccagccagtcttccaaggggcagtcccgaccttcagcgccaggaatttttttaatggcctgctttgttaagaagcaggaatatgttctccactttgagaaatattaagccatcagtgataacacta

SEQ ID NO: 670347 - DNA, 1306 bp, Homo sapiens
gtggtccaatcacctcagtcaggagtcaaagaccagcctggccaacatgtgaaaccccatctctattaaatatacaaatattagctgggtatgctggcacgcacctgtaatcccagctccttgggcaagagaagcacttgaacccagggggttgaggtggccataagccgagattgcaccgctgcactccagcctgggcgacagagcagacagagcaagactcagtctcaaaaaaaaaaaaaaaaaaaaccaacaaaaaagattarcttgtggtatcattgaagcaaagataattatattttaaatgaaaatttaaatttaaaatgaaaatataattttaaattatattttaagtgaaaagacagggatttggggccaaattctagagcagacacaggaagctgacagagtttgctctaaaatgtttatattttttgtccttttagctactcaacacatgccttcatcctgaaagtacagtaaagatcagttgagttgtttgatgttaaacttgaggtctaaatatgttttgaagaaaattacttaaatactttcttcccatacattgtacaatttctattgataagatgtggaagcattatatgaaaaaagattttgaaatagtctgtgtcatataaccccatttctataaataatgaaaatgaatatatatgttgccctctgcatggaaaattaggctagccacatataaaaatgtaaatggggagtatctataagtgattattttcccatatagactttttctatgtttgtatttttttccaaattttctactataaaagtcttttttatgctctataaggtttttataaaagatattaagtctacatttttaaaaatattcaggccaggtgccgtggcacacccctataatctcagcactttgggaggccaacaggggcggttcactctgagctcaggagttcaagaccagcctgggcaacatggcgaaaccctgaatctactaaaaatacaaaaattagctaggtgaggtggcgcgcacctgcaattccagttactcaggaggctaaaacaggagagtcgtttgacccaggaggcagagtttgcagtgaggtgagattgcgccactgcattctgtcctgggcgatagggtaggactctgtctcaaaaaataatagtaagtaaataaattaaaagtaaaaatattcaaataataccttcattacaaactttacatactagatataaagttaaacagtttgtattctttctttgagttcttcctaagcactttgaggctaactatatggaatctgtgatttag

SEQ ID NO: 670348 - DNA, 616 bp, Homo sapiens
tgtgtgtagccagggtttcttctgtttctgttgacaggggtttactcaaccttgttttgaatgaacagttcagtagtttcacattcataacaaaagactagtacattcatttccccagcagtaatgttagtcctgatttcagttgtggtccactgggacacatggataaaagacctagagcattttatccttgagatatttccccawcctcctccctatccaccaaaggaaaaataatgaaagatcctgtatttctactgcccataccctatctggtctaaaaatactttgctcagttgggcttgttaatttagggcaaaatttctttaagttcaaatacaaacttttaaacattacttgtgccacagtgaaaaaaaattgctccaagtctactagtgttttcattatttggttgaataattagtttcacccttttatgtaattaaaaaaaaacatgcttcttgacactgtggggtaagcaagtgttgtttgacaagaaatacaaatataagagatatgaaaaagtatttctcatttttaatcagattgggatagtagaatgtagagaggtaagaaaataaaaaccaaaaggaaacccagaagtatgtttccatat

SEQ ID NO: 670349 - DNA, 625 bp, Homo sapiens
tgcaatttatttatctcaaggcttggaaaaagacttcctactagaagaagtatcttttattcagaggattgtattcataggcaattatccaaaaagaaaaagcttattgtatctaagagaaactgagaaagaatatattaagggaaataattgacttttgatataacttctttagtcattatccacatgccataactcatctttttgaactgtcaacacaaaraattatctatgatcaataatgtatatatcaatacacaacatatattcctgttattttttcttcatataaattttcactagccaaatttagtaccataacaggctctccctcaagatttttcaaacaggtaaaatgcactacaaaaaacaagggtcatggtacagcttttgttttttcaaaaagtatacgcttcctctgtattaacagatttatgaatgcctgacccttctttcctcaatctctttagactgtcatgaagctaagatggtgtaacatctgttttttggtcaacagaacaaagaaatgaattttcaaaaacattacactgcctactactccatcccaaacaggcgtattctttactctgacttgtacaaaataacttttttttttttttttttt

SEQ ID NO: 670350 - DNA, 780 bp, Homo sapiens
cctctctaccctgaatgcaagagaccctcatagttaggcaggtatatcatcgcccctattcagcctgaaaaagttacaaaagatggatcttcgtccctctgcaacccttaggattaagggttctcttataaaagacaagggggaaatgtcagaggcatgtgaacaagagcaactccatcttaaataggagctgggcaaaacgaggctgaaacctactgggctgcatttccagatggttaggcattctaagtcacaggatgaaataggaggtcagcacaaaatacaggtcataaagaccttgctgataaaataatttgcagtaaaggagccggccaaaacccaccaaaaccaaaatggcgacgagagtgacctctggtcatcctcactgctacactctcaccagcttcatgacagtttacaaatgccatggcaacatcaggaagttaccctagatggtctaaaaaggggaggcatgagtaatccactccttgtttagtatatcatcttttattcctttactttcttaataaacttgctttcactttgcactgcggagtcaccctgaattcgttcttgcgtgagatccaagaaccctctcttggggtstggatcaggacccctttcctataacaacatcattatgcaaatagaattatagattgaaataagaagaaaagaaacatgatagtatgaatgcttatgttaggatcctcgcctagtgacaaagattctctgcctggtcaaactttcgtcaggctactgagcctttccctaggcttg

SEQ ID NO: 670351 - DNA, 2465 bp, Homo sapiens
acgtatgtttattgcggcactattcacaatagcaaagacttggaaccaacccaaatgtccatcaatgatagattggattaagaaaatgtggcacatatacaccatggaatactatgcagccataaaaaaggatgagttcatgtcctttttagggacatggatgaagctggaaaccatcattctcagcaaactatcacaaggaaaaaaaacaaacaccgcatattctcactcataggtgggaattgaacaatgagaacacttggacacaggaaggggaacatcacacactgggtcctgttgtgcggtgggggtatggggggggatagcattaggagatatacctaatgtaaatgacgagttaatgggtgcagcaaaccaacatggcacatgtatacatacgtaacaaacctgcacgttgtgcacatgtaccctagaacttaaagtataataaaaatatatatatatttaaaaaataacaaaaaataaagtgctaattgtaaaaaacaacaaaaatatttccaatttagtttgaaccttcaatgtataccttaagcaagtgacttgaaggaaatttgaatgctgcgttccttctcccagctctgcctcactgaggatgggaatccagtggcacctgagactcctggatgtagtgcctgggtgacattcctgtggagaaaagcactttagggccagtctctagatgtcttctcatgggtcttctgctttcacatgaagcttttgagaagatgaggaaaattatttaattagtcacagactatcaaaatctatgttcaagatagcggcttatagtggcttatatctactcataagggcagagccctcatgattaaacacttcccattaggctctgtctctcaattctgttgccttggggattaaggtaacagcagatagatttgaggggacacagtgatgagggaaggctcattccaagccctgtggtctgccatgcgtgcaggcagggctgcctttctcagagagagcagtgaggggcagagatgggaatggggaaccagcagaagcacagtgaaagaaaaaggcctggatgcagacatggacagatgcatccatccagaaaaaagcacctgtactttccccctggagttgcatccctctggaatggtgtttcctggcaagtcagttgcaagagaagggatctgggaaataacatctcaggatatgctgcatttgtgtggtgcttatttcaaactgaaagcatttagaaaacatcaattggacaaaggctcttttcctacatcagttactccagaaggaagccaactgtcatgaaaaccctccctgggaatggccgggcgcggtggctcacgcctgtaatcccagcactttgggaggccgaggctggaagatcacgaggtcgggagatcgagaccatcctggctaacacagtgaaaccccatatttactaaaaatacaaaaaattagccgggcgaggtagcgggagcctgtagtcccagctactcaggaggctgaggcaggagaatggcgtgaacccgggagacggagcctgcagtgagccgagatcgcacccctgcactccagcctgggggacagcgagaccccgtctcaaaaaaaaaaaaaaaaaaaaagaaaaccctccctgggaatgttgatctatcagggaatattaacatgcactaggagttaaattcaaaagagattggaagttgatttcatccagtcaggctattaactattcttttgaggatccatttattttattttacatcatttactctccctaggttggttacagtccccacctccctctccccgataaaggatgtataagcacctggacctcactgggttatctgggtaatctctctcctctgatattttcctctgcatgttaaatacatttgtttgcctttttctcctattatgtgtcttttgtccattcattttaagcaaactttagagggcaaaatcaaactttgacatttcaccctacgcaagcaagtttccttaaaattcaggcccctgaatgggcagcaggagggtgtgtgcagatgctacaccagagtgatttggccacttctactcaggaatcagtaatactccccagaaccccaggctgcaggccactgatgctgatgtaggtggatccacttcctctgytgctgaaccaggctgagatgatgtgagatataatgagtccgaatctgcgtccagttttatccaaatccaagtgatttctccatatatgtgggcatttgcttgataggagatggagactctctttcctggatgtcagacaggaggctggcatcttggtcagaatgtcccctcttactgctaaacagtgaaagaggaaagtggcattgatagtgcaaggcagggacatgcactgagcagcagctgccctcactaggagagagggttcactgtcctgatctttcccaagttctctcctttatgtgttc

SEQ ID NO: 670352 - DNA, 779 bp, Homo sapiens
aaaataaaccaaatgaatgaagtttccctccaagtttgtcatcttcatcttaggaaatagcttaaagtttaataaagtttacacatgccmattttgtgaatatcaaattcaacactttggaaacacaagcttctaaataaactgtttcactgtgacagtgtccttgagaatacatgccatccagaggtaattctgctttatactcagattctttccatacttccaaaaaaggatcaatattagacctgtacaacaaattacactcttttacagaaaataataaaatatccaagtctctcaccaaattttcaaaaaagaggaaaagtgtaagcttccagatgaaagtttctatagctttccccaaatttagtaccaccatgaaaaagaaattcttcactcattcaaggcatacgactagaaaactaatttccatggcatcaaattaatttcctcctttggagataaaaccatgagatcttttccaaagcattaaaatcaccaagaaaaaaaaaaaagaaaaaaaagaccattaccagcattttaaaactgagtaagagaatgaagtaaacaaaaaagggaaagaaaaagcttcaaaagttcatttttctcctaatttcttgaactctctattccagaagtacctaatgcttttcttaaaagagaggctttcaatttttccctatgtctaaaggctgctttaagtagcctaagaccaaggacaggagagtgaaaacgaagagggttttggctctccaaggtgggggtggaattgcagctac

SEQ ID NO: 670353 - DNA, 1334 bp, Homo sapiens
aaacttttttcctcctgcatatgtgtaagctctagaaggaaagagcttgttaaatagttatctggatcattctgtagtttagacaattatttcacatttaatgctggatggattttggagaataagcaatttacatgaatcaaattaactaaagaaatgaaaaagcactctctttctgctggataaacagaacagccagtctcgcattatttcagttaaatatgtttagggttcaaattatacaagcatcttcccttaccattctgtcaaacagcagagatctcagccctctttttgtgggtggttacatgtgtcctttgaggggaaaaaagaaaagaaaaagtgcaccccacatccatatggcatgattatcggtgaagttatttttagctttacaaaatcaagagttaggaaaattcatagagtgaaagaaatgttcataaaacagcctaattaagcaaaacatttttcagagtttccaccacatttctctgtaaagacactgacaagtgaatacacccagctggtaagggcttgccagcatttaggttagtaaagtggtaaattatttgtgtttcatggtggcaaatgtacctatttctgcaaaggctaggacagaacagccaaaagaggccatttagttgacactgattaatggaaagagcaagtaaaaatttaaggaaggaagggagaaaaaaggggtagaaagagttcagtggaagtggaagaggaaaaatggaggatgggctggtaagaaaccttggattcaaaagctggctccaccactttctgcattcagaagcctgaacaaatcagttcatctatctgagcctcagtttacacttttgtaaatgggagttattcatacttctacttgtcttgaagatttgtagggaggagccartgaatagggtgtttgtgtctttagttttgaaagcactttgaaaacaaatagttacatagaaatgtaagatttctaataattttgcttgtttgctactgagaggtgaagccagctggacttcctaggttgagtggggacttggagaacttttctgtcttacaagaggattgtaaaatgcaccaatcagtgctctgtagctagcaagaggattgtaaaatgcaccaatcagcaggatcctaaaagtagccaatctcagggaggattgaaaaaagggcactctgataggacagaaacagaacatgggaggggccaataagggaataaaagctggccaccccagccaatagaggcaatccgctcgggttcccttccatgctgtggaagttctgttctttcgctcttcacgagaaaccttgctacttctcactct

SEQ ID NO: 670354 - DNA, 1334 bp, Homo sapiens
aaacttttttcctcctgcatatgtgtaagctctagaaggaaagagcttgttaaatagttatctggatcattctgtagtttagacaattatttcacatttaatgctggatggattttggagaataagcaatttacatgaatcaaattaactaaagaaatgaaaaagcactctctttctgctggataaacagaacagccagtctcgcattatttcagttaaatatgtttagggttcaaattatacaagcatcttcccttaccattctgtcaaacagcagagatctcagccctctttttgtgggtggttacatgtgtcctttgaggggaaaaaagaaaagaaaaagtgcaccccacatccatatggcatgattatcggtgaagttatttttagctttacaaaatcaagagttaggaaaattcatagagtgaaagaaatgttcataaaacagcctaattaagcaaaacatttttcagagtttccaccacatttctctgtaaagacactgacaagtgaatacacccagctggtaagggcttgccagcatttaggttagtaaagtggtaaattatttgtgtttcatggtggcaaatgtacctatttctgcaaaggctaggacagaacagccaaaagaggccatttagttgacactgattaatggaaagagcaagtaaaaatttaaggaaggaagggagaaaaaaggggtagaaagagttcagtggaagtggaagaggaaaaatggaggatgggctggtaagaaaccttggattcaaaagctggctccaccactttctgcattcagaagcctgaacaaatcagttcatctatctgagcctcagtttacacttttgtaaatgggagttattcatacttctacttgtcttgaagatttgtagggaggagccagtgaatagggtgtttgtgtctttagttttgaaagcactttgaaaacaaatagttacatagaaatgtaagatttctaataattttgcttgtttgctactgagaggtgaagccagctggacttcctaggttgagtggggacttggagaacttttctgtcttacaagaggattgtaaaatgcaccaatcagtgctctgtagctagcaagaggattgtaaaatgcaccaatcagcaggatcctaaaagtagccaatctcagggaggattgaaaaaagggcactmtgataggacagaaacagaacatgggaggggccaataagggaataaaagctggccaccccagccaatagaggcaatccgctcgggttcccttccatgctgtggaagttctgttctttcgctcttcacgagaaaccttgctacttctcactct

SEQ ID NO: 670355 - DNA, 1334 bp, Homo sapiens
aaacttttttcctcctgcatatgtgtaagctctagaaggaaagagcttgttaaatagttatctggatcattctgtagtttagacaattatttcacatttaatgctggatggattttggagaataagcaatttacatgaatcaaattaactaaagaaatgaaaaagcactctctttctgctggataaacagaacagccagtctcgcattatttcagttaaatatgtttagggttcaaattatacaagcatcttcccttaccattctgtcaaacagcagagatctcagccctctttttgtgggtggttacatgtgtcctttgaggggaaaaaagaaaagaaaaagtgcaccccacatccatatggcatgattatcggtgaagttatttttagctttacaaaatcaagagttaggaaaattcatagagtgaaagaaatgttcataaaacagcctaattaagcaaaacatttttcagagtttccaccacatttctctgtaaagacactgacaagtgaatacacccagctggtaagggcttgccagcatttaggttagtaaagtggtaaattatttgtgtttcatggtggcaaatgtacctatttctgcaaaggctaggacagaacagccaaaagaggccatttagttgacactgattaatggaaagagcaagtaaaaatttaaggaaggaagggagaaaaaaggggtagaaagagttcagtggaagtggaagaggaaaaatggaggatgggctggtaagaaaccttggattcaaaagctggctccaccactttctgcattcagaagcctgaacaaatcagttcatctatctgagcctcagtttacacttttgtaaatgggagttattcatacttctacttgtcttgaagatttgtagggaggagccagtgaatagggtgtttgtgtctttagttttgaaagcactttgaaaacaaatagttacatagaaatgtaagatttctaataattttgcttgtttgctactgagaggtgaagccagctggacttcctaggttgagtggggacttggagaacttttctgtcttacaagaggattgtaaaatgcaccaatcagtgctctgtagctagcaagaggattgtaaaatgcaccaatcagcaggatcctaaaagtagccaatctcagggaggattgaaaaaagggcactctgataggacagaaacagaacatgggaggggccaataagggaataaaagctggccaccccagccaatagaggcaatcygctcgggttcccttccatgctgtggaagttctgttctttcgctcttcacgagaaaccttgctacttctcactct

SEQ ID NO: 670356 - DNA, 605 bp, Homo sapiens
ggaaagatcctatgtacccttcacccagttcacaaccaggacactgacattgatacactccacccaccttattcagattttaccagttatacatgcacttatttgtgtacatgtgtgggtatttaattcaaagtggttttatcaaatgtgtagagtcatgtgaccacagtcaagaaaaagaacagtgccatcaccacaaggatatgcaatcctctgtgttgctcctttataccaaacccgcttccgtcttcatctgctccatcccaaggtctgaacccatggcaaccaaccagtaatctgttctccattcctatagtgttayttcaagaatgttatgtaaattaaacaatataccatgtgacctcttgagattgacttttctcactcagcgtaattctgatagtggtgtagtgcaatatagaagtagtccattctcacaggcgtgtggagatatctcattgtgattttaatttgcacttccctaatgcctaatgttattgaacatatttcctggagtttatttttctctttttctagttttatgatctgaaaacattttttatctccataggttattggggaacaggtgatgtttggttacatgg

SEQ ID NO: 670357 - DNA, 605 bp, Homo sapiens
ggaaagatcctatgtacccttcacccagttcacaaccaggacactgacattgatacactccacccaccttattcagattttaccagttatacatgcacttatttgtgtacatgtgtgggtatttaattcaaagtggttttatcaaatgtgtagagtcatgtgaccacagtcaagaaaaagaacagtgccatcaccacaaggatatgcaatcctctgtgttgctcctttataccaaacccgcttccgtcttcatctgctccatcccaaggtctgaacccatggcaaccaaccagtaatctgttctccattcctatagtgttacttcaagaatgttatgtaaattaaacaatataccatgtgacctcttgagattgacttttctcactcagcgtaattctgatagtggtgtagtgcaatatagaagtagtccattctcacaggcgtgtrgagatatctcattgtgattttaatttgcacttccctaatgcctaatgttattgaacatatttcctggagtttatttttctctttttctagttttatgatctgaaaacattttttatctccataggttattggggaacaggtgatgtttggttacatgg

SEQ ID NO: 670358 - DNA, 3032 bp, Homo sapiens
ggctgttataaatatatttgaagctgttagaccaaaattgttccctgagctgcattcaaatcatagatcatggtttctaattcttcagaacagaacaacttgagttgagtattgggctctcttttggtgatgtcctttttaatcttctttttaacttctttcaaattagctgtttaatttagccacttggtggggccttagggttctcagcagtgccatacagagtgttggcctcacatatgagacaacagaaacttggagattaaattgcccggatggtggctcacacctgtaatcctaccactttgggaggccaaggcagttggatcatttgaggtcaggagttcgagaccagcccggccaacatggtgaaaccccatctctactaaaaaatacaaaaatcagctgggtgtggtagtacctgcctgtaatcccagctactcgggaaagtgaggcaggagaattgcttgaacccgggaggcagaagttgcagtgagctgagatagcaccactggactccagcctgggcaatggagtgaggctccatctcaaataaataaataaataaatggtatgccttagcataggtgatgagtccctgactgggaagactggaattcagagctgttataccacaaaggtactgcttattgaattggacctgggctgtaattcttccttcccatctgagaaacaaggctgctgtgataaacttctcatcaactccagagaccattgttgttatcatttgcctactacatgcataaatcttttattacaaaagataattattatctgtgccacttacttgatagtcttgttaaatgagtagcttgctcaataagtatgatgtattcaatggggaaagaaatcactcctgaaaggaagaggggcttgagctggcagttgtgggatgggtggaagttgaatatatgcagagaaggaaagagagtgggagagggtcagaagaggataggggagtgggggacagcacgtgtcttcagcagagggtctgtgtgaggtagatgttagccacctccttgggatagggcatgttcgaattggaagcaggcctagggtatagtcaacattagcccagactaggtcaaaatgacaagtcctttgaaggggcagctagggtcaaacaatctcaacttagggcaatgactgacacagaatgttgtgggcatcagagcagtgtaggttgaggtggctgaaatcaggacaagtatagaagtagcttattttttgtttttctactctgcaaaatgaagagtctggcacttgtcttttaaaatgcacattaacaataaaattgaaataacatattctatcagattggcagaaattatttttagaatattatcttggtccattagggctgcaattacaaaataccataaactggacaatagaaatttatttctcacagtgctgaaagctagaaagtccaagatcaagacactgaatcggtgtctggggagggcccgtttcttggttcatagatggcgccatcttcctgcacccacacttggtggaaagagaaagttcgccctctgggtctctttacaagggcactaatcccaatcatgagatcatgatttcatctcctcctggaggcttgggtgttaggatttcaacatatgaattttgacggggacacaaatgctcagactatagcaaatatttaatgcaaggaagggtactgaaagacaggcattcttatattcactggtgggggygcatgccggaacaaactttctgcaaacagtcaaaattaattcatttacttaattatttgttgagcatttactatttaggaagcacaggtctttggaaacatcttgcctttcagtcaccctccttctccccagtgttctcctgttgccctctggcttcccagagcatcccatcactgatgctacaatctgaatattgcagagccctcctgattgagattagtgcccttatgaaagagaccacgaagaggtagctagcccctcccaccagtaaggaaagagcctcacaagacactatatctgctggtgccttgatcttggacttcacagcctgcagaactatgagaaacaaatgtttgttgtttataggccatccagtttatgacagtttgttacagcagcctaaccagactaaaacacctaaccagacccatcttctttaaacaatgatccaagattcagacctatccctccaccttgtttctcttttaaaacatatctgcttggtatcccatcccactagggccctgtaccagctagctcaccccagtaaagtacagtgagtgacatcaaacataaatttaatttgaaaaaattcgacttaaattgtaccctccagaataaaaataatttttttttgtataacctgaaccctgaatgcgagtcaaatgcttcatctggtgctcacccaaaaacagcaatctattccaacactgaggaaaagctgtgttagacattacatacacacaaaaccatgtgtagtcgaatttcctggcaatttgatggtaattttgactacattgaatagtctcccaactcactaatagaatctgaccctgtctctaagatgcttctctaactcaggctgaagagctaatggttaataataatgtgtttcttaaagagatatttgtgttgtaaaggagcacatttgaaggagtgatgctttttccaggaggaataagcctgttggagatgcaatatttatttgggtgcagggggaagggagggagctgcctcctgcttgtacagcaggccttgaattctgtctttttcagattggttagaagagccaggctggtccaaaaaagtggttcacagtgtcttggatgccctttcatgtactgcacatgcttctggaataaatactgacatccatgtatggctgggggagtaaaatcaacattcactaagcaggtaacaggaacatagttgtataagttactccatcatatacctcactgaatcctcacaattactacgtgaggtagctattgtagctatttttataga

SEQ ID NO: 670359 - DNA, 3032 bp, Homo sapiens
ggctgttataaatatatttgaagctgttagaccaaaattgttccctgagctgcattcaaatcatagatcatggtttctaattcttcagaacagaacaacttgagttgagtattgggctctcttttggtgatgtcctttttaatcttctttttaacttctttcaaattagctgtttaatttagccacttggtggggccttagggttctcagcagtgccatacagagtgttggcctcacatatgagacaacagaaacttggagattaaattgcccggatggtggctcacacctgtaatcctaccactttgggaggccaaggcagttggatcatttgaggtcaggagttcgagaccagcccggccaacatggtgaaaccccatctctactaaaaaatacaaaaatcagctgggtgtggtagtacctgcctgtaatcccagctactcgggaaagtgaggcaggagaattgcttgaacccgggaggcagaagttgcagtgagctgagatagcaccactggactccagcctgggcaatggagtgaggctccatctcaaataaataaataaataaatggtatgccttagcataggtgatgagtccctgactgggaagactggaattcagagctgttataccacaaaggtactgcttattgaattggacctgggctgtaattcttccttcccatctgagaaacaaggctgctgtgataaacttctcatcaactccagagaccattgttgttatcatttgcctactacatgcataaatcttttattacaaaagataattattatctgtgccacttacttgatagtcttgttaaatgagtagcttgctcaataagtatgatgtattcaatggggaaagaaatcactcctgaaaggaagaggggcttgagctggcagttgtgggatgggtggaagttgaatatatgcagagaaggaaagagagtgggagagggtcagaagaggataggggagtgggggacagcacgtgtcttcagcagagggtctgtgtgaggtagatgttagccacctccttgggatagggcatgttcgaattggaagcaggcctagggtatagtcaacattagcccagactaggtcaaaatgacaagtcctttgaaggggcagctagggtcaaacaatctcaacttagggcaatgactgacacagaatgttgtgggcatcagagcagtgtaggttgaggtggctgaaatcaggacaagtatagaagtagcttattttttgtttttctactctgcaaaatgaagagtctggcacttgtcttttaaaatgcacattaacaataaaattgaaataacatattctatcagattggcagaaattatttttagaatattatcttggtccattagggctgcaattacaaaataccataaactggacaatagaaatttatttctcacagtgctgaaagctagaaagtccaagatcaagacactgaatcggtgtctggggagggcccgtttcttggttcatagatggcgccatcttcctgcacccacacttggtggaaagagaaagttcgccctctgggtctctttacaagggcactaatcccaatcatgagatcatgatttcatctcctcctggaggcttgggtgttaggatttcaacatatgaattttgacggggacacaaatgctcagactatagcaaatatttaatgcaaggaagggtactgaaagacaggcattcttatattcactggtgggggtgcatgccggaacaaactttctgcaaacagtcaaaattaattcatttacttaattatttgttgagcatttactatttaggaagcacaggtctttggaaacatcttgcctttcrgtcaccctccttctccccagtgttctcctgttgccctctggcttcccagagcatcccatcactgatgctacaatctgaatattgcagagccctcctgattgagattagtgcccttatgaaagagaccacgaagaggtagctagcccctcccaccagtaaggaaagagcctcacaagacactatatctgctggtgccttgatcttggacttcacagcctgcagaactatgagaaacaaatgtttgttgtttataggccatccagtttatgacagtttgttacagcagcctaaccagactaaaacacctaaccagacccatcttctttaaacaatgatccaagattcagacctatccctccaccttgtttctcttttaaaacatatctgcttggtatcccatcccactagggccctgtaccagctagctcaccccagtaaagtacagtgagtgacatcaaacataaatttaatttgaaaaaattcgacttaaattgtaccctccagaataaaaataatttttttttgtataacctgaaccctgaatgcgagtcaaatgcttcatctggtgctcacccaaaaacagcaatctattccaacactgaggaaaagctgtgttagacattacatacacacaaaaccatgtgtagtcgaatttcctggcaatttgatggtaattttgactacattgaatagtctcccaactcactaatagaatctgaccctgtctctaagatgcttctctaactcaggctgaagagctaatggttaataataatgtgtttcttaaagagatatttgtgttgtaaaggagcacatttgaaggagtgatgctttttccaggaggaataagcctgttggagatgcaatatttatttgggtgcagggggaagggagggagctgcctcctgcttgtacagcaggccttgaattctgtctttttcagattggttagaagagccaggctggtccaaaaaagtggttcacagtgtcttggatgccctttcatgtactgcacatgcttctggaataaatactgacatccatgtatggctgggggagtaaaatcaacattcactaagcaggtaacaggaacatagttgtataagttactccatcatatacctcactgaatcctcacaattactacgtgaggtagctattgtagctatttttataga

SEQ ID NO: 670360 - DNA, 3032 bp, Homo sapiens
ggctgttataaatatatttgaagctgttagaccaaaattgttccctgagctgcattcaaatcatagatcatggtttctaattcttcagaacagaacaacttgagttgagtattgggctctcttttggtgatgtcctttttaatcttctttttaacttctttcaaattagctgtttaatttagccacttggtggggccttagggttctcagcagtgccatacagagtgttggcctcacatatgagacaacagaaacttggagattaaattgcccggatggtggctcacacctgtaatcctaccactttgggaggccaaggcagttggatcatttgaggtcaggagttcgagaccagcccggccaacatggtgaaaccccatctctactaaaaaatacaaaaatcagctgggtgtggtagtacctgcctgtaatcccagctactcgggaaagtgaggcaggagaattgcttgaacccgggaggcagaagttgcagtgagctgagatagcaccactggactccagcctgggcaatggagtgaggctccatctcaaataaataaataaataaatggtatgccttagcataggtgatgagtccctgactgggaagactggaattcagagctgttataccacaaaggtactgcttattgaattggacctgggctgtaattcttccttcccatctgagaaacaaggctgctgtgataaacttctcatcaactccagagaccattgttgttatcatttgcctactacatgcataaatcttttattacaaaagataattattatctgtgccacttacttgatagtcttgttaaatgagtagcttgctcaataagtatgatgtattcaatggggaaagaaatcactcctgaaaggaagaggggcttgagctggcagttgtgggatgggtggaagttgaatatatgcagagaaggaaagagagtgggagagggtcagaagaggataggggagtgggggacagcacgtgtcttcagcagagggtctgtgtgaggtagatgttagccacctccttgggatagggcatgttcgaattggaagcaggcctagggtatagtcaacattagcccagactaggtcaaaatgacaagtcctttgaaggggcagctagggtcaaacaatctcaacttagggcaatgactgacacagaatgttgtgggcatcagagcagtgtaggttgaggtggctgaaatcaggacaagtatagaagtagcttattttttgtttttctactctgcaaaatgaagagtctggcacttgtcttttaaaatgcacattaacaataaaattgaaataacatattctatcagattggcagaaattatttttagaatattatcttggtccattagggctgcaattacaaaataccataaactggacaatagaaatttatttctcacagtgctgaaagctagaaagtccaagatcaagacactgaatcggtgtctggggagggcccgtttcttggttcatagatggcgccatcttcctgcacccacacttggtggaaagagaaagttcgccctctgggtctctttacaagggcactaatcccaatcatgagatcatgatttcatctcctcctggaggcttgggtgttaggatttcaacatatgaattttgacggggacacaaatgctcagactatagcaaatatttaatgcaaggaagggtactgaaagacaggcattcttatattcactggtgggggtgcatgccggaacaaactttctgcaaacagtcaaaattaattcatttacttaattatttgttgagcatttactatttaggaagcacaggtctttggaaacatcttgcctttcagtcaccctccttctccccagtgttctcctgttgccctctggcttcccagagcatcccatcactgatgctacaatctgaatattgcagagccctcctgattgagattagtgcccttatgaaagagaccacgaagaggtagctagcccctcccaccagtaaggaaagagcctcacaagacactatatctgctggtgccttgatcttggacttcacagcctgcagaactatgagaaacaaatgtttgttgtttataggccatccagtttatgacagtttgttacagcagcctaaccagactaaaacacctaaccagacccatcttctttaaacaatgatccaagattcagacctatccctccaccttgtttctcttttaaaacatatctgcttggtatcccatcccactagggccctgtaccagctagctcaccccagtaaagtacagtgagtgacatcaaacataaatttaatttgaaaaaattcgacttaaattgtaccctccagaataaaaataatttttttttgtataacctgaaccctgaatgcgagtcaaatgcttcatctggtgctcacccaaaaacagcaatctattccaacactgaggaaaagctgtgttagacattacatacacacaaaaccatgtgtagtcgaatttcctggcaatttgatggtaattttgactacattgaatagtctcccaactcactaatagaatctgaccctgtctctaagatgcttctctaactcaggctgaagagctaatggttaataataatgtgyttcttaaagagatatttgtgttgtaaaggagcacatttgaaggagtgatgctttttccaggaggaataagcctgttggagatgcaatatttatttgggtgcagggggaagggagggagctgcctcctgcttgtacagcaggccttgaattctgtctttttcagattggttagaagagccaggctggtccaaaaaagtggttcacagtgtcttggatgccctttcatgtactgcacatgcttctggaataaatactgacatccatgtatggctgggggagtaaaatcaacattcactaagcaggtaacaggaacatagttgtataagttactccatcatatacctcactgaatcctcacaattactacgtgaggtagctattgtagctatttttataga

SEQ ID NO: 670361 - DNA, 642 bp, Homo sapiens
atttcttcctctgtgttctaaatatggtacccagatatggggcaaggtgacagtgagtattgtttttattttcaaaaatgcagttatgaaagaggtctttattcattgtagaaatgtttgaatatgcagaaaattacagaggaaaaatcagatttactcataatctcagcattccaatataacacctcctttggtgtttaatggtatatttttgtaccatattttttctactttataaaaatataattgagatcatattgtatataaaactttgaaatctgctttttttgcttaatactggttcaaaaacatttcatgtaatttttaaaatccttagaaatgtaattttagtggctgtgtaatattaaatcatatgaatgtgacatcrtttcccagggatttcccagtaagtaattctgtgataaacatctttaagtttctctttctgcatttcagattatcttttgaagacaggtttctagggctccccagtgaaagttaaattgtttggttaattaaaagacaacataatagttagcaattttacctttaactatcttattgaatattgatatatcagcaaagaaatgacttttctatagctttatctcttataagacctttctgagttatgaaattgat

SEQ ID NO: 670362 - DNA, 1343 bp, Homo sapiens
ggcagatcctgtccacacagaaaggagcaattaataaagaggagaatgggcgacctggaaatccccataatgaaagtttgtttatgaactagatactaagtgcaacaggggcgtgaaagcgaataaatgcttccccaagagatcctagcaaccagcagtgggatcacaggaagggccgacatcctagatttttaaactctttagaatcccaggagacataaatcaaataagcagatttgttgcttctttcaactgagaaaaaaacatggttgatttttttaaagtgctgctagagaataatgtattgaaaaagcaagaatcgtagtgttgcccaggagattaaaatcaggggaggaaaaacaaaaggcaaaaaccccaaaattcaaccagatcaacaaggagcatagcttcccaacatgcaaatccagaccgatttttaaaaattaatcggcacaattgtctgttaattgtacctttgccagttgattacggtatttcttaaacaacatcccactactaagcagctttgcaacacttgatcctcttctgatacctgttctgtgcttaggatatcgaaagcgaagtgggattaattctggcctctggcagctggggtaatttaaggcttcactggagtgggacaggtcaccgcaggttgagctataaaagctgcctccagtgtaactttgctcggggtaacacactgcaaagtgcttggatttttttttatcgagattaaaaatgatctcttgctgatattttcatttattacaggaaggcaatttgttaggtgggctttcagaggagaagatgttgttccgatgatttttctggatttacttccatgtggtagcggagaggaaggcagaactgatttgggaccttcctgatagggtgcagcaactctcccacttcagagcagaccagcactcggttctggcctccagagtctcccctgtgccaacagaggtccttgggcgggcagccatatccagcagccatggaaggagccatcaggagcagaacatgggccagcaaaggatggtgcacagtgggctggtgttcttagccaaaatggtgcttatatctcaaaactctagtgtttccactggagagggttggagcagacgaaraggtaaaaatggcgaatggtgtgggtcagcctcagacaatcagagagctgataggacatcgtctctggggttcgctggaaggacttggagttggggtacgttatgagttggctgaggcccatgttagcagatggggcaggagccagagaaatatgggtggcagagttagggatcttagaatggggagacaacttggctagtggggcagca

SEQ ID NO: 670363 - DNA, 632 bp, Homo sapiens
aaaaacaacttctaaactcttttttttttctaaatggctgtaccatttcacattgtatccagacaatttcacattgtctatatatagttatatttctgaattttatgtccagttccatttatcaactctccttatggcaaaaactctctccttatggcaaaaccatattattttgatttcagtagttttgcagaaagtactgatgtaaagtaatgatagtcattcamctttgttcttcctttggaaaattgttttgactatttaattcttttgaatctctagtaaaaaattattttgttgatatctacaaaatacaattgcctgaatcttgagtgaaattgcagaactgacatcttaatcatattgagtttccagtctacaaacatggtacctttatttagttgtcatctttactatttctctataatgttttatagccccttttctacagatttttatatgttaaaatttttctagacatttttgatgtatctgtatgtgctaacttcagtctcaatttttaattgttattataacaaagaaatggtttaataaccgtgggttttgtggcattactcacaaatgtgttctagtagttgttttacatttcttgtaactttctacatggaaaa

SEQ ID NO: 670364 - DNA, 632 bp, Homo sapiens
aaaaacaacttctaaactcttttttttttctaaatggctgtaccatttcacattgtatccagacaatttcacattgtctatatatagttatatttctgaattttatgtccagttccatttatcaactctccttatggcaaaaactctctccttatggcaaaaccatattattttgatttcagtagttttgcagaaagtactgatgtaaagtaatgatagtcattcacctttgttcttcctttggaaaattgttttgactatttaattcttttgaatctctagtaaaaaattattttgttgatatctacaaaatacaattgcctgaatcttgagtgaaattgcagaactgacatcttaatcatattgagtttccagtctacaaacatggtacctttatttagttgtcatctttactatttctctataatgttttatagccccttttctacagatttttatatgttaaaatttttctagacatttttgatgtatctgtatgtgctaacttcagtctcaatttttaattgttattataacaaagaaatggtttaataaccrtgggttttgtggcattactcacaaatgtgttctagtagttgttttacatttcttgtaactttctacatggaaaa

SEQ ID NO: 670365 - DNA, 624 bp, Homo sapiens
gccttttatttgtctgctcatgcttcaaacactcaaaggacattttcagaatctcagtagatgaaggttcaatctttaaatgacgtgacaggctgtatcttccttaagagattttgacacgatattaagccatagttacaagccaatacttgaatgggaagccctggggaaatcttttagagctggaacacggcgtttacagcaggaggcaggtgtctgcaccagtgaagcaaataacgatatgatatatttagtatcgaaaatggaagcgaaactactgattctttacactggggacaacggaagaagttgaatgagggaaaaaaatcatcttttggggccctaggaaatgttaatttacwgacagtatgaaatatactctcatcacgacaggtgcactcagaaccaggtgctgctctcaatatcgtctttgaatttatgtgtttcttttcagtgataggatgtgaagcagctgtactggccatgtggagagaaagcaaagagcttttaattagcaattagggggctgttaatttctttggggatctctctctatcttctctttgtacttttactatattcttaggagtttctatatgtctcctaaaatacaaagaaaatcaa

SEQ ID NO: 670366 - DNA, 642 bp, Homo sapiens
gaaaaatataccttctttttacattcaaargcgagattctacctttagatttgtcagtgacatccaataatgcatatgtgcttacattttattgaaaaaaggaaaattgagctgataatataacataaattttcttaaaggctaaataataataaaatcttcctcaatgaaatggaattgttctattttataagtcaataaatattatattagatacagtatttaaaatgtctggaatctatgtatattttctttatatgcaaggggaatttcattttctgaaataaaagaaaaaccatatgcaacatcatctaaccctcagatttgggggctggttaattttaatcacagtaaatctaataataaaacaatgtatagcatgtttagcagtcttgaaaatatattttagaaaatattagaaataggtgagataaatgggttaccactttctaagtctgaaaacttttcaaagttgggattcttaacctgagtccatttatttcttctaggaggtccaaaatttttatcacaaagaagtaattactttgtatttttaaaataattagatattctaacatgactaaaggtcatttgaaaactagaacaaataaaatcctacttagaagacaaaacagaaaaata

SEQ ID NO: 670367 - DNA, 642 bp, Homo sapiens
gaaaaatataccttctttttacattcaaaggcgagattctacctttagatttgtcagtgacatccaataatgcatatgtgcttacattttattgaaaaaaggaaaattgagctgataatataacataaattttcttaaaggctaaataataataaaatcttcctcaatgaaatggaattgttctattttataagtcaataaatattatattagatacagtatttaaaatgtctggaatctaygtatattttctttatatgcaaggggaatttcattttctgaaataaaagaaaaaccatatgcaacatcatctaaccctcagatttgggggctggttaattttaatcacagtaaatctaataataaaacaatgtatagcatgtttagcagtcttgaaaatatattttagaaaatattagaaataggtgagataaatgggttaccactttctaagtctgaaaacttttcaaagttgggattcttaacctgagtccatttatttcttctaggaggtccaaaatttttatcacaaagaagtaattactttgtatttttaaaataattagatattctaacatgactaaaggtcatttgaaaactagaacaaataaaatcctacttagaagacaaaacagaaaaata

SEQ ID NO: 670368 - DNA, 642 bp, Homo sapiens
gaaaaatataccttctttttacattcaaaggcgagattctacctttagatttgtcagtgacatccaataatgcatatgtgcttacattttattgaaaaaaggaaaattgagctgataatataacataaattttcttaaaggctaaataataataaaatcttcctcaatgaaatggaattgttctattttataagtcaataaatattatattagatacagtatttaaaatgtctggaatctatgtatattttctttatatgcaaggggaatttcattttctgaaataaaagaaaaaccatatgcaacatcatctaaccctcagatttgggggctggttaattttaatmacagtaaatctaataataaaacaatgtatagcatgtttagcagtcttgaaaatatattttagaaaatattagaaataggtgagataaatgggttaccactttctaagtctgaaaacttttcaaagttgggattcttaacctgagtccatttatttcttctaggaggtccaaaatttttatcacaaagaagtaattactttgtatttttaaaataattagatattctaacatgactaaaggtcatttgaaaactagaacaaataaaatcctacttagaagacaaaacagaaaaata

SEQ ID NO: 670369 - DNA, 642 bp, Homo sapiens
gaaaaatataccttctttttacattcaaaggcgagattctacctttagatttgtcagtgacatccaataatgcatatgtgcttacattttattgaaaaaaggaaaattgagctgataatataacataaattttcttaaaggctaaataataataaaatcttcctcaatgaaatggaattgttctattttataagtcaataaatattatattagatacagtatttaaaatgtctggaatctatgtatattttctttatatgcaaggggaatttcattttctgaaataaaagaaaaaccatatgcaacatcatctaaccctcagatttgggggctggttaattttaatcacagtaaatctaataataaaacaatgtatagcatgtttagcagtcttgaaaayatattttagaaaatattagaaataggtgagataaatgggttaccactttctaagtctgaaaacttttcaaagttgggattcttaacctgagtccatttatttcttctaggaggtccaaaatttttatcacaaagaagtaattactttgtatttttaaaataattagatattctaacatgactaaaggtcatttgaaaactagaacaaataaaatcctacttagaagacaaaacagaaaaata

SEQ ID NO: 670370 - DNA, 1218 bp, Homo sapiens
tgttattgtcatgcaactcatcaagtgctaattgtctattttttccttttttaatgtatcaatgatgttgataccactttccagaagatactgaggaaagatcatttatcacagcacaactttatgtaaaaggaatatgagggctgtgattgattagtatttatcctaaatgataaattttaaatatttccagatattaaatttgcataattgtataataaatcactgttttatcttacagatttcacagaattggctraaactctattagcatttgtccccctccccaaaacaaaaacaaaaataaaaccaaagcatttcatggtaaggtttatttgtcttataggttaaatcacttgactagcattatactgcagaatgtgttctatgtttttcctatcaaaataaaagtaaaatggcaagtaatgaatatgtttctttttaaccggtcaaaatccatacccaaactctccaaaaattaaatcttacaactggaaagcagctaaaactgcacctgcttcaagtaaatgtaaagtggcagaccatttgcaagttgaaagtaatccttttcctgtggaatataaaaactcacaaaagaaactcatgccctggagaaatggaatctgatagaacattcactttaaacacacacacacactcacacacacacacacccctcacaataaaaacaccaaaaacagaagcatatgaggaaagattaaaaatgagctaaaaacacagttgttttcattcataaatttataaaagttctcacaaataaatgttgtcattatttgagtcttgttagaatggtacttggaaatcaaagactagaaccaaaggaacaaacagaatattgtgtttaagtctggtaaatacagccaattataataataagttcatatatttgcaaaatgaaatgcagaatatttagaaatgaaattcttaaaactgagcataaagatcggaaagccaatatttattttaaagttttttaattattttttgtttattatactttaagttctagggtacatgtgcacaatgtgcaggtttgttacatatgtatacatgtgccatgttggtgtgctgcacccatgaaccgcacccatttacattaggtatatctcctaatgctatccctcccccctctccccacccgataacagtccccggtgtgtgatgttccccttcctgtgtccatgtgttctcattgtt

SEQ ID NO: 670371 - DNA, 683 bp, Homo sapiens
ggtgggctccacacagttcaaggttcctggcccctttgtttacctactcaagcttcagcaatggtggacgcccctcccccagccttgctgctgccttgcaattcaatctcagactgctgtgctagcagtgagcgaggctctgtgggcgtgggaccctccgagccaggtgcgggatataatatcctggtgcgccatttgctaagactactggaaaagcacagtattagggtaggagtgtcccaattttccaggtaccatctgtcacagcttcccttggctaggaaaaggaattccctgaccccttgtgcttcctgcatgaggtgatgccccaccctgctctgtgggctgcacccactgtctgacaaaccccagtgagatgagccccatacctcagttggaaatgcagaaatcacccatcttytgcatctctcaccctgggagctgtagactggagctgttcctatttggccatcttggaaccccctaaagttattttaatatatgtgttctgatataattatgttttgactaagtcatcatggttaacactgaatgtcaacttgatgacattgaaggatacaaagtattgatcctgggtgtgtctgcgagggtgttgccaaaagagattaacatttgagtcagtgggctgggaaaggcagacccacccttaatctgggtgggca

SEQ ID NO: 670372 - DNA, 872 bp, Homo sapiens
ctgtttggccaagagagtccctattcctaccagggactcagrtagctagagtgggttatacataagtatttcatcattcatttcttgtttgatgaaattgattatgagaaggaaacatgttaatgctgttttttaacagctttatgaaagtatagttgacatatgtaaagtgtacattttgatacatttatatatatatacatatatacccataaaccatcacacaatcaaaataatgaaagtacccattactcccaaaagttattgtaataactcccatactggccccaagcaaccactgatatgctttttgttatggtaacaatagattgaaaaataccttagagatcattagcctttgttaccaaggagttcagcgtgtggagatttccatggaataagaccaggagggaagttgaagtaactgggactaggctgatatctgctcactgggaaaggggatggatacaaagaggaacttggtgataacaggacacagattccaaagcatgtggcaacttcggattgggttcaggtaaactttaagattggggtagactggggttttgcaggtcctttaaaggaggtccttaggaaatgatgccatccttgaactgcacaaccaaaataaaaacatacagacagaacccccaacccaaacccagaacttcaaggttggcagtggaaaaggactttcctggtaggtggggcagctgatttttgtccttcaaatcctcttggctctcttagggtcactcctggcgatgggagacataccatcattccgtggtgggcaggtctatgcaaaatgatccccagagtccaaggaagcagagaggccaaagaaagaggttgacaaatccagtttctca

SEQ ID NO: 670373 - DNA, 872 bp, Homo sapiens
ctgtttggccaagagagtccctattcctaccagggactcagatagctagagtgggttatacataagtatttcatcattcatttcttgtttgatgaaattgattatgagaaggaaacatgttaatgctgttttttaacagctttatgaaagtatagttgacatatgtaaagtgtacattttgatacatttatatatatatacatatatacccataaaccatcacacaatcaaaataatgaaagtacccattactcccaaaagttattgtaataactcccatactggccccaagcaaccactgatatgctttttgttatggtaacaatagattgaaaaataccttagagatcattagcctttgttaccaagkagttcagcgtgtggagatttccatggaataagaccaggagggaagttgaagtaactgggactaggctgatatctgctcactgggaaaggggatggatacaaagaggaacttggtgataacaggacacagattccaaagcatgtggcaacttcggattgggttcaggtaaactttaagattggggtagactggggttttgcaggtcctttaaaggaggtccttaggaaatgatgccatccttgaactgcacaaccaaaataaaaacatacagacagaacccccaacccaaacccagaacttcaaggttggcagtggaaaaggactttcctggtaggtggggcagctgatttttgtccttcaaatcctcttggctctcttagggtcactcctggcgatgggagacataccatcattccgtggtgggcaggtctatgcaaaatgatccccagagtccaaggaagcagagaggccaaagaaagaggttgacaaatccagtttctca

SEQ ID NO: 670374 - DNA, 872 bp, Homo sapiens
ctgtttggccaagagagtccctattcctaccagggactcagatagctagagtgggttatacataagtatttcatcattcatttcttgtttgatgaaattgattatgagaaggaaacatgttaatgctgttttttaacagctttatgaaagtatagttgacatatgtaaagtgtacattttgatacatttatatatatatacatatatacccataaaccatcacacaatcaaaataatgaaagtacccattactcccaaaagttattgtaataactcccatactggccccaagcaaccactgatatgctttttgttatggtaacaatagattgaaaaataccttagagatcattagcctttgttaccaaggagttcagcgtgtggagatttccatggaataagaccaggagggaagttgaagtaactgggactaggctgatatctgctcactgggaaaggggatggatacaaagaggaacttggtgataacaggacacagattccaaagcatgtggcaacttcggattgggttcaggtaaactttaagattggggtagactggggttttgcaggtcctttaaaggaggtccttaggraatgatgccatccttgaactgcacaaccaaaataaaaacatacagacagaacccccaacccaaacccagaacttcaaggttggcagtggaaaaggactttcctggtaggtggggcagctgatttttgtccttcaaatcctcttggctctcttagggtcactcctggcgatgggagacataccatcattccgtggtgggcaggtctatgcaaaatgatccccagagtccaaggaagcagagaggccaaagaaagaggttgacaaatccagtttctca

SEQ ID NO: 670375 - DNA, 681 bp, Homo sapiens
aatgatccaaagtataaagcagggatagatcttctatcttctactggcttgatcttccagggctcatattagttagtgcacaaatcttctataagggataggtggtatagtttccttatcttccattaacattggtgtcctaatyctgagcatattgaaaaaagaagcgaaactacacagatccatagaacgggactgaaagggaccttaaggagcatattgtctataacctgcccatttcataaagtcgcctggtgatatcgctagactaaagtagatgagggtttcttttccattcaaaaggacaggaatatggatgaaggtcaatgaggaccacgttagcatattagccagcatgactttgttatacttcagaagaaaactgctgcatctcaatgttacctccacaataaatcaatatattaggttgaaccacatgaaactgcccatacttgatcattttgccctaccaaaaaaagtcaattacatatgattcaacttagtatgttccaaactctgaaactgcttttccagtaagtgaactgattatagtcctttaaaaactaaataaaatgaacagaaaaaacaccctgaaaactcgttatatttaaaatacagccgaaatgtaatacatacatcactaatcatattaatatgggacatctgtgtttaggtaaaatt

SEQ ID NO: 670376 - DNA, 443 bp, Homo sapiens
aaaatggaaaagagaaacaggtacagttactttgaatgatatgttttcaacctaatagctcaaaaacgtggttgttacaggkagttagacaggcatgagtggggcaggagagggctcttctccccaacccactagggatgtcaggtgatggttcaacaattatcacactgcctctctaaaaatgataatttggcaactgggcaccagggtgccaaggagagacaatctcctgatgatccacagctgttaatattaaagtgttaattgaatgcagatgccagggagaaggaacttcctgggcatgctccttaagagacacgatggcgaagtatgaccttttggggacactccactggaaaagggaagaaaggctcagatgggcatgtatacaacttcctaaacacattgcacatgcccccttcccaagggtaaggggggcaccg

SEQ ID NO: 670377 - DNA, 915 bp, Homo sapiens
cttaacccaaatgaaagcgaggtcattaggaagctgtgcctggtgaagttctggcaccaggtgggtagatcacattttctagtgtatgtaaaattttaacatttcagacccccagttttaagaccttatctaatttccttgagccccttagtcattgtgaactcgctgtggagtgtctgcctccacctgccttggtgtttatgaacattcatggtaactttagaaggcaagggttagaggaaactttttgccgcccacccccagtctgcaacagtacctgtggggaagattttaccctgggactccaattttcagggagaggaagtttctaggatttcccatagrcttacgagggactcgccatgtggaaggattttaggcctgagaaggataataacactttataatttctaggtgatcttatttgttgcctcttccttctccagagtgactactgcattccgacctgcccccccacccttttttttttcttttgagacagagtcttactctgtcacccaggctggagtgcagtggtgtgatcttggctcactgcaacctccacctccctggctcaagctattctcatgcctcagcctcccgagtagctgggactacaggcatgcaccaccacacctggttaatttttgtatttttagtagagactgagtttcactatgttggccaggctggtctccaactcctggccccaagtgatctgcctacctcgggctcccaaagtgctgggattacaggcctgagcctctgcgcccagccccctcttctgctttctaagtgtccattctccttgtagtgagtgggtggtggggggatatacacatgtgactctggttagtacataggcagccatgaagtccacaaatgtacagggagccacagctttcatgctacaga

SEQ ID NO: 670378 - DNA, 915 bp, Homo sapiens
cttaacccaaatgaaagcgaggtcattaggaagctgtgcctggtgaagttctggcaccaggtgggtagatcacattttctagtgtatgtaaaattttaacatttcagacccccagttttaagaccttatctaatttccttgagccccttagtcattgtgaactcgctgtggagtgtctgcctccacctgccttggtgtttatgaacattcatggtaactttagaaggcaagggttagaggaaactttttgccgcccacccccagtctgcaacagtacctgtggggaagattttaccctgggactccaattttcagggagaggaagtttctaggatttcccataggcttacragggactcgccatgtggaaggattttaggcctgagaaggataataacactttataatttctaggtgatcttatttgttgcctcttccttctccagagtgactactgcattccgacctgcccccccacccttttttttttcttttgagacagagtcttactctgtcacccaggctggagtgcagtggtgtgatcttggctcactgcaacctccacctccctggctcaagctattctcatgcctcagcctcccgagtagctgggactacaggcatgcaccaccacacctggttaatttttgtatttttagtagagactgagtttcactatgttggccaggctggtctccaactcctggccccaagtgatctgcctacctcgggctcccaaagtgctgggattacaggcctgagcctctgcgcccagccccctcttctgctttctaagtgtccattctccttgtagtgagtgggtggtggggggatatacacatgtgactctggttagtacataggcagccatgaagtccacaaatgtacagggagccacagctttcatgctacaga

SEQ ID NO: 670379 - DNA, 915 bp, Homo sapiens
cttaacccaaatgaaagcgaggtcattaggaagctgtgcctggtgaagttctggcaccaggtgggtagatcacattttctagtgtatgtaaaattttaacatttcagacccccagttttaagaccttatctaatttccttgagccccttagtcattgtgaactcgctgtggagtgtctgcctccacctgccttggtgtttatgaacattcatggtaactttagaaggcaagggttagaggaaactttttgccgcccacccccagtctgcaacagtacctgtggggaagattttaccctgggactccaattttcagggagaggaagtttctaggatttcccataggcttacgagggactcgccatgtggaaggattttaggcctgagaaggataataacactttrtaatttctaggtgatcttatttgttgcctcttccttctccagagtgactactgcattccgacctgcccccccacccttttttttttcttttgagacagagtcttactctgtcacccaggctggagtgcagtggtgtgatcttggctcactgcaacctccacctccctggctcaagctattctcatgcctcagcctcccgagtagctgggactacaggcatgcaccaccacacctggttaatttttgtatttttagtagagactgagtttcactatgttggccaggctggtctccaactcctggccccaagtgatctgcctacctcgggctcccaaagtgctgggattacaggcctgagcctctgcgcccagccccctcttctgctttctaagtgtccattctccttgtagtgagtgggtggtggggggatatacacatgtgactctggttagtacataggcagccatgaagtccacaaatgtacagggagccacagctttcatgctacaga

SEQ ID NO: 670380 - DNA, 870 bp, Homo sapiens
cttatactagagtaaataaagctgaaaatctcattagataacacgagggagttaaggttacactgggaaacagcactgccccattttcttggcttttgcttaaatgtaacctcagtacacttgtatccaacctccagctattcccagaagcctggaaccaatcactgtgttcagcagtcatcagtttatggctggttttttattttaaatcagtggcatgatgaataaaatatacatgtatatatgtgtatatatatgtgtgtgtgtgtgtgtgtgtgtrtatatatatatatatatatatatatatttttttttttttttttttttgagacagagtctcactctgtcgcccaggctggagtacactggcgcgatctcggctcactacaagctttaaagagcttttgtgacttagtttctgctttcaaaggattttaagtttgcaaaagctataacagtcaccaaacataagttctgagtattaaaggttatgggactgttacagactacttagttctagagacttcttctttttttttttttttagatggagtcttgctctgtcgcccaggctggagtgcagtggcgtgatctcggctcactgcaagctccgcctcccaggttcacgccattctcctgcctcagcctcccaagaagctgggactacaggcgcccgccaccatgcccggctaattttttgtatttttagtagagacggggtttcaccgtgttagccaggatgatctcgatctgaccttgtgatccgcccacctccgcctcccaaagtgctgggattacggcgtgagccaccacgcccggcagagacttaactacaatagaaacatctgaaagcacagaaaactgatgtgc

SEQ ID NO: 670381 - DNA, 870 bp, Homo sapiens
cttatactagagtaaataaagctgaaaatctcattagataacacgagggagttaaggttacactgggaaacagcactgccccattttcttggcttttgcttaaatgtaacctcagtacacttgtatccaacctccagctattcccagaagcctggaaccaatcactgtgttcagcagtcatcagtttatggctggttttttattttaaatcagtggcatgatgaataaaatatacatgtatatatgtgtatatatatgtgtgtgtgtgtgtgtgtgtgtatrtatatatatatatatatatatatatttttttttttttttttttttgagacagagtctcactctgtcgcccaggctggagtacactggcgcgatctcggctcactacaagctttaaagagcttttgtgacttagtttctgctttcaaaggattttaagtttgcaaaagctataacagtcaccaaacataagttctgagtattaaaggttatgggactgttacagactacttagttctagagacttcttctttttttttttttttagatggagtcttgctctgtcgcccaggctggagtgcagtggcgtgatctcggctcactgcaagctccgcctcccaggttcacgccattctcctgcctcagcctcccaagaagctgggactacaggcgcccgccaccatgcccggctaattttttgtatttttagtagagacggggtttcaccgtgttagccaggatgatctcgatctgaccttgtgatccgcccacctccgcctcccaaagtgctgggattacggcgtgagccaccacgcccggcagagacttaactacaatagaaacatctgaaagcacagaaaactgatgtgc

SEQ ID NO: 670382 - DNA, 870 bp, Homo sapiens
cttatactagagtaaataaagctgaaaatctcattagataacacgagggagttaaggttacactgggaaacagcactgccccattttcttggcttttgcttaaatgtaacctcagtacacttgtatccaacctccagctattcccagaagcctggaaccaatcactgtgttcagcagtcatcagtttatggctggttttttattttaaatcagtggcatgatgaataaaatatacatgtatatatgtgtatatatatgtgtgtgtgtgtgtgtgtgtgtatatatatrtatatatatatatatatatttttttttttttttttttttgagacagagtctcactctgtcgcccaggctggagtacactggcgcgatctcggctcactacaagctttaaagagcttttgtgacttagtttctgctttcaaaggattttaagtttgcaaaagctataacagtcaccaaacataagttctgagtattaaaggttatgggactgttacagactacttagttctagagacttcttctttttttttttttttagatggagtcttgctctgtcgcccaggctggagtgcagtggcgtgatctcggctcactgcaagctccgcctcccaggttcacgccattctcctgcctcagcctcccaagaagctgggactacaggcgcccgccaccatgcccggctaattttttgtatttttagtagagacggggtttcaccgtgttagccaggatgatctcgatctgaccttgtgatccgcccacctccgcctcccaaagtgctgggattacggcgtgagccaccacgcccggcagagacttaactacaatagaaacatctgaaagcacagaaaactgatgtgc

SEQ ID NO: 670383 - DNA, 870 bp, Homo sapiens
cttatactagagtaaataaagctgaaaatctcattagataacacgagggagttaaggttacactgggaaacagcactgccccattttcttggcttttgcttaaatgtaacctcagtacacttgtatccaacctccagctattcccagaagcctggaaccaatcactgtgttcagcagtcatcagtttatggctggttttttattttaaatcagtggcatgatgaataaaatatacatgtatatatgtgtatatatatgtgtgtgtgtgtgtgtgtgtgtatatatatatrtatatatatatatatatttttttttttttttttttttgagacagagtctcactctgtcgcccaggctggagtacactggcgcgatctcggctcactacaagctttaaagagcttttgtgacttagtttctgctttcaaaggattttaagtttgcaaaagctataacagtcaccaaacataagttctgagtattaaaggttatgggactgttacagactacttagttctagagacttcttctttttttttttttttagatggagtcttgctctgtcgcccaggctggagtgcagtggcgtgatctcggctcactgcaagctccgcctcccaggttcacgccattctcctgcctcagcctcccaagaagctgggactacaggcgcccgccaccatgcccggctaattttttgtatttttagtagagacggggtttcaccgtgttagccaggatgatctcgatctgaccttgtgatccgcccacctccgcctcccaaagtgctgggattacggcgtgagccaccacgcccggcagagacttaactacaatagaaacatctgaaagcacagaaaactgatgtgc

SEQ ID NO: 670384 - DNA, 1296 bp, Homo sapiens
agttattgacattggtatctgaaacttaaagtttttagatcttgccatatatttgtgtagaatgtttacactcacaaaatctcaaagtgctgttcatctcataatgatataagaagttgctaggtgatgttcatctggaatttcaaggaaattataataggagacatgtttcttcttttctcaagtgtttgaggatattcttctaacattgccatgaagattttgtatgaatttatcacaaagctggagcattgcttggaacagtggaacagaatgcgtgagcagggaatttcttaaacttggaaaccatccttgccactaccactgccctagggagactgggaaaaatagaagccctcatgagaagcccaaactcttgcccattttcaaagatcaaaaataggcatatatagtagttattatgggcagggtagagaaacttccattttcagttttctttgtccctattttctgcctaccaaacatccttcaaaatgtttggtttatgattgattatatttcatttttggaaatatactttcatgggtggccaaatagcaatgaattgcaaatctcatgaatatatatttcctatcttgtctggaggctgagttgttcatgtgattttggctgaactcatacccatatgctgattcctaaaactttttgaagacattcagtgagagttttagattcctggtgatagctaaataaagatttacataaatacgccatataagaaaacagaactaatcatgttaaaagttccttgttgtaatcccagcactttaggagkctgaggcaggagggtcacttgaggccaggaaatcgagaccagcctgggcaacatggtcttattatcatggtcaacagttcttattagcagtttcattgtctaattgttgatctcagtagagtctcttcagctgtgtcacttagcaattaaagattatggattgtgcagtcataaggcctggattcaaatattgggtttgctacttgtgacattggacaaatttatttgtaacactgtgcctcaaacttcatgggcttattcctgatctcatttcttaataagctatgtgaccttgagcaagagacatcctcaatatgccttggtttcctcatctatataaagagtatagtaatatctccctcataggattgtgtgtgtattaaatgagtgtatgtgctggtaagtaaagttgttgaggaaaaaggcctggcttatagtaagtgggatgtaagtgttagccactattccactacagcgtgagcttcatgaaggtagaggag

SEQ ID NO: 670385 - DNA, 627 bp, Homo sapiens
tgcaggctcttttttggttccatatgaactttaaagtagttttttccaattctgtgaagaaagtcagtggyagcttgatggggatagcattgaacctataaattaccttgggcaggccatactggttttcatagcagctgtacaagtttatattcccaccagtagtgcacaagagttccaatttcttcagatccttgccaatacttaattttttttgtgggggtggtttctgataatagccattctaatgagtatgagggtggtatctcattgtggtttggatttgcatttccctaatgattagtggtattgagcatcttttcatatgctcatagatcatttgtttatcttctttagaacactgtttattggagacctttgcccatttcttaatcaggttccagggggtttttgttgagttaaaaataaacttttttaaaatagaaaactagaagcaggttttttcaatcttaagagtcatctgactgggcacggtggctcatgcctggaatcccagcaatttgggaggccaaggcgggccgatcaactgaggtcaggagttcaagagcagtctagccaacatggtgaaaccccgtctctactaaaaatacaaaaattaggtgggca

SEQ ID NO: 670386 - DNA, 618 bp, Homo sapiens
atatcagctgaaatgaagaactactctcttattcaagctgttagacttatgggctgtctgtgaagctgctccttcctctgtgtggtttggggaatgggctggtagcaaggaaaaagggttgggtcctacaggcggtgtggccatgagtatatacagggtggcaggtgaatcaatgtagtgctgtgctcttggccaagaagaagaggatagggtagaagacacagctccaaccctgtgtcagtttgaggtagggtatgacaactgactccatcccttgcaggtatgaaaaattagactctacatgctttttggatctgttgtggcaaattacactgaagttattttatccctttactatttatttttgtaatttgcattttcaaagaaaaagatacagtaaaaaaaaatgaaatcctgtacaaacaataggtgctataaagcactttaaaaggaaaaacatcattccccagatactttgatgaagaacatgaaagagcaacaaaatttttatagtatataccttattccaaatttttacttgaactcctctaatgaatatgtcaagggaaagcagtgattattttcttttgaatttaaawtaatttgtctatttattca

SEQ ID NO: 670387 - DNA, 577 bp, Homo sapiens
gggggtcctcctgtttggatgaaggagaaatgtaaatgattttaattcatatagttaggggatcccttctgcagaaattacaggaccctggcttaggagtgggatgagctatggggtgagccatagaatttgagatactttccagcagctggcctagaagaagaagtccaaratgtcttccacaagcaatgctctgtgagggcctcagggaagccctgtgtgatcaagcagatttttaccacagaagccagccacctacaggtactgatgggcctgcggctggcagcgatgcttaggacccggccacacataggaagatgttcattgaaacttttgccaccctacaggtggggcaggtgaggttccggagtgactaggacatgttctgtttcccacttatagcagcaaaggggacatgttgccaggtgggacatatacacctctattgtatcaaccacttcttcctggtgtcctagcactataagcagagtctgtgatttatgctttcaaaaattatgataaaatgtaaataacaaatgctcaccatcttcaccattttaaagtgtacaattcagtg

SEQ ID NO: 670388 - DNA, 2729 bp, Homo sapiens
acagattgagttaaaacacatgcgttaattttttttatcatgactccaaggtcatttttcttatgttcactggtatttttcaaaataatgagttaatcacaatcactctcttgagaccctatagtggctgcagagttgaagttggggcttacttgcctatttgccgtttctatgccaattagtgcacacagagcctggatgttttgctttaagaaatcactgggattcttctccagacaggaggggtatggttacagcctggcctcatcatcagaaggtatttatcaagtgagtgttgttatcttagcatttgccactttatactggaattatctgcttgtattgatctatacacgagattggaaggtattgaaaaaaacaaaccatatcttacacaattttgtattactagtagagtgcctggaatatgagtcactcaataaatgtttgttgacgcgagttgaagtattttcaaatgcattgctctagatgacacagagcaggggataatccagagagacaaaatggcctcccttgtgttatttttctaaatgttatctaaacaagaatagatcaaagaataattataaagaaaggtcgaaggtaaagccttgagaaaagtatactaggcaactatgagctgaaagaaggttgggtacaatatattataatatcagacatattgacttaaaagtaaaagcaatatatacattgaatatatttaagatagaatattagaacaacacaattaataaactttatgtaatgaacatgtatgaaaccctataaccaaaaaatttagaaattcatattttctcaagtacacgtggaatatttctttaaaaattaacatatagtaggccaaaacacaaatattaacaaataccaaagaagcagtatagttaagatcacatttttttttaccataatggaataatattagaaatgagaaataaaaacaaggccaaaagaatgccatgcatttggagaccaaaaaacactctgctaaataatgcatggattaaagaagaaatcataatggaaatgttaaaagtatgtagaaggaaaataataaaattatcaaatatcaaggtttgtgggataaagctaaattagtggttgagggatttaataattttaaatgtctattaaaaactaagaaacacagaaaaagttaaaattaaaagctaagttttcaagtcaagaaattggaagaagggcatcacagtcaatccaaagaaaatagaaagaaggaaatataaatcaacataaagaaataattttttaaagcaatggaattgaccaaaaagcaaaagctgatatttgtgaaaaaactgctaagagtaagaaacttttggcaaaatcaaggaataaagcaaaaaagtagaaaatagtaatattagaaattttaaaatagaacacaacagcaaagtagaaatgaaaaacacaaaagaatcctattcatgatttatgccaataaattctaagcagattaaatgattttgtaaaaaataatatcaattgccaaaatgaacccaagaagtattggaaaaatctgaatatactaggaaatttccaccagtgattaaaaacctaccatgaaagataccacaggtagggggttacaagtgagttttcttttaaagaataagcaactcatatcttgcataaatygtttctgtaaacagaaaaatcagaaagtctttataccaaatccagaaggtacaaggaaagaaaattataaactaaccccatctataatgatgaagataacaattgacatttaaattgaacatttactggtatgctataagcactttgcatgccttatcttcttaatgctaacaacaaccttatgaagttggtaccattcttgactctaattcccagctgagaaaactgaggcataaattggttaagtaacttatctaagataatagctaaaaaatggcagaacttggattttaatgcaaaaattataatttaagtgaatgaaatccaggtgtgtgtgtaatctactgcattaactgaccaaatgaaaaagaactacattaatatcaaaaagaaaacatgatgagaattatcactatggctccacactgaaatagaagttctatccatcatggtaaataagaaaaaaaaaataagatacatacaaactggaatgtaagaaataaaaataattgttattgacacgtgataatgattgcctacacagaaaaactaaggaaatctacaaattactgaagtaataagaattcagcaatgatgttagatacatagccatgtgaaacatggcttatatataaaccatgccaatagtattcatgttcttataactaggaatagtagattagaaaacataattttaaaaaagaaaaacatagctattaaaataattgtaatggatgggaaaatggagaacaatcatgatgtaaataaagttaaaaaaagcaaaaaaaattatacctatgtcagcattttgtttaaactatataaagcccattattccaggggttttggttgtgattttttggtatatgtttatgaagtccaataaaacatcaaataagtcatgggaatttgagagatattgttacttcacaatttcctgcatttttcaaatgtttatattaagacatattttgaaagtcagtaaaaatctcatgaaaaagtttaaactaggtgtgctgaattggacctaaagaaaagttttggacaaatacttt

SEQ ID NO: 670389 - DNA, 1274 bp, Homo sapiens
aaaagtcttcctcttgcctccagggacacctgacccatagcagccatgatgtgtagcttgactagcacgtgtttacagattggtgaacatcagatacattcattttattaggtagttggataatagccttttatttgtgattatttatgcattagcagcaagcaatggatatgtgctatgtaggaaagttattatttgctaatttgctgcttttaaaatacatggcacactatctattatgtatcatgaattacaattacaacaacagtttaattaatcaccagcaccctgttttgtaccaatctacagcagaattctgggtaatggtgttgtttaccatttagcaagtagcaacatttcactctgtttcactacattaaactgctcaaataaagcaaacggatattgaaaagagttggccatctgcctttattttcttttacttttgtttaaaaaaaaaactctcaaaagrgaaagaacacagccatgaaactgatagtgacaaaaagcactctctttttttctttatcaggtcagactctcatctaaatgcagttctgatgaatagtttaaaaaataaaaaagaagcccgctttgtggatttggagtgggtctcaagaccagccatgaaacctaatgattatttaacggcgctgcactcgaggctggcttctgtaagcctcctttcccccctttaagagtttgatgaataggtcttgtgacagccatttaggaataaacaagaattcatcagtctgcataagaagaagccagtttatagattaagtttcctgaggtaattcatgaggtcagtcccatttagatggagactattagggcctggctctcgagagtggccgtagaggggagtcactccaaatggaccccgctcacacaaagctccctttcaggtagaagcctgccatttttatgaccctgctgttaggacgcacatcaacttgtcactgtgcagatctgctagggcaagacctcatcactctattaaagagctctgtgaccctattgatttgaagtatttaaagcaggggtgaagttcaaagcaatttcttttctatactattactcagtctctctgtgtcttggctctaaaacatctgctgtcagttcctttctgttgtctgactctggaatctgtcactggagaacagagtagttttatttaaaataaattggattccttttcagttttcagcatttcacattgtgatcaatggtttatgctccttcatctgccgggagacttaactgcaagt

SEQ ID NO: 670390 - DNA, 650 bp, Homo sapiens
atagcacatagaatagttatcacatgatgggtatttgatgaattggctcatctgttctataaaacaggggtcctcaactcccaggctgtggacctgtaccagtccttggcctgttaggaaccaggctgcacagcaggaggtgagcgagcattactgcctgagctctgccttctgtcagatcagcatcagcattaggttctcataggagcaygaacactattgtgaactgtgcatgtgagggatctaggttgagtgttcctatgagactctaatgcctgaagatatgaggtggaacagtttcatctcaaaatcattgcccgaaccaccaccaccacccaccccatctgtggaaaaattgttttccatgaaatcagtctctggtgccaaaaagattggggaccaaagctataaaatatgaattccactcattcttataatttctaaattgaactttccagaatgctctgtttaagacaaacaacccaaaagcactttaaacttctacagctaaatgcaagaattattatccctttgagctactctaaacgttaatctctactaaacactaattcatagtttaattacaccagatagacattctttaaaacttgactactttgagcttagtttcagagtaatgtagagaatgc

SEQ ID NO: 670391 - DNA, 650 bp, Homo sapiens
atagcacatagaatagttatcacatgatgggtatttgatgaattggctcatctgttctataaaacaggggtcctcaactcccaggctgtggacctgtaccagtccttggcctgttaggaaccaggctgcacagcaggaggtgagcgagcattactgcctgagctctgccttctgtcagatcagcatcagcattaggttctcataggagcacgaacactattgtgaactgtgcatgtgagggatctaggttgagtgttcctatgagactctaatgcctgaagatatgaggtggaacagtttcatctcaaaatcattgcccgmaccaccaccaccacccaccccatctgtggaaaaattgttttccatgaaatcagtctctggtgccaaaaagattggggaccaaagctataaaatatgaattccactcattcttataatttctaaattgaactttccagaatgctctgtttaagacaaacaacccaaaagcactttaaacttctacagctaaatgcaagaattattatccctttgagctactctaaacgttaatctctactaaacactaattcatagtttaattacaccagatagacattctttaaaacttgactactttgagcttagtttcagagtaatgtagagaatgc

SEQ ID NO: 670392 - DNA, 650 bp, Homo sapiens
atagcacatagaatagttatcacatgatgggtatttgatgaattggctcatctgttctataaaacaggggtcctcaactcccaggctgtggacctgtaccagtccttggcctgttaggaaccaggctgcacagcaggaggtgagcgagcattactgcctgagctctgccttctgtcagatcagcatcagcattaggttctcataggagcacgaacactattgtgaactgtgcatgtgagggatctaggttgagtgttcctatgagactctaatgcctgaagatatgaggtggaacagtttcatctcaaaatcattgcccgaaccaccaccaccacccaccccatctgtggaaaaattgttttccatgaaatcagtctctggtgccaaaaagattggggaccaaagctataaaatatgaattccactcattcttataatttctaaattgaactttccagaatgctctgtttaagacaaacaacccaaaagcactttaaacttctacagctaaatgcaagaattattatmcctttgagctactctaaacgttaatctctactaaacactaattcatagtttaattacaccagatagacattctttaaaacttgactactttgagcttagtttcagagtaatgtagagaatgc

SEQ ID NO: 670393 - DNA, 632 bp, Homo sapiens
aatatacatcatccatgcttttcagggtttagggtcaaatgtgtcatgatgtatcaaaacattaataatggttatctttgtagactgagattgtgcaaaatcaattatatagctctcttacatttgtaataaaacatgtaatacacatgactaccagagagggaatatatgttatcaagacatagtcttcagcttcccttcaagatatcaaaataaaatgtgtaggatttatttagtgcttttatttgcaaaatttagaattttcttcttttttggaagaaagaaataactatatgaaaatgaaaaaagaaaaagacataacaatactaatatgaattttgatcatgtgaataaataactttgtaattatctaggtctagatttatttcattttcattctgtgtgaagtgaagtagcaaatgaamagggaaattttatgtaaattataactacaaacatgtaaaagtcccagtgtgggagtacatatcttggaaagaaaatgtgtgaacacacacacacacatgcatgcagacacaagcctttatacagcattctcaaagagaatcaagactctatttgattaagaaatactgaggaaatacagaatatcaaatggggtatatatatatata

SEQ ID NO: 670394 - DNA, 652 bp, Homo sapiens
ttgctctgtcacccaggctggagtgcagtggygcgatctcagctcactgcaagctccgccttctgggttcatgccattctcctacctcggcctcccaagtagctaggactacaggcacccgccaccacacccagttaatttttttgtatttttagtagagacggggtttcaccatgttagccaggatggtctcgatctcctgaccttgtgatccgcccacctcggcctcccaaagtgctgggattacaggcatgagccaccgcacccggccatgttatgacttttattcttataccttgactcattctaatttggctctgctttgaacttttccattttaagatctctctgtgggcgcttcttgctctgtaaatttaaaacagtctgtgtcaaaaacagtctcactctgacctgaccagcttagatgactagctcaagaatagtcaagcttgcttgggctccatgaagtcccccagagcggaaaagcccttgaaattctagggaatgatctttgaggtcatgggagcaggatctctccaccaaggtcaccaatgccagatgcccttggggtgtccatagctgtgagaagtcaggcaaaccccaggacacattgatatggactgctaaacatgcctacagcctcctacctgct

SEQ ID NO: 670395 - DNA, 1222 bp, Homo sapiens
gcaggctaaggcctgctgatggtgctgtattccgtgggctcctcagggcccctgccggggaggtggctactgaggtggcccatgttgcagtaggtcggttcctgatcctcagcacccaaggtcagagatgcataggaaatgtcctccttcggcaaggaagcctgcagcaaaggcgggctccaggtcagagaggacggcaggaagtgacggtcacggggcagaggagccctcggaggaggatagtggggatggaccattcagggcttctaatcccactcaagccctccagcttcccccttcactctgccaagcaccctgagcttcaaccacaacagaacagattctcccccaaccctgcaccagtgcagcacatttcctgtggaatcccaagtcactcagcctgtctgggactctgctgcccacgtggggactgtgtttgccagtccctgtgtccccaggactgagacttgcctgtgggagctcctaggcgagtcctgcagtgactatggctttgccccacacctgcctcctctatgcccacatgagcaggagaaagcccaccctccaacggggtgcaacggcaggcctgtgtccccctgccccagcctcacagcagcccccatggaggacgcaccatggtgacatattccacttccacctggtcaacctgggcagaggaaagcttcgtggtagcctttygcggggaggttccggccagctgcagggtcaggtctgcatagcagaggtcgccctccaggggctgcagtacctgggacagggaacacaggctggggagtcacaagatctgtctgtggacacaggttccttttccacggtgggacgggacgagagcctctccacttccccaggtgcccctctcccatttccctccgtgtcctccacttctcaggctcctgtacccctcagcccttgtccccctggctgtttccaggccctcagcccccaggccctgcagggtgccatgaggacaggatactttggcacaggacttctctgatattttggaccttctgagagatggaaaatgaggaaggggaaagaagctgcctggtctctctggtccgaccttgggggctatcttacctgctctggggacatcccggctgctaaaagacaaacaacaattcagaattagaaagcccattccccagactcacaagaacccccaggtctagggaagagaaatatggaagaaaagagg

SEQ ID NO: 670396 - DNA, 976 bp, Homo sapiens
tggggcctgtctgacagccacccccagtcaccagcgctgagagtgaggccgccttagaccacccagccccagtccatgtgagtgatccatggagcaatcccaggagaatctggcagaactgcccaacagagcctgagccaggttgctgacctacagaactgtgagcaaggtattggtttgttgttttaagccactatgttttcgggtggtttcctttttctttccttctattttttttttttagagacagtgttttgctctgctgcctaggccagagtgcaatggtgcaatccatcatagctcactgcagccctgaattcctgagctcaagagatcatcctgcctcagcctcccaagtagccaggactacaagtgcttgctaccacacccggctaacttaacaaaatttctttggtagaaacagggtcttactggagtgtccatgctggtcttgaactcctgggctcaaggaatcctcctgcmtcggcctcccaaagtatggggattatagatgtgagctaccgtggtttccttacacagtcacttcaatacctcatagatgctacttaataaaatattaaataatagctcacattcattgagcatttactataagctagggacttgttctgaaaaattacatgggccagacacggtggctcacgcctgtaatcccagcactttgggaggccaaggcgggcggatcatgaggtcaggagattgagaccatcctggctaacatggtgaaaccccgtctctactaaaaatacaaaaaattagccaggtgtggtggtgggcgcctgtagtcccagctactccggaggctgaggcagaagaatggcatgaacctgggaagcagagcttgcagtgagccgagatcatgccactgcactcaagcctgggtgacagaacgagactccatttcaaaaaaaaaaaaaaagaaaaattacatggatttactaatttaattttcata

SEQ ID NO: 670397 - DNA, 591 bp, Homo sapiens
tgtaatataaagaaagcaaacaacactcccccagccctcttttgacatttcatagccttgaaaagcttaaactctgaaacacactaaatgcagtgtttcttataccatgcaaacatctcttgtcagagatagcatccctgagattagccagctgtattgatttagatgcctcagggttgttaattgtagtgaggactgttatgtctctatggcttctgaaagaggttatggctactgcaaatacatcttaaagaaggaaagaatactatcagccaagatgtgcagtccaagctttggaactaggctggcaaaaccctactcacatccctgtaaagcagacatatatttttgtattttttataggtggatacagtgcagaccatgaacccctctgrccacattgaggaatcgtgtaaaatgaatgtatgtgctcgtaagtgaaatatatgcagtgttccaactcaatatgttggatcctaatagacctggatttgtcttgtgtaaaaagaaatcgattcccaaggggcaggatcactaactgattaaaatgaagctttgagtttgaagaaaacaaaaaaggctttaaaataa

SEQ ID NO: 670398 - DNA, 665 bp, Homo sapiens
tttggagaatctccttttatttttgaagagtttgaaaaaaatcataaaatataatcaaagttactttaagtcaagctttgtcatattttcattttaaattttgggggtatgtttccaatcaatatagcatataattttaatatgcacattgtatgaaaagcattgaaaatcttatacttcaaaatagatcataagtcttaaaatgcttgattacaaggcaatatggttttctcaacagaacaaaaaaaagattatttgcttctcttttgctcttttgtrttataagtgcagcgtgatgtattagtttaattaaagtctaccaaattatcataaggattttatgtgctacaaataattggctttttgttctctgctcactttttgttaatggaagcagaattttttttaatgatacttagtatataagacaacagaacactacagggaagaaaggcaaatgaggtgtctaatgaagtgacctttggcatcttggactggaaataaaatgaagactgcactaatgcaatgaaaaagtcaatgtttccaaagggttaaaaggatagatcatattatggctcaaagccaaactacacctagaatcctaccatatataaaaatggcaatcctattaatatgaaaagatgataggctctaaaatttagtaa

SEQ ID NO: 670399 - DNA, 725 bp, Homo sapiens
catcatcccccaaagatccctcatgcctttttcaccttattatttttaagagttaggactgggcgaggtggctcatgcctgtaatcccagcactttgggaggccgaggcgggtggatcatgaggtcaggagatcgagaccatcctggctaacacggtgaaaccctgtctctactaaaaatacaaaaaattagccgggcatggtggtgggcgcctgtaatcccggctactctggaggctgaggcaggagaatggcgtgaacccaggaggcagagcttgcagtgatccgagatcatgctcctgcactccagcctgagcgacagtgcgagactccgtctaaaaaaaaaaaaaaaattagctggaatggttatgccattcatttagccatcaaattgatggatgtcagttgtttctaattgtgggttaatgagcwtcgttatgcgtatattttccagtactagtatgattagttccttagaacaaaaagctagaattgctgggtcaaaggcaatgtgtattttaaatattgaaggatattgccaaatagccttccaaaaagttcatacgaacttatactcaccaacaatggataactgtgcttttaggcagttgaaatcttatgcaatggaagcacgtgtaactcttcagtatacctctagggaattccaaagcagtttcaaaaatcatgaaaaagtttgttgagaaacttttcaaaacaaaaaccact

SEQ ID NO: 670400 - DNA, 602 bp, Homo sapiens
gcgagccaccatgcccggccacaggtttcaaagtttttaacgtataaagagttgctgattttaacatcatattttggtcacgtttaagatgttctacagatatttttgcttcaaagcttcaaactccagctatgcctgggtctcattctatccccagaaattgacaatgcttccctacccttagggctgccccgtccccgtcccactcggtcccatttaataaatawacctcacctcccttcgccacctgctggacgcgaggggctactacgatgccatgggtgtcctgattttttatttctcagacaggactgctccgtgtgtgtctttggattctacgtagatttatatttgtaaaatattacatttgtcatgaccagaagaaatgtcattatcgtaaaatttagattctggagtctatatatgaaagcaatactaactactaactgttataacaacaaaatgtgggatgtatatctacagaccacagccagcttgccagttcattcaagaatcgaaccctggatttagcagtttctgcacaaagggaatgaaatatttttaattgataattcagtcaaaaatattaatgaagatccata

SEQ ID NO: 670401 - DNA, 602 bp, Homo sapiens
gcgagccaccatgcccggccacaggtttcaaagtttttaacgtataaagagttgctgattttaacatcatattttggtcacgtttaagatgttctacagatatttttgcttcaaagcttcaaactccagctatgcctgggtctcattctatccccagaaattgacaatgcttccctacccttagggctgccccgtccccgtcccactcggtcccatttaataaataaacctcacctcccttcgccacctgctggacgcgaggggctactacgatgccatgggtgtcctgattttttatttctcagacaggactgctcygtgtgtgtctttggattctacgtagatttatatttgtaaaatattacatttgtcatgaccagaagaaatgtcattatcgtaaaatttagattctggagtctatatatgaaagcaatactaactactaactgttataacaacaaaatgtgggatgtatatctacagaccacagccagcttgccagttcattcaagaatcgaaccctggatttagcagtttctgcacaaagggaatgaaatatttttaattgataattcagtcaaaaatattaatgaagatccata

SEQ ID NO: 670402 - DNA, 602 bp, Homo sapiens
gcgagccaccatgcccggccacaggtttcaaagtttttaacgtataaagagttgctgattttaacatcatattttggtcacgtttaagatgttctacagatatttttgcttcaaagcttcaaactccagctatgcctgggtctcattctatccccagaaattgacaatgcttccctacccttagggctgccccgtccccgtcccactcggtcccatttaataaataaacctcacctcccttcgccacctgctggacgcgaggggctactacgatgccatgggtgtcctgattttttatttctcagacaggactgctccgtgtgtgtctttggattctacgtagatttatatttgtaaaatattacatttgtcatgaccagaagaaatgtcattatcgtaaaatttagattctggagtctatatatgaaagcaatactaactactaactgttataacaacaaaatgtgggatgtatatctacagaccacagccascttgccagttcattcaagaatcgaaccctggatttagcagtttctgcacaaagggaatgaaatatttttaattgataattcagtcaaaaatattaatgaagatccata

SEQ ID NO: 670403 - DNA, 689 bp, Homo sapiens
ttctaatcagtccagaggattgagtttctgctgcctggtccatggaatctgggactttatcttcaaatgaccttccagatctgggaggtgtcatgttgtgaggtgcaaatacggttggttttggtatttttgcaaaaactttctcttcttgggtttttctttatttgtgggaatgttacttggccatctggsacttttcaaaggtgaatatctccgggctgtgttcctctgacactctttgaactattatggcttattaaaaagttaccgcttaaaagtttctattccttttcctaaaacatctgttttcaataactcaggcttccttcggaaatttgaaattctatgattttaggctttccaaaaataggttcgctgcagctgcctttcagactcatggcagccttcttcaggatgtaggcttatttcaaagaaacaatcttcacactgctttggtcatttctgccctttgaatggatattttcttaatgtatattctcgttggggtcatggcacagatggaaaaattcctttatgattacaaagcattcccagccagccaaacatagttaatagatgctcatggctacatacttctataggttactatttctaatatagagaaatccttgtcctcatttcacatagctcgcaattcagaggaaaatgaaggatacagatggacttta

SEQ ID NO: 670404 - DNA, 689 bp, Homo sapiens
ttctaatcagtccagaggattgagtttctgctgcctggtccatggaatctgggactttatcttcaaatgaccttccagatctgggaggtgtcatgttgtgaggtgcaaatacggttggttttggtatttttgcaaaaactttctcttcttgggtttttctttatttgtgggaatgttacttggccatctgggacttttcaaaggtgaatatctccgggctgtgttcctctgacactctttgaactattatggcttattaaaaagttaccgcttaaaagtttctattccttttcctaaaacatctgttttcaataactcaggcttccttcggaaatttgaaattctatgattttaggctttccaaaaataggttcgctgcagctgcctttcagactcatggcagccttcttcaggatgtaggcttatttcaaagaaacaatcttcacactgctttggtcatttctgccctttgaatggatattttcttaatgtatattctcgttggggtcatggcacagatggaaaaattcctttatgattacaaagcattcccagccagccaaacatagttaatagatgctcatggctacatacttstataggttactatttctaatatagagaaatccttgtcctcatttcacatagctcgcaattcagaggaaaatgaaggatacagatggacttta

SEQ ID NO: 670405 - DNA, 650 bp, Homo sapiens
attcccctgaccccaccaatgaacagcccctcatcctccatgatcctcttaaaaaccccagaattcctcagagagatggatttggaggtctccttccatctccctgcttggggtcctgccatcgctaaactgtctgtcctgcaaattctgctgtctcagtgcattggtctgttactctgcagggggcacaggaacctgttggttccgtaacagcagagcctgcctttgcagcccttccttgctcagccaccagatgtaggccacccaggaagtcgtgaccttgggcagggtggctctctgccactgaggctcaccttcaggagctggtggctgaaggcacacacggtcacattccccctagttgggcagcaaagccttccttgaatgagagtcctttccacagctccatgtccaccacaactgtgttctcccttccagaattactctaacaaagtcctccaagaacatctgtttcccttccatggtttgttttctttgcccaaagaatcagggggccatgtttagcttaggttcaaaggacccttctccctcccactggaggttcgtaatcctaatgccagcccaagccagtggaggagagtcttaggtttaataaaatcagggggtttcagtattwgagtgttttaatc

SEQ ID NO: 670406 - DNA, 598 bp, Homo sapiens
ctgtcaattgaacagagacagatgggagggtgggtgggtgggggagggagatggccctttatcccttcctttacttccaaccacagccttagactaaagtagatttttggatatagattcttccccctactaggtggggcaggtcctgaaataaagacaaggtggattggggggtgagggcatctgtttccctgctttctaaacacttcagaacaggaataaatttaatcccaaggtttgctaaccatggtagataaaatattttttaaatgaactcatgaatttattttaaagtatatttggagaaaaattaacttgcytataaagccctcaattttgcaaatactagaatgaagccaaaagagacatttatatttttaaaagtaaaatagatacgtgaaagttaaaagaaggcaaaagcatgcagaaataactataaatattgaagctagagtatgaatggctgaagtctgagaaactatgatttaggatatagcacagttaagccaagtaatcatgcttgataaaaaataattggtgaatggatgagtaaattaatggttggttgagtgagtgtgtagataaattaggagtgttg

SEQ ID NO: 670407 - DNA, 598 bp, Homo sapiens
ctgtcaattgaacagagacagatgggagggtgggtgggtgggggagggagatggccctttatcccttcctttacttccaaccacagccttagactaaagtagatttttggatatagattcttccccctactaggtggggcaggtcctgaaataaagacaaggtggattggggggtgagggcatctgtttccctgctttctaaacacttcagaacaggaataaatttaatcccaaggtttgctaaccatggtagataaaatattttttaaatgaactcatgaatttattttaaagtatatttggagaaaaattaacttgcttataaagccctcaattttgcaaatactagaatgaagccaaaagagacatttatatttttaaaagtaaaatagatacgtgaaagttaaaagaaggcaaaagcatgcagaaataactataaatattgaasctagagtatgaatggctgaagtctgagaaactatgatttaggatatagcacagttaagccaagtaatcatgcttgataaaaaataattggtgaatggatgagtaaattaatggttggttgagtgagtgtgtagataaattaggagtgttg

SEQ ID NO: 670408 - DNA, 598 bp, Homo sapiens
ctgtcaattgaacagagacagatgggagggtgggtgggtgggggagggagatggccctttatcccttcctttacttccaaccacagccttagactaaagtagatttttggatatagattcttccccctactaggtggggcaggtcctgaaataaagacaaggtggattggggggtgagggcatctgtttccctgctttctaaacacttcagaacaggaataaatttaatcccaaggtttgctaaccatggtagataaaatattttttaaatgaactcatgaatttattttaaagtatatttggagaaaaattaacttgcttataaagccctcaattttgcaaatactagaatgaagccaaaagagacatttatatttttaaaagtaaaatagatacgtgaaagttaaaagaaggcaaaagcatgcagaaataactataaatattgaagctagagtatgaatggytgaagtctgagaaactatgatttaggatatagcacagttaagccaagtaatcatgcttgataaaaaataattggtgaatggatgagtaaattaatggttggttgagtgagtgtgtagataaattaggagtgttg

SEQ ID NO: 670409 - DNA, 642 bp, Homo sapiens
taactcaaaatggcagaattttcttcagctgttttaaaagcacccagccttgacctgagatggagaggtagacattccaattccaagagggtggttgcttgctaaaagtggcagagcctcagcaattgtgaaattgctttttcacctgtacttggtgtcattacaaatgattccatgtgtggagactcagattcactcagaaccattctacctcctttacaaagcactccaaatatgggaaaaggaagaaaaaaagggagaaaactactcatggctcttgctgagaaacgtgatggccaactgttgtaggaaaagtataaattttggagtcagacaggtttrgatgagaaacacaatggaccacattcacacttccatggctttagtaattcacttaaatttgccaagcctctgtttcctcatctgtaaaatggtgatacaggttgagcatgctcattggagcatttcaaatttcagatttttggattagagatgctcaaccggtaagtataatgcaagtattccaaaatatggaaaaatctgagctctgaaacatttctggtcccaagtatttcataagacatactcagcctgtaataatacctactcttttcagggttgagaattaaataaagaatgtgc

SEQ ID NO: 670410 - DNA, 650 bp, Homo sapiens
tcagaaacaattgcatctttaagaaaggatgaagaaaattctcctgcatgctcccaagtgggtgtgccaggtgtaattgttatgcaagaggggacttttcaaatcagcagctaaaccagagctcagaacagcctggaaagaagcaacccatygtcaggtggctggcaagcctcccttttggaagcatgcatattcctccccagaaaggaaatgcaccttatttgtatccagtagtgcatagatctttttaaaaaatgtatgtatagaattctgttttttttttttcctgcctacaatttatcaaccccatctttagtaaaagtactccaactgtctctaggaaatccctttcctcatactagcacgatgtgattttgcaagaaatggggcacagtcctggcttctggaacaccccatcctcttgactccatgaatgcttatagggatgtaacagagaccaagacaattgattcaatcaaacttaaccctagtactgtaccttgaaaaactaagaaataaggtattccaattctgaacttaaaactgaatctaagactgaactcatttgcaaccatcctgacatcccattaggacaatcatctaagaatggagctaacaaagaacaaaaggcagtcaagagataaaggcag

SEQ ID NO: 670411 - DNA, 422 bp, Homo sapiens
tctaacccagataagccatcctgatgagaacacttataatgtttcaaataaaaggacattgattagttcactgattccaactcatccttcaggtcccagactaaatattcctcagggtagcctctctaacccttccagaatagcttacttccccatattacaaaacttcacaggaccatttaatattcctttataggattttgtctaattccaactaatcattttttgtggttgtctttttcaccaatgtatctccatcacctggcacaatgcctggaacrtagtggatgctcactaaatattgttaatgtgtaaataaaataatgaatgaatgaataggtgagcctcataaacagcctgttacttttttcattgttggaagatattttttttttcttctctaagaagttttctcttacagt

SEQ ID NO: 670412 - DNA, 2138 bp, Homo sapiens
  misc_feature 374: n = A,T,C or G
tgtgtatgttcactgcagcactattcacagtagcaaagacatggaatcaacccaaatgcccattaatgatagactggataaataaaatatggtacatatataccatagaatactatgaagccataaaaaggaaagagatcatgtcctttgcagggacatggatggaattggaagccattattctcagcaaactaatgcaggaacagaaaaccaaacactgcatgttctcacttataaatgggaactgagcaatgagaacacatgaacacagggaagggaataacacacactggggcctgtcagtgggtggggtagtgggagggagagcattaggaaaaataactaacaacctgggtgatgggttaattacctangtgatggtattttaattatttttatataaccaaaaataataagtagtctcagtttgcaatgaactgttattctttccatgtatcagaaattcaataaaatcaaatcagtaaagaccacttatgagctgtgggagaggctttaatattttacaaggtcagtacctaggcgatgggttgataggtgcagcaaaccatcatggcacatgtttacrtatgtaacaaacctggacatcctgcacatgtaccccagaacttaaaataaaattttaaattaaaaaaaaagaaagaaaagacgtgtagagagaatatcaaatctcaaagtatttgtactcaatggaagaaagacagcataatgatgagtctggccacatttttgatgattgattgcttacagctttcaagtctcaccctcctccctctttctcttctatgtcacaccttggcaaactgataaagccctggtgctccctcccttcacattagtggaaagttcaaccatgaaagtccctgcctaagaacccataccccagccccacacaaaccacaataaactttaaagccaattgctcctacttcctcaagtcatttttggaatggcttgagagcctgccctgctctccccagaaagccttattaagtgaataatgaatctttgcataacctcctgctatgtgtgtgtggcattattagtctcaacatctgaactaaatttttgatagagggtccattcttcagtgaggtaaacccaacagaaagagaaaaagagagagacagagagagtttcacataacattttagtcaccctagggcataaatctgctttatttcttgacctaagatgcatgtgcaattgcttgttattccttatcataaatgctattttatctatattagaattaaagggtttctgtgtttctgttcttggcaatcaaatgatccctgattatgacacatgatgactccttttttatcatggcccgcagaccttgtaaaatattaatgcctcttccacagctcataagtggcctttactgatttgatgttattgaatttctgatatactcaaagaataacagttcatcgtaaacagaatctacttattctttttggttatatacaaataataattaaaagaaagaagaaaaaaatatttgctcaagctgtagataaagcaaagttagagaatatctaactcatacatttctagggcaaggagtatgaaaaatgtagagactatatccttggaactgaaatggttctaccctcctggggaaacacactagagtcattccttttggctgtcagagttgctgttaattttgtctgcaattgccagcaaagtgtaagaagatgtatgaggatgaattattgatttccacttggattctgattgaagtagttttgcagcttatttccaagtaactcttttcatcttcatggcaataaatacaaacatcagtttaatttatctctttgagttagcaccttttatgacaaattgtatttgtaaaactaatcattctctcattataatcagcaaatgaagaactagagttgagcaaattcttctaacacaccaaaattttgaaatagcaactttcagtaaaaaaaaaaaaaaaaaaaaattaaagaaagtgaacatagagtatagaaggttttcaatacaataaatcttgcagcttaaaaaacaggaagtgtcctgtggaaaatattgttgatggtgattgaggaatatgttccttcactcaaactagattttctgga

SEQ ID NO: 670413 - DNA, 2138 bp, Homo sapiens
  misc_feature 374: n = A,T,C or G
tgtgtatgttcactgcagcactattcacagtagcaaagacatggaatcaacccaaatgcccattaatgatagactggataaataaaatatggtacatatataccatagaatactatgaagccataaaaaggaaagagatcatgtcctttgcagggacatggatggaattggaagccattattctcagcaaactaatgcaggaacagaaaaccaaacactgcatgttctcacttataaatgggaactgagcaatgagaacacatgaacacagggaagggaataacacacactggggcctgtcagtgggtggggtagtgggagggagagcattaggaaaaataactaacaacctgggtgatgggttaattacctangtgatggtattttaattatttttatataaccaaaaataataagtagtctcagtttgcaatgaactgttattctttccatgtatcagaaattcaataaaatcaaatcagtaaagaccacttatgagctgtgggagaggctttaatattttacaaggtcagtacctaggcgatgggttgataggtgcagcaaaccatcatggcacatgtttacatatgtaacaaacctggacatcctgcacatgtaccccagaacttaaaataaaattttaaattaaaaaaaaagaaagaaaagacgtgtagagagaatatcaaatctcaaagtatttgtactcaatggaagaaagasagcataatgatgagtctggccacatttttgatgattgattgcttacagctttcaagtctcaccctcctccctctttctcttctatgtcacaccttggcaaactgataaagccctggtgctccctcccttcacattagtggaaagttcaaccatgaaagtccctgcctaagaacccataccccagccccacacaaaccacaataaactttaaagccaattgctcctacttcctcaagtcatttttggaatggcttgagagcctgccctgctctccccagaaagccttattaagtgaataatgaatctttgcataacctcctgctatgtgtgtgtggcattattagtctcaacatctgaactaaatttttgatagagggtccattcttcagtgaggtaaacccaacagaaagagaaaaagagagagacagagagagtttcacataacattttagtcaccctagggcataaatctgctttatttcttgacctaagatgcatgtgcaattgcttgttattccttatcataaatgctattttatctatattagaattaaagggtttctgtgtttctgttcttggcaatcaaatgatccctgattatgacacatgatgactccttttttatcatggcccgcagaccttgtaaaatattaatgcctcttccacagctcataagtggcctttactgatttgatgttattgaatttctgatatactcaaagaataacagttcatcgtaaacagaatctacttattctttttggttatatacaaataataattaaaagaaagaagaaaaaaatatttgctcaagctgtagataaagcaaagttagagaatatctaactcatacatttctagggcaaggagtatgaaaaatgtagagactatatccttggaactgaaatggttctaccctcctggggaaacacactagagtcattccttttggctgtcagagttgctgttaattttgtctgcaattgccagcaaagtgtaagaagatgtatgaggatgaattattgatttccacttggattctgattgaagtagttttgcagcttatttccaagtaactcttttcatcttcatggcaataaatacaaacatcagtttaatttatctctttgagttagcaccttttatgacaaattgtatttgtaaaactaatcattctctcattataatcagcaaatgaagaactagagttgagcaaattcttctaacacaccaaaattttgaaatagcaactttcagtaaaaaaaaaaaaaaaaaaaaattaaagaaagtgaacatagagtatagaaggttttcaatacaataaatcttgcagcttaaaaaacaggaagtgtcctgtggaaaatattgttgatggtgattgaggaatatgttccttcactcaaactagattttctgga

SEQ ID NO: 670414 - DNA, 1266 bp, Homo sapiens
gaaatcagacatcctggggtccataacccagctctgcctcataccatctagtgtatcggggaaaacgattctgtattcagttttctcaagagtaaaagaagtatcagtatgcctgccttcatggtcataaacatagaaattataggcactggggactccaaaagagaagagtgtgagagtgcttggggtggtggtgagggtggaaaaattatctcttagatataattatctatttaggtgatgggtaccctagaagcctaaacctcactattacacaatctatccacatgacaagcctgtacatgtatcccttgaatctgaaatataataaaagaaagaatgtctgccttatagagtcatgtgcgggataaagataatgtacattacgaattttgtgatatatatacttattatttgattcaattctaatttcacctgcctcccgaaatgtaaaacaaaggcaattatgaagatgattttataatataatttatatattctctttccactctagaaaaagcattttctagaaataaatacattttgtaaaattaaatatttattttttgattttttaaattgtaaaagtaagttttatataatatcaggcagtatatttttatcactatatatgaaaacaaactatcaatgaaatactctagcaaattacacaatttttaacagtaaactcagtaaaacatggctttctcagaagaaataaagaagtcacacatatrtatagctgaaattgaagttctaaatagtaagatgaatctcaagcagtctggtatttcatttcacttaagatctttctccttataattggcacctaaggtgttagatttaaaacccacttctggtgtgaatataagtcagagataggctgtcagtaattgggctggggaaaaaaaggaaagaaatgtgcaaactaatgtgtaaaataacaattttattatttcttaagaaaagacatagaaattgatgggtgttcttaatttttcaaaggacagtattacagtctctgtgaaataaaataagggccatttgcttattaaagatgttttcaaaataataaaccatttgaaaaccacttaaaattgttgggtttttttttttgtgatttcctctgcagcaaataacattctcaaataaatttgctgattattatcaggttaaagcatgatttttgcttttcttctacttgtcacacacacatacactttcccttcttttacagtatgaaataatcatatgtcattattttat

SEQ ID NO: 670415 - DNA, 1266 bp, Homo sapiens
gaaatcagacatcctggggtccataacccagctctgcctcataccatctagtgtatcggggaaaacgattctgtattcagttttctcaagagtaaaagaagtatcagtatgcctgccttcatggtcataaacatagaaattataggcactggggactccaaaagagaagagtgtgagagtgcttggggtggtggtgagggtggaaaaattatctcttagatataattatctatttaggtgatgggtaccctagaagcctaaacctcactattacacaatctatccacatgacaagcctgtacatgtatcccttgaatctgaaatataataaaagaaagaatgtctgccttatagagtcatgtgcgggataaagataatgtacattacgaattttgtgatatatatacttattatttgattcaattctaatttcacctgcctcccgaaatgtaaaacaaaggcaattatgaagatgattttataatataatttatatattctctttccactctagaaaaagcattttctagaaataaatacattttgtaaaattaaatatttattttttgattttttaaattgtaaaagtaagttttatataatatcaggcagtatatttttatcactatatatgaaaacaaactatcaatgaaatactctagcaaattacacaatttttaacagtaaactcagtaaaacatggctttctcagaagaaataaagaagtcacacatatgtatagctgaaattgaagttctaaatagtaagatgaatctcaagcagtctggtatttcatttcacttaagatctttctccttataattggcacctaaggtgttagatttaaaacccacttctggtgtgaatataagtcagagataggctgtcagtaattgggctggggaaaaaaaggaaagaaatgtgcaaactaatgtgtaaaataacaattttattatttcttaagaaaagacatagaaattgatgggtgttcttaatttttcaaaggacagtattacagtckctgtgaaataaaataagggccatttgcttattaaagatgttttcaaaataataaaccatttgaaaaccacttaaaattgttgggtttttttttttgtgatttcctctgcagcaaataacattctcaaataaatttgctgattattatcaggttaaagcatgatttttgcttttcttctacttgtcacacacacatacactttcccttcttttacagtatgaaataatcatatgtcattattttat

SEQ ID NO: 670416 - DNA, 1440 bp, Homo sapiens
cagtaaaattgctcctttctgggcttaacacatgaagatattatgtttaaaatgtcttcttctcctttcgaaaattattctaacaagagatgtttcataattatgccagccagaatatttacctaaagtatattaaaatttatttttataaatacaaatgtacactagtaaattttaaagccatgcttttgggtttgctcacttttaagtataaattactttctattttatacagcatgtaaattgagttgcatcagtcaaaaccccaaggataaatcccttcatttctgcagacaaaagtctaatctacacccagtcatgttcaaatctctgcaattttagttctaagagcccaaactgacaargtgtctgcgtggcagaaaaagttataaataccatgatctctgttacagaatatcagattcttcatcttagtcattatcaagtgtggagtttgccttttgcggagaaaagggcagaatcagctatgttgtcaccaaatagcttgggagccagtacacacacacaaaaaaaattcagtatgattctcctgccaaaataaaatctaaggatcccttgggcccgctaaaggcttctctcgctaattcatgaaattcttccctggatttggggcatgatagattgtaatcactcattcagagagcagatggctcagcctactgctgaaagcaaactttgcaatgaagcatatagtatcagagagacatgttaaatttcattgtaaaggtaccttgccatcatgtatcatcagacaagtgagttctagtcacaatccctttgtgacctcagataaatcactactccctcagttctctatttcctgctctgtaaaatgagagggttggattagatgagctctgtccagcaataatatgggttcttcctgttgtggggttcactatatgctacaaccaagtgtgatcctaagtgtcttactcaaataaagaagtattttttctttagaaaaagtcaagttagaaattcaagaaatacttgaaaacacaaaaataaaggattacggtaggggaaaataaactataactttgaatagagaagtctaacctcaagctaaaatggatttctctaagtgaatttatgcttggctagaattcaaagattggatgtactgaatcattagcactctatacacttggctaaaaatatttttaaaacagctctttaaaggccttcaaataaaatttacggaatttttagtgaacaataatttcaatttgaataatgtacatgggaaaataattttaaaggtagaaatatgactcatgaaaaaaggcatttttatcacactagaaataaaccatttgcattattaatgcttcaggtaaattcatacaaaaataagctgaatagtcacagaggttttattccttccttttttttcccgaaagttaagatttcatt

SEQ ID NO: 670417 - DNA, 1440 bp, Homo sapiens
cagtaaaattgctcctttctgggcttaacacatgaagatattatgtttaaaatgtcttcttctcctttcgaaaattattctaacaagagatgtttcataattatgccagccagaatatttacctaaagtatattaaaatttatttttataaatacaaatgtacactagtaaattttaaagccatgcttttgggtttgctcacttttaagtataaattactttctattttatacagcatgtaaattgagttgcatcagtcaaaaccccaaggataaatcccttcatttctgcagacaaaagtctaatctacacccagtcatgttcaaatctctgcaattttagttctaagagcccaaactgacaaagtgtctgcgtggcagaaaaagttataaataccatgwtctctgttacagaatatcagattcttcatcttagtcattatcaagtgtggagtttgccttttgcggagaaaagggcagaatcagctatgttgtcaccaaatagcttgggagccagtacacacacacaaaaaaaattcagtatgattctcctgccaaaataaaatctaaggatcccttgggcccgctaaaggcttctctcgctaattcatgaaattcttccctggatttggggcatgatagattgtaatcactcattcagagagcagatggctcagcctactgctgaaagcaaactttgcaatgaagcatatagtatcagagagacatgttaaatttcattgtaaaggtaccttgccatcatgtatcatcagacaagtgagttctagtcacaatccctttgtgacctcagataaatcactactccctcagttctctatttcctgctctgtaaaatgagagggttggattagatgagctctgtccagcaataatatgggttcttcctgttgtggggttcactatatgctacaaccaagtgtgatcctaagtgtcttactcaaataaagaagtattttttctttagaaaaagtcaagttagaaattcaagaaatacttgaaaacacaaaaataaaggattacggtaggggaaaataaactataactttgaatagagaagtctaacctcaagctaaaatggatttctctaagtgaatttatgcttggctagaattcaaagattggatgtactgaatcattagcactctatacacttggctaaaaatatttttaaaacagctctttaaaggccttcaaataaaatttacggaatttttagtgaacaataatttcaatttgaataatgtacatgggaaaataattttaaaggtagaaatatgactcatgaaaaaaggcatttttatcacactagaaataaaccatttgcattattaatgcttcaggtaaattcatacaaaaataagctgaatagtcacagaggttttattccttccttttttttcccgaaagttaagatttcatt

SEQ ID NO: 670418 - DNA, 1440 bp, Homo sapiens
cagtaaaattgctcctttctgggcttaacacatgaagatattatgtttaaaatgtcttcttctcctttcgaaaattattctaacaagagatgtttcataattatgccagccagaatatttacctaaagtatattaaaatttatttttataaatacaaatgtacactagtaaattttaaagccatgcttttgggtttgctcacttttaagtataaattactttctattttatacagcatgtaaattgagttgcatcagtcaaaaccccaaggataaatcccttcatttctgcagacaaaagtctaatctacacccagtcatgttcaaatctctgcaattttagttctaagagcccaaactgacaaagtgtctgcgtggcagaaaaagttataaataccatgatctctgttacagaatatcagattcttcatcttagtcattatcaagtgtggagtttgccttttgcggagaaaagggcagaatcagctatgttgtcaccaaatagcttgggagccagtacacacacacamaaaaaattcagtatgattctcctgccaaaataaaatctaaggatcccttgggcccgctaaaggcttctctcgctaattcatgaaattcttccctggatttggggcatgatagattgtaatcactcattcagagagcagatggctcagcctactgctgaaagcaaactttgcaatgaagcatatagtatcagagagacatgttaaatttcattgtaaaggtaccttgccatcatgtatcatcagacaagtgagttctagtcacaatccctttgtgacctcagataaatcactactccctcagttctctatttcctgctctgtaaaatgagagggttggattagatgagctctgtccagcaataatatgggttcttcctgttgtggggttcactatatgctacaaccaagtgtgatcctaagtgtcttactcaaataaagaagtattttttctttagaaaaagtcaagttagaaattcaagaaatacttgaaaacacaaaaataaaggattacggtaggggaaaataaactataactttgaatagagaagtctaacctcaagctaaaatggatttctctaagtgaatttatgcttggctagaattcaaagattggatgtactgaatcattagcactctatacacttggctaaaaatatttttaaaacagctctttaaaggccttcaaataaaatttacggaatttttagtgaacaataatttcaatttgaataatgtacatgggaaaataattttaaaggtagaaatatgactcatgaaaaaaggcatttttatcacactagaaataaaccatttgcattattaatgcttcaggtaaattcatacaaaaataagctgaatagtcacagaggttttattccttccttttttttcccgaaagttaagatttcatt

SEQ ID NO: 670419 - DNA, 1383 bp, Homo sapiens
ggtgtcagggagagaaggatgaaggcaccataaggttattatatataataactggcatataggatatagtacaggcacctcagtagacctattttcagttcgtsctgtggagcatgtgaaactattttaaatagaggcctttgggacttaagtaacttcaactctctgaatgaggtttaaggcaagcttgctgtgggctggatctatcctgtataatccctactgatttgggtgatgtataggtacccttccctgaaattcttccctgagaataattattgttgtcatctactacggaatcctgggcccactttcttccttcttcttgggggaggaaatctcccagacatcttgccaagcatttgcttaagtctttgaaccgctgcactagctaatttctccacctgaaacaatatacaaacccctcctcttctccacccgctaggttcttatgctggcagctcatatttttacaagaaaaagaagttagaatgtattgagcacctgctataagcctggcactttgctagtcactgtgtggcagatgactacatcagtcatgactgataaaacataacttctatccttgtaagtgccgcaggacttatttgtgactcttaacaacaggggttccaaaccttagtgtgcatcagaactgcctggggcttattaaaactcagattactggacctcatccctagaatttcttactcggcccgcaggtctgaggtggagcctgagagtgtgcatttctaacaagttcctagatgatgatgatgttgctcatccctggaccacactatgagaaccactgctttccatcaagcctgtgaaatagatattattcccatttatagatgaggagctgagatgtagagaggccaaatgacttgcctcagttcttgcacacagagccagagcccagatttgaagctgagaggcctcactccaaagcttctgctgtttccattatatcagggatggcaaaggcatagataccacctgtgcttccctcacttagtccacccccacgacaggcaatattaatcaatcacagcacctctgagcccagagatgtcctcggaatctttcacacactgctcctgacagccaaacctacccgtcagtgggagctgaagtttgcaatttctgtactaacctgtatggcctttctaaaatggagacattaccaaggaatcaatctattaacagctgaaaacaaaccttgtgtgagctccagtcttatctgcctaggagggaagagcgtggtagattgcaggctgtgtgaagcacagcactcccatggcgacctcacggatcataactagagtctacactcagcacacaggcaacacagggccgttacccttgaaaagtgtaaaa

SEQ ID NO: 670420 - DNA, 612 bp, Homo sapiens
tgaaaaagaacaaagttggataataatgctactggatatcaaaacttattttattggctgggcctggtggtgtgaccctgttgtcccagctactctgtaggctgacgtgagagaactgcttgagtccaggagttcaagactgtagcgcactatggtacctgtgaacagcccactgcactccggcctgggcaacatagtgagacccagtctcttcattaattaataacaataaatttcaaaacattattttaaaatgacaataattttgacagtgtggtattgtgtatggatcggtgaatagatcaaatagaaaagaaaaaaactatcattgttatcattattaaaaaactatcactagcccagaaattaacctactcatatgtggacacactgcatgacaaaggtaacaccgcaaagcaaagaggaaaggtcagtcttttcaataaatgsactaagtcaataagatattcatatgggaaaaaattattcttggctcctacctcacactaaatataaaatttccaggtcaattagagatcaaaatgagaaaaataaattagacttctagaagataacataagagaaagccttcatgacctcagtaggcaagac

SEQ ID NO: 670421 - DNA, 612 bp, Homo sapiens
tgaaaaagaacaaagttggataataatgctactggatatcaaaacttattttattggctgggcctggtggtgtgaccctgttgtcccagctactctgtaggctgacgtgagagaactgcttgagtccaggagttcaagactgtagcgcactatggtacctgtgaacagcccactgcactccggcctgggcaacatagtgagacccagtctcttcattaattaataacaataaatttcaaaacattattttaaaatgacaataattttgacagtgtggtattgtgtatggatcggtgaatagatcaaatagaaaagaaaaaaactatcattgttatcattattaaaaaactatcactagcccagaaattaacctactcatatgtggacacactgcatgacaaaggtaacaccgcaaagcaaagaggaaaggtcagtcttttcaataaatgcactaagtcaataagatatycatatgggaaaaaattattcttggctcctacctcacactaaatataaaatttccaggtcaattagagatcaaaatgagaaaaataaattagacttctagaagataacataagagaaagccttcatgacctcagtaggcaagac

SEQ ID NO: 670422 - DNA, 1813 bp, Homo sapiens
aatcataaaatctccattcatcatatttaatttctgtataatagggttttttcaacctcagcattattgacattttgggaggctgtcctatacactgcagtatccttggtcactcctcatcaagtgccaatagaactcaccctccccccaggttgggacaaccaaaaatgtcttcagacattgttgaatgtctcttggggggcaaaatcatccttcacggagaaccattactgtatagtactcctttgatttgacaccatagttttttttttttaacaagtcccctatttaagttacttcgaatttattgctgttacaaatgatgcagaactaaaagttctaggtatacacctttttataattcaaaattgttctcttgagaataaattcaatatggtcaaggggtagaaacacttttgtggattttgacactcattactaatttgcttttcaaaagaatcccacccatcttagtgtgaggaacaatgaaagaatgtaatagtttccctgccatcttgccagtgcatcatctaatatgttgtaatttcagcatcatgtggtgaaaggaatctagaatttgaagtcaaactggcctggatcaaaaagccacataagcactgatagcacgttggcctcaggtagttactttatctctcagctctgatgtttgtaagagtgtttgaacgatctctaccttgcaaggtggttgtgcttaaaaaaaaactgttattaactgtcattatgcactgctgtcctggatattcaaaatacctctgtctgtaaggcaggcagtggaaaatataatttctgttttacaaaggccggagaggggaaggtatttatcagagtcacacaggagacgtgggcttccacagagcctggaggtttattgcgccagagagtttgtttcattctagccatctgtatatgcctctaccaggtgcctgccctgctggaggctgtgggggttgccagaggaaggggtagcagagattactgtctgacacatgaaattacaggagctccrtgcctggtactgttaaagattcccagattctagggattcttctctgtccttcactcccaggacctctgttgtcagcatgactggacagccctatgcctgacatatatcctgattccctttactctccccagtcagctcctaaccagtaccttgcttctgctgtcaccctccatagtccactctccacaaagcctcagccttaaacagtaaattagatcatgtcatgcctctccttgacccctataatgccttcccattgcacttagaataaatactaactacataccagagtcagcaacttaccccagtggctctcaaccttatgatgtagcgtcacctggaattttttttttttacaggttttaaaaaataaccttcactttttaaaagctaatgtgtgcattacaggaaactgaaaaccactagaagcaaagaacaaagccatccacaatcacaagcaatttagtttcacatgtccttctaagtcctgtttgtgtagatacaacatccaacttgatggacttgagatcatatgttatgtatcatgccttttcacacatcatgaatatttaccaattcaaaatcttaaagctatgtgagtattctgatactcagcaacacattacagcaacttcatctgttagaaaaaatgtaatcctccctttcttaggacaaaaatttcatagaagacccaaatgacaacatgcctctacataaaagcattagcagagttctgattaaaatactgcgttttcttaatgctcaatttaaaatgaaacataaagc

SEQ ID NO: 670423 - DNA, 1813 bp, Homo sapiens
aatcataaaatctccattcatcatatttaatttctgtataatagggttttttcaacctcagcattattgacattttgggaggctgtcctatacactgcagtatccttggtcactcctcatcaagtgccaatagaactcaccctccccccaggttgggacaaccaaaaatgtcttcagacattgttgaatgtctcttggggggcaaaatcatccttcacggagaaccattactgtatagtactcctttgatttgacaccatagttttttttttttaacaagtcccctatttaagttacttcgaatttattgctgttacaaatgatgcagaactaaaagttctaggtatacacctttttataattcaaaattgttctcttgagaataaattcaatatggtcaaggggtagaaacacttttgtggattttgacactcattactaatttgcttttcaaaagaatcccacccatcttagtgtgaggaacaatgaaagaatgtaatagtttccctgccatcttgccagtgcatcatctaatatgttgtaatttcagcatcatgtggtgaaaggaatctagaatttgaagtcaaactggcctggatcaaaaagccacataagcactgatagcacgttggcctcaggtagttactttatctctcagctctgatgtttgtaagagtgtttgaacgatctctaccttgcaaggtggttgtgcttaaaaaaaaactgttattaactgtcattatgcactgctgtcctggatattcaaaatacctctgtctgtaaggcaggcagtggaaaatataatttctgttttacaaaggccggagaggggaaggtatttatcagagtcacacaggagacgtgggcttccacagagcctggaggtttattgcgccagagagtttgtttcattctagccatctgtatatgcctctaccaggtgcctgccctgctggaggctgtgggggttgccagaggaaggggtagcagagattactgtctgacacatgaaattacaggagctccatgcctrgtactgttaaagattcccagattctagggattcttctctgtccttcactcccaggacctctgttgtcagcatgactggacagccctatgcctgacatatatcctgattccctttactctccccagtcagctcctaaccagtaccttgcttctgctgtcaccctccatagtccactctccacaaagcctcagccttaaacagtaaattagatcatgtcatgcctctccttgacccctataatgccttcccattgcacttagaataaatactaactacataccagagtcagcaacttaccccagtggctctcaaccttatgatgtagcgtcacctggaattttttttttttacaggttttaaaaaataaccttcactttttaaaagctaatgtgtgcattacaggaaactgaaaaccactagaagcaaagaacaaagccatccacaatcacaagcaatttagtttcacatgtccttctaagtcctgtttgtgtagatacaacatccaacttgatggacttgagatcatatgttatgtatcatgccttttcacacatcatgaatatttaccaattcaaaatcttaaagctatgtgagtattctgatactcagcaacacattacagcaacttcatctgttagaaaaaatgtaatcctccctttcttaggacaaaaatttcatagaagacccaaatgacaacatgcctctacataaaagcattagcagagttctgattaaaatactgcgttttcttaatgctcaatttaaaatgaaacataaagc

SEQ ID NO: 670424 - DNA, 2515 bp, Homo sapiens
tcagcatttaacttctgatctctatcatcgtattcttgtaatgtgctaatgcctagttcttcggggaaagaggtgtgagttctgcagtttgttctcaaataatccaaggggaaggaactatatgtaaatataacaagaatgataaagcaaatgtgcaaaacagtaatgataaatccaagtaaagggtacatggtaggttcttggctctgttcttgcagtgtgaagtttaacaaagtcatttgcttgcagaatattatttaagaggtggggtctttggggtcttgctatgttacccaggctggactcaaactcctaggcttaagcaatcctccttcctattaagtagctcgggcagggctacaggtacataccaccatcctggcttgcttgcagaatatttttagcaatgaagtggtttttttgttgctttgttttttgttttttgggggttttttttgtatttttttttagatggagtcactcttgtcccccaggctggagcgcgatagcacaatctcagctcactgcaacctctgcctcctgggttcaagcaattctcctgcctcagcctcctgagtagctgggattacaggcgcctgccaccacaccccccggctaatttttgtatttttagtagagacgaggtttcaccatgttggccaggctggtcttgaactcctggtctcaagtgatcctcctgcctcggcctcccaaagtgctgggattacaggtgtgagccactgcacctggcccctttggctctttttactacattatttctgtattttctaggctattcacctatggtttgcttatagatttactttttttttttttaaactttattttaggttcaagggtatatgtgaaggtttgttgcataggtaaacacatgtcacaagggtttgttgtacagattatttcaattaagtctagtacccaatagttatcttttctgctcctttccctcctcccaccctccaccctccaggagaccccagtgtctgcagtttctttgtattcgtaagttatcatttagcttccacttacaagtaagaacatgtggtatttggttttctgttcctgcgtcagtttgctgcggataatatcctcctgcttcccatctatgttcccacaaaggacatgatctcgttcttttttatggctgccagtagatttacttaactgcagattatgtaattaagaagctggtagtctgtaaaaatggtaatatacgtgactacagagagggaccatctcccttagctaattgagggaaacgtgtctttttttttttatgctggcagggctaagtagtttggttgacaggactatccacaagtgattcatgaagaagcaggtactcactccaagataagatccatactcacagtctttggtcaagaaagttgatttcatttgtccgatagtaatgtaactatgtaaagacctgatttgaatcttactggctatagctttggatatgttgattgtggggtttttttacacctcacttttcttataaatagaaaggacacaattgcaattgctttgtcctgccaccaccacctccctccacccccagaaatgtgagaaaagagtaactagcggtgagttaccttgggtcagactgtccatttcttagctttatttttctcatctttcaaatgagggagcctcttctagctgtaaaatcttagattttgattcttttgtttgtttcaaacaattgacaagagtttctagaaatgtttttccttttgcagtgctcgttacatgaaagatctttttcctcttcaccaggcagttgcagtggtgcagaatggctgacctcagtcttgcagatgcattaacagaaccatctccagacattgagggagagataaagcgggacttcattgccacactagaggcagaggcctttgatgatgttgtgggagaaactgttggaaaaacagactatattcctctcctggatgttgatgagaaaaccgggaactcagagtcaaagaagaaaccgtgctcagaaactagccagattgaaggtaagtatttaaaccagactgcttatatatgttcagaaagcaggttagggattatgcctttggtataatcttggaaactgagaattgagctgagtttttttagtgtaggctagtaactttatgtttctttgttagataccgaggaggtagacttaccaccctttgagtgagcgttcatgagtctgtggatgacttttaaccctaatgtttcttctctaaygtttcaacaaccatataatcttcttcttaatttcctaaattaaactgtctactgtgccttttctctgaaagtagctttgaaaagttaaataaaattctgcggttatatcagaacttcatttagactggaatcagatgccatttgttgtctttggagtcatcccacctcaggattaaagcataattaaagcctttaagagaaatttgccattttcctggatcagatgtgctaataattggctgagtatttt

SEQ ID NO: 670425 - DNA, 635 bp, Homo sapiens
tctgtgctctttaaaatatactttttaacaatgcatgctgttatgatgatgggggcaacaatcatttttaactacatctaacctcagttattgggttgtgggagtaaaataatttaaggtttacatgtaatctaaaataattgaggatctatagttgccaatttgcatgmatgttttacaaagtctaactgattcttccaataaagaatttttagtttatgttttctgaaaacatttgaatttatatttataccaaataaaaaagtaacatggactaacacgccatttctccacatatggtttagaatctcctgccagggcttattataaatcctaggcccctctcaagttctcatgaatcaaaccatgtgaaaattattatggtaagttagtggttggttttagtgctggaagattagttgatgtgattaggtgaatcaggaacatctcattaatctggtgcatgctacctgtggcttgctttatcagtagcctcttcccacctttagcatcgaaggggttcatgtgacaggctgatgaagcatgccggtcaagagtatggccatttgtgtcacatagacctaggttcaagcctagcagaacagtgtcaccttggaacactctaggcctgtttc

SEQ ID NO: 670426 - DNA, 635 bp, Homo sapiens
tctgtgctctttaaaatatactttttaacaatgcatgctgttatgatgatgggggcaacaatcatttttaactacatctaacctcagttattgggttgtgggagtaaaataatttaaggtttacatgtaatctaaaataattgaggatctatagttgccaatttgcatgaatgttttacaaagtctaactgattcttccaataaagaatttttagtttatgttttctgaaaacatttgaatttatatttataccaaataaaaaagtaacatrgactaacacgccatttctccacatatggtttagaatctcctgccagggcttattataaatcctaggcccctctcaagttctcatgaatcaaaccatgtgaaaattattatggtaagttagtggttggttttagtgctggaagattagttgatgtgattaggtgaatcaggaacatctcattaatctggtgcatgctacctgtggcttgctttatcagtagcctcttcccacctttagcatcgaaggggttcatgtgacaggctgatgaagcatgccggtcaagagtatggccatttgtgtcacatagacctaggttcaagcctagcagaacagtgtcaccttggaacactctaggcctgtttc

SEQ ID NO: 670427 - DNA, 594 bp, Homo sapiens
aagtgctatggtgaattgttctgcaaaagtacaaatcctggtctatttttagaccttttgctccaggcctgaaaatattctcagagtttcttagtttagtattttgggggcatgattttgaagcattctgagacattatgctgcatattagtttctttaacaataatatttscatatcaaatattaaattcttgaactttttgttaatgcttcaaatatttcaggattgtgttatacttccccttttcaaaggaaaccactctttgcatctgctgcagttagagcaagaaagatccttctctccaaattgccgtttttattttttactgttgtgttacagcacaaccttctgtgtacagcatacaaatgataggtggtaaagatattgtgggtttgcatgcataataaatatggttccatttgagtagttggtgagtatttcataatgcaacagtggaaaatgaggcaatttgaatattttgggaggcttcaatatatatttactgtgcatgcatatacatatttacatacaattttcaacactcttatttataagcaaatagccaaacagacaattatttgtatgtgggccca

SEQ ID NO: 670428 - DNA, 594 bp, Homo sapiens
aagtgctatggtgaattgttctgcaaaagtacaaatcctggtctatttttagaccttttgctccaggcctgaaaatattctcagagtttcttagtttagtattttgggggcatgattttgaagcattctgagacattatgctgcatattagtttctttaacaataatatttgcatatcaaatattaaattcttgaactttttgttaatgcttcaaatatttmaggattgtgttatacttccccttttcaaaggaaaccactctttgcatctgctgcagttagagcaagaaagatccttctctccaaattgccgtttttattttttactgttgtgttacagcacaaccttctgtgtacagcatacaaatgataggtggtaaagatattgtgggtttgcatgcataataaatatggttccatttgagtagttggtgagtatttcataatgcaacagtggaaaatgaggcaatttgaatattttgggaggcttcaatatatatttactgtgcatgcatatacatatttacatacaattttcaacactcttatttataagcaaatagccaaacagacaattatttgtatgtgggccca

SEQ ID NO: 670429 - DNA, 642 bp, Homo sapiens
tcataagcatttattaagtgcctacataataaatgcagcacctactagatgctatcaggaaataaaaacatcctagattttatttatttgtttgtttgtttattttttttgagacagagtcttactctgtcatccaagctggagtggagtgtcatgatctcagctcactgcaacctcygcctcccgtgttcaagcaattctctgcctcagcctgccgagtagctgggattacaggtgacagccaccgtgaccggctaatttgtggatttttagtaaagatgcggtttcaccattttggccaggcttgtcttgaactcccgacctccggtcatctgcccacctaggcctcccaaagtgctggggttacaggtgtgaaccaccgcacccagccccatcctagactttaaaagaagagagatactggctcccttaatttgtagttatcctagattgccaaaagggtgtgttttgtttgaaatactgtgatttgcaaaattatgtggttgtcattcctactttcttcatgcattccaacagaagtcatgccaaacgtatccaggaactgtttagaaggcggaggctgttgtcccataaacatctaaattttctgcatttgcatccttctcaaactagatgagtagg

SEQ ID NO: 670430 - DNA, 642 bp, Homo sapiens
tcataagcatttattaagtgcctacataataaatgcagcacctactagatgctatcaggaaataaaaacatcctagattttatttatttgtttgtttgtttattttttttgagacagagtcttactctgtcatccaagctggagtggagtgtcatgatctcagctcactgcaacctctgcctcccgtgttcaagcaattctctgcctcagcctgccgagtagctgggattacaggtgacagccaccgtgaccggctaatttgtggatttttagtaaagatgcggtttcaccattttggccaggcttgtcttgaactcccgacctccggtcatctgcccacctaggcctcccaaagtgctggggttacaggygtgaaccaccgcacccagccccatcctagactttaaaagaagagagatactggctcccttaatttgtagttatcctagattgccaaaagggtgtgttttgtttgaaatactgtgatttgcaaaattatgtggttgtcattcctactttcttcatgcattccaacagaagtcatgccaaacgtatccaggaactgtttagaaggcggaggctgttgtcccataaacatctaaattttctgcatttgcatccttctcaaactagatgagtagg

SEQ ID NO: 670431 - DNA, 1416 bp, Homo sapiens
ggacccrcccacttcctgctgattggtccattttacagagcgctgattggtccattttacagtgtgctgattggttcgtttttacagagtgctgattggtgcatttacaaacatttagctagacacagagtgctgattggtccgtttttacagagtgttgattggtgcgtttacaaacctttagctagacagaaaagttctccaagtccccactcgacccaggaagtcaggctggcttcacctgtcacttacatcatcatttttagtgctgtcacctctgtccttctttcttcatccctaaaggcatagttggcttacaacctgtgctgtattgactcttccctttttctcccctgggtttttttttttccctctcccttaatttgctcccagaaaataccacgtgtcagggctgggtaaagatgcaagtgtccagtttggtcagtatttagaagatgagaataattgaagggtaagtcatttttaaattatttttgttccctctaaatggtgattatttaactatcttgatatttacactacaataaaactatctaccaaagcacacacattaaatggcatttgtgtcctgacactgagaaggaaatgcataatgagaccatcacctaccaaagcacacacagtaaatgacatttttgtcctgacattgagaaggagatacacaatgaaaccattgcaaatgctcaagctgatgaatacaggttgacttcttcctttttaatcacatcaagaaatacatattttctctcatatggtcttccccactgataacccaactttcaactttgacccacatttacctttatctggtagtcaatttctttaaaaagcaaagttgctgttgtttttttaataaattcacaaatgttactaaatataggaaagagtcaaagatatcaaagccccattgagatcttgatgttgggcagttatctaggtttactcactagctaagtgacttatgacttattctttcaccttacccaagaaatttgaatgctgttatctgttacagacctttgaggttaccaggacatagcttaaactgtgagcttttgaataataaggaccaaggcttctatgcaaactttggagatttttatagttgctttctagaataaaaaagccagtaatacctaagagcaaaagtagcatcaccagttattttctatgtcctttccagtcagacttgaccttttcttcaatgcttccccaaattccaaattattttctgcctgagggaaggaaaagcattgcctcctgccagagacagccaagatgctgcagaagcaacagctggccagaagtgattttctgtgattttcccttcctgtggagcatgccagtcatagaaatggagcattatgtttctaggtaagaatcccagattggtaa

SEQ ID NO: 670432 - DNA, 1416 bp, Homo sapiens
ggacccgcccacktcctgctgattggtccattttacagagcgctgattggtccattttacagtgtgctgattggttcgtttttacagagtgctgattggtgcatttacaaacatttagctagacacagagtgctgattggtccgtttttacagagtgttgattggtgcgtttacaaacctttagctagacagaaaagttctccaagtccccactcgacccaggaagtcaggctggcttcacctgtcacttacatcatcatttttagtgctgtcacctctgtccttctttcttcatccctaaaggcatagttggcttacaacctgtgctgtattgactcttccctttttctcccctgggtttttttttttccctctcccttaatttgctcccagaaaataccacgtgtcagggctgggtaaagatgcaagtgtccagtttggtcagtatttagaagatgagaataattgaagggtaagtcatttttaaattatttttgttccctctaaatggtgattatttaactatcttgatatttacactacaataaaactatctaccaaagcacacacattaaatggcatttgtgtcctgacactgagaaggaaatgcataatgagaccatcacctaccaaagcacacacagtaaatgacatttttgtcctgacattgagaaggagatacacaatgaaaccattgcaaatgctcaagctgatgaatacaggttgacttcttcctttttaatcacatcaagaaatacatattttctctcatatggtcttccccactgataacccaactttcaactttgacccacatttacctttatctggtagtcaatttctttaaaaagcaaagttgctgttgtttttttaataaattcacaaatgttactaaatataggaaagagtcaaagatatcaaagccccattgagatcttgatgttgggcagttatctaggtttactcactagctaagtgacttatgacttattctttcaccttacccaagaaatttgaatgctgttatctgttacagacctttgaggttaccaggacatagcttaaactgtgagcttttgaataataaggaccaaggcttctatgcaaactttggagatttttatagttgctttctagaataaaaaagccagtaatacctaagagcaaaagtagcatcaccagttattttctatgtcctttccagtcagacttgaccttttcttcaatgcttccccaaattccaaattattttctgcctgagggaaggaaaagcattgcctcctgccagagacagccaagatgctgcagaagcaacagctggccagaagtgattttctgtgattttcccttcctgtggagcatgccagtcatagaaatggagcattatgtttctaggtaagaatcccagattggtaa

SEQ ID NO: 670433 - DNA, 1416 bp, Homo sapiens
ggacccgcccacttcctgctgattggtccattttacagagcgctgattggtccattttacagtgtgctgattggttcgtttttacagagtgctgattggtgcatttacaaacatttagctagacacagagtgctgattggtccgtttttacagagtgttgattggtgcgtttacaaacctttagctagacagaaaagttctccaagtccccactcgacccaggaagtcaggctggcttcacctgtcacttacatcatcatttttagtgctgtcacctctgtccttctttcttcatccctaaaggcatagttggcttacaacctgtgctgtattgactcttccctttttctcccctgggtttttttttttccctctcccttaatttgctcccagaaaataccacgtgtcagggctgggtaaagatgcaagtgtccagtttggtcagtatttagaagatgagaataattgaagggtaagtcatttttaaattatttttgttccctctaaatggtgattatttaactatcttgatatttacactacaataaaactatctaccaaagcacacacattaaatggcatttgtgtcctgacactgagaaggaaatgcataatgagaccatcacctaccaaagcacacacagtaaatgacatttttgtcctgacattgagaaggagatacacaatgaaaccattgcaaatgctcaagctgatgaatacaggttgacttcttcctttttaatcacatcaagaaatacatattttctctcatatggtcttccccactgataacccaactttcaactttgacccacatttacctttatctggtagtcaatttctttaaaaagcaaagttgctgttgtttttttaataaattcacaaatgttactaaatataggaaagagtcaaagatatcaaagccccattgagatcttgatgttgggcagttatctaggtttactcactagctaagtgacttatgacttattctttcaccttacccaagaaatttgaatgctgttatctgttacagacctttgaggttaccaggacatagcttaaactgtgagcttttgaataataaggaccaaggcttctatgcaaactttggagatttttatagttgctttctagaataaaaaagccagtaatacctaagagcaaaagtagcatcaccagttattttctatgtcctttccagtcagacttgaccttttcttcaatgcttccccaaattccaaattattttytgcctgagggaaggaaaagcattgcctcctgccagagacagccaagatgctgcagaagcaacagctggccagaagtgattttctgtgattttcccttcctgtggagcatgccagtcatagaaatggagcattatgtttctaggtaagaatcccagattggtaa

SEQ ID NO: 670434 - DNA, 1705 bp, Homo sapiens
atcgtcacagaggatttcaaatgcttttttttttctaaccagaatacttgaaagaaactgagatttccttgttatgagttcaactgttcattttatatgccctataattgaccattctccagaagtcagcataggcaacagagatgtaaggcaactgcaaacacacacacacacacacacacacacacacacacacacacacacacacacacacacagctttggcacagtgaaaaattaaaatgcaatgccaggcttgggactattttgaagcctcaggctaggaaagcaataccctcacctttctcagctgcctactatgtacctaaccttccaattatttatggctgagatgcttaagatgtactggagaaacagccatggctgagagatacacaaagctgaaatattatagagagttataacttcatgaatgaaaaacctataaaaatcacttaagggtcctaatctttcagttaatctcacctcagtgccactcaagggtttaaaggagtttcactgattggtttttaaaggacaacgataaaaatgctttgaaataactaattataatttcaggtatctatgtaaaggtccagacacaaatatttgaaaatggactgttcctagaatcagggattgacacagatctttaaaactttctagcccaaacatccatgtgacatttgtatccctttggccatattgctttcaaggcttcaatgctctaggaaagaggatcttactgcagtactgctagatttaggtggagatcaaaattaccaatgtttgaaagtgatatttttacattaacttgatcaagagttagaacttggacttattactcagacagtctgatccttcattgacaagctgtgctgagaaaccattctgtgggctaaagaggatatggactcccaggattgctctggcattgcggttgagaagatatactggaataacctcttttgaaaacagtttagcattacctcctaaagttgacatctacaacaatatgactgccaggtatattaccaagagaaattctcatatgtgtacaagaagacatgcatgagaatgttcaaagaaactctgattaaaatagatagaatctagtaatgaccaacatcccaccagggagtagatgaataaaccctgatatgttcacataattaaataccatggctcaagcaaaacaaatgtttgatagtgacacacagctcatagggagaaatcttaacaatatattagtttaaaaaaattccctaaagacaataaaaawatacacactttaggaatccatagagatgcctaaaactatatgaaaagtcacaaagcaatggtgagcatagattgaggatgctggactgactccatgtgaggagacaaggggatggttttttgtgtgggactatcatactgttagatgtgggatagtagcaaaatcataggttttgttctgggcaatgggtttgcagatactcattaacatcattaaacataactacttacacaactaaagaaaaggaggctatgatggaaaacaaagagaaatgatcatccttgagaggcatgtaagattacaacatcggatgaccgcagttttcctcaagataggaatccagctcccattccaaaatgtccaccaaagttgcaacatagtagcatttgccatataaaagtactggagttattaactggattcc

SEQ ID NO: 670435 - DNA, 1420 bp, Homo sapiens
actaactatatagagaacactgaataaatctatagtttgggaaaaacattaagatacaaattttagacatcttcaagttttgatactctaaaatatttcagcattcaatcccaccaaatctgttagacccatactgagagaattggcccaggcatagaaggtaaagggaagagaagtttctgaaggtacttgatggcccttgggtagaactgaggggtctggcgcccaggatggagggtgggggaacagttttaaagttgctaccttttatacagtgaggaggctaggcagtcattgaccaccttctctctcctttctacagcctcctccaggctttgatttcctctcttcaaggtcagttttgtgaaccgattttttaggaggatggggggatggagaatgcttttgtgagggaacctggtgacgacctgctgtggcaactgttcactgttgactatagatgtattgggagatgctacagcggaatcaggctttctgatatcaacggcaataatttgattctagaggtcaaggggttgcagttgccacaataagccagagggaatgattagtaatcagagttttcatccacagaaatctgtgacaatgattagctgattttaagttttgggaaatgaaaaaaaaagaaaagaaaagaaaaacaaacaaaaaaggatatttcactaaggagctgcttgatatgctaaggaaaattacatgtatgttgcccagaaacttagcccgtattttcagagaggagattcattgygtcttacccaatccccagacttccatatagttagtaggcaaagctcttcgcagaccaggaaccactcaactggggaggaggtaggtttggtctcttggtgaaggacattgtaacatggccacaggtgtaattatgatatttattccccaacacctaaaccggaggaaacttcagtcattttcttgaatgactatacactgggaaaaagctgagaacctgtgatggtttccggcttgtatttacaaacagaaataacaagtatttctttgctgccttgcccaggtgtatgtcagctctcctgatctctgttataagatggcccagagggaactaaatcatcttgatatagctcccaatatgttatacctcagaactggttgcacacaatagattcattacattgatgctatcatgccaactgttcctggtgaaaagtaggcagtaaacctactacatatttttataagacatatgttcaccaccattaacttgatccaacttgaccactttgacccaatgaaccctatgtttagaagtgcacagaagcattttatcacaaacataattgtgccattttggaggcaaggcctgaacagttccaaagaagcacagtaaactgcatgagcagatggctcagactccgatggcaca

SEQ ID NO: 670436 - DNA, 1420 bp, Homo sapiens
actaactatatagagaacactgaataaatctatagtttgggaaaaacattaagatacaaattttagacatcttcaagttttgatactctaaaatatttcagcattcaatcccaccaaatctgttagacccatactgagagaattggcccaggcatagaaggtaaagggaagagaagtttctgaaggtacttgatggcccttgggtagaactgaggggtctggcgcccaggatggagggtgggggaacagttttaaagttgctaccttttatacagtgaggaggctaggcagtcattgaccaccttctctctcctttctacagcctcctccaggctttgatttcctctcttcaaggtcagttttgtgaaccgattttttaggaggatggggggatggagaatgcttttgtgagggaacctggtgacgacctgctgtggcaactgttcactgttgactatagatgtattgggagatgctacagcggaatcaggctttctgatatcaacggcaataatttgattctagaggtcaaggggttgcagttgccacaataagccagagggaatgattagtaatcagagttttcatccacagaaatctgtgacaatgattagctgattttaagttttgggaaatgaaaaaaaaagaaaagaaaagaaaaacaaacaaaaaaggatatttcactaaggagctgcttgatatgctaaggaaaattacatgtatgttgcccagaaacttagcccgtattttcagagaggagattcattgtgtcttacccaatccccagacttccatatagttagtaggcaaagctcttcgcagaccaggaaccactcaactggggaggaggtaggtttggtctcttggtgaaggacattgtaacatggccacaggtgtaattatgatatttattccccaacacctaaaccggaggaaacttcagycattttcttgaatgactatacactgggaaaaagctgagaacctgtgatggtttccggcttgtatttacaaacagaaataacaagtatttctttgctgccttgcccaggtgtatgtcagctctcctgatctctgttataagatggcccagagggaactaaatcatcttgatatagctcccaatatgttatacctcagaactggttgcacacaatagattcattacattgatgctatcatgccaactgttcctggtgaaaagtaggcagtaaacctactacatatttttataagacatatgttcaccaccattaacttgatccaacttgaccactttgacccaatgaaccctatgtttagaagtgcacagaagcattttatcacaaacataattgtgccattttggaggcaaggcctgaacagttccaaagaagcacagtaaactgcatgagcagatggctcagactccgatggcaca

SEQ ID NO: 670437 - DNA, 1420 bp, Homo sapiens
actaactatatagagaacactgaataaatctatagtttgggaaaaacattaagatacaaattttagacatcttcaagttttgatactctaaaatatttcagcattcaatcccaccaaatctgttagacccatactgagagaattggcccaggcatagaaggtaaagggaagagaagtttctgaaggtacttgatggcccttgggtagaactgaggggtctggcgcccaggatggagggtgggggaacagttttaaagttgctaccttttatacagtgaggaggctaggcagtcattgaccaccttctctctcctttctacagcctcctccaggctttgatttcctctcttcaaggtcagttttgtgaaccgattttttaggaggatggggggatggagaatgcttttgtgagggaacctggtgacgacctgctgtggcaactgttcactgttgactatagatgtattgggagatgctacagcggaatcaggctttctgatatcaacggcaataatttgattctagaggtcaaggggttgcagttgccacaataagccagagggaatgattagtaatcagagttttcatccacagaaatctgtgacaatgattagctgattttaagttttgggaaatgaaaaaaaaagaaaagaaaagaaaaacaaacaaaaaaggatatttcactaaggagctgcttgatatgctaaggaaaattacatgtatgttgcccagaaacttagcccgtattttcagagaggagattcattgtgtcttacccaatccccagacttccatatagttagtaggcaaagctcttcgcagaccaggaaccactcaactggggaggaggtaggtttggtctcttggtgaaggacattgtaacatggccacaggtgtaattatgatatttattccccaacacctaaaccggaggaaacttcagtcattttcttgaatgactatacactgggaaaaagctgagaacctgtgatggtttccggcttgtatttacaaacagaaataacaagtatttctttgctgccttgcccaggtgtatgtcagctctccygatctctgttataagatggcccagagggaactaaatcatcttgatatagctcccaatatgttatacctcagaactggttgcacacaatagattcattacattgatgctatcatgccaactgttcctggtgaaaagtaggcagtaaacctactacatatttttataagacatatgttcaccaccattaacttgatccaacttgaccactttgacccaatgaaccctatgtttagaagtgcacagaagcattttatcacaaacataattgtgccattttggaggcaaggcctgaacagttccaaagaagcacagtaaactgcatgagcagatggctcagactccgatggcaca

SEQ ID NO: 670438 - DNA, 1420 bp, Homo sapiens
actaactatatagagaacactgaataaatctatagtttgggaaaaacattaagatacaaattttagacatcttcaagttttgatactctaaaatatttcagcattcaatcccaccaaatctgttagacccatactgagagaattggcccaggcatagaaggtaaagggaagagaagtttctgaaggtacttgatggcccttgggtagaactgaggggtctggcgcccaggatggagggtgggggaacagttttaaagttgctaccttttatacagtgaggaggctaggcagtcattgaccaccttctctctcctttctacagcctcctccaggctttgatttcctctcttcaaggtcagttttgtgaaccgattttttaggaggatggggggatggagaatgcttttgtgagggaacctggtgacgacctgctgtggcaactgttcactgttgactatagatgtattgggagatgctacagcggaatcaggctttctgatatcaacggcaataatttgattctagaggtcaaggggttgcagttgccacaataagccagagggaatgattagtaatcagagttttcatccacagaaatctgtgacaatgattagctgattttaagttttgggaaatgaaaaaaaaagaaaagaaaagaaaaacaaacaaaaaaggatatttcactaaggagctgcttgatatgctaaggaaaattacatgtatgttgcccagaaacttagcccgtattttcagagaggagattcattgtgtcttacccaatccccagacttccatatagttagtaggcaaagctcttcgcagaccaggaaccactcaactggggaggaggtaggtttggtctcttggtgaaggacattgtaacatggccacaggtgtaattatgatatttattccccaacacctaaaccggaggaaacttcagtcattttcttgaatgactatacactgggaaaaagctgagaacctgtgatggtttccggcttgtatttacaaacagaaataacaagtatttctttgctgccttgcccaggtgtatgtcagctctcctgatctctgttataagatggcccagagggaactaaatcatcttgatatagctcccaatatgttatacctcagaactggttgcacacaatasattcattacattgatgctatcatgccaactgttcctggtgaaaagtaggcagtaaacctactacatatttttataagacatatgttcaccaccattaacttgatccaacttgaccactttgacccaatgaaccctatgtttagaagtgcacagaagcattttatcacaaacataattgtgccattttggaggcaaggcctgaacagttccaaagaagcacagtaaactgcatgagcagatggctcagactccgatggcaca

SEQ ID NO: 670439 - DNA, 637 bp, Homo sapiens
aaatgcataagtctcattccccatcctccttttgctaacgatggtcattttttgtagcacaataatctgaaaattttagaattatttttgttcttgtacagtacagcatgtaaattataatttaacaacacctgcatttaacctgctaacacggtttacacactattaaatcccggccccatagagaatgagaagatgagatgctgataaaatttgcttctgatgatgctgaacataccatctattttttctcttcttttttttttgagacggggtctcgctctgtcacccaggctggagtgcagtggcgcgatctctsctcactgcaagctccgcctcccgggttcacaccattctcctgcctcaggctcccgagtagctgggactacaggcgcccgccaccccgcccggctaattttttctattttttagtagagggtaaggggtttcaccatcttacccaggatggtctccatctcctgacctcgtgatccgcccacctcagcctcccaaagtgcagggattacaggcatgagccaccgcacccggccaaccatctattttttcaatattattttccacattgtttgaatgtctgtaatgtgtgtgagacccagctgaatttaaaatgtggttc

SEQ ID NO: 670440 - DNA, 637 bp, Homo sapiens
aaatgcataagtctcattccccatcctccttttgctaacgatggtcattttttgtagcacaataatctgaaaattttagaattatttttgttcttgtacagtacagcatgtaaattataatttaacaacacctgcatttaacctgctaacacggtttacacactattaaatcccggccccatagagaatgagaagatgagatgctgataaaatttgcttctgatgatgctgaacataccatctattttttctcttcttttttttttgagacggggtctcgctctgtcacccaggctggagtgcagtggcgcgatctctgctcactgcaagctccgcctcccgggttcacaccattctcctgcctcaggctcccgagtagctgggactacaggcgcccgccaccccgcccggctaattttttctattttttagtagagggtaaggggtttcaccatcttacccaggatggtctccatctcctgacctcgtgatccgcccacctcagcctcccaaagtgcaggrattacaggcatgagccaccgcacccggccaaccatctattttttcaatattattttccacattgtttgaatgtctgtaatgtgtgtgagacccagctgaatttaaaatgtggttc

SEQ ID NO: 670441 - DNA, 637 bp, Homo sapiens
aaatgcataagtctcattccccatcctccttttgctaacgatggtcattttttgtagcacaataatctgaaaattttagaattatttttgttcttgtacagtacagcatgtaaattataatttaacaacacctgcatttaacctgctaacacggtttacacactattaaatcccggccccatagagaatgagaagatgagatgctgataaaatttgcttctgatgatgctgaacataccatctattttttctcttcttttttttttgagacggggtctcgctctgtcacccaggctggagtgcagtggcgcgatctctgctcactgcaagctccgcctcccgggttcacaccattctcctgcctcaggctcccgagtagctgggactacaggcgcccgccaccccgcccggctaattttttctattttttagtagagggtaaggggtttcaccatcttacccaggatggtctccatctcctgacctcgtgatccgcccacctcagcctcccaaagtgcagggattacaggcrtgagccaccgcacccggccaaccatctattttttcaatattattttccacattgtttgaatgtctgtaatgtgtgtgagacccagctgaatttaaaatgtggttc

SEQ ID NO: 670442 - DNA, 611 bp, Homo sapiens
attgctgtgtatcaaatggttgaaaggcaggacaattgtggtgatttctaggaggaaaaaaaatagggttttagtgagtcaacaacaggatgatagtggatttcctgccatacctaacttgccaaatatttatcgagcatccactgataggtgtgacatgtaatggctgcaggctgtaktgcgaagagtgtgggcttgagatagacctatgtttgaatcaagagatttcagccaactgttcacatgaatttaggcaaattaaacatagttttttaaactttcaaatgaggatattataataataactgtgtcacagaatatttcatgtagattaaacaaactgtgatgattaattttctgtgtcaacttggctaggccaccatacctaggcagtttgtcaaataccagtctagatgtcactgggaagatattttttagatgaaattggattttgcatttgtagattttgagtgaaatggattatcctccataaagtgggtggatcttatccaatcaattgaaagtcttagaaaaactgctgaggtccccaaaggaagaggaattttgacctccagacttccttcagactgaagatataatattaatttttc

SEQ ID NO: 670443 - DNA, 1786 bp, Homo sapiens
  misc_feature 1535, 1548, 1549, 1550, 1551: n = A,T,C or G
gctcctcaagtacaaggacttcgtcctgtagccttctaaaagttgttcaactcaagaactaaaaaggaggccaggtgcggcatctcacccatcattctgagaggctgaggtgggaggactgcttaaagccaggagctcaagactagcttgggcaaaaaaacaagactcttgtctctacaaaaaaattaaaataaattaaaaaaaattagccaggcatagtggtgcatgtctgtagtcccagctacctgggaggctaaagtgaaaggatcacttgtgcccaggaggtggaggttacagtgagctatggttgtgccactgcatgccagcttgggtggcagaatgagaccctgtctctaaaaataaaaattwaaaaaaaaaaaagaaaaagaaaaagaaaaaaaggccaggcatggtggctcacacctgtaataccaacactttgaaaaactgaggcaggagaaccacttgaggccaggcgttggataccaaccagggcaacatagcaagactccatctttccaaatatataaataaataaaattaggcaagcatggtggaccatgcctgtagtcctagtcactcaggaggctgaggcaggaggatcacctgagtccaggacttccaggctgcaatgagctatgatcacaccagttcactccagcctgggcaacagagcgagacctggtctgtaattttaaaaaatagtaaaataaaataaacataaaattttttaaagaataaataaataaaaagaactaaaagggttgggtgaaggatgggacattaaaaaaaaaactaaaaagagactctgcagagtatgcttataatatatactattggcctctatacacagggcagaaaaaggcagcattatttttaaaaaatggcctttatccaagtccaacaattaaccattaaccctctctactcaccaccaggctccaatgtaccttccgatgaataggcaccagaataatttcttgttcaaagagatttacccctttggtccatcgtttcactgcttggtaacccccagactttaatttaggatagaagaaagtactgaatacatgaagtgctggatagccttgctttttatttctttccaccagaagattcatgtaaaaattaatgacctacaaaataccaagggagcaaaagctggaacatggcaaacatattatcaaaactaaatttctacctgaataaggatgaattcgaaggtaaggtactaaagaagaggataaaaagactgtctatagtagaagacagggaaaaaagtgatcagtgcaaaggagggcacatgaaaatgaaatgaaactgtacttttaaggcatgtgagtaacacttaacagccagaagaaggaatccaggaagaaagtctgtgcaataatggaaagatctacataactgtatcacaccaaaaatacgcagaaatattaacagtaagtgaattttactacatataaattagacttcaattttaaaatattaacttgaaggacatacaccaaattaataaaaaatttatctcngattgctcatacnnnnggttgggagacggagtctcgctctgtcgcctaggctggagtgcagtggcgcaatcttggctcactgcaagctccgcctcccgggttcataccattctcctgcctcagcctcccgagtagctgggactacaggcgcctgccaccacgcctggctaattttttgtatttttagtagagacggagtttcaccatgttagccaggatggtcttgatctcctgacctcgtgatccgcccg

SEQ ID NO: 670444 - DNA, 1786 bp, Homo sapiens
  misc_feature 1535, 1548, 1549, 1550, 1551: n = A,T,C or G
gctcctcaagtacaaggacttcgtcctgtagccttctaaaagttgttcaactcaagaactaaaaaggaggccaggtgcggcatctcacccatcattctgagaggctgaggtgggaggactgcttaaagccaggagctcaagactagcttgggcaaaaaaacaagactcttgtctctacaaaaaaattaaaataaattaaaaaaaattagccaggcatagtggtgcatgtctgtagtcccagctacctgggaggctaaagtgaaaggatcacttgtgcccaggaggtggaggttacagtgagctatggttgtgccactgcatgccagcttgggtggcagaatgagaccctgtctctaaaaataaaaatttaaaaaaaaaaaagaaaaagaaaaagaaaaaaaggccaggcatggtggctcacacctgtaataccarcactttgaaaaactgaggcaggagaaccacttgaggccaggcgttggataccaaccagggcaacatagcaagactccatctttccaaatatataaataaataaaattaggcaagcatggtggaccatgcctgtagtcctagtcactcaggaggctgaggcaggaggatcacctgagtccaggacttccaggctgcaatgagctatgatcacaccagttcactccagcctgggcaacagagcgagacctggtctgtaattttaaaaaatagtaaaataaaataaacataaaattttttaaagaataaataaataaaaagaactaaaagggttgggtgaaggatgggacattaaaaaaaaaactaaaaagagactctgcagagtatgcttataatatatactattggcctctatacacagggcagaaaaaggcagcattatttttaaaaaatggcctttatccaagtccaacaattaaccattaaccctctctactcaccaccaggctccaatgtaccttccgatgaataggcaccagaataatttcttgttcaaagagatttacccctttggtccatcgtttcactgcttggtaacccccagactttaatttaggatagaagaaagtactgaatacatgaagtgctggatagccttgctttttatttctttccaccagaagattcatgtaaaaattaatgacctacaaaataccaagggagcaaaagctggaacatggcaaacatattatcaaaactaaatttctacctgaataaggatgaattcgaaggtaaggtactaaagaagaggataaaaagactgtctatagtagaagacagggaaaaaagtgatcagtgcaaaggagggcacatgaaaatgaaatgaaactgtacttttaaggcatgtgagtaacacttaacagccagaagaaggaatccaggaagaaagtctgtgcaataatggaaagatctacataactgtatcacaccaaaaatacgcagaaatattaacagtaagtgaattttactacatataaattagacttcaattttaaaatattaacttgaaggacatacaccaaattaataaaaaatttatctcngattgctcatacnnnnggttgggagacggagtctcgctctgtcgcctaggctggagtgcagtggcgcaatcttggctcactgcaagctccgcctcccgggttcataccattctcctgcctcagcctcccgagtagctgggactacaggcgcctgccaccacgcctggctaattttttgtatttttagtagagacggagtttcaccatgttagccaggatggtcttgatctcctgacctcgtgatccgcccg

SEQ ID NO: 670445 - DNA, 3656 bp, Homo sapiens
catgtatttcacttctctggggccagatggcctcttcctaagattctcctcagtgctgagagttcttcagtcctgcctgctgacttccctccaggacagaacagatgcctcttcctcccatagatatgatgcaagaactgagctgtccaagcaaaaaaaaacctttgaaggaagaatttctgtgctgtgagtggtttactctgagaataggactcaagttttagaaatctttgttcaatgtcagagatagagcgactgtaatctgtgagccaagaaaaaaggtttgtaaaggctagaagaaaagaagcccatggctaagaacttgtaaaaacatctacagcaaacaagagttccaagagaaagactgtgaaacagcaggcccacaggagctggagagcgagctttgaaacgatacaaaattaattgtctaaggggcaaataaatggtgcagtacacaaatgcaggaggtgacacaaacgcacctggattcaacagaggacaagtagacacatctatgtcccaggctgcactaatgaggaaagtccaccaggtgggaagtaggtaccactgagagtttataaggctaaaaaccccagtcttgggatgcggagaaggagggaaggaagtgagaatgaacaggaatggcatattctgttcacttcactgacagctttgcactgtgcattcccagctgggcatgtcccagacatgatctcttgcatgggctgtactaacgaacatcaaatattcaggctggcaaccagttacatgaaccggtgtcaggagtgcacattaataggcatctgactagggcagggctgggcaaactacggcccctgcgctacatccagcctaaagcctgtttctgtaaataaagttttatcaaaacacccaatttgtttccctattgtacacagcttttttcatgctgcattggcagcgctgggtagttgtgacacaaaccatatgggccacagggcctaatatatctgtaatctggccctgtacagaaaaaatgtgctgaaccttggactagtggggcagatagtgaagctgagaagattaagaccaagggagtagtgggatgtggttccagggctaaagcagtaactctatcagaaagcaagtcaggctcgggggcggtggctcgcgcctgtaattccagcactttgggaggccgaggcgggcagatcacgaggtcaggagattgagaccatcgtggctaacatagtgaaatcctctctactaaaaatacaaaaaattagccaggcgtggtggcacgtgcctatggtctcagctactcaggaggctgaggcaggagaatcgcttgaacccaggaggtggaggttgtggtgagctgagatcacaccaccgcactccagcctggacaacagagcgagactctgtctcaaaaaaaaaaaaaaaaaaaaaaaagaaagtcagaaactccctcctggaactggcagatgggtagggttaaatctgagtggaaaatggaagcagggaagagcaaagccacgatcaaaacctgagaaactgagaggatgaacacagcgcagaagtgacaccaaggtaagatcctgtatcttttggagtcaagaaccaccattttgatgggctattctgggcttcccagaccttcccaagaagctgctccttacagcttacaggaccacattcttgggaagccacagacccaaatcatgccttgccaggtgttattcagtgtggaccgcggtaggactatgatggtcagagatgaccttgggtggggagaggaagcagacagaggaagaaacagactgtgtttggacaagagaaaatagggtacatctaatggagagacagatgaatactaagtggggataactgcagaggccttatttaataaggtgaagagtttgcactgatacagtaggctatgggagatcactgcagggatttgcacagggcagtcatttgtgattccagttatttgtgagataaggatagtggggcatgacaaagctctacaaaactgtaagacactgcatatctttgatgaacagtagtatgaaagacaaaacagattggatttgctagaataaaggtgctaacaagatggctgtcactagcaatctgctgcagcaacaggctcaaacacccctacgcagagctcttccttcatgtgcttcatcttatttgcatgaacattcctaggagttaagcagaaaaaaggcagggatgagcttggaaaatgaccaggagtgttgactggggagtgaatattggagtacaggctgggtgtggtggctcacgcccgtaatcccagcactttgggaggccgaggcaggtggatcacctgaggtcaggagttccagaccagcctggccaacgtggcgaaaccctgtctctactaaaagtacaaaaattagctggacgtggtggtgcacacctgtaatctcagcttcttggaaggctgaggcaagagaatcacttgaacctgggaggtggaggttgcagtgagccgagatcacgccactgcactccagcctgggtgacagagcgagactctgtctcaaaaaagaaaggaaggaaggaaaggaaggaaaggaaggaaggaagaaaagttggagtataaagaagtgagccttgatagaaacaaactcaaatgagaaaagcaagccacactgaatccaagggccatgaataaatacaaactcaaactctggtgtggaaacagctgcagatgtacaattgtgactgtcccttctaaagtgaaatcccccggaaagtgggaaaatattctcccccaggcaaccttccatcaacaaggagcttgtgggcactgagcgtaaagcagtgcattgaacctgtgccctgccttccaggagtcttcagtctctggccgtggtctataagaaagggctaccagctaagtgagagcactagaataacagatatatccagtgctatgctggtaaatatttaaaaaacggctcttgcagggggagataaagcaatctgtagtttttgccaatttctgtggtgtaaatactctcaccaaagcctatttattttatttaattaattaattwatttattttttagatggagtgttgctcatgctgcccaggctggagtgtaatggtgcgatctcgactcaccacaactgcgcccggcccctttgggagccaccgcgcccggcccccaaagcctatttaaagctactaacatgatatcaccaaaacggaaattggaaaggatgcacacaattggctctggtgagccaggggagccctctagcacagcactggaaatgaagcttgttgcttgtagcagctcttaactggatgttggtctgttgtgatatctaaggacactgacaggccactacgaaggcatgctgctgaacccactccactcacccagttattcagaggcagatcttacagctgacattcttcaaagaagaacctcagcttcaggctttggaagaaactcattttgcagattaggaaactgaggtccagagctgttctccttgagctgcatgtgagggctggtgtcattatgctttacataatcagtaagaaattctgaaaccagacagtaactgctgtgtgagaaggtagtcgaaaacagtcaactccattacagtgcagcagacacaggga

SEQ ID NO: 670446 - DNA, 1884 bp, Homo sapiens
atgtttattgtagcactattcacaatagccattatattgaatcaacccaattgtccatcaatagatgaatggataaagaaaatgtatatatacacaatgaaatattatttatccataaaaaaagaataaaaccctgtcatttgcaacaacatggatggaactgttggacacacaaagataaatatcacattctccctaatatagggacctaaaaatataatgaattcacgaagatagagtagaaaaatagttaccagaggtaaagtgkattggggagtggtaataaagaaaagatagttaatgggtacaaaatatggttagaaagaaggaataagttctggtgttcacttatacagaaaggtaattatagttatcaataatttattatgtaattcaaaataactaaaagaatagaatgtgaatgctcctaataaaaagaaattataaatacttgaggtgatggacaccccaatttccctgatttgatcattacacatggcatgcttatatcaaaatatcaaatggaccccataaatatgtacaactagtatgtatccataataattaaaaattaaaaaatataattaagacgtgacagttctttgttaggctttacattttttgaacaaattatccatgtaggcatttctctttgatttttgtctataagatagtatgatttcctacatgcattggagagatctaatgatccatctgtacacatatatatattcatatctaaatattgtatgtacccacatacctatatttgtatgtacacataatcatatatatgttttcatgtggtattagaagttaatgtgaaatatacaaatatgtctttatatttttatataacacatcgtttatcagaaagtttcaggttatttataataaattttcatttcaatggtatgtgtttagaactattgaaaaataagtcatttcacacttgatgcccaaagtagtcagtatagtgaatttaacttgattcctatgaagttctcttttccagataccccttataattacttttgaatatttagaaagccattgccttactcctgcacctttgttcctgggggagaatcatccaagtccactcagatggaaaaaaataaaatgtataatgctgaacttattatttaaaactttagtgttaatagaaaaaaatggaaaatgatgcaattctgtctcaactagaatattgactctgagaaattgtctataaattggactgcttactggtaatgtagcctgaaatttttcttcatgaatcctgatactttcattcccctgaaaataagttatcaatagttacagaaataaaaggtatatatgttactagcttataatgaagagatctaaagaggatcttcttttccaagattaaaatcagcatgtagtagctcctactttaatatgtggttctcataggatagtagtactcataatagcagcaataggattagtactagcagtagtggcatcttggtgttcttgaatgcaaatttaacattttataatatatatttcatattaccatcccaaaatgtttcttataacttagaattctgaaaaactcaggaacttcctttccacagtagtttttgaagaattctattacataacacctttttatctggacaattagcaagtttaaaattcttgtatttcctgattgattataatagcaatataatgtaatacttacaaaacttgaacacttaataatttccagaatgctatcaaaatgaatagtatagaatgtaatattggaatgaagtacagattaatatgttttgacaaagataatgcatagactattgaggcaaatgatactgtcaacatatgttttttatttctttaatttcttagaagcaa

SEQ ID NO: 670447 - DNA, 1884 bp, Homo sapiens
atgtttattgtagcactattcacaatagccattatattgaatcaacccaattgtccatcaatagatgaatggataaagaaaatgtatatatacacaatgaaatattatttatccataaaaaaagaataaaaccctgtcatttgcaacaacatggatggaactgttggacacacaaagataaatatcacattctccctaatatagggacctaaaaatataatgaattcacgaagatagagtagaaaaatagttaccagaggtaaagtggattggggagtggtaataaagaaaagatrgttaatgggtacaaaatatggttagaaagaaggaataagttctggtgttcacttatacagaaaggtaattatagttatcaataatttattatgtaattcaaaataactaaaagaatagaatgtgaatgctcctaataaaaagaaattataaatacttgaggtgatggacaccccaatttccctgatttgatcattacacatggcatgcttatatcaaaatatcaaatggaccccataaatatgtacaactagtatgtatccataataattaaaaattaaaaaatataattaagacgtgacagttctttgttaggctttacattttttgaacaaattatccatgtaggcatttctctttgatttttgtctataagatagtatgatttcctacatgcattggagagatctaatgatccatctgtacacatatatatattcatatctaaatattgtatgtacccacatacctatatttgtatgtacacataatcatatatatgttttcatgtggtattagaagttaatgtgaaatatacaaatatgtctttatatttttatataacacatcgtttatcagaaagtttcaggttatttataataaattttcatttcaatggtatgtgtttagaactattgaaaaataagtcatttcacacttgatgcccaaagtagtcagtatagtgaatttaacttgattcctatgaagttctcttttccagataccccttataattacttttgaatatttagaaagccattgccttactcctgcacctttgttcctgggggagaatcatccaagtccactcagatggaaaaaaataaaatgtataatgctgaacttattatttaaaactttagtgttaatagaaaaaaatggaaaatgatgcaattctgtctcaactagaatattgactctgagaaattgtctataaattggactgcttactggtaatgtagcctgaaatttttcttcatgaatcctgatactttcattcccctgaaaataagttatcaatagttacagaaataaaaggtatatatgttactagcttataatgaagagatctaaagaggatcttcttttccaagattaaaatcagcatgtagtagctcctactttaatatgtggttctcataggatagtagtactcataatagcagcaataggattagtactagcagtagtggcatcttggtgttcttgaatgcaaatttaacattttataatatatatttcatattaccatcccaaaatgtttcttataacttagaattctgaaaaactcaggaacttcctttccacagtagtttttgaagaattctattacataacacctttttatctggacaattagcaagtttaaaattcttgtatttcctgattgattataatagcaatataatgtaatacttacaaaacttgaacacttaataatttccagaatgctatcaaaatgaatagtatagaatgtaatattggaatgaagtacagattaatatgttttgacaaagataatgcatagactattgaggcaaatgatactgtcaacatatgttttttatttctttaatttcttagaagcaa

SEQ ID NO: 670448 - DNA, 1884 bp, Homo sapiens
atgtttattgtagcactattcacaatagccattatattgaatcaacccaattgtccatcaatagatgaatggataaagaaaatgtatatatacacaatgaaatattatttatccataaaaaaagaataaaaccctgtcatttgcaacaacatggatggaactgttggacacacaaagataaatatcacattctccctaatatagggacctaaaaatataatgaattcacgaagatagagtagaaaaatagttaccagaggtaaagtggattggggagtggtaataaagaaaagatagttaatgggtacaaaatatggttagaaagaaggaataagttctggtgttcacttatacagaaaggtaattatagttatcaataatttattatgtaattcaaaataactaaaagaatagaatgtgaatgctcctaataaaaagaaattataaatacttgaggtgatggacaccccaatttccctgatttgatcattacacatggcatgcttatatcaaaatatcaaatggaccccataaatatgtacaactagtatgtatccataataattaaaaattaaaaaatataattaagacgtgacagttctttgttaggctttacattttttgaacaaattatccatgtaggcatttctctttgatttttgtctataagatagtatgatttcctacatgcattggagagatctaatgatccatctgtacacatatatatattcatatctaaatattgtatgtacccacatacctatatttgtatgtacacataatcatatatatgttttcatgtggtattagaagttaatgtgaaatatacaaatatgtctttatatttttatataacacatcgtttatcagaaagtttcaggttatttataataaattttcatttcaatggtatgtgtttagaactattgaaaaataagtcatttcacacttgatgcccaaagtagtcagtatagtgaatttaacttgattcctatgaagttctcttttccagataccccttataattacttttgaatatttagaaagccattgccttactcctgcacctttgttcctgggggagaatcatccaagtccactcagatggaaaaaaataaaatgtataatgctgaacttattatttaaaactttagtgttaatagaaaaaaatggaaaatgatgcaattctgtctcaactagaatattgactctgagaaattgtctataaattggactgcttactggtaatgtagcctgaaatttttcttcatgaatcctgatactttcattcccctgaaaataagttatcaatagttacagaaataaaaggtatatatgttactagcttataatgaagagatctaaagaggatcttcttttccaagattaaaatcagcatgtagtagctcctactttaatatgtggttctcataggatagtagtactcataatagcagcaataggattagtactagcagtagtggcatcttggtgttcttgaatgcaaatttaacattttataatatatatttcatattaccatcccaaaatgtttcttataacttagaattctgaaaaactcaggaacttcctttccacagtagtttttgaagaattctattacataacacctttttatctggacaattagcaagtttaaaattcttgtatttcctgattgattataatagcaatawaatgtaatacttacaaaacttgaacacttaataatttccagaatgctatcaaaatgaatagtatagaatgtaatattggaatgaagtacagattaatatgttttgacaaagataatgcatagactattgaggcaaatgatactgtcaacatatgttttttatttctttaatttcttagaagcaa

SEQ ID NO: 670449 - DNA, 2597 bp, Homo sapiens
  misc_feature 2182, 2183, 2184, 2185, 2186, 2187, 2188, 2189, 2190, 2191,2192, 2193, 2194, 2195, 2196, 2197, 2198, 2199, 2200, 2201,2202, 2203, 2204, 2205, 2206, 2207, 2208, 2209, 2210, 2211,2212, 2213, 2214, 2215, 2216, 2217, 2218, 2219, 2220: n = A,T,C or G
  misc_feature 2221, 2222, 2223, 2224, 2225, 2226, 2227, 2228, 2229, 2230,2231, 2232, 2233, 2234, 2235, 2236, 2237, 2238, 2239, 2240,2241, 2242, 2243, 2244, 2245, 2246, 2247, 2248, 2249, 2250,2251, 2252, 2253, 2254, 2255, 2256, 2257, 2258, 2259: n = A,T,C or G
  misc_feature 2260, 2261, 2262, 2263, 2264, 2265, 2266, 2267, 2268, 2269,2270, 2271, 2272, 2273, 2274, 2275, 2276, 2277, 2278, 2279,2280, 2281: n = A,T,C or G
gagaacgttgacccatgagaagtctaacccaataaacaaattattttatttgaagtgatctgaaaatccaagtcaagtcctgactaagtgttttaatcacaaactgcacaggaaaaacttgttaattgaattaatgagtagctagccatgagttatactccttttcaggttttcagttcaattttaaattattcttaagtagtatataccaatatgattaatttttatattttgaccttgtattctgtgatcttgctaaactcactttttaattcttatcttttttgtagatacctcagagacaatgagaaatgtcatcattgaacagagttttattcctttctctccaatatttatagcatttatttatataactattaatttacttgccttattgcattggttaggatccccagtatgatgttaaataggagtggttgtgagaaagtgcatttttctctttccaaatcttaaatggaaagaattgagtctttcacataacttaagtattatgttagtgtctttttttgcagatccttttattgggttgagaaaattctcttttattgctagtttgtcagctgttttaatcatgagtggtttttgaattttgtcaaatgcttcttccgtataaatacaatcatttggcttttcttgtttattggctttctgaatgaccaaattgattttgaatgtggaaccagcctttccttcttggagtaaatccactcaattttggcatcataatatatttaaatgttgctgaatttaatttgatgacattttgttgaggacttccacacttgtattcatgacaaatatcagcttattgttttcctttcttgtaatgtctttggtttcatcaaaagaataattctgacttcataaaatgaatcaagcagtgtttccctctcttctacattctgaagaatgtgtgttttccaactactttagcaaaaattaagaagtttgatagtgctaatattagagggtaatatctatcaacaggaacccatatacattatttttgggaaagtgaatttttgtaaccattttaaaaataattaggcactatcttataaagttaaacatgtttatgccttaaaacacagcaattaaactcccagagaaattttaacatatgtgcaccagaagaaatgtacaacagaaaacatgtataaaagtattcagagcagcaacattatttataactgcaaaacaatggaaactgaaatgttcttcagcatcaacaggaaatgcaaaaacatggataagttacagatacatataacacatactggtaaaataaacaagacccagaaagctatatataacatgacagcatttttataaagctcgattgtttaagaattaatacatagtagaaaaactatttttaatagcaagctaatgataaacaacattaaggatagtggatgtagggagagcaaggtattaggatgaaagaggagcacatgaggcttcagagacttgggtttcatacctaagcattttattattatacaatgtaacttacctgtttggcakgtatatccattgacccagatgtattatacaatttagcaggtttttttaattaaataaggttatatatgtatatatatggtttatatatgtgtgtttatattatgtatctgtgtgtgtccttttaatatgcttagttgttgtcataatacataatttaattctatgcagaaggaataagcaaatgcccaaatttcccagtttcctccaaccctttacactggatggagtctttgattgctgggataaagaagttccatctgtattaagagatcaatgaacacagtagtgtttactctagacctgcaccactcctgctaagagatccaaatcgcttggcctatctctaggttagtagcctgttcatggcttgttttagttaaaaagtaacagtcaaagtgaaagttttataacagagcatgaattcagtcttttcatctccccaactcatctcccaaaagaagcagcaaaacaaacaaacagacaaaacaaacaaacaaacaaacaaaaaacagtttcaaactcttaaggtacataagtccaatgcctttcataatcctagaatctatctgctatatcctcacttggagaaaataaaatcaaagaaaaatggatagaaggtaaggggaagaaatannnnnnnnnnnnnnnnnnnnnnnnnnnnnnnnnnnnnnnnnnnnnnnnnnnnnnnnnnnnnnnnnnnnnnnnnnnnnnnnnnnnnnnnnnnnnnnnnnnntcaccctagccctaagaacatacacacataaaagtgccatggtttatgaaaacagaaaattcaggcaattttcttctaatggtctcatcaaaacactatctctctgtttgaagtatttgaacataaagtgtcttttcatttaaaatgtgtttgaatgtactttgactacaactcactgaaaagccaaaatttaaaccatatgttaataaatatgaatacagatcacacagaggatattgctcataagccaaaatttggtggccatttttactccatttgtttgctaaacatgacttatgactccaaatttgttcta

SEQ ID NO: 670450 - DNA, 2597 bp, Homo sapiens
  misc_feature 2182, 2183, 2184, 2185, 2186, 2187, 2188, 2189, 2190, 2191,2192, 2193, 2194, 2195, 2196, 2197, 2198, 2199, 2200, 2201,2202, 2203, 2204, 2205, 2206, 2207, 2208, 2209, 2210, 2211,2212, 2213, 2214, 2215, 2216, 2217, 2218, 2219, 2220: n = A,T,C or G
  misc_feature 2221, 2222, 2223, 2224, 2225, 2226, 2227, 2228, 2229, 2230,2231, 2232, 2233, 2234, 2235, 2236, 2237, 2238, 2239, 2240,2241, 2242, 2243, 2244, 2245, 2246, 2247, 2248, 2249, 2250,2251, 2252, 2253, 2254, 2255, 2256, 2257, 2258, 2259: n = A,T,C or G
  misc_feature 2260, 2261, 2262, 2263, 2264, 2265, 2266, 2267, 2268, 2269,2270, 2271, 2272, 2273, 2274, 2275, 2276, 2277, 2278, 2279,2280, 2281: n = A,T,C or G
gagaacgttgacccatgagaagtctaacccaataaacaaattattttatttgaagtgatctgaaaatccaagtcaagtcctgactaagtgttttaatcacaaactgcacaggaaaaacttgttaattgaattaatgagtagctagccatgagttatactccttttcaggttttcagttcaattttaaattattcttaagtagtatataccaatatgattaatttttatattttgaccttgtattctgtgatcttgctaaactcactttttaattcttatcttttttgtagatacctcagagacaatgagaaatgtcatcattgaacagagttttattcctttctctccaatatttatagcatttatttatataactattaatttacttgccttattgcattggttaggatccccagtatgatgttaaataggagtggttgtgagaaagtgcatttttctctttccaaatcttaaatggaaagaattgagtctttcacataacttaagtattatgttagtgtctttttttgcagatccttttattgggttgagaaaattctcttttattgctagtttgtcagctgttttaatcatgagtggtttttgaattttgtcaaatgcttcttccgtataaatacaatcatttggcttttcttgtttattggctttctgaatgaccaaattgattttgaatgtggaaccagcctttccttcttggagtaaatccactcaattttggcatcataatatatttaaatgttgctgaatttaatttgatgacattttgttgaggacttccacacttgtattcatgacaaatatcagcttattgttttcctttcttgtaatgtctttggtttcatcaaaagaataattctgacttcataaaatgaatcaagcagtgtttccctctcttctacattctgaagaatgtgtgttttccaactactttagcaaaaattaagaagtttgatagtgctaatattagagggtaatatctatcaacaggaacccatatacattatttttgggaaagtgaatttttgtaaccattttaaaaataattaggcactatcttataaagttaaacatgtttatgccttaaaacacagcaattaaactcccagagaaattttaacatatgtgcaccagaagaaatgtacaacagaaaacatgtataaaagtattcagagcagcaacattatttataactgcaaaacaatggaaactgaaatgttcttcagcatcaacaggaaatgcaaaaacatggataagttacagatacatataacacatactggtaaaataaacaagacccagaaagctatatataacatgacagcatttttataaagctcgattgtttaagaattaatacatagtagaaaaactatttttaatagcaagctaatgataaacaacattaaggatagtggatgtagggagagcaaggtattaggatgaaagaggagcacatgaggcttcagagacttgggtttcatacctaagcattttattattatacaatgtaacttacctgtttggcaggtatatccattgacccagatgtattatacaatttagcaggtttttttaattaaataaggttatatatgtatatatatggtttatatatgtgtgtttatattatgtatctgtgtgtgtccttttaatatgcttagytgttgtcataatacataatttaattctatgcagaaggaataagcaaatgcccaaatttcccagtttcctccaaccctttacactggatggagtctttgattgctgggataaagaagttccatctgtattaagagatcaatgaacacagtagtgtttactctagacctgcaccactcctgctaagagatccaaatcgcttggcctatctctaggttagtagcctgttcatggcttgttttagttaaaaagtaacagtcaaagtgaaagttttataacagagcatgaattcagtcttttcatctccccaactcatctcccaaaagaagcagcaaaacaaacaaacagacaaaacaaacaaacaaacaaacaaaaaacagtttcaaactcttaaggtacataagtccaatgcctttcataatcctagaatctatctgctatatcctcacttggagaaaataaaatcaaagaaaaatggatagaaggtaaggggaagaaatannnnnnnnnnnnnnnnnnnnnnnnnnnnnnnnnnnnnnnnnnnnnnnnnnnnnnnnnnnnnnnnnnnnnnnnnnnnnnnnnnnnnnnnnnnnnnnnnnnntcaccctagccctaagaacatacacacataaaagtgccatggtttatgaaaacagaaaattcaggcaattttcttctaatggtctcatcaaaacactatctctctgtttgaagtatttgaacataaagtgtcttttcatttaaaatgtgtttgaatgtactttgactacaactcactgaaaagccaaaatttaaaccatatgttaataaatatgaatacagatcacacagaggatattgctcataagccaaaatttggtggccatttttactccatttgtttgctaaacatgacttatgactccaaatttgttcta

SEQ ID NO: 670451 - DNA, 2597 bp, Homo sapiens
  misc_feature 2182, 2183, 2184, 2185, 2186, 2187, 2188, 2189, 2190, 2191,2192, 2193, 2194, 2195, 2196, 2197, 2198, 2199, 2200, 2201,2202, 2203, 2204, 2205, 2206, 2207, 2208, 2209, 2210, 2211,2212, 2213, 2214, 2215, 2216, 2217, 2218, 2219, 2220: n = A,T,C or G
  misc_feature 2221, 2222, 2223, 2224, 2225, 2226, 2227, 2228, 2229, 2230,2231, 2232, 2233, 2234, 2235, 2236, 2237, 2238, 2239, 2240,2241, 2242, 2243, 2244, 2245, 2246, 2247, 2248, 2249, 2250,2251, 2252, 2253, 2254, 2255, 2256, 2257, 2258, 2259: n = A,T,C or G
  misc_feature 2260, 2261, 2262, 2263, 2264, 2265, 2266, 2267, 2268, 2269,2270, 2271, 2272, 2273, 2274, 2275, 2276, 2277, 2278, 2279,2280, 2281: n = A,T,C or G
gagaacgttgacccatgagaagtctaacccaataaacaaattattttatttgaagtgatctgaaaatccaagtcaagtcctgactaagtgttttaatcacaaactgcacaggaaaaacttgttaattgaattaatgagtagctagccatgagttatactccttttcaggttttcagttcaattttaaattattcttaagtagtatataccaatatgattaatttttatattttgaccttgtattctgtgatcttgctaaactcactttttaattcttatcttttttgtagatacctcagagacaatgagaaatgtcatcattgaacagagttttattcctttctctccaatatttatagcatttatttatataactattaatttacttgccttattgcattggttaggatccccagtatgatgttaaataggagtggttgtgagaaagtgcatttttctctttccaaatcttaaatggaaagaattgagtctttcacataacttaagtattatgttagtgtctttttttgcagatccttttattgggttgagaaaattctcttttattgctagtttgtcagctgttttaatcatgagtggtttttgaattttgtcaaatgcttcttccgtataaatacaatcatttggcttttcttgtttattggctttctgaatgaccaaattgattttgaatgtggaaccagcctttccttcttggagtaaatccactcaattttggcatcataatatatttaaatgttgctgaatttaatttgatgacattttgttgaggacttccacacttgtattcatgacaaatatcagcttattgttttcctttcttgtaatgtctttggtttcatcaaaagaataattctgacttcataaaatgaatcaagcagtgtttccctctcttctacattctgaagaatgtgtgttttccaactactttagcaaaaattaagaagtttgatagtgctaatattagagggtaatatctatcaacaggaacccatatacattatttttgggaaagtgaatttttgtaaccattttaaaaataattaggcactatcttataaagttaaacatgtttatgccttaaaacacagcaattaaactcccagagaaattttaacatatgtgcaccagaagaaatgtacaacagaaaacatgtataaaagtattcagagcagcaacattatttataactgcaaaacaatggaaactgaaatgttcttcagcatcaacaggaaatgcaaaaacatggataagttacagatacatataacacatactggtaaaataaacaagacccagaaagctatatataacatgacagcatttttataaagctcgattgtttaagaattaatacatagtagaaaaactatttttaatagcaagctaatgataaacaacattaaggatagtggatgtagggagagcaaggtattaggatgaaagaggagcacatgaggcttcagagacttgggtttcatacctaagcattttattattatacaatgtaacttacctgtttggcaggtatatccattgacccagatgtattatacaatttagcaggtttttttaattaaataaggttatatatgtatatatatggtttatatatgtgtgtttatattatgtatctgtgtgtgtccttttaatatgcttagttgttgtcataatacataatttaattctatgcagaaggaataagcaaatgcccaaatttcccagtttcctccaaccctttacactggatggagtctttgattgctgggataaagaagttccatctgtattaagagatcaatgaacacagtagtgtttactctagacctgcaccactcctgctaagagatccaaatcgcttggcctatctctaggttagtagcctgttcatggcttgttttagttaaaaagwaacagtcaaagtgaaagttttataacagagcatgaattcagtcttttcatctccccaactcatctcccaaaagaagcagcaaaacaaacaaacagacaaaacaaacaaacaaacaaacaaaaaacagtttcaaactcttaaggtacataagtccaatgcctttcataatcctagaatctatctgctatatcctcacttggagaaaataaaatcaaagaaaaatggatagaaggtaaggggaagaaatannnnnnnnnnnnnnnnnnnnnnnnnnnnnnnnnnnnnnnnnnnnnnnnnnnnnnnnnnnnnnnnnnnnnnnnnnnnnnnnnnnnnnnnnnnnnnnnnnnntcaccctagccctaagaacatacacacataaaagtgccatggtttatgaaaacagaaaattcaggcaattttcttctaatggtctcatcaaaacactatctctctgtttgaagtatttgaacataaagtgtcttttcatttaaaatgtgtttgaatgtactttgactacaactcactgaaaagccaaaatttaaaccatatgttaataaatatgaatacagatcacacagaggatattgctcataagccaaaatttggtggccatttttactccatttgtttgctaaacatgacttatgactccaaatttgttcta

SEQ ID NO: 670452 - DNA, 1011 bp, Homo sapiens
tgggggactgttgggaaggcatcattgtgttttgaaatatgagaaggacatgcgatttgggagtggccaggggtggaataatatgtttggctctgtgtccccacccaaatctcatgttgaattgcaatccacaacgttgagtgaaggacctggtgggaagttattggatcatggggatggattttccccttactgttcttgtgatagtgggtgagtgttcatgagatttaaaagtgcttagcacttacccattcactctctcctgtgccaccatgtaaagattgtgcctgcttccccttcaccttttgctatgattgtaagtttcctaaggcctcctcagaaccagaagcccgtacagcctgcaaaactgtgagctgattaaacctcttttctttatgaattacctagtctcaagtatgttgttatggaagtatgaggactgactaatacagtagctattcattcaaatacatctttcataatagaataaaattagcattaattttgagttaaattatttgtttttgtggaattctaccaagctttccttttcactcacatcccagggacttcaaacaagagaaattatttattcctcactcttcatgttcatgttgggtaaacagaagattctcgtgcatgtatttctccctaggattccagggagcagcactatctggaaagttgtatcagaggaaaagctagagcattggtattgttatacctttacatctacatagtcagtgttgcttacagataattttttttttaattttactttaagttctgggacacatgtgcagaacgtgaaggtttgatacataggtatacatgtgctatggtagtttgctgcacctatcaacccatcatctaggttttaagccacacatgcattaggtatttgtcctaatgctttccctcctccaccacccaactggtccyggtatgtgatgttctcctccttgtgtccacatgttctcattgtacaactcccacttataagtgagaaca

SEQ ID NO: 670453 - DNA, 962 bp, Homo sapiens
tatcagaaggaaaccttctagatttttcttcttcaagtgcaattggtttcacacttattgaacattttccataggccagaaactgataggaactttacatgtatcgtttcaaatttttataaaaaccttcagggatgaattataatctctattttatcataagtaaattgaccatcaatgcaactaacaaatgactgagccaagatttgaatgtaggtatgtctgaccccagtgtttctattctctctaccacagtgagattgtttattgaaataaattatgaaaaaatgtattattttaccttggaggtgagggcaataattaaaagatatgaggactaataatgattttcattattgttggttatactcttatattactggaaggaatggaggacagccctttttctcaaactcagcaacaaagtttggtttggtttataaaatattttctacatgtgtttattttttattttcctgaatgtttgaaaactatcatgtgcgtagatgcaccatcatgtatatttattcttgaatctgaaattccatctaggtggcaacaagtctgttgcatattttatgctcaattaaaaagaagtcttacaagatttttatgtattacggaaagatcaccatctgtcccctatttaattaggtccatcctgattatgttacatgtgttctggctccctttaagaaaattttctacatatacatgaaggagaggcttgctaaaaatgaattgtcagcaagaaacaggagagatttaaacaaagaaactccaagaaaaccttaacaaagagaaatatctcaaacctgaatccttagattcagtaaaataataacccttccccttcacctctcatgacttctataccaaaatacaaatgcaacttgaatcctatcattttagaagcttcargagttaatttttctttcctgttacttttcagtttggaacac

SEQ ID NO: 670454 - DNA, 600 bp, Homo sapiens
taaagaattatctggtacatagcacatagaatattaagacatcgtctcagaaatctggtgaaatttcagtcatgagcttgttgttgggtcatagaagagaaggttatggaaaactcctatgactctcaatggctttggctgttggaattcaaacatatttatgacacagcgtattttgtaaatacactgtgaatgtgaaatcaaactcctttccatagttccaagggatttggataagaaacctgaacattttaaatcagtcagatataattatttttctgtaagttagtcttgttaggaatgatgatagcactaaaaaatggcaaaacaaattctggaaaaaaaagaaaatatttggtggcttttatcctatttcagactggttttactcagaaactgaaatacagaattatttcccaattacttagttgttggtagtagaaataagaatctgaaaaaatgtgcaagttaaataaatacgtcctaaagaacaacaacacaatgcctacagatttagacacaacagaatagactatatgaattctatatcatagktttctgtaagttttatctgttaaaagttttaaggttgttctttcc

SEQ ID NO: 670455 - DNA, 647 bp, Homo sapiens
caaatgatcatccccagaaagttttagagttctacaaaacttytactgaatagataattggaatcttatacatctattgcaggtattagaaaaagagaaagctccctcaacaaattttataaacttagtctagcttactatcaaaaccagaaataaataatgagagaaagaaaaattacaactcaatatcattcacaagcataaaacaaatgtactaaacacaatgttagcaaatcaaattcaataccatataaacaaatatacagtgtagagcacattgttttattcacaataaatgtaaggatgatttaaaataatataacatattaatgtagttcaataacagatgaaaggagaagactgtaagcctaccccagtagatatagaatcagcatttcttaaaagtaaaaattattactttatttaatttgaaggacttgagagaaatccttcaaggtacactagttttacaaataatgcaaggcagatgccacttgaaagttgtggttgtgacaaataggttaaacttctgaactttacatgtatagaattaaaatacaggatgagaagtgctcaaaggttacaaaggataaaggtaattaacgattataaagttcttacactgtttgtgaaatagtacaatatta

SEQ ID NO: 670456 - DNA, 647 bp, Homo sapiens
caaatgatcatccccagaaagttttagagttctacaaaacttctactgaatagataattggaatcttatacatctattgcaggtattagaaaaagagaaagctccctcaacaaattttataaacttagtctagcttactatcaaaaccagaaataaataatgagagaaagaaaaattacaactcaatatcattcacaagcataaaacaaatgtactaaacacaatgttagcaaatcaaattcaataccatataaacaaatatacagtgtagagcacattgttttattcacaataaatgtaagratgatttaaaataatataacatattaatgtagttcaataacagatgaaaggagaagactgtaagcctaccccagtagatatagaatcagcatttcttaaaagtaaaaattattactttatttaatttgaaggacttgagagaaatccttcaaggtacactagttttacaaataatgcaaggcagatgccacttgaaagttgtggttgtgacaaataggttaaacttctgaactttacatgtatagaattaaaatacaggatgagaagtgctcaaaggttacaaaggataaaggtaattaacgattataaagttcttacactgtttgtgaaatagtacaatatta

SEQ ID NO: 670457 - DNA, 636 bp, Homo sapiens
caagaatttaggttggataggggagagacacataggctggaagaaaatggaaaaatcaaaggaaggtcttgttaagatcaaagagtaagtctagaagcagaaatgagtgagagaaatggaaagttgaagaggataggatactagaatttaagtttctggaggtggagtaatttgaggcaatcaatgagatccaagattcatccaagaatgggggtgactaaagttacatggaggtcatagggttgacaaggtcaaggagctgttggatgggttatgtacatggacaytgtggtcactcatggtgattgtgggacccgaggtggatcggggccagtacgatggtagtaggtcaaggaagagggctgtggtttaatgtggcagcctgaaattcaacagaagaaaagtttttacttgagggcatagaagcaagggtctgtagaaggcattgggatgtaagatgaatgctcatcttatttctggtcctgtggtagatggagtatggaaaggactgtgggggaaatgtctacaggggagaacctgcatcaattatgtcaggaaaaagaggctgaagatacagaggacttcaggtgtcacagaatgaatggttcaaaagtgggaagctagccaggtgtggtg

SEQ ID NO: 670458 - DNA, 636 bp, Homo sapiens
caagaatttaggttggataggggagagacacataggctggaagaaaatggaaaaatcaaaggaaggtcttgttaagatcaaagagtaagtctagaagcagaaatgagtgagagaaatggaaagttgaagaggataggatactagaatttaagtttctggaggtggagtaatttgaggcaatcaatgagatccaagattcatccaagaatgggggtgactaaagttacatggaggtcatagggttgacaaggtcaaggagctgttggatgggttatgtacatggacactgtggtcactcatggtgaytgtgggacccgaggtggatcggggccagtacgatggtagtaggtcaaggaagagggctgtggtttaatgtggcagcctgaaattcaacagaagaaaagtttttacttgagggcatagaagcaagggtctgtagaaggcattgggatgtaagatgaatgctcatcttatttctggtcctgtggtagatggagtatggaaaggactgtgggggaaatgtctacaggggagaacctgcatcaattatgtcaggaaaaagaggctgaagatacagaggacttcaggtgtcacagaatgaatggttcaaaagtgggaagctagccaggtgtggtg

SEQ ID NO: 670459 - DNA, 1767 bp, Homo sapiens
atgatttgcagtttctcacaaaatgattttcatgctgctctgtgttgtagttctgtttcagaacttccgtacctttttcttgtatgtagcacgtataaatgcagctgtcatgcagttcttttcttttgctagaaaattagtcaggaggtaagatgaatcttccaaagttatgttaaattttgtttaacttgacaaattaaactttgttcttattaaacaaatacgtaaacaaatactggaaaagcaaagsttatatttgggagtaaaatgtatcttaaaatgcatgttcatcttttgctgagggaggaatagcttcttgtatgtccactggatagtaacagtggttcttttttggaattttatttttacctcttttgaacttctaaatcggtccctttattttcttaaaacatttgctctcttttttgtttacagattaaagaagtatggatcaattttagtcagttgataatttcatttaggaaacattgtcttgctcattatagagagttaagactgtgcataaaatactgaagtgcctcttttttattaggctcatatgtttgttcttgcaaagcgagatgcctattgtgattggtgttagatctgtaagaagctgtgttttttccacaagaataatcgacgaccggtttgagagcatctctcgcgttctttttctgtctgcttactgtccttgacaatgtgatcctgcacagtatcaggtgccagttatgcgtccctggaaggttggctcttatcagcaagtcctgcagatatctcttagataaaagtggtttgaaagaaaaggtatatttttcttttttgtttaaaagtaaaataaaacctccagttacactgtgcattcccctcacgtaaaaacaagacaaaaaccctttcctgagttgctcggcatgcactcctgtgctgtttcatgcatgtggatgttccttccgtttgttcctgtggaataactgagtgtgcctgatggcagaacacactgcagtgttatcagtgtctgcatgttttttaatagaacaggtttacttgatctgtcatctgttatgcaaaaaacagcaattacttttgcatccatctagctaaatctataatctgtgtcaatcacttatacctatcaatcatccgtatctattcacctgtcctctatgtctgtcttctctcagtctacatccatctagccttctgtcaatcatctacttttttttttaatagaacaagaagtttacttatcaagtcttgaaagggggacatgtttcaattggtgttcaaacaaaaattccagcttgtattagaaccttgaaatggtgaagttgtggaggttttctttgttccataatacagagacaagttcataatttttagtataacagctaagttgacaaattctaagtttcctcaggtaaatagtcataactgtccttttccctagagaagtgcttgctgggatagtaaaaacatacaccatttcatgacttctgcaaatactttccagcggaagtcagtgtaggtttgtttttggctaacatggtcttgctgcgcaggaatgtaaacactgtgtttgaaactctggaaatcacgtgtgtggggagatggggacgcttcccatgttgtggggagctctgtggctgtgatggctgcagttgccgtgcctctgttggaacgctaagtgcctgcaactcacgtcaatcatagaattgtgacgcacagttggcaaaatagttctttatgctatttctcaaaatttgagga

SEQ ID NO: 670460 - DNA, 1767 bp, Homo sapiens
atgatttgcagtttctcacaaaatgattttcatgctgctctgtgttgtagttctgtttcagaacttccgtacctttttcttgtatgtagcacgtataaatgcagctgtcatgcagttcttttcttttgctagaaaattagtcaggaggtaagatgaatcttccaaagttatgttaaattttgtttaacttgacaaattaaactttgttcttattaaacaaatacgtaaacaaatactggaaaagcaaagcttatatttgggagtaaaatgtatcttaaaatgcatgttcatcttttgctgagggaggaatagcttcttgtatgtccactggatagtaacagtggttcttttttggaattttatttttacctcttttgaacttctaaatcggtccctttattttcttaaaacatttgctctcttttttgtttacagattaaagaagtatggatcaattttagtcagttgataatttcatttaggaaacattgtcttgctcattatagagagttaagactgtgcataaaatactgaagtgcctcttttttattaggctcatatgtttgttcttgcaaagcgagatgcctattgtgattggtgttagatctgtaagaagctgtgttttttccacaagaataatcgacgaccggtttgagagcatctctcgcgttctttttctgtctgcttactgtccttgacaatgtgatcctgcacagtatcaggtgccagttatgcgtccctggaaggttggctcttatcagcaagtcctgcagatatctcttagataaaagtggtttgaaagaaaaggtatatttttcttttttgtttaaaagtaaaataaaacctccagttacactgtgcattcccctcacgtaaaaacaagacaaaaaccctttcctgagttgctcggcatgcactcctgtgctgtttcatgcatgtggatgttccttccgtttgttcctgtggaataactgagtgtgcctgatggcagaacacactgcagtgttatcagtgtctgcatgttttttaatagaacaggtttacttgatctgtcatctgttatgsaaaaaacagcaattacttttgcatccatctagctaaatctataatctgtgtcaatcacttatacctatcaatcatccgtatctattcacctgtcctctatgtctgtcttctctcagtctacatccatctagccttctgtcaatcatctacttttttttttaatagaacaagaagtttacttatcaagtcttgaaagggggacatgtttcaattggtgttcaaacaaaaattccagcttgtattagaaccttgaaatggtgaagttgtggaggttttctttgttccataatacagagacaagttcataatttttagtataacagctaagttgacaaattctaagtttcctcaggtaaatagtcataactgtccttttccctagagaagtgcttgctgggatagtaaaaacatacaccatttcatgacttctgcaaatactttccagcggaagtcagtgtaggtttgtttttggctaacatggtcttgctgcgcaggaatgtaaacactgtgtttgaaactctggaaatcacgtgtgtggggagatggggacgcttcccatgttgtggggagctctgtggctgtgatggctgcagttgccgtgcctctgttggaacgctaagtgcctgcaactcacgtcaatcatagaattgtgacgcacagttggcaaaatagttctttatgctatttctcaaaatttgagga

SEQ ID NO: 670461 - DNA, 1767 bp, Homo sapiens
atgatttgcagtttctcacaaaatgattttcatgctgctctgtgttgtagttctgtttcagaacttccgtacctttttcttgtatgtagcacgtataaatgcagctgtcatgcagttcttttcttttgctagaaaattagtcaggaggtaagatgaatcttccaaagttatgttaaattttgtttaacttgacaaattaaactttgttcttattaaacaaatacgtaaacaaatactggaaaagcaaagcttatatttgggagtaaaatgtatcttaaaatgcatgttcatcttttgctgagggaggaatagcttcttgtatgtccactggatagtaacagtggttcttttttggaattttatttttacctcttttgaacttctaaatcggtccctttattttcttaaaacatttgctctcttttttgtttacagattaaagaagtatggatcaattttagtcagttgataatttcatttaggaaacattgtcttgctcattatagagagttaagactgtgcataaaatactgaagtgcctcttttttattaggctcatatgtttgttcttgcaaagcgagatgcctattgtgattggtgttagatctgtaagaagctgtgttttttccacaagaataatcgacgaccggtttgagagcatctctcgcgttctttttctgtctgcttactgtccttgacaatgtgatcctgcacagtatcaggtgccagttatgcgtccctggaaggttggctcttatcagcaagtcctgcagatatctcttagataaaagtggtttgaaagaaaaggtatatttttcttttttgtttaaaagtaaaataaaacctccagttacactgtgcattcccctcacgtaaaaacaagacaaaaaccctttcctgagttgctcggcatgcactcctgtgctgtttcatgcatgtggatgttccttccgtttgttcctgtggaataactgagtgtgcctgatggcagaacacactgcagtgttatcagtgtctgcatgttttttaatagaacaggtttacttgatctgtcatctgttatgcaaaaaacagcaattacttttgcatccatctagctaaatctataatctgtgtcaatcacttatacctatcaatcatccgtatctattcacctgtcctctatgtctgtcttctctcagtctrcatccatctagccttctgtcaatcatctacttttttttttaatagaacaagaagtttacttatcaagtcttgaaagggggacatgtttcaattggtgttcaaacaaaaattccagcttgtattagaaccttgaaatggtgaagttgtggaggttttctttgttccataatacagagacaagttcataatttttagtataacagctaagttgacaaattctaagtttcctcaggtaaatagtcataactgtccttttccctagagaagtgcttgctgggatagtaaaaacatacaccatttcatgacttctgcaaatactttccagcggaagtcagtgtaggtttgtttttggctaacatggtcttgctgcgcaggaatgtaaacactgtgtttgaaactctggaaatcacgtgtgtggggagatggggacgcttcccatgttgtggggagctctgtggctgtgatggctgcagttgccgtgcctctgttggaacgctaagtgcctgcaactcacgtcaatcatagaattgtgacgcacagttggcaaaatagttctttatgctatttctcaaaatttgagga

SEQ ID NO: 670462 - DNA, 2031 bp, Homo sapiens
acagaagagggcactgggcatgggccagggaggttaagaattgggatggggacatggaggagcccaatccaaggcaagacacaggctcaggctttaccacagtcacaaaggctgcttcttgtttttgtttttagcagaaggtaagcatgagcaaatcactttttagaggtaactttgctggacttgtgaagaatggtgtgcaaggtccagagcgacttcaggagagggaaggtgggattcccacagagcaggagcacagatgagccaagcaaggccctgcttggaaggcagcaatcaacagagatgcacagacctgtgagggtgctgggacagccatgcaacactgcagcccttttgcttcctgagctcaccagttccctcgctccacatctgagaggtgctttggagaaacacagcccttctcaagagggttgcaaagtaagcttagttggtacatgagtgcacagcacattttaatttttatagttatgcatttatatgtattagacaaatgaycgacagaaaatttaccatttcacaggtattagtgtttaggatgaggctaaagtaggtatttctgtttagaaaagtaaatttgaagaaaagctacccagcaaattatagtagtatgtggtacacagacaaaaaaaaaattatgcagtcgtccaaatgactgaaactgataaaatgctggtcctggtctatggatgccccctctgacaaagcacagaatactcgcaccttctccagagtcagtgaccaaagatgagacagcagggcacccagcacagaaaccaccaggagccaacgacttcctcctgtgctccatcctactctctcactcacaccaagaattaaatccttttatgtagacagatggtcaagaattgctactataaagcaactcagtatggtctgaactatcagagagctacatggagaaacagttactgctaaacagacctctctgctgatgtttttcccggctacttaagtactgaaaatttccacaaggctgagtcaaatctgcatttcatcatctataagaaaggtacctatcgaggacaccctgctggccagtgtgtaaatatctaaaggaggactcagaaaacaccagggaagtccagcctgcatgtggtggctgggcttcagtgaagcatgcagcacaacaggagttgtaagtagtagttacataagcagccctggaaattctgctcagaagcaaactgaacaaataatattatctaaggcttacaattatttaactccctaaatttttggtcctcccagtagcacttttaaatgcctaaaagcaattaaaagcaacatttttccaatgtctcacagaaccattagaaacacaaaattaatagcttcataaactatagcttctattttatccataatagaatgaaggtgcataaaccacatagtaattaatctttggacaaaagcaaacaataaatggaatatatggctaagatcctttctttttgagtgtggcccaagataaaaatttcttccaaaagggtatcattaatgcaataaggcttttgtggaattctattttgtatgaaattcctgttttctattagctacttcttcctctgcgacacaagcctcattccttgtgaaaaacacgaagcagaaaacatttgtgaaatcatcaggtaaagatcccacgaccgttctatcactgacacagtatgtaggtacgtggtacaacccccaagggaccaccttgtggcatcctcagcaaccacagagccacagggcagatgagtgtttgctcccactgaggctctgcaacctctgccaccaatactggagaaatcctccaacctcactgttttctcctgaacttgttcccttctgttttttgattaatacgcagcaaacaggcacaccttcaagctgccaaaagcatcttcaacgttgtacacttacaatcttcaaaatatagttgttcaaaagagtcatcaaagtagtttttgaaatagaacacttactttgaccacataattgaacctt

SEQ ID NO: 670463 - DNA, 2031 bp, Homo sapiens
acagaagagggcactgggcatgggccagggaggttaagaattgggatggggacatggaggagcccaatccaaggcaagacacaggctcaggctttaccacagtcacaaaggctgcttcttgtttttgtttttagcagaaggtaagcatgagcaaatcactttttagaggtaactttgctggacttgtgaagaatggtgtgcaaggtccagagcgacttcaggagagggaaggtgggattcccacagagcaggagcacagatgagccaagcaaggccctgcttggaaggcagcaatcaacagagatgcacagacctgtgagggtgctgggacagccatgcaacactgcagcccttttgcttcctgagctcaccagttccctcgctccacatctgagaggtgctttggagaaacacagcccttctcaagagggttgcaaagtaagcttagttggtacatgagtgcacagcacattttaatttttatagttatgcatttatatgtattagacaaatgaccgacagaaaatttaccatttcacaggtattagtgtttaggatgaggctaaagtaggtatttctgtttagaaaagtaaatttgaagaaaagctacccagcaaattatagtagtwtgtggtacacagacaaaaaaaaaattatgcagtcgtccaaatgactgaaactgataaaatgctggtcctggtctatggatgccccctctgacaaagcacagaatactcgcaccttctccagagtcagtgaccaaagatgagacagcagggcacccagcacagaaaccaccaggagccaacgacttcctcctgtgctccatcctactctctcactcacaccaagaattaaatccttttatgtagacagatggtcaagaattgctactataaagcaactcagtatggtctgaactatcagagagctacatggagaaacagttactgctaaacagacctctctgctgatgtttttcccggctacttaagtactgaaaatttccacaaggctgagtcaaatctgcatttcatcatctataagaaaggtacctatcgaggacaccctgctggccagtgtgtaaatatctaaaggaggactcagaaaacaccagggaagtccagcctgcatgtggtggctgggcttcagtgaagcatgcagcacaacaggagttgtaagtagtagttacataagcagccctggaaattctgctcagaagcaaactgaacaaataatattatctaaggcttacaattatttaactccctaaatttttggtcctcccagtagcacttttaaatgcctaaaagcaattaaaagcaacatttttccaatgtctcacagaaccattagaaacacaaaattaatagcttcataaactatagcttctattttatccataatagaatgaaggtgcataaaccacatagtaattaatctttggacaaaagcaaacaataaatggaatatatggctaagatcctttctttttgagtgtggcccaagataaaaatttcttccaaaagggtatcattaatgcaataaggcttttgtggaattctattttgtatgaaattcctgttttctattagctacttcttcctctgcgacacaagcctcattccttgtgaaaaacacgaagcagaaaacatttgtgaaatcatcaggtaaagatcccacgaccgttctatcactgacacagtatgtaggtacgtggtacaacccccaagggaccaccttgtggcatcctcagcaaccacagagccacagggcagatgagtgtttgctcccactgaggctctgcaacctctgccaccaatactggagaaatcctccaacctcactgttttctcctgaacttgttcccttctgttttttgattaatacgcagcaaacaggcacaccttcaagctgccaaaagcatcttcaacgttgtacacttacaatcttcaaaatatagttgttcaaaagagtcatcaaagtagtttttgaaatagaacacttactttgaccacataattgaacctt

SEQ ID NO: 670464 - DNA, 552 bp, Homo sapiens
tcttcctatgttctcccatttttcctaatgaatcctgaaacccacttttttttcttaagtttttattttttattttgagacagggtcttgccccgtttactaggctggagtgcagtggcgcaatctyggctcactacggcctcaacctgcctgggctcaagctattctcctctctcagcctctgtagtagctgggactacaagtgcgcaccacctcacctggctaattttaaaaaaccgtttttgtggaaatggggtcttgctatgttgtccaggcagatctgaaactcctgggctcacgtgatccgcccgcctcagcctcccaaggtactaggatcacaggcgtgagtcaccacgcctggccttaagttcttactttgaaaaatttctaacatgcggaaaagtagaagaataggagattcttcctcgtatcctccagctagattcaattgctggcagtgccttcgttaaagctccttttctgattttccctttacacaattgtcatctatacttttttttttttttttttgagatgaagtttcgctcttgt

SEQ ID NO: 670465 - DNA, 552 bp, Homo sapiens
tcttcctatgttctcccatttttcctaatgaatcctgaaacccacttttttttcttaagtttttattttttattttgagacagggtcttgccccgtttactaggctggagtgcagtggcgcaatctcggctcactacggcctcaacctgcctgggctcaagctattctcctctctcagcctctgtagtagctgggactacaagtgcgcaccacctcacctggctaattttaaaaaaccgtttttgtggaaatggggtcttgctatgttgtccaggcagatctgaaactcctgggctcacgtgatccgcccgcctcagcctcccaaggtactaggatcacaggcgtgagtcaccacgcctggccttaagttcttactttgaaaaatttctaacatgcggaaaagtagaagaataggagattcttcctcgtatcctccagctagattcaattgctggcagtgccttcgttaaagctccttttctgattttcyctttacacaattgtcatctatacttttttttttttttttttgagatgaagtttcgctcttgt

SEQ ID NO: 670466 - DNA, 1532 bp, Homo sapiens
  misc_feature 13: n = A,T,C or G
taaatctacatcntcacttcgttcaacttgacagcccgacttgcccaagttctctgaatgctgggctggaaggtcctggatgaaaacaaggtacccctatcctggaggctgacaaggaggtgaacagtgggaggcacaggaaagtgggttcacctgatttagcattgggactaggggatatgttccctttacagaaggcagcctataaacatacatgcgtcttgaaattcctagaaaccagcctgaagccagagtcagtgagcaagaaagcaattttctaagggccatctttagctttaaatatctcatgcagattccaagctcggcctggagcaaggacagtgcctgtctgtgagggagaggtgaaaagaagtatttctgtcatgcccaaggggagctgcatttatagtccccgagcccgcacaagtgcctaaggcagccgccttcttccctgagttcctgctatctgctcctttggagttgtcttcttgctccccaaatagcagaaactcaccatgcatgcccccactaaaacaatgtttaaaaaggtgccttcactgacaaaccctaaacttaaaaaaattcaaattccagctttagcaccaaaattaattcacttttggaacatgtgaatgcataaagcgtaggtggctgtgtcatcaaaaccctgcaatgttcttttaggggaaattttgcaggagttggcaaactatgaccttctggccaaatctgacctgccacttgttttagtaaatcaagttccaccataacacagacacactcactgtacatgctgtctataactgcagagttgagttgttgagacagagacagagatacagttcacaaaacaaaaaatatctactaccaggctctgtaaaaaagtctgccaatctctaggttcaaggggatctattctttgtgtaaatgatgccaaaatacatgaatgcctccaagttaaaaccagttctttacttcacaatttaaggatttgttcatactttattgaggtaatggatttcttatttatttttattgaataatgttttgtcaaaaaattcaaataatatttgaggtagaaaaactagattacccaaaacagtagactcttgaaatttattgataatccaaacactttttaggcagayggaatatatctactgatatttaccatactaaaaggtaaaacggaattttaaaatgtctattaatttattttaaaacagctttttttcaatttaaaaaacctctatattttcaaaaaccaaaagaatactgagaagactggcaccgtttttaatgtctgcaagtctctttaaggtctggttttttagaaagttggtttctcacatctgcttttgaattcaacttgttgcaatatgttgttttatttgaagtatatgaaggctcagacacactgttgaattgagagagctatttaaagaatccttccaaagaactgtgaatattcttctttgatacctaacaagactctacgagggctagtttcttagggttggttacaatttgga

SEQ ID NO: 670467 - DNA, 3000 bp, Homo sapiens
cacgctacccacccctcagacacagcctacccaagggcctcaagcggtgggtgcatttctattatttgactaataaatctgaattaattgcatcacccttgaaaacatcccagcatttaaatgcccattgtcttattgtggagctgtgctctaaaccatccaaggacttcacgaggcacagggcacagaaagataacgcagtgtaattcctttggaggtggtattagtctgcagagttaaaaggccacctgcatggagagggcagggaggcagggtcatgtaggcttgtggctaggcccagtgcaagccctctatgaacagccactgtgagcagcgtggggttgggatggaaggggagggtgcgctgagactgtctctcacacagacacgttctgtaaacgtacacctggctgtgcattccttgataatgcactgtgagaatagaagctrtccattcatatttagaaaaaaaggaataggtcagacagcaaatacaaggggaagaaagtcaagttccatttctggagaaggcatttccaggccagaaccatgctgtgttgtccttgagaatggagccagacaagtgcatccatggaaggaaaattaaagcccttcaaggagctgctgggccagcacccggtcaccgccctgccccaggccccattcaccacatcatccccctctcctacactgatgagaaaattcaaacagcaggagagcaagcctccagtcactagagaatggcctgcctgggattggacaaagcatcgctttgggagctccatcaccctgggagccctgtttctccccaggacctgtaaccctcacctcttgatgtacttcccttgcaccctcaagtccaggctctggagtgatctctctacagtgactatctgcaatggctgcacatcatgggcacagggctgagagctagtgtttctggagacccagactggggtttgaatccagactctgcacatgtgactggaggtaccttcatttccttatctgtaaaatgggaacaaagttatctatcacttagggttgtaaggtttacaacagttagcacataaaaagcactttgggttgggcacagtggctcacacctgtacttccagcactttgtgaggccgaggcgagcagatcacttgaggtcagaagttcaagaccagcctggccaacatcatgaaaccccatctctactaaaaacacaaaaattagccgggtatggtggcgcgtgcctgtaatcccagctactcgggaggctgacgcaggagaatagcttgagcctgggaagtggaggttgcagtgagccaagattgtgccactacactccagcctgtgcaacagcgggagactccatctcaaaaaagcaaaaaaacaaacaaacaaaaaaaacaagagcattttgaacagggccttgtctgtactatataagtggtacctgatttcaattaagtgaagtctaatattcatagagtggcttgcaagggcatccaggaagatgatctgccttccaagcctgcttctctcttctgtccctacgagcccatgtactccctgtagctctcaccacctgcacaacatgctgtttctcacttccatatgatgctgggccttcagcttggtctcctctccctggagcagtctttaccaatctcttctctctaccagccctcaggggagttaggaatccgttgtcatttctgccttgtcagcctacatatctctctgtccttctccaacccacaacactggaattgtctgtttaccactgaagtgtgccggtatggatagttgagcctgtgacctattcatttttgtgtctagcctaggatctggtggagagttggtgatcaataaataatgctaattggatgagtatatggactgctttcttctttcttgcttttttaaaaggtaacaggacatgtcaaatctcaagccctctccaccagtctatgcatcccacccccagtctctccctccatgtcccatttcccatgcacttgccagaattcgagtttcaggtacacagatcttggtttcccacatgaaggctattactggtggttcagagcagacctttctgctctgtaacatgtttccacatgaatgctagtagcactgcatagaagcaaattattattgcttatatgcatggatgaaaacagatcatcttataactctaggaaagaatgatccaggtttccaaaacaattagtttgtttttcaataacacattcacagtggaagtgtttacaactgctctacttttctaaccaaaaccaattccattgtgtgacccagttccaacagaagggtagggggatgggggctgcactgccagtggagcaaacaccagggggagcgaaagggcagccagtaagcaaacctgagactgactgggtctccctttgacgtcagcatggagagggctcctcctggcagaacataggtagggctgataagcagtgatcatctgagacacttcctagctctgccttcaatttttcataagatcgtgatctttggtaagtcttttgatcttcatttagccaattcacaagtagatgcttagcggccaacaagaatttcgctacaccatgcccccaatattctaagctgcctgaaggaatttgctgccagagtttgtttgtattctgcaagccattcataactatgtgggtttgcttgcatatattcaggtgaacaggaaggagcgaggtcggcacctggcatgtacactgctgatgctgagataccaacttatacaaatgaaactttttgtttatacaaattgagccatgctatggttacatgttcttaaaatagtagatacaaaatctgatccaaacaaccctagacaaaacaataaagagaattttaaagaaatttccaggcatgttcttcagttgtgattctacagttctaatcataaaggctcatgcaagtgcatgccaaataaattagatttggatactagaaattaacaaagat

SEQ ID NO: 670468 - DNA, 776 bp, Homo sapiens
tgttttccatcctccaactctaggctctgtatacctagaggtcccagttcccaggagggcaacatctccaccaaaggtgacagcaagagtcgaactttaaactacaaatagcctgtcacgctagcctccttatgttaagagatgaccaggaaggaaaggaggtgtaattctcacaagggtartcgactcttaccatgaagagataggctactttcacacagtgaggacagagaagaatgtgtttgacatgcaagtgatccactgggtggctcttggtaccttcttttccaattttaataataaatgggcaagtgcaacagccacagcctgaagagggcatggtgacctggagtttggagctctcaagagtgagagtctgggtcacctcaccagataagccacctagatgaggaaaggagcagaccaaggctgaggggcatctacaatgggtggtagaaaaaggagacaatgagcacctctgcaggtgtgagaccagccacagcttcagggcatgttgtttgtccttttaaccctcttatcataattttccccaaaaaaagagattaaacaggttcctggatgaactttcccagatggagcagacttactatgcagagcaaacggatccaaaaaaccaaaagatagactctagtggatgatgtggtagaccattcagatgtccctgtcaggaccaagacactcattccatcatcttccaggaatgtcagctgctgatggcttataggaattgtgttggccaagggggtcccctaccc

SEQ ID NO: 670469 - DNA, 776 bp, Homo sapiens
tgttttccatcctccaactctaggctctgtatacctagaggtcccagttcccaggagggcaacatctccaccaaaggtgacagcaagagtcgaactttaaactacaaatagcctgtcacgctagcctccttatgttaagagatgaccaggaaggaaaggaggtgtaattctcacaagggtagtcgactcttaccatgaagagataggctactttcacacagtgaggacagagaagaatgtgtttgacatgcaagtgatccactgggtggctcttggtaccttcttttccaattttaataataaatgggcaagtgcaacagccacagcctgaagagggcatggtgacctggagtttggagctctcaagagtgagagtctgggtcacctcaccagataagccacctagatgaggaaaggagcagaccaasgctgaggggcatctacaatgggtggtagaaaaaggagacaatgagcacctctgcaggtgtgagaccagccacagcttcagggcatgttgtttgtccttttaaccctcttatcataattttccccaaaaaaagagattaaacaggttcctggatgaactttcccagatggagcagacttactatgcagagcaaacggatccaaaaaaccaaaagatagactctagtggatgatgtggtagaccattcagatgtccctgtcaggaccaagacactcattccatcatcttccaggaatgtcagctgctgatggcttataggaattgtgttggccaagggggtcccctaccc

SEQ ID NO: 670470 - DNA, 1241 bp, Homo sapiens
ataccaaaatctgagtcttgcagcctggcccagcagaattcacatataagaaaaattggccctctggataggtgggtttcactacccaagaatactgtattttccatccacatttggtttagaaaaacccaagtataagtggactcttgcagttcaaacccatgttgttcaagggtcaactctactttattactttattgcaggttttgtggggttttttttrttttgggtttttttgttttttttttttgaggcagagtcttgctctgttgcccaggctggagtgaagtggtgtagtctcggcccactgcaacctccgcctcccaggttcaagcgattctcctgcctcagcctcccgagtagctgggattacaggcgcctgccaccatacctggctaattttagtattttcagtagagacagggtttcaccatgttggccaggctgttctggaactcctgacctcaggtgatccacctgccttggcctcccaaagtgctggaattacaggcatgagccactgctcccagcctattgcagtttcttaaaaggcaattcattttaagatagagctatagttaataatatggaaatatctttaatacatattaattggaaaagcagattggagaacaatatgtttagtataattccattatgtatatcttttacattgtttacatctgtcatacccatatttattttggttcatttgctctttcagagacctacatatatacgttaaaatggcctaatattaaaatgctttttcccatttctccttatttttttgcttgaaaatgttgatattattttcaacatttggcatttagccatttttttagtcagtcttcctgaatttttaaattttagttactctcttatatatgtcataaaattgggttttgtcttgtgatatatctaaaagtctttttgtttaattgataaaagcaatgtgtctcatttttatgtttttgtttttattgcctttgtaaatattttattatatagaatctgctgtatttgtgttgtatgtttcttctcataattaaaaacatgtgtgtttttatcctagaggctacttttataattcagacttcatcagataccctataactctatattcgtaagatctatcagttccctcctgtgatcagtaaaaataatgacacaggattttcatctttgtcactttgcaagccggggacctctagccagtgacaccctgcctgggccttgct

SEQ ID NO: 670471 - DNA, 1241 bp, Homo sapiens
ataccaaaatctgagtcttgcagcctggcccagcagaattcacatataagaaaaattggccctctggataggtgggtttcactacccaagaatactgtattttccatccacatttggtttagaaaaacccaagtataagtggactcttgcagttcaaacccatgttgttcaagggtcaactctactttattactttattgcaggttttgtggggttttttttgttttgggtttttttgttttttttttttgagrcagagtcttgctctgttgcccaggctggagtgaagtggtgtagtctcggcccactgcaacctccgcctcccaggttcaagcgattctcctgcctcagcctcccgagtagctgggattacaggcgcctgccaccatacctggctaattttagtattttcagtagagacagggtttcaccatgttggccaggctgttctggaactcctgacctcaggtgatccacctgccttggcctcccaaagtgctggaattacaggcatgagccactgctcccagcctattgcagtttcttaaaaggcaattcattttaagatagagctatagttaataatatggaaatatctttaatacatattaattggaaaagcagattggagaacaatatgtttagtataattccattatgtatatcttttacattgtttacatctgtcatacccatatttattttggttcatttgctctttcagagacctacatatatacgttaaaatggcctaatattaaaatgctttttcccatttctccttatttttttgcttgaaaatgttgatattattttcaacatttggcatttagccatttttttagtcagtcttcctgaatttttaaattttagttactctcttatatatgtcataaaattgggttttgtcttgtgatatatctaaaagtctttttgtttaattgataaaagcaatgtgtctcatttttatgtttttgtttttattgcctttgtaaatattttattatatagaatctgctgtatttgtgttgtatgtttcttctcataattaaaaacatgtgtgtttttatcctagaggctacttttataattcagacttcatcagataccctataactctatattcgtaagatctatcagttccctcctgtgatcagtaaaaataatgacacaggattttcatctttgtcactttgcaagccggggacctctagccagtgacaccctgcctgggccttgct

SEQ ID NO: 670472 - DNA, 1241 bp, Homo sapiens
ataccaaaatctgagtcttgcagcctggcccagcagaattcacatataagaaaaattggccctctggataggtgggtttcactacccaagaatactgtattttccatccacatttggtttagaaaaacccaagtataagtggactcttgcagttcaaacccatgttgttcaagggtcaactctactttattactttattgcaggttttgtggggttttttttgttttgggtttttttgttttttttttttgaggcagagtcttgctctgttgcccargctggagtgaagtggtgtagtctcggcccactgcaacctccgcctcccaggttcaagcgattctcctgcctcagcctcccgagtagctgggattacaggcgcctgccaccatacctggctaattttagtattttcagtagagacagggtttcaccatgttggccaggctgttctggaactcctgacctcaggtgatccacctgccttggcctcccaaagtgctggaattacaggcatgagccactgctcccagcctattgcagtttcttaaaaggcaattcattttaagatagagctatagttaataatatggaaatatctttaatacatattaattggaaaagcagattggagaacaatatgtttagtataattccattatgtatatcttttacattgtttacatctgtcatacccatatttattttggttcatttgctctttcagagacctacatatatacgttaaaatggcctaatattaaaatgctttttcccatttctccttatttttttgcttgaaaatgttgatattattttcaacatttggcatttagccatttttttagtcagtcttcctgaatttttaaattttagttactctcttatatatgtcataaaattgggttttgtcttgtgatatatctaaaagtctttttgtttaattgataaaagcaatgtgtctcatttttatgtttttgtttttattgcctttgtaaatattttattatatagaatctgctgtatttgtgttgtatgtttcttctcataattaaaaacatgtgtgtttttatcctagaggctacttttataattcagacttcatcagataccctataactctatattcgtaagatctatcagttccctcctgtgatcagtaaaaataatgacacaggattttcatctttgtcactttgcaagccggggacctctagccagtgacaccctgcctgggccttgct

SEQ ID NO: 670473 - DNA, 1241 bp, Homo sapiens
ataccaaaatctgagtcttgcagcctggcccagcagaattcacatataagaaaaattggccctctggataggtgggtttcactacccaagaatactgtattttccatccacatttggtttagaaaaacccaagtataagtggactcttgcagttcaaacccatgttgttcaagggtcaactctactttattactttattgcaggttttgtggggttttttttgttttgggtttttttgttttttttttttgaggcagagtcttgctctgttgcccaggctggagtgaagtggtgtagtctcggcccactgcaacctccgcctcccaggttcaagcgattctcctgcctcagcctcccgagtagctgggattacaggcgcctgccaccatacctggctaattttagtattttcagtagagacagggtttcaccatgttggccaggctgttctggaactcctgacctcaggtgatccacctgccttggcctcccaaagtgctggaattacaggcrtgagccactgctcccagcctattgcagtttcttaaaaggcaattcattttaagatagagctatagttaataatatggaaatatctttaatacatattaattggaaaagcagattggagaacaatatgtttagtataattccattatgtatatcttttacattgtttacatctgtcatacccatatttattttggttcatttgctctttcagagacctacatatatacgttaaaatggcctaatattaaaatgctttttcccatttctccttatttttttgcttgaaaatgttgatattattttcaacatttggcatttagccatttttttagtcagtcttcctgaatttttaaattttagttactctcttatatatgtcataaaattgggttttgtcttgtgatatatctaaaagtctttttgtttaattgataaaagcaatgtgtctcatttttatgtttttgtttttattgcctttgtaaatattttattatatagaatctgctgtatttgtgttgtatgtttcttctcataattaaaaacatgtgtgtttttatcctagaggctacttttataattcagacttcatcagataccctataactctatattcgtaagatctatcagttccctcctgtgatcagtaaaaataatgacacaggattttcatctttgtcactttgcaagccggggacctctagccagtgacaccctgcctgggccttgct

SEQ ID NO: 670474 - DNA, 650 bp, Homo sapiens
ttttgagatgatggaaactttgtttctttttgagactgtgacttgctctctcccagactggagtgcaatagcacaatcagggctcactgtaacctcaacctcctgggctcaagacatcctcctgccttagcctcctgtgtagctggaactacagatayacaccaccacgctcggctaattttttgatttttgtagagatggagtctccctatgttgcccagactggtctcaaactcctgggctcaagcaatcctcccacctcggcctcccagagttctgggattacaggcacgagccaccatgccccgccaatggaaacatttttaaattaattggggtaatagttgcacaactctgtgaatatactaaaaaccactgaaccgcacactttaagtgaatgacttatatggtaagtaaattatatctcagtaacactgttaaaggaaaaacaaaaaatcaaatacctttagtgtacaagttcaacaaagactcctagtcacacaaaacccacttgtataacactaccagagtccaggggagaatgaatggcccactcaagtttctgttgactgtccatatactagtacaatgtgacataaatcttatgccttgaacttgcttcttgatgaaagaattatggtatacattct

SEQ ID NO: 670475 - DNA, 650 bp, Homo sapiens
ttttgagatgatggaaactttgtttctttttgagactgtgacttgctctctcccagactggagtgcaatagcacaatcagggctcactgtaacctcaacctcctgggctcaagacatcctcctgccttagcctcctgtgtagctggaactacagatacacaccaccacgctcggctaattttttgatttttgtagagatggagtctccctatgttgcccagactggtctcaaactcctgggctcaagcaatcctcccacctcggcctcccagagttctgggattacaggcacgagccaccatgccccgccaatggaaacatttttaaattaattggggtaatagttgcacaactctgtgaatatactaaaaaccactgaacygcacactttaagtgaatgacttatatggtaagtaaattatatctcagtaacactgttaaaggaaaaacaaaaaatcaaatacctttagtgtacaagttcaacaaagactcctagtcacacaaaacccacttgtataacactaccagagtccaggggagaatgaatggcccactcaagtttctgttgactgtccatatactagtacaatgtgacataaatcttatgccttgaacttgcttcttgatgaaagaattatggtatacattct

SEQ ID NO: 670476 - DNA, 2375 bp, Homo sapiens
tctctggacttcttaagtttcatacttaattcaattattttaatctttctgtttatttatataaacagtattcagaaccataaattttccactgagctttgcttttattgtaccatgtagagtccgatactattttccacatggggaccaattctctctgatttcctccttgacccaagaattatttaagagtttctaaatttctagatgacaggttagttttgtttctagttttagttttattgcattttgatcagagaatgttgcctgtaatatcatcttttgatctatcactagctgagagaggcctagtaagttcccttctactgataagttttttgtaatttctggaggctttgcttcctgaatttcgaaatggatatttagtccacagaaagtcatgagagttcttcattgtggagtgtagcttctatcactttggtgtgctttttttgacttgtttacagctttttgagtaactgtcaatctgtgatcatttcctctgtcctgacatttctcagctctccttggctatatccattattgaggaggcctacctataggttttgggcaattctggcttctgaaagaagttaataatagccctcagctctgacagatatttgccaacttgatctagttcctggtgtggcaaggcaggcagagcatttcttaatattcattcccacttccctactctaagcatcatcactgtcccagataatataactattcttctgtcttgatgttccatcatttccaatctcagctcaaagttggaccctgcctcagctcaaagtttgacccacacctgcttggttagagcccctgcatctcaacaccttgcttcattggcctggcctgttggactgacctcttgcaatgacaatactgccaataaaactttgagaattaccttgatttcttcttgagccagtattgccttttaagatggactgctctttctcaccagtgtggtacctgcatgacccatgtttaagctgtccattccttctgaatacattggatccaccagttgctctttctgggaccarttgtggcacccaagtcagccttaccaggctctagcttttaccttcacctttcttaccaaattactgaagatttgcacttcacgatagcagctgcctcaagaggaaaaatattaggggcagagatgtctaagtgattacctttttcctagtttatgatggaaaactcacagattcttgcatctggccaatatgttttggattattttttcttatagtttgccacagagttcacctatcacagtaaaatctttccatgggtcctatagaagattgctgccatgagccttagtaaaaggcctttttaactccaacaaattacaatctttagttctatcttatctctaacattatttgtctattctcaaaaaacagtcaattggagactggcaaaaatgaatttccctccccaaaataacacgaattacaacaatgataataataatggctaatacttttcaagcacttactatgtgaagtttctgtgtatttgatatatattatctcagttaatcctcactataattttaggtaaatactataattgttgttattataattattattatcataatcctaatttatagattaggaaactgagacaagttgcataagaaaagtaaggttatgaaagttttaagtggtggaacagataggatctcaggtctaactccaaaaactacatatacccttatccattatgctgattctccctaaggccatgcagattacatgcgttccattgattaataattgtatgctctatcatggattctatatcataattgtatagaagcatacattactggtctagttcccatagtacacttcaagcatcagcatactgttactgaatcagcatactcatcaacatacaagaatcagcatactcatcaatcacagggtacaggtattaaataaatattttgcaagtttactcttgaatgtcttcaaaagtctttaggtaagtataatcttattaattcataattagaacatcctaaagacttaacattatttactctattacctttgaaccacctcccttaaaagacagtgaattggttagaataagttgtggcagctgctataataaacaacccgtcaagccccaataaacaatcaaaaggctatttttgctcatgttcattctgttactgaaatgccaggggttcagtctaggtcatgttgcttgcagcacagaaagccaatcaccaagacaatgagtatccctagggaagaaggatttaatcgggtgctgcagccaaggagaactgtagatcagtctcaaaaccatctcccaaccaactaaaatattgagca

SEQ ID NO: 670477 - DNA, 1906 bp, Homo sapiens
gtatcaactcatttcatcctaatgccctacgaggtactatcattgtctctatattataaacgaggcactagaagcacacagaggtcagctaatttggccaaagtcacccagctagtaagggaccaagctgggattatgcactctggctcttactgactctgtgatccccctcagattctcaggtcttctcatcagggagactgaggtctgataaactcatttacatggaggggtcaacrgtcctttttgagataaggaataaggaccaggtaaatgatcaaatgtactaatgcctcctccagctcctttcctgttcctggacccagcccctctccactgtttttatgtttgaatttgcaatcttgacacaaaatgcccatgaaggtcaaaagataaaaaacaagaaaaagaaaggcttattccttttcaatgcttgtaggtgaaaatcacattgatgtgttttatattttctgggtggtgtctggcgatccctacacacccaggtgaacttgttattcctattaaatgagtcagtcctgagggtaaacgttaatttaattgagcatacgtataccaataaaaccttggggaaaaaaagtgccagtaggtggaaatatttctgatagctacccgaaataatggcatgtatgtattgtatgtgcatgagtgttagagacaaaatgtcacatttcatagtgtgaaggctgaatatctatctaaacagaggaacttgagagaataaactgtaatccaaaggaatacatctttggtagaatttcaggcttcatcagcaagggagagagcctctaactatttcttgcctgatgcccttggaaccaaagcacctggcctcgagttcaatgcgattggagggggcagccccagataaagagtgaaaggggtggagagtaggtgtgagtcaggaatggtaccagtgcacctcatctttctcatctacaagtcagcaaggtgacccccactttaacaccttggatggcccccaccatgaagtccatactccttagtttggcacacaggagctcctcagcctgaaccctgtctaccttgctgtccttttgcattctttcttccctctggttgaatgtccctctccagtccctaggcctcctctaggaactagtcaaaatgctacctcctctgtgaagcctccccacattccctcctctgttgatatcttagaccccaggcttctggtttatttaaattatgatttgtctaaacatctcttccccttggtgagctctatgatttaggaatctgtcttatctgccccaaacctggctcagtgcctggttcccactgtacactcagcaaattgtgatgatggagtgaggggctaaaggctgggcctcagggcatagcactgagggagggagactgtggcacagccgcttattgttgcacaggttgtgcactgcatacttctatgatacaaatggccttctctaaagttctgcatcaccttcacataggcagtagccctcggagacacagctcagtggctagagtcatggaaatcctggcctggccctgcagtcaagtgacagtgtgaggaaatgaagtgttttgaggccaagggtgtagtagattcctcacttcctcagctcctcccgtcctcccttttctgggaggggaagtatcagggtcagggatacacatagaggtttgggcatcttaagaagctgcccctgagccagaggctcttctcagttggaagatgctcttctcatgaacgtctcaccctcacgaactggttaaccggttaggcacgacttctaacttctggatctctgtaggttaaggtttctcagccttcatgctattaacatttttgactggatacttctttgcagggtgggtggggggagctgtcctgtgcattgca

SEQ ID NO: 670478 - DNA, 602 bp, Homo sapiens
caataaaatgccacctttgtttttgtttttgttttttttttgagacggagtcttgctctgtcgctaaggctggagtgcagtggcatgatctcagctcactgcaacctccacctccagggttcaagcgattctcctgcctcagcctcctgaaaagctgggactacaggtgcatgtcaccacacctggctaattttttgtatttttagtagagacaggatttcaccatgttggccaggatggtcttgatctcctgacctcgtgatccaccctccttggcctccacaagtgctgggattacaggcrtgcgccaccgcgcccagccataaaatgccatttttttatacatcaaaaatgaaggtgcttgaggctaacattcaaaaatgtgtattgagggtccacacaggaagcctgtgctctggttatatttatagaggtggtctcaagtctctagaacacaaagtctctgctacctcgtgaaggaacacaacagttctccctgtgaccaaaggacccttgccttctttagagtcaacctagagtccaggtgaatacaatgtcatgtctttcatacagtgggctgctttgtagcaaactccaccatc

SEQ ID NO: 670479 - DNA, 935 bp, Homo sapiens
ttattttgggacatatttctagcctgtcaagatcaccatgattctgcaacttacctctctgaatctcagtgtatttacctaggaagtagagataacagacatacctagctttctgagggttataggtaaagctcagataaaccctaaaatacaatgcaaatgccattttaattctatcatccatcttatctgctgtatcctccagctttatgtcatcctaaaatttgattggcatgcctcctatctctctgttgggacactcatgcaaatattgtttagcacaggatcaggaccagagccctttgacctggcccctgaaacagccctctcacawaggtgacatcaagtcccaccagcactctttggggtgtggttgtgaaattcattgagaagcaaccagccatggtcactgttttcattttgctcagttgctttgctggaataaagatacaaatggctgagcatttctctgctggaaatgaagttaattgcttcaagtgattactactgccccctaaatgtccacaaactatcttctcattaagaatttatagaaacttcctttaataatatcaatttcaaagtgtcctaagttcacattttcccagtttctgaatactgggagacggtttgcctttctcctatcacttggtatcattactctatcccatcatttccaatttaccaagcagtaggcagagcagattcttccgtaacctggaatgtaattcacctgggcctacactggagtcacctgggggagcttcaacgcacggagctgctcgtcccactctagggattctgttgaactgctttgggatctggtctgggcatggaataatagggctccccaggtgagctttattaaatgtaatttgcctctcttgggtttcaatttcctcttagtggttttcacccttatctttgtactttgg

SEQ ID NO: 670480 - DNA, 1076 bp, Homo sapiens
  misc_feature 538, 579, 580, 581, 582, 583, 584, 585, 586, 587, 588, 589,590, 591, 592, 593, 594, 595, 596, 597, 598, 599, 600, 601,602, 603, 604, 605, 606, 607, 608, 609, 610, 611, 612, 613,614, 615, 616, 617, 618, 619, 620, 621, 622, 623, 624: n = A,T,C or G
  misc_feature 625, 626, 627, 628, 629, 630, 631, 632, 633, 634, 635, 636,637, 638, 639, 640, 641, 642, 643, 644, 645, 646, 647, 648,649, 650, 651, 652, 653, 654, 655, 656, 657, 658, 659, 660,661, 662, 663, 664, 665, 666, 667, 668, 669, 670, 671: n = A,T,C or G
  misc_feature 672, 673, 674, 675, 676, 677, 678: n = A,T,C or G
ttttccaggttacttttctaggaatatatatttttactttgggattccccacttaaaagataagaaaatgggagggataggaaaatcataatatacaccaccccttaccccactcaaaaaatggcaactagattaattttcttaaattcaatattacacgagtgaaattttgcttgggaacttttaagtaggaataaatggcttctaaagtaatatgttttatcagggtatcagggtttggtcatcttttcatagaaaataagtatgtttggaaacaactggctcacataaccggttccttctctttttccaattgttgtcacttaaaaaatattcatcagaaagtggaaaatttgttttgaactgcacttgccgtccctaaagtgccacatcagtttctttttttttttttttgaaacggagtctcgctctgtcacccaggctggagtgcagtggcacgatcttggctcactgcaaactccacctccggggtccacaccattctcctgcctcagcctcccgagtagctgggactacnagcgcccgccaccacgttcggctaattttttgtatttttannnnnnnnnnnnnnnnnnnnnnnnnnnnnnnnnnnnnnnnnnnnnnnnnnnnnnnnnnnnnnnnnnnnnnnnnnnnnnnnnnnnnnnnnnnnnnnnnnnnttactgtacaacatttcaaatattaaaataaatagagagtataacaaatacctgtatatttcttatctaggtttgccaattgctaacatgttgtcatatttactttatttttttaaagcatttggaggtaaattataatgttgctttaccattatgttctttagtatctctaaaataaagatattttaattttttgtgtrtatatatatatatatgtgcccccccccacacaacttttttttttttttatattttgtagcaatggggttcaccatgttggccaggctgatctcgaactcctgacctcaggtgatccacctgccttggcctcccaaagtgctaggattataggtgtgaaccactgtgcctggccaaataaagatttttttcttaactga

SEQ ID NO: 670481 - DNA, 1778 bp, Homo sapiens
ttttccaatgattggattctccagggtgcgcacatgacagagacaagtttctgtactgagtcctgattccctaggcaaaaagtgcaaagcataccgaaaaataaatatccagccttaaaaaatcagtacaacaatcccttggctcccatgaacatcgtagaccccactgtgtgcaggggccgcagtcgacggcagggtatgaggagaaacaggacaggtttccatgtcccttgtgagcgcagagtgtaggaggaagattgacaggaaaaccaaaataagacacctgaaactccacgatatgataaatgatatgacaacagggggaggtgctaaatgttacgagagtgcagcagaggcataaaataaaagaagcctgaagcaaacttttaattcgttacacaaaaaagtctttagtcttctttgccgagattaaagcagtgccactctgggtctggagccgaactggtagctggggtctagaagaattcagagttcatcccgagtcttctctagagatggaagcctggagaagcctggagaagcctggggaagccagaaggccctgaacccctgacaaaaagcctaaggatcctcacccagcaatgctgaccacgaccattaaaacatgaagcccacccccaaagaggaaaatccttgccctttaatgaagctgccaaaaacctccaaatttaacagtttgcactgtgtctttctgcagacacagaaaaatgagctgggaaatagaacagtcacatctggccaagagagttgtggacttttgaggtgttgcctgggtctcctgggcagtagaatcagctgacccaatgtttaatagagaaactacaaattttcaaacataagaaaaccatgtaaaaaaaaaaaatcaatgggggagggggtgtttaaatgcatttgagaccagccatatgacagcgatttggaagcccttataacccttagttttaataacataagaattccctatgaaattctaaataaggctgggcatggtggttcatgcttgtaattccagcgcttaaggaggctgagttgaggtgggcagatctcctgaggttaggagtttgagatcagcctggccaacacggtgaaaccccatctctgctaaaaatacaaaaattagctgggcatggtggtgcgcacacgtaatcccagctacttgggaggctgaggcaggagaatggcttgaacccaggaggtgggggttgcagacagctaagatcgtgccactgcacgccagcctcggtgacaaggcaagactctatctccaaaaataataattctaaataaagcaaaataaaatgtatgcataaacatatatatgcaaaggtatatrtatatgcacatacatgcatacatgtgtatagatatatgtacagtatagcctgccagctatgttaaaagaagttttttgcaaagccaccttttgtgtatggaactgtgtgtgaaaaaagacttatagaactgtgagaaacttggataagatgaggcatgcgtacttccccatctgaaatagccaagatgatgaccattcttataagtgaaagagttttttttttttgtttggggaagtgtttttttttttctttttatctttcattcctgttcaaattcttttttaatttacacataagaaaaagtggtctggcacagtggctcacttctgtaatcctagcactttgggagactgagagggaggactgcttgagaccaggaattcgagaccaacctgggcaatatattgagaccctgtctctatt

SEQ ID NO: 670482 - DNA, 1778 bp, Homo sapiens
ttttccaatgattggattctccagggtgcgcacatgacagagacaagtttctgtactgagtcctgattccctaggcaaaaagtgcaaagcataccgaaaaataaatatccagccttaaaaaatcagtacaacaatcccttggctcccatgaacatcgtagaccccactgtgtgcaggggccgcagtcgacggcagggtatgaggagaaacaggacaggtttccatgtcccttgtgagcgcagagtgtaggaggaagattgacaggaaaaccaaaataagacacctgaaactccacgatatgataaatgatatgacaacagggggaggtgctaaatgttacgagagtgcagcagaggcataaaataaaagaagcctgaagcaaacttttaattcgttacacaaaaaagtctttagtcttctttgccgagattaaagcagtgccactctgggtctggagccgaactggtagctggggtctagaagaattcagagttcatcccgagtcttctctagagatggaagcctggagaagcctggagaagcctggggaagccagaaggccctgaacccctgacaaaaagcctaaggatcctcacccagcaatgctgaccacgaccattaaaacatgaagcccacccccaaagaggaaaatccttgccctttaatgaagctgccaaaaacctccaaatttaacagtttgcactgtgtctttctgcagacacagaaaaatgagctgggaaatagaacagtcacatctggccaagagagttgtggacttttgaggtgttgcctgggtctcctgggcagtagaatcagctgacccaatgtttaatagagaaactacaaattttcaaacataagaaaaccatgtaaaaaaaaaaaatcaatgggggagggggtgtttaaatgcatttgagaccagccatatgacagcgatttggaagcccttataacccttagttttaataacataagaattccctatgaaattctaaataaggctgggcatggtggttcatgcttgtaattccagcgcttaaggaggctgagttgaggtgggcagatctcctgaggttaggagtttgagatcagcctggccaacacggtgaaaccccatctctgctaaaaatacaaaaattagctgggcatggtggtgcgcacacgtaatcccagctacttgggaggctgaggcaggagaatggcttgaacccaggaggtgggggttgcagacagctaagatcgtgccactgcacgccagcctcggtgacaaggcaagactctatctccaaaaataataattctaaataaagcaaaataaaatgtatgcataaacatatatatgcaaaggtatatgtatatgcacatacatgcatacatgtgtatagatatatgtacagtatagcctgccagctatgttaaaagaarttttttgcaaagccaccttttgtgtatggaactgtgtgtgaaaaaagacttatagaactgtgagaaacttggataagatgaggcatgcgtacttccccatctgaaatagccaagatgatgaccattcttataagtgaaagagttttttttttttgtttggggaagtgtttttttttttctttttatctttcattcctgttcaaattcttttttaatttacacataagaaaaagtggtctggcacagtggctcacttctgtaatcctagcactttgggagactgagagggaggactgcttgagaccaggaattcgagaccaacctgggcaatatattgagaccctgtctctatt

SEQ ID NO: 670483 - DNA, 1778 bp, Homo sapiens
ttttccaatgattggattctccagggtgcgcacatgacagagacaagtttctgtactgagtcctgattccctaggcaaaaagtgcaaagcataccgaaaaataaatatccagccttaaaaaatcagtacaacaatcccttggctcccatgaacatcgtagaccccactgtgtgcaggggccgcagtcgacggcagggtatgaggagaaacaggacaggtttccatgtcccttgtgagcgcagagtgtaggaggaagattgacaggaaaaccaaaataagacacctgaaactccacgatatgataaatgatatgacaacagggggaggtgctaaatgttacgagagtgcagcagaggcataaaataaaagaagcctgaagcaaacttttaattcgttacacaaaaaagtctttagtcttctttgccgagattaaagcagtgccactctgggtctggagccgaactggtagctggggtctagaagaattcagagttcatcccgagtcttctctagagatggaagcctggagaagcctggagaagcctggggaagccagaaggccctgaacccctgacaaaaagcctaaggatcctcacccagcaatgctgaccacgaccattaaaacatgaagcccacccccaaagaggaaaatccttgccctttaatgaagctgccaaaaacctccaaatttaacagtttgcactgtgtctttctgcagacacagaaaaatgagctgggaaatagaacagtcacatctggccaagagagttgtggacttttgaggtgttgcctgggtctcctgggcagtagaatcagctgacccaatgtttaatagagaaactacaaattttcaaacataagaaaaccatgtaaaaaaaaaaaatcaatgggggagggggtgtttaaatgcatttgagaccagccatatgacagcgatttggaagcccttataacccttagttttaataacataagaattccctatgaaattctaaataaggctgggcatggtggttcatgcttgtaattccagcgcttaaggaggctgagttgaggtgggcagatctcctgaggttaggagtttgagatcagcctggccaacacggtgaaaccccatctctgctaaaaatacaaaaattagctgggcatggtggtgcgcacacgtaatcccagctacttgggaggctgaggcaggagaatggcttgaacccaggaggtgggggttgcagacagctaagatcgtgccactgcacgccagcctcggtgacaaggcaagactctatctccaaaaataataattctaaataaagcaaaataaaatgtatgcataaacatatatatgcaaaggtatatgtatatgcacatacatgcatacatgtgtatagatatatgtacagtatagcctgccagctatgttaaaagaagttttttgcaaagccaccttttgtgtatggaactgtgtgtgaaaaaagacttayagaactgtgagaaacttggataagatgaggcatgcgtacttccccatctgaaatagccaagatgatgaccattcttataagtgaaagagttttttttttttgtttggggaagtgtttttttttttctttttatctttcattcctgttcaaattcttttttaatttacacataagaaaaagtggtctggcacagtggctcacttctgtaatcctagcactttgggagactgagagggaggactgcttgagaccaggaattcgagaccaacctgggcaatatattgagaccctgtctctatt

SEQ ID NO: 670484 - DNA, 1778 bp, Homo sapiens
ttttccaatgattggattctccagggtgcgcacatgacagagacaagtttctgtactgagtcctgattccctaggcaaaaagtgcaaagcataccgaaaaataaatatccagccttaaaaaatcagtacaacaatcccttggctcccatgaacatcgtagaccccactgtgtgcaggggccgcagtcgacggcagggtatgaggagaaacaggacaggtttccatgtcccttgtgagcgcagagtgtaggaggaagattgacaggaaaaccaaaataagacacctgaaactccacgatatgataaatgatatgacaacagggggaggtgctaaatgttacgagagtgcagcagaggcataaaataaaagaagcctgaagcaaacttttaattcgttacacaaaaaagtctttagtcttctttgccgagattaaagcagtgccactctgggtctggagccgaactggtagctggggtctagaagaattcagagttcatcccgagtcttctctagagatggaagcctggagaagcctggagaagcctggggaagccagaaggccctgaacccctgacaaaaagcctaaggatcctcacccagcaatgctgaccacgaccattaaaacatgaagcccacccccaaagaggaaaatccttgccctttaatgaagctgccaaaaacctccaaatttaacagtttgcactgtgtctttctgcagacacagaaaaatgagctgggaaatagaacagtcacatctggccaagagagttgtggacttttgaggtgttgcctgggtctcctgggcagtagaatcagctgacccaatgtttaatagagaaactacaaattttcaaacataagaaaaccatgtaaaaaaaaaaaatcaatgggggagggggtgtttaaatgcatttgagaccagccatatgacagcgatttggaagcccttataacccttagttttaataacataagaattccctatgaaattctaaataaggctgggcatggtggttcatgcttgtaattccagcgcttaaggaggctgagttgaggtgggcagatctcctgaggttaggagtttgagatcagcctggccaacacggtgaaaccccatctctgctaaaaatacaaaaattagctgggcatggtggtgcgcacacgtaatcccagctacttgggaggctgaggcaggagaatggcttgaacccaggaggtgggggttgcagacagctaagatcgtgccactgcacgccagcctcggtgacaaggcaagactctatctccaaaaataataattctaaataaagcaaaataaaatgtatgcataaacatatatatgcaaaggtatatgtatatgcacatacatgcatacatgtgtatagatatatgtacagtatagcctgccagctatgttaaaagaagttttttgcaaagccaccttttgtgtatggaactgtgtgtgaaaaaagacttatagaactgtgagaaacttggataaratgaggcatgcgtacttccccatctgaaatagccaagatgatgaccattcttataagtgaaagagttttttttttttgtttggggaagtgtttttttttttctttttatctttcattcctgttcaaattcttttttaatttacacataagaaaaagtggtctggcacagtggctcacttctgtaatcctagcactttgggagactgagagggaggactgcttgagaccaggaattcgagaccaacctgggcaatatattgagaccctgtctctatt

SEQ ID NO: 670485 - DNA, 1778 bp, Homo sapiens
ttttccaatgattggattctccagggtgcgcacatgacagagacaagtttctgtactgagtcctgattccctaggcaaaaagtgcaaagcataccgaaaaataaatatccagccttaaaaaatcagtacaacaatcccttggctcccatgaacatcgtagaccccactgtgtgcaggggccgcagtcgacggcagggtatgaggagaaacaggacaggtttccatgtcccttgtgagcgcagagtgtaggaggaagattgacaggaaaaccaaaataagacacctgaaactccacgatatgataaatgatatgacaacagggggaggtgctaaatgttacgagagtgcagcagaggcataaaataaaagaagcctgaagcaaacttttaattcgttacacaaaaaagtctttagtcttctttgccgagattaaagcagtgccactctgggtctggagccgaactggtagctggggtctagaagaattcagagttcatcccgagtcttctctagagatggaagcctggagaagcctggagaagcctggggaagccagaaggccctgaacccctgacaaaaagcctaaggatcctcacccagcaatgctgaccacgaccattaaaacatgaagcccacccccaaagaggaaaatccttgccctttaatgaagctgccaaaaacctccaaatttaacagtttgcactgtgtctttctgcagacacagaaaaatgagctgggaaatagaacagtcacatctggccaagagagttgtggacttttgaggtgttgcctgggtctcctgggcagtagaatcagctgacccaatgtttaatagagaaactacaaattttcaaacataagaaaaccatgtaaaaaaaaaaaatcaatgggggagggggtgtttaaatgcatttgagaccagccatatgacagcgatttggaagcccttataacccttagttttaataacataagaattccctatgaaattctaaataaggctgggcatggtggttcatgcttgtaattccagcgcttaaggaggctgagttgaggtgggcagatctcctgaggttaggagtttgagatcagcctggccaacacggtgaaaccccatctctgctaaaaatacaaaaattagctgggcatggtggtgcgcacacgtaatcccagctacttgggaggctgaggcaggagaatggcttgaacccaggaggtgggggttgcagacagctaagatcgtgccactgcacgccagcctcggtgacaaggcaagactctatctccaaaaataataattctaaataaagcaaaataaaatgtatgcataaacatatatatgcaaaggtatatgtatatgcacatacatgcatacatgtgtatagatatatgtacagtatagcctgccagctatgttaaaagaagttttttgcaaagccaccttttgtgtatggaactgtgtgtgaaaaaagacttatagaactgtgagaaacttggataagatgaggcatgcgtacttccccatctgaaatagccaagatgatgaccattcttataagtgaaagagttttttttttttgtttggggaagtgtttttttttttctttttatctttcattcctgttcaaattcttttttaatttacacataagaaaaagtggtctggcacagtggctcacwtctgtaatcctagcactttgggagactgagagggaggactgcttgagaccaggaattcgagaccaacctgggcaatatattgagaccctgtctctatt

SEQ ID NO: 670486 - DNA, 1937 bp, Homo sapiens
ttctgtctgaaacagagcccctcaaccctcccggaaagaagcacacataccccaaactctctcataattcttagacattctccagacctcaacctcatcattactccttagaaaaatcgttcctaaaccataacctgtatcaactgccctcctggaacccaccatatgcttctcgttggtaacacttatggtggttacatatttaacattcattgttgtgcttattttataaagctttgaggtatagttgacatacaaaaaattgcacatatttactgtaaacgtttcaatgaatctagacatatgcatacatctgtgataccatcaccaaaatcaaggagtactgaatatatctttaacctccagggtatgtgattaatgtatatttctcctcggggatcatcagcttcgtaggggcaggaactgtattagttttcactcaccgttttgtccctattgattactacagtagttgacaaagtacaactaacattttaccgagcacttactttgtgccaggcattatttaaatgctatggatatattaatatacttaataactacagtggcctcttgggttgttcttattgtcatcccattttttagataaaaaaactgaggcatgaggagagacattatgtaacttgctcaacgtcatacagacaatatgtaatggggcatagagaagggtgtcaataattatttgttaaacaaatgaatggatgaataagagaaagaaagggtgaatgaagctcttcccttgatcctagttggaagcatgtcctctacaagagtgctgacttatcttttcttgcgagatggatgggaatacaaggctatggggatgcccaggagactgttttggactccagtgctgctgactctggagagaggaaaaggtgggggttgggatagtctaggaaatgctgcgtcgcacaacacagccgagtgggtgggagccaaaaatagccagtcctttgagtagaaactcctctagggaggaaacatttctttgaaattggacacacaaattagctaatgatatccagacactaaagaactgcatgttccccagacagcccgcggccccaggatcagacgctgatcttgtggagcacagattaagagatgccgcagtctagggtgggtatagattgttgtgtctgccatcctcactcacagccctgagcacagaggtgaggacgcagccaggggccagcactctccttccatgtgtgccaatccctgcctccctgtatgtcctgggctgtttgtccaggatggaaagtggcactgtggcatttttacctgtttgtgctcagtgacagttgacatgacacagagtctatgttggcagtatttccaggccgaagcttaggaaatcgactttaggatgaatttttcaatctgggagactctaacagaggctctgagcctgggatgtgcaaactacctgcacttatcttcaaaattgtgtccaaatgtgcgtttctcaagggagagggtccaaaggtttcatgagtaaacaacaacaaaagctttcaacaaggtatgggatgtctccaaaagggtgagaayccatgatgatgatactgataatagcaataataaagtaacttttctgagtgcttagaatttgctaaggccaggcgtggtggctcacacctgtaatcctagcactttgggaggccgaggtgggcagattgcttgagcccagagttcgagaccagcctgggcaacgtggtgaaaccctgtctcaaaaaaaaaaaaaaaaaaaaattagctgggcatggtggtgcatgcctatagtcccagctacttggaaagctgaggtgggaggatcacttgagccccgatggaggctgcaatgagctgagatcatgctactgcactccagcctgggtcacagagtaagaccctgttccccaaccctgccc

SEQ ID NO: 670487 - DNA, 661 bp, Homo sapiens
ggctgaaaaactacctgttgtgaactatgctcactacttggatgatgggaccattcatatcctcagcatcacagaatatacccatgaaacaacccagcacatgtatccactggatctaaaataaaagttgaaattataatttaaaaatgggttagaatcatagcaaatmactgtgcatgagccccgcctagccatttctagtacataacctggtatttggcttctagtagatgcttatgacagcaaccataagcctcccacccaaaaatctattctctccttctttaacatgagaaggaaataaaattcttacttaagccattgataatctggattttctgtcataaaccaccaaactgaatccaattgatttagtatcccgtgaatatttgttgaatgaataaataattctcaagcaaatcagaggatctaaattacatgttacaggtaggtttgattagtacagaaccactgcttcaatatacttttatcagtagataaaatcctcctaaaaacagtgtccataggagtcaaaataataaaaaagaacactaggtggtgaaaatattggaaacttctagacgtacagtagccttcatttcttgcaccgccaaaagccgggctgataatggagcaaataccctcttcccaggctcccctg

SEQ ID NO: 670488 - DNA, 640 bp, Homo sapiens
acagagattatgaactatgatataaattaattcatactgcactttaacaatagtaactctcccaactcgtgtgcatgttttttctctttctgttttttgtgtgtcctcttcaatttctttcattagagttttatacattttgttgtagatatctttcacctccctggttaaatttattcctaggtattttattatttttgtagctattgtgaatgggattgctttcamtttcttcttcagctacctctttacacatatataaaaacactgatgtgttgattttgtgtcctataactttactgaattcattgatctgctctgagagttttttagtgagtctttggctttttcatgaaataaatatatctaatttgttgagagtttttaattaaaaggatattgaattttatcaaattccttttttgcatctacttttgtccttcattctaatgatgttacttagcgtgtttattgatttctgtattttaaatcatcattgcatccctgaggtaaatctcatttgattattgtgtataaactttttgatgtgttgttggatttggtttgctagtattttgctgaggattttttgcatctgtgttcatcagaggtattggcttatggctgtttttgttgttgt

SEQ ID NO: 670489 - DNA, 606 bp, Homo sapiens
tacaaaataatattaaaaagattctggcatttctttttagatacatgagctttgctaatcaaagtacagacagacaaaayagaatagataagagcttaaacttgtttgcacatgatccagaatagcagactcagttctatgttatgcatactctgcaattgtcaacaagttattcaacatctctggttcctgcttattgataaagtggaaaaatatatcgagcgcattccttgccaggttttaatataattaaataaggccattttcataatgcacttagcaatgtgcttaatgtattagctgttattattaatcatcttctttgtttttctctttctaagaaaacactaataagtttcagatatcaatgctgagagagagagaagatgtaaagaaaagaaaaaacaggaaaggtaaaaagtcatatttgacatgtcttataagatgcatttttgactttgctaatgctattctgtgaaaaaaggagtaatattttcctaaagatgaactaaattcgtgcctctccatattctagaagttcacgaaaagaaaaaacataggcacttaataattcatatgttattggattaaaaccaacacagaaca

SEQ ID NO: 670490 - DNA, 1524 bp, Homo sapiens
ccactttttaaaaaaagtataacataggcaaacctccagtaacactgcacaagggaagaaaacacaacaaggtttagaataaaaaaatagatcaaaactcagacacaagtcaattttgaaataatgagatcacaatgaaaaactacagtctggggctttataaatcttaaattaaataaaaagaatttaaaaactaaataatgaaattgactcaacaagaaatcaaaaccccaagaaaccagaaacaaggacattggattaatagtcagaaaccaacctccagaaggcagtaggcctaggttttggagaagacttttccaacaaggaagagaaaatttcaatgttatacaaattaaaccagcaaataggtgaaataaagagaagaaattcaaaatacattttatgtggctagtatgttcctcaataaagggacgagaaagagagaaagaaacacagagacagagaaaggacagaaagaacattaatgcaggctctgttagggggactttgtgggaaggaggctcagtaagccagttaactgtcaagggttatgtgatgaaagacgaggcaagaaaagggaacttttcctcttagttacaatctggatttcatttatgtatatatgtattgagagctccaagtaaaacactgaattcattttcaatagcttttggctactggaatttattccttaaaagtgactatataggccaggtacggtggctcatgcctataattccagcacttcgggaggctgaggtgggcagataacttgaggtcaggagttccagaccaacctggccaacgtggcaaaacccagtctctactaaaaatacaaaaattaggcgggagcagtggtgcatgcctgtaatcccagctactcaggaggctgaggcacgagaatcacttgaacctgggaggcagaggttgcagtgaacctagatcatgccactgcactccaatctgggcgatagagcaagaccctgtcttgaataaataaataaataaataaaaataaaagtgactatacagagtgatcgacaagttggagggccaggaagatttatgcaggttatataacgcaatattctgatggaaatagtgaggattctttatcctttgtgaattactcttcacattgccaaatcacwtttaccaaatcccaagaatcactgtgaaaataatctcatcaccttaaatttttaatcataaaatacatctcaaaaaatatacatatacacacacacagtgtacacactaccaaatttaggaaaatctcaatgtaaatatcttgtagctggcctgtttttcccgtatctctcctcctcatttattgagttttgatctcaggtgtcatgctttccactgtggtttaccattctccctaaacaatgtgttggtaagttcttcacatttttgaactccatataaagtgaatctctaccttgattttttcaatgattgttttttgaaacatagctagactggtacaagtagccatgattcattcattttattgctgta

SEQ ID NO: 670491 - DNA, 1524 bp, Homo sapiens
ccactttttaaaaaaagtataacataggcaaacctccagtaacactgcacaagggaagaaaacacaacaaggtttagaataaaaaaatagatcaaaactcagacacaagtcaattttgaaataatgagatcacaatgaaaaactacagtctggggctttataaatcttaaattaaataaaaagaatttaaaaactaaataatgaaattgactcaacaagaaatcaaaaccccaagaaaccagaaacaaggacattggattaatagtcagaaaccaacctccagaaggcagtaggcctaggttttggagaagacttttccaacaaggaagagaaaatttcaatgttatacaaattaaaccagcaaataggtgaaataaagagaagaaattcaaaatacattttatgtggctagtatgttcctcaataaagggacgagaaagagagaaagaaacacagagacagagaaaggacagaaagaacattaatgcaggctctgttagggggactttgtgggaaggaggctcagtaagccagttaactgtcaagggttatgtgatgaaagacgaggcaagaaaagggaacttttcctcttagttacaatctggatttcatttatgtatatatgtattgagagctccaagtaaaacactgaattcattttcaatagcttttggctactggaatttattccttaaaagtgactatataggccaggtacggtggctcatgcctataattccagcacttcgggaggctgaggtgggcagataacttgaggtcaggagttccagaccaacctggccaacgtggcaaaacccagtctctactaaaaatacaaaaattaggcgggagcagtggtgcatgcctgtaatcccagctactcaggaggctgaggcacgagaatcacttgaacctgggaggcagaggttgcagtgaacctagatcatgccactgcactccaatctgggcgatagagcaagaccctgtcttgaataaataaataaataaataaaaataaaagtgactatacagagtgatcgacaagttggagggccaggaagatttatgcaggttatataacgcaatattctgatggaaatagtgaggattctttatcctttgtgaattactcttcacattgccaaatcacatttrccaaatcccaagaatcactgtgaaaataatctcatcaccttaaatttttaatcataaaatacatctcaaaaaatatacatatacacacacacagtgtacacactaccaaatttaggaaaatctcaatgtaaatatcttgtagctggcctgtttttcccgtatctctcctcctcatttattgagttttgatctcaggtgtcatgctttccactgtggtttaccattctccctaaacaatgtgttggtaagttcttcacatttttgaactccatataaagtgaatctctaccttgattttttcaatgattgttttttgaaacatagctagactggtacaagtagccatgattcattcattttattgctgta

SEQ ID NO: 670492 - DNA, 1524 bp, Homo sapiens
ccactttttaaaaaaagtataacataggcaaacctccagtaacactgcacaagggaagaaaacacaacaaggtttagaataaaaaaatagatcaaaactcagacacaagtcaattttgaaataatgagatcacaatgaaaaactacagtctggggctttataaatcttaaattaaataaaaagaatttaaaaactaaataatgaaattgactcaacaagaaatcaaaaccccaagaaaccagaaacaaggacattggattaatagtcagaaaccaacctccagaaggcagtaggcctaggttttggagaagacttttccaacaaggaagagaaaatttcaatgttatacaaattaaaccagcaaataggtgaaataaagagaagaaattcaaaatacattttatgtggctagtatgttcctcaataaagggacgagaaagagagaaagaaacacagagacagagaaaggacagaaagaacattaatgcaggctctgttagggggactttgtgggaaggaggctcagtaagccagttaactgtcaagggttatgtgatgaaagacgaggcaagaaaagggaacttttcctcttagttacaatctggatttcatttatgtatatatgtattgagagctccaagtaaaacactgaattcattttcaatagcttttggctactggaatttattccttaaaagtgactatataggccaggtacggtggctcatgcctataattccagcacttcgggaggctgaggtgggcagataacttgaggtcaggagttccagaccaacctggccaacgtggcaaaacccagtctctactaaaaatacaaaaattaggcgggagcagtggtgcatgcctgtaatcccagctactcaggaggctgaggcacgagaatcacttgaacctgggaggcagaggttgcagtgaacctagatcatgccactgcactccaatctgggcgatagagcaagaccctgtcttgaataaataaataaataaataaaaataaaagtgactatacagagtgatcgacaagttggagggccaggaagatttatgcaggttatataacgcaatattctgatggaaatagtgaggattctttatcctttgtgaattactcttcacattgccaaatcacatttaccaaatcccaagaatcactgtgaaaataatctcatcaccttaaatttttaatcataaaatacatctcaaaaaatatacatatacacacacacagtgtacacactaccaaatttaggaaaatctcaatgtaaatatcttgtagctgkcctgtttttcccgtatctctcctcctcatttattgagttttgatctcaggtgtcatgctttccactgtggtttaccattctccctaaacaatgtgttggtaagttcttcacatttttgaactccatataaagtgaatctctaccttgattttttcaatgattgttttttgaaacatagctagactggtacaagtagccatgattcattcattttattgctgta

SEQ ID NO: 670493 - DNA, 1403 bp, Homo sapiens
cagtgcttttaaatgtgcttttaaatgtgctatttaaccctccttcctatgtgaaataaaaggggactttttacagacattaaatttcctatgagccatttctcaaaactaaaatatgtttatatgtgttttccgctatgctaacccctggtgttttccggtcttcaaccagagctcttcttcaagctgtgacccattcctttgtttcaagtgttttaatacttgttttttttttttttttttccatctccatggtgtttttccttctgcaaattatttttccctttggacctccttcctccagcagtgtacaggcctgtgaaagtaaagtttgaagagtcttcctgatttttacaggaagctctaagaaagaagtagatgaatattatccatgtttaaataggattcatttgtctggtgtttacctactattgtagtgttccactaaaatttaatagaaaaagtttcaatggaataccttgccttttaattaaaagccacaattttatttgaatgtcagaaatgcactaaagaaaattggctggaatattttagggaagtgatttggagacctaaaaaggtgaacaaggtacaaaggggaagatgtatgataaactcaaaacatactcaaaatttaagtgtgccttacaattgtagatttaaatgattcttaatatcatatgaacctcattgtgtatataataggaagttagaattcaagccccatgacggcagggtctatgtctgacttgctactctccctagtactcatcaaagcacctggtgcatagcagcctcaatatttgttaaattaatgaatatttctgagtaattaaataagtggggttaacagaagtgagtccaaatggatgaaaatactacctatttccctcatacacctcattatacctcattatagcactgggaatagaaaattgactcaatccaaaataagtctaccaacaattattcaactaaccactgagatcatgcagaagttgtgcataaaataaagataaaagattttgcccttgtcctcaagacaattattctcaagctatgggctccatacgcacacgaaattaacaagaggaaaggcaacagattcctctgtttttccattttaagcagtgagccaagaaaaactatacataactgtktacctacaggatctgtgatattttatataatgcctatgaggaaaaatgactatttccacagctttcggtttaagaaatgaaaagaggtggttgggcttaggatattagagataagaaaagccccaaaattggaatctctgatttgaagcattttagctgtataatctggaatactacccagtggtagcagaagttaatgtttattaggcctaatatgaactttccactgttctactataatat

SEQ ID NO: 670494 - DNA, 1403 bp, Homo sapiens
cagtgcttttaaatgtgcttttaaatgtgctatttaaccctccttcctatgtgaaataaaaggggactttttacagacattaaatttcctatgagccatttctcaaaactaaaatatgtttatatgtgttttccgctatgctaacccctggtgttttccggtcttcaaccagagctcttcttcaagctgtgacccattcctttgtttcaagtgttttaatacttgttttttttttttttttttccatctccatggtgtttttccttctgcaaattatttttccctttggacctccttcctccagcagtgtacaggcctgtgaaagtaaagtttgaagagtcttcctgatttttacaggaagctctaagaaagaagtagatgaatattatccatgtttaaataggattcatttgtctggtgtttacctactattgtagtgttccactaaaatttaatagaaaaagtttcaatggaataccttgccttttaattaaaagccacaattttatttgaatgtcagaaatgcactaaagaaaattggctggaatattttagggaagtgatttggagacctaaaaaggtgaacaaggtacaaaggggaagatgtatgataaactcaaaacatactcaaaatttaagtgtgccttacaattgtagatttaaatgattcttaatatcatatgaacctcattgtgtatataataggaagttagaattcaagccccatgacggcagggtctatgtctgacttgctactctccctagtactcatcaaagcacctggtgcatagcagcctcaatatttgttaaattaatgaatatttctgagtaattaaataagtggggttaacagaagtgagtccaaatggatgaaaatactacctatttccctcatacacctcattatacctcattatagcactgggaatagaaaattgactcaatccaaaataagtctaccaacaattattcaactaaccactgagatcatgcagaagttgtgcataaaataaagataaaagattttgcccttgtcctcaagacaattattctcaagctatgggctccatacgcacacgaaattaacaagaggaaaggcaacagattcctctgtttttccattttaagcagtgagccaagaaaaactatacataactgtttacctacaggatctgtgatattttatataatgcctatgaggaaaaatgactatttccacagctttcggtttaagaaatgaaaagaggtggttgggcttaggatattagagatragaaaagccccaaaattggaatctctgatttgaagcattttagctgtataatctggaatactacccagtggtagcagaagttaatgtttattaggcctaatatgaactttccactgttctactataatat

SEQ ID NO: 670495 - DNA, 641 bp, Homo sapiens
  misc_feature 481: n = A,T,C or G
ttgcttctgagtcatgtgaaaatgtgtttaatgctattgaccaaggtggttttggtttttcttcaagggaaactctcaagggactggatgggaaccgrattttgacaatttgcccggcaggatttttagagtgtggtgtccccagcaggcaaactggcactcggcagcctcgttagcataactctgatctgtgtgtcccacgaggccatccttccagtcaagggtggagccaaagaagtcagcagaagcaagtcaaagccagatggaaaatcacagactccacgacacatatgtccattttctcaggaatccaaaaggtgctggggcactaatgtactacctttctcacctctcctgacatgggcaacagggtctgttctaagaggtgggaacacggggtcaccttggatcagtccctctttgttccaggaagttcacccgaaatggtcctttataaataaattttgaatcaagtgccttntcggctgttctggtggaaaagttcaagagtgttgttgggctttgcagtgaccttggactcaaatcttactggcaataaaaatggctgtgtttctcccaattaactagtttgaacctataagtttatttggggtgtcaggaacatgctatgaggtaagcaa

SEQ ID NO: 670496 - DNA, 591 bp, Homo sapiens
caggcacgtcacattgaccagaatgtgagcagacatgccagacaccatgtttaaaaagatgctttcaatgtgatttgtggtttgataggcatcttgatcctctgtctcttcaataggaagggtatatgactttgcttaagctgccatgacaagtactacaagcagaaggaggagagagaaggcagaagtacttgtaaacaactagatctcatgagaactcactcacttgtcttgagaacagcaaggaggaagccccccctccaacggcacccatgatccaattacctcccacttagcccctcctccaacaatgaggattacaattcaacatgagatttcagtggggacacagattcaaccgcattacttaggtaatcagcttgccctttccatctcttaggttcaaaaccaatggggtttctacrgagcaatccattcacataattatggtgttctaagatgttcttataagcaggaaagagcacataataaatggtgtccagagcaaagaatatcctgctcttggttttatttaatgtaacaactgagacaatgtaaatatatatacacatatatatgtatgtataataa

SEQ ID NO: 670497 - DNA, 1976 bp, Homo sapiens
aactttaaaaatattatgctaaatgaaagaagccagacacaaaagcccagatgtatgattccatttatatgacatgtccagaataggcgaagccatagagacagaaactagattggtggttgacaggggttggtaggaagaagaggggaattagaactaactactaacaggtatgaggtttcttttggggtgacggaagtgttctgaaactagatagtaataatggttgcacaacataaaaatatagtaaaaaccactgaagtgtgtactttaaagaagtgaatgttatgttatatgaatatccctcaacttttaaaatattagaatgaaaaagaaagaaataaaataaatacaaaaagcgagagtattaacaggccttcaagatttgggttaaaactcacttatgtgtccatggttgttaaaagacaatgacatcaatattgaaggtcattccttcttgctgaaaaaaagtgtggtattattttcagcttcctgatcrctaaataatacatctgaagcgattccgccactgatttacaagcaagtaagatggctaagtcattttttcaggagtccctaatgagaggggggtctctggcagtcataattaaaatgaatactttcatagttttacatgatgaactggcaagctataatacaaagaagcaagtttcctttttttccgcccccccaagatctattcaagcttaaaagtacctctaatttttttccttaaaaggaaatagttcaacaggggttgaaaatataaagaatacaagacagtaatagggaaaagaggaaaataatctgaaatgaagagagagctacagattcaaagcctgacaataaaccagaccaagcgtcaagactaatcagtgaattccaattcacctgcatgaaacaactgcttggatgagcaaaaacaatgctgtacagctttgacagatttaccacatttctgtaaacctctccacaatgcaaaacgatactcagataagctacctgtggcataagaaagaaattatcaacaaattaaatggaagttgccttaaatgtctatcataagtgacagcttcttagaataatgcaatttgaacttaaaatgaatagttttgttgtgatcacgatacaaaaaatttgatatatgttgtactcagtcacacttggggctagatgtgactgttataaaacagaacatcacttctctaagaaaacatctaacttgataagagaatatgaataatgcactttgtgtaagtaaatggcgagcttaacaaagccaatttgatagataaaattatgaaaatttaaagacaactgctaaagaacaaccataaacaagataattttacagacattaactgcaagtggaataccaaaactgaaacctaagaaaaagtactgtattaacagagcataaattttgaacaaaatatttttaaaaagcaatatgaggctaggaaatgtatatttatgttacacaattcaaaatctactttctagcattaaggtccataccaggaaaaactctctcaaaccatgtatttcctatattctgacaccacaacaatcatcaacacagaagaggacttctgtgaccaaaggtatgggaacttctccccaccaccaagcagcagacaccaactgggtgtcctccaattcaatcctgacacaatctaccaggagacagtgtcagatcccacaggttgggggctcagtccccaagactgccccccacaccagtaaacagcagtcacaagtctgggcctccggaacttcaagttgggattcccatggtcccctctttgggttcaattagtttgctggagtggctcacagaattcaggaaagcacttacttacgtttaccagttttgtataaaggatattgcaaaggatacagacaaagacacgcatagggtaaggtatgggagaaagggcagacaacatcttttttttttttttttgaggcggagt

SEQ ID NO: 670498 - DNA, 2068 bp, Homo sapiens
aaaataaaaaacacacatttttaatctacgagagactgatacataaaattcaacaaaaatgagttactagaaaaattaacttaaaaaaagaagacataaaagtaccagtttttaaattagattcaacacatacaaaaattctctgtaaaactgctataaaagtctctaaatgcttactctcaatttcagtacttatgttatcatggaccagtgacaaacagttggcgactcagcagtggtctgtggcacacatttgagtagtattgctttaaatatcaatatgaaatttttatatatatataattttgaagtaaatgaatatatatatttatataaatatataaaaatatatttatataaatatatataaaaatatatataaatatataaatatatatttatataaatatatataaaaatatatataaatatatataaatatatatttatataaatatttattttgaagtacatgaatatatatatttatataaatatatatataaatattcatttacttcaaaatttatatctataccccagaccatttctctggccttctgatttacacgtggagattaccatctctctcttagttaatggcattatttctactcaggagaaatctgttattattatctctttctcctcctcacctgtccaaccaatccatcatttatgtcctattgaattttgctattctgtacatctttactgctagcttcttagtccaaagccaccaatgtctgatacaacttaataccagccttcctgcttctactactccatcctctttcttccattctgcatagagttacaagaatgagttttctaaaaaggtaaatctgtttataacattttattggcttcatgttttaattacagtttccttgggtgaatggtatgtaacaattacattttcaagtcgttgagaggcagtactctagatgggtggtttaatagcttagttggggtggtggttgtgtaaatgttaaaaattctgatttgagaggttgccagatattaagattaagaaggaataaatcagaggctggagatatttaggaagccctgtagccaaagggatactattctcttagtgctttaactgtacatttacctctcatttccttccggtttaaaactgagccagatcccagtctttcacggggataattgacatatcaggtagcaggctaatttgtattagcagcaatctggaagtaacttgtggggttgaattctaagtagactaaggaggatgcaacatacaaatatgtgtgtacttaattcagatggagccaaatttatgtataggagtgttgttaacaggagtctggatttaatgtgttaacttcagcacctggaaatggctccagcaatttgcctggttatttgattcaaacttgggttcagcaatggccaacatttcaatgtggttgagatcccttaacgtttctagctgtgcaggtaggaggaaagtgaaatggcacaatacatttattatatgcagtcctctcctgtacctcctcactccaacccttctgagattccagaggacatacccatgattaagaattgagaaatgtcttggtgaggggagcagacctgtatggtatctctcagctgggaaatcttactgggatatgctgccattgagctagaattgatttcagtggggatcacggggctctggagtggcaaagggcttttttggcagtgctttggcttcatggataaggtagctatcattttcatagtaggcttagatgtggagtggcagtcagtgttttgaaatgcagcctttagtggtcgtggctaattggttataatgtccttaagcatacaataaattggccatttaacatatttttacttgatctctataactggggaaattctagctgtgtggagtagaaacttgacatttgctactgataataggagccctttggagccccttgattgaaggtgagactgatttcccttgagaaaggacatgaaatactaccacaaatgtayactttaaatcttccaaggctttcctaaagggacttgctgtttactg

SEQ ID NO: 670499 - DNA, 633 bp, Homo sapiens
gagattaacaatgatgttcattgatcagaagactcagtaccgttaagacgttaggtctccaaaaattgatctataggttcagtgcaatcccagtcaaaatcatagcatgcctatctgtagataatgactactctaaaaataatttagaaattcaaaggatctagaagagcaaaaacaattttgaaaaaaagaacaaagttaaaggattcactctacttgaattcaatacttataatataaagcttcagtgatcaagagagtactatcagaataagcataattattataactgattagaaatccacacatatatggtcaatagattttcaacaaaggtacacaggcaattcagtgagaacatgcatggttttttcaataaatgrtgctaaaaaaattaaacattcatgaacaacacattgttcaattttcttacacaaagttaactcaaaatgaatcataagtttatgtgtagagcttaaagtatctagaagaaatatttttgtctttatgttataagacctgtgttggttttttttttttaaatagcctgtcagagaaaaataaataaaccaaaatttaacatggtaaatgcatataaaaaagaaataagaataataagcaaacaaggaaata

SEQ ID NO: 670500 - DNA, 1611 bp, Homo sapiens
aattcatagtgaaaacctaagaaataagcaatttttaactgtcggtcacatgccaagaatttatgaataaaaattttataatatttgaaaacacaggctttctaatttaacaatttttttaatgtggaaaaggactttttactaatagatcaaaataacttttgtttctctgaaataataagtcaaaagcataaatacttaagctcataattaattattaatgtcttggaattatatcttatatggaagtgatttagatattcaactgttagagtaggtagcttaggcagacatgagcagggcaggagagcccacccatcatgccaggaatggcaagagaccatcatgtgatggtcaggtggttgttaaactgtctctctaaaataattggtcaagttggtactagggaaaggcagtctcccaatagatagaaagcacctgaagctggtgattaccagcttcctggtaaaatctcaggagttgggcaagtgggcgtatgcatgcacattaagaggtaaaatgatggagtttaactggtgtctaaccctcctttgggaatactcaactagtaagggaaaaatgccttagatgagcatgcacacaacttcagtaaacgtactgcacatgcagctcctcctaagtgctagcaggccactgcacatgcggacagcccatctcaagagaagaatcagggagaagaaatgcaaagcccagaatcttgccaatgtataaaaccccaagtcgaaggttggacagagcacttggatctcgctagtctcctgcttggcccttttccaagtgtactttacttccttttgttcctgctctaaaagtttttaataaactttcactcttgctctaaaccttgtctgtctctcaccctgccttatgctccttggctgaactcttccttctgagaaggcaaaaatcgagttgctgcagacctgtacagattcaccactgctaaaacaacaaatattcatcatttaatatagcttagcaaaattctgagggtatagttattaaaaatatttgaaaaaccattttaagcaaacgtattataaaacataattattgttaaaagttaatttataacttttattcattcttgacagttgtttggaaattttcatgttagacaaatacagccattatctcaagttaaatttcctatttgccatttttatgttactgtttgttaggcaagtatgaaaaaagcgagaactttgaagttaaatatgtatattttctggataactcagaggacgtagttgttttattaaaataacaatactaaactactttagtttaatagcaaccgtatttaccaaaagagttattcaactcacgtgaacctgaaaagcatttgggcatattaatttatgagtgcttatttatttataagtcaatttagtaccatactggtaataaaccattgcagatgctgaccatgggtgaaaatgcaaccttcactcacgaagcgggaaggcatagctggcaggaatattcactctcctacatagtgccaaagcctcccactgtcattaacctttgagttccctagacctcatctatgccatgcatatgagtgwgacctccaaccacaaagtg

SEQ ID NO: 670501 - DNA, 1238 bp, Homo sapiens
tagagcctttagagtcagacttccccttgggaggtgatagatgcccatctcatcaaattggtagaagccagcaactctcacagcagtgaatagagaccctttgaaggaaaatgtcaggccaataaaacatcaaaggcagtttggcttcctaggtaacaaggaataatgatgatgggctcccaattcccccagcaaggcagagctttggagatctccagtggaggtgaagtaaaaaggcttttcctgaacctaatcaggaaaagcrtcctcaaatgaccacatgtggtggatgctgtcacagcagccctactgggcagatgaggatactgaggcatagataagccacgccctcctctggtgagtgcctaggtcctggcctgatggactccagccagcacgctctttaccactctgctcactaggcaggaagcaggagcccgcagtgttaggtcctccagaacctcaaagctgtgtctgtcatgggatcagggtccagaagtcctgcatttgaattccagctcagtcagtgcttcagaaaattgggataatagtcctaagatcgtagcattttgcagggggttaaagggcaaatgtgtataatgtgtggagcatggggttttgcacagaatagatcctcgatgggtgctgactcccttctttctttctcccatttatagatgaggaaataaagccctcagttataatatcatcagaatactaaagatgatattagcagctctaaaaacttcgccctaatatttaagggtctgccatgataaaagctgatttctctcccatgtaaagttgagggtaggtcttattgatgggtaggtggctctctgcagggggaaactttgacccatgccccttccaacttgcagctctgccgtcttcaacacctggtttctgaggtcaaggtcatctggctcatctgtatggggctggcagaaagggaaggagctcctcctgtgaggttctcaagggcccaaggtggaagcaagacctgtcacttctgctcgcatgcaattggctggaatacagtcacacggtcccacctacctacagaggaggctggtggacatagtcttgctgtgtgcacaggaaggaaaaaaaaacatacttggtgaacagctgaacagtctatgtcacacctggagaagtgaaattatgtccgaggaaatccagcgggtcaatagctgagctcagtttcgagcccaggtttcctgtgtgcacctggg

SEQ ID NO: 670502 - DNA, 868 bp, Homo sapiens
atgcatttttttaaaaaaagacagcccagactagattagatttctaatctgaaaattatagcttagaaattaaatcttttaaatgacttgacagaytttttttccacttctggttctattgaacaaattgagatgataaacacctgctgggtatgtatacacccttgtacacactgtttgatcatttctaagttccacatatttttgataaagcatatacttaaaatatgggattgattattttctgaagatttatttcccttcaactttgtagactttctgatgttagttttgctggtgtattttttttacagctcttcctgcaatgcctgctcaatactactcccagtgaaatttaaaatatatatatattttcatctatgagaagttatcaaatgtcttcccccacatgctgatagttcttgcctgaatccttgtatggcaatgtacactctgtcatgtgacctttgtgcccactgacacgataatcattaaaaacaattggattgtactccctgcgaagtttgaggctggggacagaagcttgtcaagtataaaaacatctgtgaatacgataacatctatagcttaaaaatactcattcctcaacgaacttgaagtaaatgactaaagtaagtgaaactgagtctatttgacaagtcttctgatatgattaaaatattgtgtgaagaaaggacttgatggaaaaatgtgatgtcaaagcctgtttttcaaagtttaagtttcattcaacgccaaatgagcatgtgaaaatcccctggagaatacccactctgaggtccattctaacctgaaactgttttttaattggtacttctaccaaatctaagtttaacaatagggcatg

SEQ ID NO: 670503 - DNA, 3137 bp, Homo sapiens
gaaaaaaattgcatttgtactgagcatgtacggactttttccttgtcactattccttaaacaatacagtagaacaactatttacatagcattgatattttattagtaattaaatattataagcaatctagaggtgttttaaagtatactggagaatgcacataggctacatgcaaacactacaccattttatatcaaagacttgaacatccatggattttggcatctaagagaggtcctgtaaccaataacccatgggtaccggaggacaactgtacctgaaaattgtgaaaatagtagattttcaatgttctcacaacaaaaaaagtgataagtatgtgaggtaatagatatgctaatttgcctgatttagccattccwtaatgcatacagatattagaacatcatgtcctataccatgaatatatacaaattttgtcaattaaaaaaaacacaacatcaataacaaactccacagtacataaggctgcactcagatatacaaaccagaacctgcttttatttatttatttatctgcttaaatgcactttattttttagaacatttcacagtaagattgagcagaatgtgcagatttcccatctactcccatccctacacaggcacagcctcttacattatcaaccttaccaccagattggtccgtttgttgcaatctatgaacctaagcagacacatcataaccacccgaagtccatagattacattagggtgagtgttgtaccttctatgggtttggacaaatgtataaggacatgtttctaaaattattgtatcacacagcatggttttactgccctaaaaatcttctattttccacctgtttattcctcccttcccccaactcctggcagccacttattttactgtttctagagctctgccttttccagaatgtcatttactgtagctggaatcatactgtatgcagccttttcagattggcttattttacttaataatgtgcttttaagtttcctcacatatccttttatggcttaagagctcatttctcttagtactgaatattccattgtccacatgtgccataatgtatttatccattcacctactgaagaacatcttggaagatgcattttaatacgatttccagattattcatgtgcatattgagtttgagaagtgttagccagctttgggctgggttgtaagaaaaggcctaggctaatccttgtatgtttatttttttaacagcctctgctttttgtaaaagtacctttggtatttcctacatgactacctatgtgactttattaaatgttgtcttctactgcaggaggcagtgaccacttattagcaatgtaaggttttctgatcactgagtgatgactttgatatgaagtgggttgtttaaccacaagctgatctcaaaccctgaggtttgagccctgttttccaaatgtgaactgaacacttggccagatgctggagaggcaaaaatatgatggcccctgttctcaaaaggtagttccctcacaaggatttgtgtttagtcaccctttggtataagcaagaacgtctggtctcttccatgatgaataaataattacaaatccttcaccacacctgtagtatatagttagggtgaacatacattctggtgtgcccaggacagtctcagttcattcttattgtcctcaagtaattattaattgtactcactatcattctcagaagcatcccctttgaaaaatatgttttatggtcaccctacctataaccaaatggtgatcactgatgaacactacagtttctattagaggatattttgaagctgaccaagagaaggcaaaggagcaaggttattcaacaatgtggttgtcactagaacaattggggtcagagaatagaaacaaaataatgccctaattctaacagaaaaaagaaatagaaataatctataatgaaacatgtatttcaatatgtatattatcatgtatgatctcaccagtcaaaggctgctgacctttgtagaatctgtgtaaatggaatagctacgaacacagaatgatagatgcatgctattggtgacttaaaacccatgaattatatttcttcttgatgttctgaatttctgaaattatgactaattcttggtaaaaattggaacaaacctaaatcaatttttctttgaattacagagtacttgtattcctagaaaatctctgtgtgttaaaaccacacagagctgctctgtgcttatgtgtacaacagattttcatcaaaaacagattattcacttataggagtgtccgttaggacattcaatagctgcccaggacatggtataattcttcatgaagtctcatgaaatgcgatgtttttagcttccttggccccacttactcatctccagttgggcttctgatcattttgacaggcaaaaccctcgcctctcttctttctttggggcacttaccccatcagtcttttttttttttttccagataatttcaacctgtccattttttgactctgccttggcatctagctaccatctctctctccttttcttatcatttaaccatcaagttcataaatagaatgagttatattctaattgtagcttcatatttacctctcactgtatgcccttcagactttttgccaccacatcaacacaactgctttgtcaaaggccttcaaggcactgtcccctccagcccctaactcctcacttggaagtattacttgacttctctgtggcatttgatactgggaaccggctcttcaagtagttaattactccactgcagtctcctttacctatctcatcctctgggtgtgctttaaatctttgatttaattgtctgtttttatccgcatgctgatgattcctggaactctatttccagctcagatatctctcctgagttcctgacttgcgttcaattgcttgtaagttattgccatctggatctcccaataataattaaaaatcaagatgtccacatttttactcactacctatcttctatttctctcatattcattatcttgcttgtaactaacacatcacctaccccatcactcacggcagaaactaaggccacctggactttcccctttgccacccactctccaccctcccctac

SEQ ID NO: 670504 - DNA, 739 bp, Homo sapiens
taattaaattgaaatctgtgaatgtagagtctagattttttatagcccaaatattcattcagggttatgaatcgtagtagatgccacagaaatgtttgttgaataaataaacmtttttttttctccagaacttaggagtgcaaaggagacagggcagggcaatgggactctttctggggtcctcaaactctcttggacaagttatgcccatttcacacagtctatagacatcaaaattgatattaaccatttaaaagaatctttcaaatttgtcctgggtgctttaaatggaacagaacaaaatttccttcttctagtttcagaattagaaaaaaaaaggtatacatgccaagaaagaaaaataactaacaaatattttatcataagcacttatggaccaccaactctatgcctatatccaagtgggaccgtgagcagcatatgacatatagaggcttagattttcgagcttagccaggaaaccaagcatatgcacaaaagagaactgtatagatgagtattttctctggatattttaaagacacattacttagtacagataattagaaaagaagacagcataccatcaggtgctaattatgcagtgcagaaaataatgcaaaaggagtgagaggagggagaaattcctctgggctcatgtcttagagaaggctttgtggaagagcgagactgggggtgcagctggaagggggtcccatgcaggaactgctgtgggcag

SEQ ID NO: 670505 - DNA, 895 bp, Homo sapiens
aaagcttgggaaaagacatttcccgtttcccgagctcagcacctccacagatggctacttctttctagagtgttctgaattaaaacaggccaggaggaagccttctgaaccaactgacatgtgtgtgctcatttgtaggaagaagttaatgataacttttttgccatcttgtaaagctatgtgatgatatgggaaaatgtcctctgcatgacaggtgctttgtttggagagccactatcgacatagacgtgtattttagtccctatgaagacactgaggctgaagggcttcttggctttcccaagactccacaactagttatggttcttggtatgagcccagcttctctgagattcctgagagctcctgcacccttctcctgcagtgcagacaatacttagaatcaggccacacaggtgctggtactgcctttgggtgggatttttatcgctcagatgactgaggctgctactttatttaataaactttcagcaggtgtgcagggctgggggcaagggaatggccatcttcatggcttggcagtcctttgggactgtggaattgtcaatgtcctgggtgataaaagcatgcacgactctggtttctttttctctggggccaattctcccaaaaccgtatttccaatggctccagctcagcagagctgtctgtccaaaaagcagagatatttcagggccayggatgctttctgaatctctaagtcctcccttcttgcccacaatgtcatctcaggaccaatggttgaggacagggattcagatcatcagcccccaactatcataggcagaggagaatccctcaaatttatgacagcaggagctcctctcagagatgggaggttgggacataggagaagaagaaagaaatgtcttct

SEQ ID NO: 670506 - DNA, 895 bp, Homo sapiens
aaagcttgggaaaagacatttcccgtttcccgagctcagcacctccacagatggctacttctttctagagtgttctgaattaaaacaggccaggaggaagccttctgaaccaactgacatgtgtgtgctcatttgtaggaagaagttaatgataacttttttgccatcttgtaaagctatgtgatgatatgggaaaatgtcctctgcatgacaggtgctttgtttggagagccactatcgacatagacgtgtattttagtccctatgaagacactgaggctgaagggcttcttggctttcccaagactccacaactagttatggttcttggtatgagcccagcttctctgagattcctgagagctcctgcacccttctcctgcagtgcagacaatacttagaatcaggccacacaggtgctggtactgcctttgggtgggatttttatcgctcagatgactgaggctgctactttatttaataaactttcagcaggtgtgcagggctgggggcaagggaatggccatcttcatggcttggcagtcctttgggactgtggaattgtcaatgtcctgggtgataaaagcatgcacgactctggtttctttttctctggggccaattctcccaaaaccgtatttccaatggctccagctcagcagagctgtctgtccaaaaagcagagatatttcagggccatggatgctttctgaatctctaagtcctcccttcttgcccacaatgtcatctcaggaccaatggttgaggacagggattcagatcatcagcccccaactatcataggcagaggagaatcccycaaatttatgacagcaggagctcctctcagagatgggaggttgggacataggagaagaagaaagaaatgtcttct

SEQ ID NO: 670507 - DNA, 625 bp, Homo sapiens
ttgagaggatcgacacatgtttttgtggagaattcaggtgattgcagagaagcatgcaggcccaaagttatggccacaacagcaraccctagtcctcaggtaacttagaaggcagccacatgatgaactatagcaaaaaattcctttttgaggtgaaactgtcacatcccacgtcaaggctaccacacactgggcatggcagaaaagaggcgcagacctctttggccatccaacacagttccacagttggtaaggtccctacaagcaccattagacaatgcagcagactgcagcaagcaaaagatctacatgtgcattttataaaagaggacccaaaaggccaagtcaccatcactaggtaacacagagaggcaagttaagaccacagtggaataaaaaggcacacccaccagaatgaggaaggaaagaaggaaaagagctggaagggagagagacagggtcaggaaagaagaggaaaagagagagagaggaagagagaacagaaaataaccctgccaacatcgagtgttgataacgacgtcatgtcatggtaagtatcacgcacggctggagatggtgtaaaagtgatgctgtcagtttggaaaacagtttgcctttatctacc

SEQ ID NO: 670508 - DNA, 625 bp, Homo sapiens
ttgagaggatcgacacatgtttttgtggagaattcaggtgattgcagagaagcatgcaggcccaaagttatggccacaacagcaaaccctagtcctcaggtaacttagaaggcagccacatgatgaactatagcaaaaaattcctttttgaggtgaaactgtcacatcccacgtcaaggctaccacacactgggcatggcagaaaagaggcgcagacctctttggccatccaacacagttccacagttggtaaggtccctacaagcaccattagacaatgcagcagactgcagcaagcaaaagatctacatgtgcattttataaaagaggacccaaaaggccaagtcaccatcactaggtaacacagagaggcaagttaagaccacagtggaataaaaaggcacacccaccagaatgaggaaggaaagaaggaaaagagctggaagggagagagacagggtcaggaaagaagaggaaaagagagagagaggaagagagaacagaaaataaccctgccaacatcgagtgttgataacgacgtcatgtcatggtaagtatcacgcacggctggagatrgtgtaaaagtgatgctgtcagtttggaaaacagtttgcctttatctacc

SEQ ID NO: 670509 - DNA, 625 bp, Homo sapiens
ttgagaggatcgacacatgtttttgtggagaattcaggtgattgcagagaagcatgcaggcccaaagttatggccacaacagcaaaccctagtcctcaggtaacttagaaggcagccacatgatgaactatagcaaaaaattcctttttgaggtgaaactgtcacatcccacgtcaaggctaccacacactgggcatggcagaaaagaggcgcagacctctttggccatccaacacagttccacagttggtaaggtccctacaagcaccattagacaatgcagcagactgcagcaagcaaaagatctacatgtgcattttataaaagaggacccaaaaggccaagtcaccatcactaggtaacacagagaggcaagttaagaccacagtggaataaaaaggcacacccaccagaatgaggaaggaaagaaggaaaagagctggaagggagagagacagggtcaggaaagaagaggaaaagagagagagaggaagagagaacagaaaataaccctgccaacatcgagtgttgataacgacgtcatgtcatggtaagtatcacgcacggctggagatggtgtraaagtgatgctgtcagtttggaaaacagtttgcctttatctacc

SEQ ID NO: 670510 - DNA, 655 bp, Homo sapiens
tcttttttcttttttttccttctgagatggagtctcgctctgtcgcccagactagagtgcagtggcgcgatctcagctcactgcaacctctgcctcccgggttcaagcgattctcctgcctcaacctcctgagtagctgggattacaggcacccaccaccacgcctggctaattctttgtatttttaatagagacggggtttcaccatgttggccaggctggtctcaaactcctgacctcaartgatccgcccgcttgggcctcccaaagtgctggaattacaggcgtgaaccaccgcgccctgccaagagagtgcttttgatgtcactggggaaattcagcccttggctgagcaacagtgttgcagaggatattcaagtattgatagaaagttgaacaaggtgaccttatattatgaaaatactgtgattctgagctttcttaagcttgtgcacagtcagaacaatcagtacaaaatatttgtattcttcaaatagtttagatcatttcctctggatgttttcaagtataagggaaattgtgaagatgagggtatcggttgcaaaagctaccttgctctacatctgagagagggattgcctgtgaaccagaatctacgggtatgcctgtgggcaatcactgttactttatagcc

SEQ ID NO: 670511 - DNA, 655 bp, Homo sapiens
tcttttttcttttttttccttctgagatggagtctcgctctgtcgcccagactagagtgcagtggcgcgatctcagctcactgcaacctctgcctcccgggttcaagcgattctcctgcctcaacctcctgagtagctgggattacaggcacccaccaccacgcctggctaattctttgtatttttaatagagacggggtttcaccatgttggccaggctggtctcaaactcctgacctcaaatgatccgcccgcttgggcctcccaaagtgctggaattacaggcgtgaaccaccgcgccctgccaagagagtgcttttgatgtcactggggaaattcagcccttggctgagcaacagtgttgcagaggatattcaagtattgatagaaagttgaacaaggtgaccttatattatgaaaatactgtgattctgagctttcttaagcttgtgcacagtcagaacaatcagtacaaaatatttgtattcttcaaatagtttagatcatttcctctggatgttttcaagtataagggaaattgtgaagatgagggtatcggttgcaaaagctaccttgcyctacatctgagagagggattgcctgtgaaccagaatctacgggtatgcctgtgggcaatcactgttactttatagcc

SEQ ID NO: 670512 - DNA, 610 bp, Homo sapiens
tttcagactctttacccattgcaagaaattgaacatccatgcaagatacttggtaagccggaattgcagtggaaagaaacgatgaacttagtgtctcacattctgctgagcatacctttaaaatgtcttcaaatttctaagtacatgagacgaaggcaaacagcagaaaagctcagaaatgtagagacgtctggacagtcgaattgctggtgagacaagtatggatattctgttaaaatcaatatactattatgagttgtgatttatccaacaaatatgctttaagcactatgaatgcacagagtattgcacagaagaatgatttccgctgcaaaaggaaagtytgttgatcagcagataatttgggggtttctgataaatgaataaggatttgaaccactttcatatgtcttctcttagaagtcaagtcccacattctctctcaaatgatcctaaagtattgggctcctgcttctgttacatcacctgtattagtacatcttaattatgtttaacttgccggactccctcctcttaccagcttctgagttgtgctcattttgtttatttcactgatgcaaaacaatatgtataaatgatatgcttatcg

SEQ ID NO: 670513 - DNA, 653 bp, Homo sapiens
tgaagaacttgcagtccgatgttcgagggcaggaagcatcyggcatggaaggaagatggaagacagaagacttagctgccagtctaggccttccattttccttttcctcttttatcctagccacactggcagctgattagatgatacccacccagattgagggtgggtctgcctcttccagtccactgactcaaagttaatctcatttggcaacaccctcacagacatacccaggaacactactttgcatccttcaatccaatcaaattgacaatcaatattaaacatcacaggaatcgaggctcattctcatattatgttcacatagaagatgaaaagatagagaatcttccaggaaaaaaaataccaaaagcaaaaatgcaaatgtgtgaggtactgtatagcaggggtcctcaaccccagggccacaaaccagtacacgcccatggcctgttaagaacccggcctcacagcaaagtaaatggcgggccagggagtattgcttcctgagctctgcctcctgtcagaacaggagcggcattcaattctcataggagtaggaatcttattgtgaactgcgaatgtgaggaatccaggttgtgcacttcttgttagaatctaatgcctgatgatctgaggtggaacagttttat

SEQ ID NO: 670514 - DNA, 572 bp, Homo sapiens
aatatatacattatcattcatttgatgtggaatcaataaaaatcatggatctgctccttacagtgtcacaacttgaaaaaaaacaatctataatgcatcagttttgtaattgagattctytggcatacatagcctatggtaagaattcagtaattttatatggagtatagttaattgcacaaaatacactgaatttaaagtagcaataaattaaagtagcagtaaattaaagatagacccacatgtagaaataataggttacttttaagacctagattaagaattctataattttacaaattaatacttttagacacattaaataatttttagtggtattaaactaaattagtttattaaagatagaattcaatttgcatagacaacctgataatgagaacatttatttcaattcccagatcatcatttaataaaatgtatattaatagaaattctccttttcttcctctctcaaatatttctcagatgagacattttggttatttagagtaggagacattttagcgtcatttagccactccagccctaaaggaactacctttagtattttc

SEQ ID NO: 670515 - DNA, 2653 bp, Homo sapiens
gagttgtaggacacaaatttattattgttattacattaacaatggaaaaaatgcacatgtctataaactgaaagaaaatagctgcagttaaggaagagattgaaaataaacttgagagatggaagagtcactgaatgcaggagaaattaaggtcaggaatacagatgtagaaagtagtagaaatcattaagggtaacttagcagagctgctgatgactatggtccttgactttggacatagtttaattcagatgcaatatggtcagtcttaagaacctggacacccttatcagtatgtttttaatacaagacaagcaaaacatgtattttatataataaagataaggatattggggtttacttgtcttcctgtttcaacttgttatgttaccggtccctttctgaagtttatgaaatcatctgatacaaactttttttccagaaaactatatgctgatcagtcttacatgacaagcaagatgaaacccttaaggcttagtgcatatagtcttaacatgaattctgtggatgatccatacataccctgacactgcatgcaaaaaagtatgcatatgaatttttccataaaagaagttcataattttttgatgttgtaagatgcctgtgacctctaaaactrataagaaccactggagcctaaaatgagctattggtatgtggtccacccataccacatgctttaaatcctagcacacttcctcttatttttagagtctagcagaaggctagacaattttaggccatcaaatagtctctttctcattcctcaaaattgtatgatcttctcccttcatatatctaaacagagcatgtatttattcctgaattcagaggttataacccaaagtttcatgtgtccagatctggagagaaatgaataaaacaccattaaacattcctgcccacatggaaactgttcaaccttaatggctgctcttttctatgctatctctcttccacttttaatgcatctgtttgatgtctaatttgttacatcaatacgaattttggatgtgggtaggggaagagtgtttgggatcaattaagatgacaaataaggaatgtaattgactcatatctacttaccttaatttttcttccatagctactcacagctagatctacttaggtctcatacctactatgtaatacccacctcaattattgattcaaatgtaaattgggaagaaattatttttccaatataacctaatagtttggtgggatgtgtaaaaaccctgataactcaaacaaacaatttgttttccctccatctctgcaagtttttgctaaaaattcgaatcaggtctggcaaaccactttttaatccatgatttccacattgtccagtgggattttctaaccccaatcagttagtttatttcctaagcctgagcgtacctgaatttccttcatcagtgtctcatgtgtctctgcttcccaagctattgtaatcttgtgaagcaaggtattatctaatattatttatttgttctttttaaattctgggatagttctgagcattaagtggcatgaatggaaaagagaaatcatgagatattaagcctggaaaatgctggatatatccagttggatatattaagtggtgtactgggaatgtttaacaacaagctgtacagagagagagagagagaaagagagagagagagagagagagagagagagaaaggaaggaagaaagaaagaaagaaataaagaaagaaagaaagagaggaaggaaggaaggaaagaaggggaggggagggaagagagggaagggagggaagggaaggaagggaaaaagaaaaagaaagaaagaaagaaggaaggaaggaaagaaagaagaaaggaaaggaaagaaagaaaaaagaaagaaaaagaaaggaagaaaggaaggaaagaaggaaggaaggaaggaaggaagaaagaaagaaaaagaaagaaagaaggaaaaaaaaactgactctgattagtttcttttgtattccctccatggctgatttcacgctatggaattgtggaaagatgtaaacaaccagtactcgtgagctgctacaggccatcactggttatatacataggaaaagtagaaaagactaccaatatgctgcgggaaatcagggaccccgaaagaagggaccagctgaagccgcagcagaagaacataaattgtcaagatttcatggacatttatcagttcccaaaattaatacttttataatttcttatgcctgtctttactgcaatctctggacataaattatgaagatttcatggacatttttgtaacttccccaatcaatactgttataatttcctatgcctgtctttacttatctcttaatcccgtgatcttcctaagctgaggacgtatgtcacctcaggaccctgtgatgattgcattaactgtacaagttgtttgttaaacatgtgtgtttgaatgatatgaaatctgggcatcctgaaaaagaacaagataacagcgattttcagggaacaagggagataaccataaggtctgactgcctgtgaggccgggcagaacagagtcatattttccttcttgcagaaagcaaataggagaaatatcgctgaattcttttccctgcaaggaataaccctggggaaggaa

SEQ ID NO: 670516 - DNA, 566 bp, Homo sapiens
ggacacagtgtgaaaggagataacaaataacaataaaaaccctcactgagtgttaggagcagttattcaacttttctaaactacatcctcatctttggggcacagctaatattgatcgaattaaccaggcctatttgtacacatttaagagaatgcaaacacatcatattgtattacattatatttataaatgatgcataaaatatgtcaaaactgggcaaaatacaacaaagataacacatattaagaaggcaatgaccaaagctaaaatggtgatgtataatacaattattacatctactggcygtaagtcgggcttgatttaaaggtaaaaaaatttctaaaatttgttaatcccacaaagtaatgaccaggaatcagatttaagaactctaagcaaagtcacaaacataagaatcactaattgtctacaacatgagtactgtattatcaaaatatctttttctcttgtgcttatgttatcctggaagaaacagtgaactactgaaagaactaaaactaacaaactatacgttaattaaaatgagtttaaaataaaacccaat

SEQ ID NO: 670517 - DNA, 1480 bp, Homo sapiens
agctatatctaatccagtaggacactgtggagaatacaagtgtcaaatttttgctaaaaaactaatatatggctgggagtggtggctcacacctgtaatcccaacactttgggaggccgaggcaggtggatcacctgaggtcaggagttcgagaccagcctggccaacatggtgaaatcccatttctactaaaaatacaaaaattagccaggcatggtggcagatacctgtaatcccagctactcaggaggctgaggcaggagaatcactggaacccaggaggcagaggttgcagtgagccaaggtggcaccattgcactccagcctgagggacaagagtgagacttcatctcaaaaaaaaaaaaaaagactaatatatggagattgatttatcattttatcaaaaggtaacccaaatactaatatgactttttttagaccattcatttaataaattgcgctaaaagactcaaaagttcttttatgttttatgcccaaactaattaatattgagtaaagttagtccaaaaaattataaacattttattgctcatttaagctcattatttgcaggtattataaactatagcaaatgaagtttacttccctcagatattctacaattattgtatgcccttaaatttgtattttaagattcagttttatattctagcaaaactgtacaattggcttttagacaaaatacttctttgcctttgataggcaaaaacacattaattatatcgcatgcacttttctaaatactcaaactgacttaatttcttaaagtagtataaaagaacatgtgcattaatcagaactaagggtacttttacatactgttcattgtcctacttgatagccactctataatgtgtaaaaatatgcagcaaagatatgttaaaaattttgtgagactatccaaagatttttcactaattatttcaatgaaatattagccaacttcatagagctaactagcatagtaaaattcattttaaactgacacactgcagagaatttatactaaaatataaaaatttacattaaaattgtgttagatatgaaatttgaatttttttccaggtagggtatgtgttgttttacctatacggtataattatttgtarccctatctcaagttacatgaacaaatgttttaaaaaatactagtttaataattcaactcagttgagccacaaatccagtaggggacatctagaaagctctgataagttaaaatattttataaaccagaaaatattgtgataaaatcagagaaaaaacataattaatttaaaccaaaattatcaagccgtatacatttatccaaggatttcccatgattaaaaatattactgaactttatttcaatcaaatttttaaaaaccttcaattttgttctgaagcacagaagtcctttgcgttatgcaattctcctacccgcctgccttcccctgcttctcgtcttctgacatag

SEQ ID NO: 670518 - DNA, 1480 bp, Homo sapiens
agctatatctaatccagtaggacactgtggagaatacaagtgtcaaatttttgctaaaaaactaatatatggctgggagtggtggctcacacctgtaatcccaacactttgggaggccgaggcaggtggatcacctgaggtcaggagttcgagaccagcctggccaacatggtgaaatcccatttctactaaaaatacaaaaattagccaggcatggtggcagatacctgtaatcccagctactcaggaggctgaggcaggagaatcactggaacccaggaggcagaggttgcagtgagccaaggtggcaccattgcactccagcctgagggacaagagtgagacttcatctcaaaaaaaaaaaaaaagactaatatatggagattgatttatcattttatcaaaaggtaacccaaatactaatatgactttttttagaccattcatttaataaattgcgctaaaagactcaaaagttcttttatgttttatgcccaaactaattaatattgagtaaagttagtccaaaaaattataaacattttattgctcatttaagctcattatttgcaggtattataaactatagcaaatgaagtttacttccctcagatattctacaattattgtatgcccttaaatttgtattttaagattcagttttatattctagcaaaactgtacaattggcttttagacaaaatacttctttgcctttgataggcaaaaacacattaattatatcgcatgcacttttctaaatactcaaactgacttaatttcttaaagtagtataaaagaacatgtgcattaatcagaactaagggtacttttacatactgttcattgtcctacttgatagccactctataatgtgtaaaaatatgcagcaaagatatgttaaaaattttgtgagactatccaaagatttttcactaattatttcaatgaaatattagccaacttcatagagctaactagcatagtaaaattcattttaaactgacacactgcagagaatttatactaaaatataaaaatttacattaaaattgtgttagatatgaaatttgaatttttttccaggtagggtatgtgttgttttacctatacggtataattatttgtaaccctatctcaagttacatgaacaaatgttttaaaaaatactagtttaataattcaaytcagttgagccacaaatccagtaggggacatctagaaagctctgataagttaaaatattttataaaccagaaaatattgtgataaaatcagagaaaaaacataattaatttaaaccaaaattatcaagccgtatacatttatccaaggatttcccatgattaaaaatattactgaactttatttcaatcaaatttttaaaaaccttcaattttgttctgaagcacagaagtcctttgcgttatgcaattctcctacccgcctgccttcccctgcttctcgtcttctgacatag

SEQ ID NO: 670519 - DNA, 1480 bp, Homo sapiens
agctatatctaatccagtaggacactgtggagaatacaagtgtcaaatttttgctaaaaaactaatatatggctgggagtggtggctcacacctgtaatcccaacactttgggaggccgaggcaggtggatcacctgaggtcaggagttcgagaccagcctggccaacatggtgaaatcccatttctactaaaaatacaaaaattagccaggcatggtggcagatacctgtaatcccagctactcaggaggctgaggcaggagaatcactggaacccaggaggcagaggttgcagtgagccaaggtggcaccattgcactccagcctgagggacaagagtgagacttcatctcaaaaaaaaaaaaaaagactaatatatggagattgatttatcattttatcaaaaggtaacccaaatactaatatgactttttttagaccattcatttaataaattgcgctaaaagactcaaaagttcttttatgttttatgcccaaactaattaatattgagtaaagttagtccaaaaaattataaacattttattgctcatttaagctcattatttgcaggtattataaactatagcaaatgaagtttacttccctcagatattctacaattattgtatgcccttaaatttgtattttaagattcagttttatattctagcaaaactgtacaattggcttttagacaaaatacttctttgcctttgataggcaaaaacacattaattatatcgcatgcacttttctaaatactcaaactgacttaatttcttaaagtagtataaaagaacatgtgcattaatcagaactaagggtacttttacatactgttcattgtcctacttgatagccactctataatgtgtaaaaatatgcagcaaagatatgttaaaaattttgtgagactatccaaagatttttcactaattatttcaatgaaatattagccaacttcatagagctaactagcatagtaaaattcattttaaactgacacactgcagagaatttatactaaaatataaaaatttacattaaaattgtgttagatatgaaatttgaatttttttccaggtagggtatgtgttgttttacctatacggtataattatttgtaaccctatctcaagttacatgaacaaatgttttaaaaaatactagtttaataattcaactcagttgagccacaaatccagtaggggacatctagaaagctctgataagttaaaatattttataaaccagaaaatattgtgataaaatcagagaaaaaacataattaatttaaaccaaaattatcaagccgtatacatttatccaaggatttcccatgattaaaaatattactgaactttatttcaatcaaatttttaaaaaccttcaattttgttctgaagcacagaagtcctttgcgttatgcaattctcytacccgcctgccttcccctgcttctcgtcttctgacatag

SEQ ID NO: 670520 - DNA, 648 bp, Homo sapiens
tgcatttcaaaataactgttgtcactgcaggtatttttcatagtaattcccagaagccagaggtttttactataaaatgagaatgacagagaaaagagtggaatggctgaattcaatggtggtatatgtgtaacatttaagaaactgccaaattttccaagtgagtgttcaaattgcattactgcrctgacataatttggcatattttaattgtatagatccactctttattgccatcgccaaaattctgtatcttaagctttgttctgcattttgcaattgttctaagagtctgtttctcagacacacacccacgcgcgcgcacacacacacaaacacacacgcacgcacgcacgcaagcaggcaagcaatacctcttgagtatgtcttcccttgattgttcacttcactaccgctcagcctgactaaacaacgtattggatttagccaatgagtatagttaactatttttgcttatgtgattagcttccatttcaaagtcagccttagagcagagaacaaaatctccttctggacaaacaaacaaaactgccaataaatctgcatgaaagtggaagatgacctgaagcagcttggtcttaagtgacccttacagaatactagagaaggagctatcttttcaaggag

SEQ ID NO: 670521 - DNA, 598 bp, Homo sapiens
aagaaagcttacgaatttgtgttggcctgcattcaaagctctcctgggccagggccgtggggcgtgggttggacaagctcacactaggtggctgtgagaatttggaaattacatacataaagtgttcagcatagtgtgtgcattcttttcttttcttttcttttttcttttcttttgaggcagagccttgctcagtagcccagtgaaacaatgattgcgcaatgacacaatcataactcactgcagcctcaaactcctgggctcaagcaatcctcctgcctcagcctcttgagtagctgggattccagacgcccaccaccacacctggctaatttttaattctgtgtgtgtgtgtgtagacatggggtctcactatgttgctcacgctggtctggaacgcctgagctcaggcaatgctgccrcctcagcctcccaaagtgctgagattacaggtgtccagccaagatgggcaccttaatcattattatcacttttttctaacttcttcctgctccaccaaagcctggtgggtgggaagatctcacaacagaatcccaagaccctgcagctaggaggatccaggagggaaaccgcaaga

SEQ ID NO: 670522 - DNA, 649 bp, Homo sapiens
ctaagggcgagaagtcccaggcccagagtgagtggggaaggccctaagggagttgtaggattagaacccagatggcattcgcctgtgtggagggtgaacctgagcttggagtctttcaggagttggagagaggaggaggacaggttggagcacatggagtcatccctaccctgcccaggcctatggatcgcacagagacggatgggcagagagtcgttccccatgcagcggggctcctcctgagctccattttcgggccagctctgtgctgggcttgggtggggccactgcaggccaaaggaggtgctgaaacacatagcactcctgcctacccccaccaggggtgccagggggacagctggctttccgacaggacccccagatgatatgtcgtgtccgtgccaatgaagtcgaggcaggactgagggacgagtgtgtttctgagggatggcatccaggaccagtgccagcattccagaggcagggccgcctgtaaacacagacaggggaggtagctgtttatgtgkttggtttgaggaaggcttctctgcccacagatacctctcctgcctccccagcccactttgggatcaagcctagaattccaccattataggttcattcctttggcttgcaatacaaacatccc

SEQ ID NO: 670523 - DNA, 625 bp, Homo sapiens
catacatggtagttatgttcattttatagttaggtgtctaagaagggagtgtatttcttactgtctgactctgttgtagactacaaagaataatcagtctagcaagatgaaagtagaacaataagcaggactatagtataagcattactataaatgtaatgaattattactaacttgcctgcccacttaactaytcctgttgtcttacctttctttcttcagcaaagtcctaaaaggtaataggtgttagaaaaactagaaggtcagaagggaaagattatgctaggaagaggtctgaaatggaaacacacatataagattgatcacagccatgtaaaataataataacaggaagatctatgcattcctcattttttaaaacttcagattcccaaagactgtaaaagcaaaactgtttttcttatttcccagaacatctggttcaaacaactttgttgcttactgaacagatatttgtcataaatcaccatgaacaatataaagatgaatgagagtgattctttcccaaaaggaaaataaaaggtaccagggaagaaagctctgtctctccagaaagtttgatgtagaaaaggggagtctgtatcagggctttggctgaacacaa

SEQ ID NO: 670524 - DNA, 625 bp, Homo sapiens
agacatgagccatcatgcctggccaagatttcttaatttcaatttaggagatggtacaaaatttaaaaatctgtattttatcataatctatgaaagattcacacatcacagttggctggtttcatactgaagtgtgccttattgggagtggaaacttttccaagttgacttgttctcttccctgattctgattcaccagatttgccatgggacttaagcatgtgcattcttcatgtgattcagatacacttccttcgcttcccacccccaacttttgcgctgctttggatgtatatgtaaagtccagagctgtctgaggccattcatacarcaaatatacatcaggcatctactgtgcaccaggtactatggttgttgggatatatcagggactaactaaaaacaaaggttcctggcttcatgcagcttattttccaaataattaccagacatctttgaatatcctgtttattatttaatttagaagattaataagaggaaaagtaagaacccagagtattgataggagaaaataggtagtgggccttctgagaaataacaaaaggtgaaattcttatatcagatataaaatgcaagtccatttttcattaaggttcagaaaagt

SEQ ID NO: 670525 - DNA, 646 bp, Homo sapiens
catattttgcgccaagtcttgtgctaaacaccaaggatatagacttgtttgattcattcatttcacagatatttgctgagcacctactacgtgcttgacagacactgtgccaggctcccaggctggcaagggagacagacattcaaaaaactacaaataagtagtataggcagctcctccctcgctgactgccaaagcttcgaagggttccagtccagcaggctcatcacagttattatcggccccttctacagatgagaaaactgaggctcagaaaggttgagagacttccccaagtctcccacagctagtgaggggctaagcctcaattgtagcccagaccrgcctaattccaaggaccgtgtcctttcttaacaatgcatatctaccagggtgcatttctcaagctttgagataaagacatcaggcaagaaaggggcaagaaaatgcacaaataccagaggtattccttttcccaagtctccaatgtaggaagaatataattccgggactactgaggagggggtttgagtaggcagcaaggggtgatgtggatatatgcatgtatgtgtgtctgtgtgtgtgtgtgtgtctgcacccatttctgtgagtgtgtaaaatgtctgtgtatatgcgcctgtctgtg

SEQ ID NO: 670526 - DNA, 595 bp, Homo sapiens
cttttcagcaatgccccactcctggtatcaatttaccatattattccatttttatgctgctgataaagacatactcaagactaggaagaaaaagaggtttaattggacttacagttccacatggctggggagcccttagaatcatggcaggagtcaagggcacctcttacatggtggcagcaagagaaaatgaggaagatgcaaaagcagaaaccactgataaaactatcagatctcgcgagacttattcactaccatgagaaaaatatgggggaaaccagccccatgattcctgttatctcccaccaggtccctcccactacacrtgggaattatgggagtacaattcaagatgagatttggctggggacacagagccaagccatatcactggtatttttaaagattaatagaacagaaactactatattgactgaggtgaatgaaattatgtgagtaaatgacataaatagggaaatccaatagagttaatgtcaatgtgggaaaatcctggacactaaactagcatagagaataaagttcatttttaataatttatttaatgtgtaaattgaacaaaaaatatatatgatac

SEQ ID NO: 670527 - DNA, 2603 bp, Homo sapiens
ataacaaagacaaaacactttgcaatcaggtttataaatatttaaatctataataaagaaaatgttaaaacattcataaaacacaaaaatcaaaagtcattctttgttcttggatggaatgcattaacactgtaaagatgtcaatttttcctaagtgaattgaatatatttcacaataacagtaacaagttttattcttgagggaaacaaatatatttctatatttctatcaaaacatgaacattgcaggaattggtggaaaaaacgaaataataggagttatttctgtctgatatcaaaacgtacttcaaattctctataattaaaacactgtttatggtgcatgcatacataaactaaagaaactgaatcaaaagtgcagaaacagatwtcaatgtatgaggatgtttgggtttggtaaaattggcatatcaagtcattgtgcaaataatagacatattattaaatggtgttggaggatctaggtaaattttggagaatttgttccacacatgcagctatataaccaaactcaaaatgcagatgtaatctaaatataaaggaaggaagcaaataaaggaggaagaaggactgattgattcaagaactagaaggaaatactgaagaatttatttataactatgaagaaaagtcttctgaggtaaaaatacaataaaaaattcaattacattaaacttatgatgaagaagaagaggaagattataacattggcaaaattcaataaaatggataaatatttgcaacatataaaacagggtttattactacaaaataaatgtatctaagctatatacatattatatttatatttttagctataaacatgtacacacgtatacatacaagaaagaaaaaaggaaggatgcatattgatattacatatgtgtgaataagagagaaaagaataataatatgcacatatacatggaagcttattttaaataaatcagaatgataattaaaaagtaattatattgcttcccaacaacagttaaatgattcataaatggaataaagacagaaatgtgacttctttaaatatagcctttatataattttgactaggaaaatatgttgatattttgtatgatcaaaaatttgaaagaacaaacacaaacatggatttaattgaatattaagttgtcaacataatatctctcaaaaaatattaaaataaaattattaaaatattttatcaaagcaatttgtatatagtaaactatacaaatcttaattgtacaactttatgaatttttaaacatcaaccaatttaaatattataaaaactactatagtcattctcagtgggaacattgatgaatttttaaactgttctttatagatgtgttattaaaaaggcatttgtgtagtaattaaaagtcctcttgtgtgctttgtagcaaaggacaaatgagtaactctattgtgttatggacatagagttttcgttgtaggagaaggatgatgcagatgtgaaatgtaagtaaaagtaaggaaaataatatggtgctggacttaatatgccatgtgagtatgaacttacaatgttttgtcaaaaaatattttttctggttccatcctctaaattgtgctatgtagtgacatctcattttgaattagcacatctaggatccagaattcatgtgtaaatgttattccccacgtaaacaaaccaggattttatagagaaatgactcattccaggtctcagagaagggaagcacaagggagactgaacaacatgttttgacagaaagtaataaagtgctcaaaggataggagcatgctaagaggaaaaggtaagcagataaataggcttcctattgctcaaatttgcaacaaccattaagaagatattctttaccaaatgttctcaaataaatcatgttagcaacaaattaagacaccaatgaataaaatagcaatccaagagacaacagcaatatgaacgaggaagaaagaaaagtcatttcctaaaatagactgcaaactaaaaaatgtagaagaaatgctacaattaaatattcaccaattgtcaattaaaacagaaataattaattcagccaaaactcattctagcaaaaatgatcaactgatgctagtatgagtgaatggaaattactgagaaaagtgtatcttaatatttatagtatttattatttaaaaggtcaatttagtaactttagattagagaaagtcttttaatcacgtgacctgatctaagtagttttgtacttgtggaaagagtcaatactaatttcataacagagatggttgttctgcaggatagtttccttaatcttatgatatacatgctgaaacattagaaatagtgaagcattatgtctgcgcctttttctcaaaaagttcaaaaaaggtaaaagaagaggacaaaaaaaataaagagagaaagagagagataaagagcaaatattctacaacgttaaaaagtagagaatctgcttgaaggatatagtggaaatcactgtgctccagacttacatgtaacaatgaagtaagtacataggatatggcaaaaatcttcatctttgtaccacgtttaattcccaacattacaaaaa

SEQ ID NO: 670528 - DNA, 586 bp, Homo sapiens
cggctctggattcataatcaccttagattgaatccaagtattcaatccttctctgactcagtttctttgtctgtaaaattgggaagataatagacttacctcaagaattaaataacctaatacatagaaagctcttagaatagtgcaggggacatcattagtcctcagtcagtagtggtcagtattataacgagatccttggcatctgtggatgtaacaagtttcgcaattctctagggacccctctggtccatgacaggtaatggtttgttgttttgctgagacaaaagttaactgctctcatggaatgatattatgacaatttgaaaacacacacatacacttctttgtgaaaagtggccactggctgggcgtggtggctcacacctgtaatcccaacactttgagaggccaaagggggtggatcactggagttcgagaccagcctggccaacatagcgaaaccccatctctactaaaaaaawaaataaataaaataaaaataaaaataaataaatagccaggcatcatggcacacacctgtaatcccagctactcgggaggctgaggcacaagaatcgcttca

SEQ ID NO: 670529 - DNA, 693 bp, Homo sapiens
ttcaacagaaaacaatcatgttcaaggaagccaagtctaggatttcaggagctcaaagtttcaaatatttttataaaaacatacatacatacacacacatacatacattcatgtggagagagaaaatgaaaagcaagaagaccttttcttccttagtccaaatccaatttaataattatccagggtattctcagtaaaaaccaggtatttatgcctctatatgtatgtcaccaaaatggagccagcttacctgaaggtcctctgaggctgtcactttcctctagtgctgtcccataaacctgaaggatatacaataacaaaggggacaattccgtgggacgaaaatcttattttaaataacttctctatactgacttcaagccaaatgaaaaaactacagcttttttggaattttattccatttctgttgtctgattcataagtgttgttaaatatttaccaggaacctgccaacagtttctcaacattagttaatcataggkaatgctattccattaacaactcaataaacttctttaaagttgtacaaggtaaatttcagtaccttaacactgctaacccatccttgtagaataaatatttgctttgagtttctctatgccaagatttatgggatcaagtaatctaaatctccttttgtaaataaggtgtgccctcaagaggatgagagtg

SEQ ID NO: 670530 - DNA, 2689 bp, Homo sapiens
ttcatgtttagactcaggtaccatccgcaagatatttcattaggtatatacaaatattccaaaatctgaaaaaaatctacttttggtcccaagcattttggacaagggatatttaacccatcctactggaaaaataaaattccttttcagtatgacagaaattaagagatcagcttaccaaacttgaatgctgcaggattttctcaagccgctcaatttggtcatcctgttttttaataatttttctcatcatcacatgttctacttcaagcctaaaatgtgcattttaaaataattactctcacacgtaattttttttaaatcatgtaaattctaaacaaacttctgaaggtataattacacaaattcttagcaatcacaaaagtagacgattgggctactgtgtcattttctacctgtgttttggtgataatatgcaaaatttaggaataatgtagaaaaatgatgtatttcgatatagcttacaaatgaaacttttttggcttcacaaagacatactaattatcataactgatacaattttcatactacagtgctcttttgctttataaatactcaagttattttgtgtgctgcttcaaattttacttttgtgtgtcgccttccatctccttagtacatcttatagtagctgtaagttgatcctgtatttcttgaaactgaaacaaagaattttaaaaaattacatttggaaatgacctaaatgtccatcagtagatgaatgaatcaacaaaatatatatgaaatattttagactatcacaatcttttttatttataaaaggtcataatctaggagaaatcatcccattacctgttttttgtaagtaattttagtgggacactgctacaccccttcagtctgcatattgttcatggctacttttgtgctgtaattgcagggccgagttattgcaacaaggatcttatggctcacaaagccttacataayactatctggccctttacagaaaagttcacagacccctgctctaggactaaaacacaacattcttcttgcttttgaattacattttatcaattacatactcaaacttacaaactggtaaaatgtggaaagataaaggattacctcacgctaagcatttatattttgaattccaaacactaccacatcaactataattttattttttgtatgtatgcatttagttttattatagcaaagcaacttgcacatttttaaatatttaaaactaagcatcatctttcctttctagggaaacaacaagaaaatttaaaaacaagcaggaacaaaattaaaatcgacaaagtcagttccaaataagatcctacaggatcttattgactctcccattgaatagcaggactcaggtcatcattaggagagaagtaatttaaaagcgtcatcttaaactgcaaagatgtccattaaacatgccaaaggagaagccctgttgtctaaatgcccacttaaccaacccaaacatctcaaacccatcctttgctgaccttctataaccccctttttagtttagctttttctacaaataagagaaaatagatacatgttggcaaatgctaactgtccatattcatatagagacagagtgtgctctctgagcccaatacaaaggaagtaaggattttcatcgaaataaaaatttattcagtaaaatggcctttctgaacaagttaacctgaaatctaagaaatacgtatacacaggttctttatacattcagaaaagtagagactaaaaagaagataattttctgaaacattccattagacattatcctctgaattaacctggcttgcctcaccatgccaatagagaaatcattaaaaatagactgtttaacaggaaaaaaaaactctctcaacttctgtgagaaatgatgcataattctcaactttcctaaggttaaatatttaagaaaaaaatatatgtataaaaaatggcagaatgaaagccagagattaagatataggtgcattataataaaatcttaataaaattaataataaggaaaatacagaagaaagccatccactataaaattttaataacattaattatcataaaaatacaaaagaaagccatccactaaaattagtaccccaaaacactttatattagttaactagctacagattaacagttgttggtgtgcaaagttgcatacatacttgacttctcatctggtctaatttcttccttgaatcctgcatcccattttctaaataggtgcagtgacgcgatgaagcatccagcagagcttttgttgctgatcctttgtttaagacatcatctcgtttttgttgaagctgtctcacagctacctgataagatgttatttttgttactgattttacaaatcaccttattattaaaccattaataatatttaactctaaagcatactctttgaaaaatatcaccacacagaccgattcaccttcttttcctcatgtgtacacattcctgtgtattactgaatccagttaaggatacagaaggtgttatcttcctgccaaactggtattgttattcacacaacatattcagcccactagtcattcctcccttgatgaatctgcaatgcttaaaaaccttctgaagtctcaaaaagaaatgagtatgtgggtgagactgatggtagtaaattatacattgtggaatg

SEQ ID NO: 670531 - DNA, 1176 bp, Homo sapiens
tggatgaaacttctttagagaatagcatgatactcccaacaagactattttagaaacaaaaagtatgtggaattctaattaactcctaaagtggtcattttcaatgaatattggagtgatttgtgaatgtaaaacatattaatatctaacgcttgtagcagttttactttgtagaagtatgtcaaaattgataattgatgatatttttattgaggctaatatattatcctttggtgccatgaatggatgaagaaacttttggaaagctaaacgagtggatacaagaaacttaggcaaattattacaccacgtgggtktgaggaataataaatattatctactcagtttcagcaaacagatatccaaggtgatcaatttaggacacttctactgaagagacgtgaagtgtacattcaactgaagtgtcattgtaattgtgtaccttctctgttatcgggcaagttaaagagcatgatgaatgtctgtagtataatggtgtaaatccttttgatttcttgcatgaaagacctgtgggatcaagtaccacctactttgacattgattctcaggtgtatgagttgatcctctgattttagatcacatttgtcctcatcactcagcatatccacgttgatattgacacggttttattttagttttagacatatgacaaatcataccatgcttgaaattgtaagtatatttttcatgaaggctgtattactttttttcagtgtatttctgtcatgttccaatccccagacacaaagtaggaaacatcaaatcctaccctagtacaggcagaaggatacagcttgatgctaacactgcatgaatgtatgaataactttatcatacgtgcatgtgggtgattatgtatcccttttgcttttcagtgtcttctcagagacgaccagccttgaaggtaattaaactcttatttatattgtgaactagtaattgtatagtctatgaaacatactttatttatttattattttgtttcaaattccattcagactacaggtgatgagaaagattctgtttcgaatatagccagagaaataaaggatggagaaaaatctgggacaggtaattttacaaaacacatttaatgtcatgttcagtccagatagaaaagaacttctcttccccaaataaatcagcgggggggtt

SEQ ID NO: 670532 - DNA, 1176 bp, Homo sapiens
tggatgaaacttctttagagaatagcatgatactcccaacaagactattttagaaacaaaaagtatgtggaattctaattaactcctaaagtggtcattttcaatgaatattggagtgatttgtgaatgtaaaacatattaatatctaacgcttgtagcagttttactttgtagaagtatgtcaaaattgataattgatgatatttttattgaggctaatatattatcctttggtgccatgaatggatgaagaaacttttggaaagctaaacgagtggatacaagaaacttaggcaaattattacaccacgtgggtttgaggaataataaatattatctactcagtttcagcaaacagatatccaaggtgatcaatttaggacwcttctactgaagagacgtgaagtgtacattcaactgaagtgtcattgtaattgtgtaccttctctgttatcgggcaagttaaagagcatgatgaatgtctgtagtataatggtgtaaatccttttgatttcttgcatgaaagacctgtgggatcaagtaccacctactttgacattgattctcaggtgtatgagttgatcctctgattttagatcacatttgtcctcatcactcagcatatccacgttgatattgacacggttttattttagttttagacatatgacaaatcataccatgcttgaaattgtaagtatatttttcatgaaggctgtattactttttttcagtgtatttctgtcatgttccaatccccagacacaaagtaggaaacatcaaatcctaccctagtacaggcagaaggatacagcttgatgctaacactgcatgaatgtatgaataactttatcatacgtgcatgtgggtgattatgtatcccttttgcttttcagtgtcttctcagagacgaccagccttgaaggtaattaaactcttatttatattgtgaactagtaattgtatagtctatgaaacatactttatttatttattattttgtttcaaattccattcagactacaggtgatgagaaagattctgtttcgaatatagccagagaaataaaggatggagaaaaatctgggacaggtaattttacaaaacacatttaatgtcatgttcagtccagatagaaaagaacttctcttccccaaataaatcagcgggggggtt

SEQ ID NO: 670533 - DNA, 2112 bp, Homo sapiens
taaaaatatcaattaccaatgttaacatacttctacaaagtaaaactgctacaagcattagatattaataagttttacattcagaaatcactccaatattcattgaaaatcaccactttaggagttaattagaattcaacatcatttttgtttctaaaatagccttgctgggagtatcatgttagtctctaaggaagtttcattaartagctattttatccaagagtaagctccttgaacaaggaagccaatgtattcatatgcaagtttatctcatttttataagtaaagtcaacaaaacatgtatctctgatgcctaatagtaacaaagaggagtaatgagtcactgtggtttatcccaattctagcactgtttcctgcttccagtagttctcagagcagccaaaatcaaatcttcttttatgcaaatattccaaatgcatctgaaatgagttcactcaggtttcctcagcagaaaacccaaaattacataaataccttcttctttttcctccttcctgcctcacaatccctcttccttgaggaaaataattgctgcatcagtggtcttcttagctctcattctacagtgtttatggagttattaggatcacttttccctctgttgataacaatatgatatgatgcctataatatctattacttcatctcattctctttcccctcttgatggaaacatgctgtaaaattaaagtaaaattatgctgctcccttagcctggtatgtgttgaactgctctccaatgtttcttcttcccaatttcaatgtaaggaagcctacaatcttactactcagatcatgaccaaggaccagcagtatcagagtcacctgagaactcactacaaatgaagaatctcaggtgtactgaatcagaacgtgcagcttatatgaactccccactgatttatttggggaagggaatttctcttctatcttgattgaacatgacattagatgtgttttgcaaaattacctgtcccagatataggtccctcctttatttctgtggctatatttgaaacagaatctttgtcgtcacttgtagcctgaatgggatttgaaacaaaataatcaatatgtaaagtaggtttcatagactatacagttaatagttcaacatataaatgagactttaattaccttctcagctcgttgtttctgaggagacactgaaaagcaaaagggatacataatcaatcatatgtaaatatgataatgttatccatacattaatgcatggatagcatgttagcatcaagttttgtactcctgcctgtattactgtaggctttgatattttatactttgtttcttgggactaaacatgaaggaaatacactgaagaaaataggaatacaggcttcaagaaatatacactgacaatttcaaatgtgatatgactttctccatatgtctaaaactaaaataaaaccatgtcaatatcaatgtggatatgctgagtgatgaggacaaatgtgatctaaaatcagagtccaactcatacacctgggaatcagcgtcaaagcaggtgatacatgcacccacatgtctttcatgcaagatatcagaatgatttggaatattttactgcaaacattcatcatgctttttaacttgattgatcagtgagaaggtacacaattataatgacactttagttgaaatctcttcagtggaagtgtcctaacttaatcagcttggatatatgtttggtgaattctagtatgtaatattcattatttctcacacccatatggtgtaataatgtgcctacatctcttgtatcttctagtttagccttccaaaagttccttcatccactcattgcaacaaggtataatatataaacttcatcaaaaagtgtaataaattaccaaatttgacatacttttacaaaataaagtttctacaagcattagatatgaataagcttttacatctggaaatcactccaatattccttgaaaataaccatttgggagtcaagtaatgaattcaacattattttcacttctaaaatagtctggttaaagtatcatgttattctctagagaatttttattaagttgctattttatccaatagctcctt

SEQ ID NO: 670534 - DNA, 2112 bp, Homo sapiens
taaaaatatcaattaccaatgttaacatacttctacaaagtaaaactgctacaagcattagatattaataagttttacattcagaaatcactccaatattcattgaaaatcaccactttaggagttaattagaattcaacatcatttttgtttctaaaatagccttgctgggagtatcatgttagtctctaaggaagtttcattaagtagctattttatccaagagtaagctccttgaacaaggaagccaatgtattcatatgcaagtttatctcatttttataagtaaagtcaacaaaacatgtatctctgatgcctaatagtaacaaagaggagtaatgagtcactgtggtttatcccaattctagcaytgtttcctgcttccagtagttctcagagcagccaaaatcaaatcttcttttatgcaaatattccaaatgcatctgaaatgagttcactcaggtttcctcagcagaaaacccaaaattacataaataccttcttctttttcctccttcctgcctcacaatccctcttccttgaggaaaataattgctgcatcagtggtcttcttagctctcattctacagtgtttatggagttattaggatcacttttccctctgttgataacaatatgatatgatgcctataatatctattacttcatctcattctctttcccctcttgatggaaacatgctgtaaaattaaagtaaaattatgctgctcccttagcctggtatgtgttgaactgctctccaatgtttcttcttcccaatttcaatgtaaggaagcctacaatcttactactcagatcatgaccaaggaccagcagtatcagagtcacctgagaactcactacaaatgaagaatctcaggtgtactgaatcagaacgtgcagcttatatgaactccccactgatttatttggggaagggaatttctcttctatcttgattgaacatgacattagatgtgttttgcaaaattacctgtcccagatataggtccctcctttatttctgtggctatatttgaaacagaatctttgtcgtcacttgtagcctgaatgggatttgaaacaaaataatcaatatgtaaagtaggtttcatagactatacagttaatagttcaacatataaatgagactttaattaccttctcagctcgttgtttctgaggagacactgaaaagcaaaagggatacataatcaatcatatgtaaatatgataatgttatccatacattaatgcatggatagcatgttagcatcaagttttgtactcctgcctgtattactgtaggctttgatattttatactttgtttcttgggactaaacatgaaggaaatacactgaagaaaataggaatacaggcttcaagaaatatacactgacaatttcaaatgtgatatgactttctccatatgtctaaaactaaaataaaaccatgtcaatatcaatgtggatatgctgagtgatgaggacaaatgtgatctaaaatcagagtccaactcatacacctgggaatcagcgtcaaagcaggtgatacatgcacccacatgtctttcatgcaagatatcagaatgatttggaatattttactgcaaacattcatcatgctttttaacttgattgatcagtgagaaggtacacaattataatgacactttagttgaaatctcttcagtggaagtgtcctaacttaatcagcttggatatatgtttggtgaattctagtatgtaatattcattatttctcacacccatatggtgtaataatgtgcctacatctcttgtatcttctagtttagccttccaaaagttccttcatccactcattgcaacaaggtataatatataaacttcatcaaaaagtgtaataaattaccaaatttgacatacttttacaaaataaagtttctacaagcattagatatgaataagcttttacatctggaaatcactccaatattccttgaaaataaccatttgggagtcaagtaatgaattcaacattattttcacttctaaaatagtctggttaaagtatcatgttattctctagagaatttttattaagttgctattttatccaatagctcctt

SEQ ID NO: 670535 - DNA, 2112 bp, Homo sapiens
taaaaatatcaattaccaatgttaacatacttctacaaagtaaaactgctacaagcattagatattaataagttttacattcagaaatcactccaatattcattgaaaatcaccactttaggagttaattagaattcaacatcatttttgtttctaaaatagccttgctgggagtatcatgttagtctctaaggaagtttcattaagtagctattttatccaagagtaagctccttgaacaaggaagccaatgtattcatatgcaagtttatctcatttttataagtaaagtcaacaaaacatgtatctctgatgcctaatagtaacaaagaggagtaatgagtcactgtggtttatcccaattctagcactgtttcctgcttccagtagttctcagagcagccaaaatcaaatcttcttttatgcaaatattccaaatgcatctgaaatgagttcactcaggtttcctcagcagaaamcccaaaattacataaataccttcttctttttcctccttcctgcctcacaatccctcttccttgaggaaaataattgctgcatcagtggtcttcttagctctcattctacagtgtttatggagttattaggatcacttttccctctgttgataacaatatgatatgatgcctataatatctattacttcatctcattctctttcccctcttgatggaaacatgctgtaaaattaaagtaaaattatgctgctcccttagcctggtatgtgttgaactgctctccaatgtttcttcttcccaatttcaatgtaaggaagcctacaatcttactactcagatcatgaccaaggaccagcagtatcagagtcacctgagaactcactacaaatgaagaatctcaggtgtactgaatcagaacgtgcagcttatatgaactccccactgatttatttggggaagggaatttctcttctatcttgattgaacatgacattagatgtgttttgcaaaattacctgtcccagatataggtccctcctttatttctgtggctatatttgaaacagaatctttgtcgtcacttgtagcctgaatgggatttgaaacaaaataatcaatatgtaaagtaggtttcatagactatacagttaatagttcaacatataaatgagactttaattaccttctcagctcgttgtttctgaggagacactgaaaagcaaaagggatacataatcaatcatatgtaaatatgataatgttatccatacattaatgcatggatagcatgttagcatcaagttttgtactcctgcctgtattactgtaggctttgatattttatactttgtttcttgggactaaacatgaaggaaatacactgaagaaaataggaatacaggcttcaagaaatatacactgacaatttcaaatgtgatatgactttctccatatgtctaaaactaaaataaaaccatgtcaatatcaatgtggatatgctgagtgatgaggacaaatgtgatctaaaatcagagtccaactcatacacctgggaatcagcgtcaaagcaggtgatacatgcacccacatgtctttcatgcaagatatcagaatgatttggaatattttactgcaaacattcatcatgctttttaacttgattgatcagtgagaaggtacacaattataatgacactttagttgaaatctcttcagtggaagtgtcctaacttaatcagcttggatatatgtttggtgaattctagtatgtaatattcattatttctcacacccatatggtgtaataatgtgcctacatctcttgtatcttctagtttagccttccaaaagttccttcatccactcattgcaacaaggtataatatataaacttcatcaaaaagtgtaataaattaccaaatttgacatacttttacaaaataaagtttctacaagcattagatatgaataagcttttacatctggaaatcactccaatattccttgaaaataaccatttgggagtcaagtaatgaattcaacattattttcacttctaaaatagtctggttaaagtatcatgttattctctagagaatttttattaagttgctattttatccaatagctcctt

SEQ ID NO: 670536 - DNA, 788 bp, Homo sapiens
aatatgcacagacatgttccacttactcactcatgtaaacttcttaaaaactcggcaatgaattaccatatggagctccaagtacaaatgctgtgtctatcgcctttgaggtctccaggcagaggtgagcagtgaaggaaggactctaggggatgggcataatgcatggtgggcagcttacccatctcaggaactggcttcagccccatggcaccacagggatggaggtaagagattgcaaatgcagtgggctgactgcaactgtgctattaggaaaactgctaaccccaatcarcagcaatcacacttgatcttcaggatgactttggagcagttctcagaactaagcagtggagagaaggccaaatgaggttatacatgactcagataaagctatggataaattaattttgttttcttgtgtgaacatttatcccaactgaagaattatagtgttggcatgaatatgcattaaaagaacagaagctgaattgtgttccaaaggaattgtattgactacacaagcagctaatgacatggtttacttctctggaagaatcagcactcattttcagagtgaccttatagtttaaattctttgaattgagagcacaatgaacaagctcctctactgaatttataagtgactatgacacggcaacaccaagtcactatctgggtaactcatctgcctgtggaaacctgtgttgatcgttgcttttgcaccagccttcctaagctagtgctgtctgcaaacagacctttctgtgcagattaaagagagcctg

SEQ ID NO: 670537 - DNA, 788 bp, Homo sapiens
aatatgcacagacatgttccacttactcactcatgtaaacttcttaaaaactcggcaatgaattaccatatggagctccaagtacaaatgctgtgtctatcgcctttgaggtctccaggcagaggtgagcagtgaaggaaggactctaggggatgggcataatgcatggtgggcagcttacccatctcaggaactggcttcagccccatggcaccacagggatggaggtaagagattgcaaatgcagtgggctgactgcaactgtgctattaggaaaactgctaaccccaatcagcagcaatcacacttgatcttcaggatgactttggagcagttctcagaactaagcagtggagagaaggccaaatgaggttatacatgactcagataaagctatggataaattaattttgttttcttgtgtgaacatttatcccaactgaagaattatagtgttggcatgaatatgcattaaaagaacagaagctgaattgtgttccaaaggaattgtattgactacacaagcagctaatgacatggtttacttctctggaagaatcagcactcattttcagagtgaccttatagtttaaattctttgaattgagagcacaatgaacaagctcctctactgaatttataagtgactatgacacggcaacaccaagtcactatctgggtaactcatctgcctgtggaaacctgtgttgatcrttgcttttgcaccagccttcctaagctagtgctgtctgcaaacagacctttctgtgcagattaaagagagcctg

SEQ ID NO: 670538 - DNA, 1227 bp, Homo sapiens
ggcaattagattgatgtggcttaacctactctgtttttgtaggtcttataaatgataataagttattaaaaccagttagaagagtgcaaaccaaaaacttacaaaatgctgtgaaattgtcaagctgaatctgtttccaaaaccctgtaccatttagccaaaaaaagcctcctttttaatcttttgtatctttaagtattgggaagcagttttccaaaattcagattttcgcttgaaagtttgaattttatcattggcaacaaatactgtcagtttttcttgaagtgtcaggctcactttgctcattttcgagaaaatgtaggtcagatgcacaagtttaaccatagtttttcagttgttctttcaagtaaaaatgatgttccatgaaaaatgtggcttgttgagtccatactgcagcaatcaatcaattgcacaagtgcttcagatttcttatttatgagacatatccagaagtaattaggttcttataactagtttttattcgatgtatgtggatttttcttgaaataataacttcaagaaaataattcatattttagcctgaattacatcttggggcaaaatgtgtttatgactaaaatgtatgttgtaagtactttttatgtgccctaaaaagcgtttyaaatctcctctgttaagaaattcctattaatcctaccatatcaacctgtttggtaaactttaattctctttccctacttgttttctgtcctgagccctgtgtatgtcatgggctttcttcccaggtagatcttctgtcattttagttcctcttctttgccatcttgagcagatacatcacacagttgtaggcagcgtaatctgtttagtttccagtgttttcagatgttcctctgaaatagtctatttctggactatttgggtcaactacagtgagttccatagaactcaaagctcattattttcaaggaaccatttttcttgaagtgtctaatgcatacaggaaacacagggatagtctttacattataaaccttagtactcagggaaactggatggcagacacctgccccatcaccacaccataggaagtccatggacagattgctgtagcccacccctagaggccagagccataaattatttcttattctgtgtctacctttgtgcatgattgcaaagatgagtgcagtttctctccaaggttttgacttggctggattgagaacagaattgcatttaata

SEQ ID NO: 670539 - DNA, 1320 bp, Homo sapiens
  misc_feature 1218: n = A,T,C or G
tcacctttttctctgtgtctgtatcaaatctccctctgcctctcttttatagcaatacatgtgattgcatttagaactcacatggataatactctcatctcaagatccgtaatcaaatcctcaatgacctactcccttccccacttcrcttaggagatggatatgttttggtgatatttttcagtgtaccacaaatggtattgagtttgacaattttataacccttaaaataaggaaatgtaattactgttaaaatagagcactgtgtaaagtatcacagaagcatgagagtaaaacagatcaattctggaaatgaccaagaatttcttctgtgccctgggtcttaaaggagggctaagagtttccaagtttaagagtgggaaaattgaactccaggcatagagaaatgcataaagagagacaaggagctgtgagtgtttggtataagcaaaagaaaaataaatgattgaagactttaatcccaactctgaagcaagggatttttattgaatccctgttattgttcagtctttggagaatacaaattaatttaagatatggtatttgttattgttcagtctttggagaatacaaattaatttaagatatggtatttgtaaaagtcaaaacataggtcatccttggggaaacaagatggtcatacctggaacaaatagagtacaatataatcaatgtgtacttctatgcttacttttataatatttactaaatcttcaggaatagaacagaataaccaggaaaccagatttctactggggggaggtaaatatggatcttaagacatgggtagaacttgagtatatggagaaggcagaaagtgcaggtagtttaagtagaagaaagaaaatgagttaatacagaaatgaaaactgtgacagtaaatgagaccaacagcataattggagttccttggagggtagcatgaaattagattggaaaaaccaagatgcagtcctgctactgaagggtttaagaacatagagtaggtgctttctcaaatagtacagactgtcttgacttgtattttccctgtgcattttagactgtgtatttattgtcattcataaaggaacaatgacttaaacaaaacaagttttggcagcctatcaaatggtgaattctctgagagcacagtgcatgccttatacattttagtttttccccaatctggaggcaggaagtactgtggaaagccanttattgaacaaggagagagactgacacaaagatttaaaggaagacagaaatttcactgttgactagtctctagcatggcacagaatgaacacagtatgtgaa

SEQ ID NO: 670540 - DNA, 1320 bp, Homo sapiens
  misc_feature 1218: n = A,T,C or G
tcacctttttctctgtgtctgtatcaaatctccctctgcctctcttttatagcaatacatgtgattgcatttagaactcacatggataatactctcatctcaagatccgtaatcaaatcctcaatgacctactcccttccccacttcgcttaggagatggatatgttttsgtgatatttttcagtgtaccacaaatggtattgagtttgacaattttataacccttaaaataaggaaatgtaattactgttaaaatagagcactgtgtaaagtatcacagaagcatgagagtaaaacagatcaattctggaaatgaccaagaatttcttctgtgccctgggtcttaaaggagggctaagagtttccaagtttaagagtgggaaaattgaactccaggcatagagaaatgcataaagagagacaaggagctgtgagtgtttggtataagcaaaagaaaaataaatgattgaagactttaatcccaactctgaagcaagggatttttattgaatccctgttattgttcagtctttggagaatacaaattaatttaagatatggtatttgttattgttcagtctttggagaatacaaattaatttaagatatggtatttgtaaaagtcaaaacataggtcatccttggggaaacaagatggtcatacctggaacaaatagagtacaatataatcaatgtgtacttctatgcttacttttataatatttactaaatcttcaggaatagaacagaataaccaggaaaccagatttctactggggggaggtaaatatggatcttaagacatgggtagaacttgagtatatggagaaggcagaaagtgcaggtagtttaagtagaagaaagaaaatgagttaatacagaaatgaaaactgtgacagtaaatgagaccaacagcataattggagttccttggagggtagcatgaaattagattggaaaaaccaagatgcagtcctgctactgaagggtttaagaacatagagtaggtgctttctcaaatagtacagactgtcttgacttgtattttccctgtgcattttagactgtgtatttattgtcattcataaaggaacaatgacttaaacaaaacaagttttggcagcctatcaaatggtgaattctctgagagcacagtgcatgccttatacattttagtttttccccaatctggaggcaggaagtactgtggaaagccanttattgaacaaggagagagactgacacaaagatttaaaggaagacagaaatttcactgttgactagtctctagcatggcacagaatgaacacagtatgtgaa

SEQ ID NO: 670541 - DNA, 591 bp, Homo sapiens
ctttggattttttattgtaaacaaaataaaacaactttgacaaaattaagtcaaggctatttttggataggtgattgctcccaaatcaaaagaaagattggagaacaaagctttccagaggccaaagatggtgggctatgctaaagcccttgccaaaaggaatcctctgcttgagacttgatttttgtgctgtcatccctgaacactccgaggcagcatccagggctgaagatcactgttcctctttctcctccacacagagaaacagtctccaaccaaagctatatcttctacatcatctcaaggtctgaagcccaggaagagcatctaaatatttgtgcttggataacatgactctctggttaccaggggtgcagaggagtgtgtatttccaacaccaccatttccatcagcctatgtagtaggggcagaaagtatcataggatttctccccagtcagagggttattcaaatgctgagctggagatatcgtgaatgtgcattacatgatccattctatgccttatattgattgttctagtcatctattaactacgatccaartacctctatcatgtactttctagcctg

SEQ ID NO: 670542 - DNA, 697 bp, Homo sapiens
tatgcattgtactagtgcagatatcaatgcctcaatggattaaaatagagaaatgactcaaactcaagtatatagaggaacaaatgataaagatgtcatctaaattgatagaagggtgtattatttaaaatggtgttagaatatctgattatttgttgagaaagaaagtattttcacatcagttcttctccaaaatctagatggattaaatatctcaatataaaacaaaaaaaataaaaacaccccctaatattgctaggagaaataataggtgaatatttgctgtaatctttgagtgagaaaggaccttctaaggacaycatgaaaaccatttgtaaaatgaaagtaaaaccacaacttcataatatggatgtaaagattaaattattttctgtaatctttgagtgggaaaggaccttctaaggacatgatgaaaaccataaccattaacttaagattggtatattttattatacaactattttaaatgaatggttaaagaacacatatatgtaaaatgtaagtaacaaatagaaaaactaccacatcaaagagcctttaaaaatcaagaataggaagaacttctcaatggaaaggatggaaaaagaaatgttaatgagcaattcataaaagaaattcaaatacccaaaaagctaactatgtaaagaatgttcatcctcactcagaatcagagaaa

SEQ ID NO: 670543 - DNA, 554 bp, Homo sapiens
catagtaagtgattcagtaatgcctatttattgatcatttgatgatgcagagagattcagaagtaccaaaagaaaaaggacttgaagtaagatctgaaatagacaggtgataatacacagcattattaaaaaggtagattttacaaggcttataaaatatgtgtgtttctcgggggatttctcaacccttaggtgtcaaaggaccaaccagaaggaagcatatcctccttccgattgctccacgaattactgtccttctccttctatgaaagaaatgcaggatgaaggatagagggtgtgtctatggataaggcccaagaataagaatcttaccatattttttattaatttttaatttacaattgacataattatatatagtttgggaatacagtgtgatgtttcaatgcatggaaacaytgtataataatcaaatcagggtaattaccatatccatcactttaagtcttaccatattttagattcacaaagaagagggctacccagcaagtcttctttaataatataagtttattttatccaatatattaaaa

SEQ ID NO: 670544 - DNA, 3143 bp, Homo sapiens
tgcatgggtgtctgtggatgctaagatcaatagtgcaggggcctcacaaaagaaatgagcaatgctgttactgcctcggtagggtagcctcagtatgaaggtggtgtctaccacagacaccagaatgccactggtccatgatcctgttgccagctggacacacactttccaggtcatgatgttagggtaacgcagaggattgcagattgcaacatagcgatcataggacatcactgcaagaagggcgcactgggtacacccaaaaatgaggaaaaagagaagtcgagctgcgcaaagtgtgaatgcaatgaccttctttctggaaagcaggtggactagtgcctgaggaactatgttggtagagaaacagaggtcagccagagacaagttgcagagaaaaaaatacatgggtgtgtgaagttgggagtcaacatgaacaagggagattagaagcagatttccaagcacagtgaccaggtagacacccaataatacgataaatagcagctgctcggtgtgtggcccatcagagagtcccagaaggaggaattctgtcacttgtgtctgatttatctgtctcatagtttgttgtccttttcagtaagaagtcactatgtgctaaccatagacaggcatacctataaaattatataattcagaagtgcaggcttaggaactgccccaatttctactgaaaatttcaagaacccccttcataagatgatcatgtttctttcattggaacattttcagtgttgtaaaacaaactttaaaagatgttgcattcattgttgatgtcatctggcaagaatagatttttaaaattatttttctcactctgaataccacacttttaataatacaatattaaatacagactgagttcatctataaagtcctgccatttaatttctgtttgttcttaactaaaacccctgagtcgtaagtgctcttgtcacatctcctcttccccgcttatgataatatagttttctgttgtattttccgtgaaaggacagacacgaaggtataagaaatcagaaagagccaaagtactggtatgttttatttaagaaactaacctgtcttacaggagctgggaaaccaaagattaactcaggatacccttgggaatcctatctgaagcctcagcttgagttctgttcagtctcaactgtgaatgaacttccaacataacagacacaccatcaaaacagaattttcattttaagccaccagcgtgactagtttcatactcagcccaaacagcactactccccagctctctctgctaaaaattatatgcattatctgtccactccccccgcaaaagtaaaagttcctttgaaaatagtttccatgtctttttcacctctgtgtcctttacgagtcatagcagagaacttcatttcataaatgaccataattcattaaacaaataataatttgatcacatagttaagcagagtcatttagaagttttgccaatatccctagagagatttgaaataataatccaattttgtggagctgttccaaaaagaagggaaataaatttactttaaagtgtaaagtttaagatcctatacacgggttgggctatcaatcctttaactgtctggtgaaagtatctcagaataacgttttaaatacatcaaataaaatgtataggattactaaggaaaccagttatatcaaaatacagttatcgaaataattttagaaaacagatttgtaaacagcaatatatgtgcttctttattaatacactaaaattttgaaatgtagtggtgggtctaataaccatcttcatttcaaaataatgatgagtttaaatatttggagatctctccaacaactgcaatacaatataaaaattcttataattactactgctgacaaagtcataaatacttctaatattggtgtgggttggttacttgcattcaaattggaaggmaacatcaactttcagttaggggaaaataaaaataaagaagtaacattttactccaagttgcagaactcacttgggttacaggaatccccaggagatttcttaaaaaaaaaaaaaagacataattacaccctacataatctagtaacagagtctcagcatctggattggtctgtgagtcaaagaaatgaaagatttcaattcctaattggtcttcagactaaagttggaatttggcattgggaggaaggtccctttgcacttctacttaactgtttggtgctttagatttttagcattgctccctgctcactttgcaggcagaaggccttaagcaaacagctcagtccaacatgcatcacctgtatgacaaaatccaatttataacccttccacctttgcccactactggtaagccatggactctacactcctttcctcacttcctgggatttctcctgcaacatcttttctccagacaggaatgtagctgtcctgggccaaagttaccactaacaaccaatctgggaaaagtttgacctaatttcttttctcttctccacttttattttaaccaccagaggaagaagcctgaaaacaatttcaccttactgttttactttacaatgtacagattaattacttaaaaggttcttttttaactcaaaatacagattattctttatgttattctcctcttttacacatctaggaaaatctgtcaaaacaaaaacagtctcatatcaaatcatataaatgtaatggttacacaatattaccattatatcaggtaaatggaggtgtggatgttgattcaatggtaaaataaaaaccagtgcccacaaactctaaaatctttgaaaggataaaagcctcttaccctatccttaaaaggaactctatattcctcctcaggttttgaagataagttacttaattttaacattttgtttgcttaattgtattttaaatatacatcaaatatatatttttcagaacaaaagaaaaaaattaataaattggacatcatcaaaattaaaaatgtttgtgcttcaaaagacaccattaaggaagtgaaaagacaacccacagagtgggagaaaatttttgcaaattctgtatctgataagggacttatatttagaatatataagaaacataacctggtaataaaaaggccaataat

SEQ ID NO: 670545 - DNA, 644 bp, Homo sapiens
tccccctcccaaagtgctgggattacaagcctgagccaccatgcctggcctattacctcatcttttaaagctcacgtcttactatctaaccaaatctgctgttaccatcagtttacttacgcatcttttcacggtggtgattgacacaggaggtaaaagggaatattgaagtggatttaacaatgtgcaatggcgggaggtgtttcctcgggggagcctgctgactcctgtaacaggaggatctgaagggagctttttctttctagactccccgtgtcccctgggcagtggccacagccacttcatttttccgaagctcaccctctaatccagcttccatgaagcacccagagggatcttctcaaaatattatataagatcgtgtcactctctggcctaaaactgttcagtggcttccactggacttcagtccctcaaacccctacctgcctctccagccccatttgccacctcttcctatcccrtggataagattgagttccttagtcttcaagcccctcagtctcccttgaggctccgaaggtcccagtcctctctctcaggctgcctacagcgctttcctctcccctaccaggctgacagatcccacggcccttccaggcccacctgaaatggcatttcct

SEQ ID NO: 670546 - DNA, 1025 bp, Homo sapiens
tgcttaaacccgggaggtggaggttgcggtgagccaagatcgcaccactgtactccagcctgggcaacaagagcgagactctgtctcaaaaaaaaaaaaaagaaaagaaacagggtgtccttcaacactgtagctcagccactcacagagcataaagctcagggcaggctgcttttcagggttcttcagccatggtgcaggtgggacgcatgaagtcaagattccatcagccctgggcagctggcctgagcctggggaactggctctgaatgaatcctaggcctctgttgccccttgctgccaatctgtaataaatcstcatcgtgtaactgggtacatgtgagtgtgttccgtctcaccagatgccgacaagttggtaagccgcgcacggtgagcctgcttcgcggttggttcatatcctttgcctatttttctattggcttatttgtctttgtctttgtctttttttccattgcgacacctactaaaatgggattgacttttacttatttgttgaaggggttcattaaagacatttatctgatatgcactgaaaatatttttccatttgtcatctatcttttgactttgttcataatttttctgtgatacagtgatattttaatgtaaattttccatcttttccttaatggcttctaggtactatgtcgttattcttagaaagtcctctcctacccaaaaagcactgaaaatttaaaaattaaaaacaagactggacgtggtggctcacacccgtaatcccagcaatttgggaggccgaggcgggtgggtcacgaggtcaggagtttgagaccagcctggccagcatgatgaaaccccgtctctactaaaaatacaaaaatcagccgggcctggtggcgcatgcctgtaatcccagctactagggaggctgaggcaggagaattgcttgatcctggggggcggaggttgcagtgagccgagatcgcgccattgcactccagctctgggcaacagagcaagactctgtcttggaaaaaataaat

SEQ ID NO: 670547 - DNA, 1025 bp, Homo sapiens
tgcttaaacccgggaggtggaggttgcggtgagccaagatcgcaccactgtactccagcctgggcaacaagagcgagactctgtctcaaaaaaaaaaaaaagaaaagaaacagggtgtccttcaacactgtagctcagccactcacagagcataaagctcagggcaggctgcttttcagggttcttcagccatggtgcaggtgggacgcatgaagtcaagattccatcagccctgggcagctggcctgagcctggggaactggctctgaatgaatcctaggcctctgttgccccttgctgccaatctgtaataaatcctcatcgtgtaactgggtacatgtgagtgtgttccgtctcaccagatgccgacaagttggtaagccgcgcacggtgagcctgcttcgcrgttggttcatatcctttgcctatttttctattggcttatttgtctttgtctttgtctttttttccattgcgacacctactaaaatgggattgacttttacttatttgttgaaggggttcattaaagacatttatctgatatgcactgaaaatatttttccatttgtcatctatcttttgactttgttcataatttttctgtgatacagtgatattttaatgtaaattttccatcttttccttaatggcttctaggtactatgtcgttattcttagaaagtcctctcctacccaaaaagcactgaaaatttaaaaattaaaaacaagactggacgtggtggctcacacccgtaatcccagcaatttgggaggccgaggcgggtgggtcacgaggtcaggagtttgagaccagcctggccagcatgatgaaaccccgtctctactaaaaatacaaaaatcagccgggcctggtggcgcatgcctgtaatcccagctactagggaggctgaggcaggagaattgcttgatcctggggggcggaggttgcagtgagccgagatcgcgccattgcactccagctctgggcaacagagcaagactctgtcttggaaaaaataaat

SEQ ID NO: 670548 - DNA, 794 bp, Homo sapiens
atatgaaggaatttacatgtaaattattagaattaatcagtgaatttagcaaaatcagcaaatttaaggtccacatgcaaaattaactgtacttctatatatataaaaaaatttttaatttaaaatatgccatttatgtttgcagcataaaatatcagatacagaagaatatagctaaagaaatatcttcaagtgttctatataaaatactacacaataatgcaagagaaattaaagaaaaattaaatacattgaggtatatattaataggaaaattaattgtgctcttaatttttgttaaaaagatctatgattttgctatgaaagtaaaatgtaaagttaaatgatacctttttatgctatcatacaataaaaataacattttaaagtacagaaaaataaaaataaagcaaaataaatataatgctgcatattataaaaatgtaaattgtccttcagttaatctaaatgttcaaggtaatctgtccccctcccccaattcctatgaacttttttgaggattttggaaaactgattccagaatttatatagaaatgagaaggtttaagaatagctgaagatttaaactaccatatattggcacactttgcagagctgttataattaagacagtatggtattgatatagtcatacaaaagtagkccaaagaaacagaatacagaggcagaaatagacccacacatgtatagtcagttgatttatgacaaaagtgacagtacagtacagtactaaagtgtggtattttcaaataaaatgtttaaaagagaaatga

SEQ ID NO: 670549 - DNA, 802 bp, Homo sapiens
aactcatggcttctgacttgtctcaacaaatggggacatttctttttgttcttggctcagttacgtacctgttcttcctcttacttgaatggtaacttattatttgcagcatgcaaaagacgttttaacctcctgtggtcttatttccaaccctatttctgtgctgaaattatactttcacaaatgagtgactgattgtcagattcaaaggccatttcttattcgctccgctcctgggcttctttagaccatttaattcatttgacttgtattttccttaaatttctttggtttacttccctccaaatctactttgtacaccagattgaccttttacaaatgctcactcattgctctgctaactcctctgctcaaaaccaaagtcatatcattcctctgctcacaacaattaatgtttcctcatctattcgtggaaaaataaaaaatccttagtgtgacatttgacatcaataatattatcctaatttatctttatataaytttttaatgaaagagatgaaaaagtcttacattgttgtctgatctatttcaccagcattttgcccattctgtacctgagaaaatatattatatacattattgaaacttcaactttcattttttcattttccatctactgctttccactgactaagctaaataactatctcgtaatgagtattttccctacttgagctaaattgatttataaacctacgaagaaatagaaacttataaccaaatatcattctttaaacttctgagctagatataaaagaaataatatatttatgacttttta

SEQ ID NO: 670550 - DNA, 547 bp, Homo sapiens
ggtattctgttaagaaaattaatccttgaaactcttcgtattcaaaagagagctgattattcatcctaaaatgaccacatcttctaaaaacattttcttttatttcataagaagagatgttctttttttttcaacaactttattcagatatactcccacataccctgcagttcacttatttgtacaattcaattgtttttggtatattgcattattaatttttaaaaattatggttagatatatataagtaaaatttgacattttattcatttttaaatgtaccattcagtggcatcatttacatttacaatgctgtgcaaccatmatcagtatctatttccaaacaatttttatcaccccagacaaaaactccataatcaataaataaggactccccacttctctctccctagagcccctggttagctctaacctactttctaaaaaaaaaattttttaaaaaggaatattctttattgagttgtttacttagcttttcttttcaaattgttttgagatcattgccaaattattatagaaacagaa

SEQ ID NO: 670551 - DNA, 547 bp, Homo sapiens
ggtattctgttaagaaaattaatccttgaaactcttcgtattcaaaagagagctgattattcatcctaaaatgaccacatcttctaaaaacattttcttttatttcataagaagagatgttctttttttttcaacaactttattcagatatactcccacataccctgcagttcacttatttgtacaattcaattgtttttggtatattgcattattaatttttaaaaattatggttagatatatataagtaaaatttgacattttattcatttttaaatgtaccattcagtggcatcatttacatttacaatgctgtgcaaccataatcagtatctatttccaaacaatttttatcaccccagacaaaaactccataatcaataaatamggactccccacttctctctccctagagcccctggttagctctaacctactttctaaaaaaaaaattttttaaaaaggaatattctttattgagttgtttacttagcttttcttttcaaattgttttgagatcattgccaaattattatagaaacagaa

SEQ ID NO: 670552 - DNA, 547 bp, Homo sapiens
ggtattctgttaagaaaattaatccttgaaactcttcgtattcaaaagagagctgattattcatcctaaaatgaccacatcttctaaaaacattttcttttatttcataagaagagatgttctttttttttcaacaactttattcagatatactcccacataccctgcagttcacttatttgtacaattcaattgtttttggtatattgcattattaatttttaaaaattatggttagatatatataagtaaaatttgacattttattcatttttaaatgtaccattcagtggcatcatttacatttacaatgctgtgcaaccataatcagtatctatttccaaacaatttttatcaccccagacaaaaactccataatcaataaataaggactccccacttctctctccctagagcccctggttagctctaacctactttctaaaaaaaaaawtttttaaaaaggaatattctttattgagttgtttacttagcttttcttttcaaattgttttgagatcattgccaaattattatagaaacagaa

SEQ ID NO: 670553 - DNA, 547 bp, Homo sapiens
ggtattctgttaagaaaattaatccttgaaactcttcgtattcaaaagagagctgattattcatcctaaaatgaccacatcttctaaaaacattttcttttatttcataagaagagatgttctttttttttcaacaactttattcagatatactcccacataccctgcagttcacttatttgtacaattcaattgtttttggtatattgcattattaatttttaaaaattatggttagatatatataagtaaaatttgacattttattcatttttaaatgtaccattcagtggcatcatttacatttacaatgctgtgcaaccataatcagtatctatttccaaacaatttttatcaccccagacaaaaactccataatcaataaataaggactccccacttctctctccctagagcccctggttagctctaacctactttctaaaaaaaaaatwttttaaaaaggaatattctttattgagttgtttacttagcttttcttttcaaattgttttgagatcattgccaaattattatagaaacagaa

SEQ ID NO: 670554 - DNA, 2084 bp, Homo sapiens
atggacagtcttaccactgggctactctgaaagtcctacttatttatctcaaatactaaaggcagacttagaatacattgaatttccaaaagaatctactctaattcagtatgtggatgatttactgttgtgttcatcctctctaccaaaatgcagaggagatactgtccacctattaaaacagcttgcttttaagagacacaaagtattgaaagataaattataattttgtctcctccaagttaaatgtttaggacatatgatttcccaaagggggttactaayaaaccctgagagaatctctgctgttaccatcttcccccacccccctccaaactaaaaagcaattaagaggattcttagagttaacaggctatttcaggagttggattccaaactactccttaatgtcccaaaccctatataaaaaaactaaaacagacccagctggacccaatctactgggaagaggggaaaaacaacacacagaagagctaaaacaggctctcacccaagcacctgctcgaggccaaaccaattacagttttctggttttcctcttcatacattaaataaacgggaatgctctaggagtatcaactcaaaaatatggtgacaatcacaggccaatttgttatttcagtcaacagatccagttgcaggggggcacactccttgtatgagggctacatcagctacagccaccttatgcaaaaatgtcaaagaatttgtcccagtgtcccttctaacatctatgccccttactcggtgagatctcttctaagtgctcaccacacttgacactattctgttagccacctcacctcttatgagatactcctgctttctgcccccagcatcacttcaaagcactgtaacaccgttaacactgctacccttctcccccttccaggtaaacaacaaaaggaagagaaacgtgattacaatttacctactaatatcttactctcccctaaagaagatttacaggaaactcccattgagaatgctgaattaatttggttcatggttggttcttatttaagggacaaccaggggcattaccaggcaggatatatcatcatttttataacagaaataatcaaaagtgcccaactccaaggagtcaaatcagcccagaaggctcgcaaatttgctaaaggaaaagtggcaaatatatataccaatagttgatatactttcggagtagcccatgattttggcatggaaataaatattttcttacctcatctggacagcccatacaaaatgggcaacaagtctcagagttactagaagcaattcagatgccaaggcaacttgcaatcataaaaattcctgggcactcaaaggataacactaaagaagcaaaaagaaataatctagctgatgctgcagcaaaaaatgctgctccaggaaatatagcctattctgtacaggaatgtatctttcatcctccaaataccctaacattctttttcaatatcaacaagcatctagccctcaagagaaacacacctgtcagcagaagggaggcatgtttgaaccatttaaggaattatggctagagcctaataaaaaactgacagttccaataggtacacaattgcctttccttaagtttattcacgacatgacccatggggcccctgaaaaaaaaatggtatcatgaggaagacaatacttttgaaaaccatcccccatggtagcccaaaatgtatactctcaatgtactattatgctcaaaacataacctgacaagctcttacgtggctcccaaagtcattttcctttgccaataggacctcctgaagtatggccgttggattttatccagatgccaccatctcaaattttcaaatgcattctggtcttagtttgtatgttttcttattgggtagaagcatttctttgttggagagctaccgccttaacagtagggaaagattttgttagaatcattccagcttgggtaactccttctgagctgcacagtgattgtgggactcattttactggacaagctgttcaatccatttgcaaaatctggcccataacagaacatttccattgtgcctaccatc

SEQ ID NO: 670555 - DNA, 2084 bp, Homo sapiens
atggacagtcttaccactgggctactctgaaagtcctacttatttatctcaaatactaaaggcagacttagaatacattgaatttccaaaagaatctactctaattcagtatgtggatgatttactgttgtgttcatcctctctaccaaaatgcagaggagatactgtccacctattaaaacagcttgcttttaagagacacaaagtattgaaagataaattataattttgtctcctccaagttaaatgtttaggacatatgatttcccaaagggggttactaataaaccctgagagaatctctgctgttaccatcttcccccacccccctccaaactaaaaagcaattaagaggattcttagagttaacaggctatttcaggagttggattccaaactactccttaatgtcccaaaccctatataaaaaaactaaaacagacccagctggacccaatctactgggaagaggggaaaaacaacacacagaagagctaaaacaggctctcacccaagcacctgctcgaggccaaaccaattacagttttctggttttcctcttcatacattaaataaacgggaatgctctaggagtatcaactcaaaaatatggtgacaatcacaggccaatttgttatttcagtcaacagatccagttgcaggggggcacactccttgtatgagggctacatcagctacagccaccttatgcaaaaatgtcaaagaatttgtcccagtgtcccttctaacatctatgccccttactcggtgagatctcttctaagtgctcaccacacttgacactattctgttagccacctcacctcttatgagatactcctgctttctgcccccagcatcacttcaaagcactgtaacaccgttaacactgctacccttctcccccttccaggtaaacaacaaaaggaagagaaacgtgattacaatttacctactaatatcttactctcccctaaagaagatttacaggaaactcccattgagaatgctgaattaatttggttcatggttggttcttatttaagggacaaccaggggcattaccaggcaggatatatcatcatttttataacagaaataatcaaaagtgcccaactccaaggagtcaaatcagcccagaaggctcgcaaatttgctaaaggaaaagtggcaaatatatataccaatagttgatatactttcggagtagcccatgattttggcatggaaataaatattttcttacctcatctggacagcccatacaaaatgggcaacaagtctcagagttactagaagcaattcagatgccaaggcaacttgcaatcataaaaattcctgggcactcaaaggataacactaaagaagcaaaaagaaataatctagctgatgctgcagcaaaaaatgctgctccaggaaatatagcctattctgtacaggaatgtatctttcatcctccaaataccctaacattctttttcaatatcaacaagcatctagccctcaagagaaacacacctgtcagcagaagggaggcatgtttgaaccatttaaggaattatggctagagcctaataaaaaactgacagttccaataggtacacaattgcctttccttaagtttattcacgacatgacccatggggcccctgaaaaaaaaatggtatcatgaggaagacaatacttttgaaaaccatcccccatggtagcccaaaatgtatactctcaatgtactattatgctcaaaacataacctgacaagctcttacgtggctcccaaagtcattttcctttgccaataggacctyctgaagtatggccgttggattttatccagatgccaccatctcaaattttcaaatgcattctggtcttagtttgtatgttttcttattgggtagaagcatttctttgttggagagctaccgccttaacagtagggaaagattttgttagaatcattccagcttgggtaactccttctgagctgcacagtgattgtgggactcattttactggacaagctgttcaatccatttgcaaaatctggcccataacagaacatttccattgtgcctaccatc

SEQ ID NO: 670556 - DNA, 2084 bp, Homo sapiens
atggacagtcttaccactgggctactctgaaagtcctacttatttatctcaaatactaaaggcagacttagaatacattgaatttccaaaagaatctactctaattcagtatgtggatgatttactgttgtgttcatcctctctaccaaaatgcagaggagatactgtccacctattaaaacagcttgcttttaagagacacaaagtattgaaagataaattataattttgtctcctccaagttaaatgtttaggacatatgatttcccaaagggggttactaataaaccctgagagaatctctgctgttaccatcttcccccacccccctccaaactaaaaagcaattaagaggattcttagagttaacaggctatttcaggagttggattccaaactactccttaatgtcccaaaccctatataaaaaaactaaaacagacccagctggacccaatctactgggaagaggggaaaaacaacacacagaagagctaaaacaggctctcacccaagcacctgctcgaggccaaaccaattacagttttctggttttcctcttcatacattaaataaacgggaatgctctaggagtatcaactcaaaaatatggtgacaatcacaggccaatttgttatttcagtcaacagatccagttgcaggggggcacactccttgtatgagggctacatcagctacagccaccttatgcaaaaatgtcaaagaatttgtcccagtgtcccttctaacatctatgccccttactcggtgagatctcttctaagtgctcaccacacttgacactattctgttagccacctcacctcttatgagatactcctgctttctgcccccagcatcacttcaaagcactgtaacaccgttaacactgctacccttctcccccttccaggtaaacaacaaaaggaagagaaacgtgattacaatttacctactaatatcttactctcccctaaagaagatttacaggaaactcccattgagaatgctgaattaatttggttcatggttggttcttatttaagggacaaccaggggcattaccaggcaggatatatcatcatttttataacagaaataatcaaaagtgcccaactccaaggagtcaaatcagcccagaaggctcgcaaatttgctaaaggaaaagtggcaaatatatataccaatagttgatatactttcggagtagcccatgattttggcatggaaataaatattttcttacctcatctggacagcccatacaaaatgggcaacaagtctcagagttactagaagcaattcagatgccaaggcaacttgcaatcataaaaattcctgggcactcaaaggataacactaaagaagcaaaaagaaataatctagctgatgctgcagcaaaaaatgctgctccaggaaatatagcctattctgtacaggaatgtatctttcatcctccaaataccctaacattctttttcaatatcaacaagcatctagccctcaagagaaacacacctgtcagcagaagggaggcatgtttgaaccatttaaggaattatggctagagcctaataaaaaactgacagttccaataggtacacaattgcctttccttaagtttattcacgacatgacccatggggcccctgaaaaaaaaatggtatcatgaggaagacaatacttttgaaaaccatcccccatggtagcccaaaatgtatactctcaatgtactattatgctcaaaacataacctgacaagctcttacgtggctcccaaagtcattttcctttgccaataggacctcctgaagtatggccgttggattttatccagatgccaccatctcaaattttcaaatgcattctggtcttagtttgtatgttttcttattgggtagaagcatttctttgttggagagctaccgccttaacagtagggaaagattttgttagaatcattccagyttgggtaactccttctgagctgcacagtgattgtgggactcattttactggacaagctgttcaatccatttgcaaaatctggcccataacagaacatttccattgtgcctaccatc

SEQ ID NO: 670557 - DNA, 2632 bp, Homo sapiens
ttacagcactgaatgaatcccaattataaaattttttattgtaaaaattattttaaagttacaaaataatttctaagtaacctttattcaggtatttctgaaatgatgtatgatatttactgcattaatttataatttattctctctcagtaacattcatacacatatttatatacatacctaaactctactataacaagaatcttgcaaacccataaaacaattatcaaaatactgtccttgatacagtattatatcataagcagactattcacatttttctaattttctcaataattttttatttttttagtccaggatccaaaataagatgtcatattattgtgttttaagaaggaagaggtttaaagaaattattgccctaaaaagcagatttttccatgaatctgctcttataagtagttaggttttctggtgtgtgtacaaaaataaaagatttctaactgtgcaatgtttgaccataagttctaaatatattattcctatatttgaatatgtgtaattcattatgacaattgctgcataataagtaaattatttaaacagtgtaaaattgaggaacacaaaagactataatggcaaaccaaatatataatgagcaaatatttattctacgtttatgtcagtagtggaagattttgcaactatacctatcataaaacacttaaaactatacctatatttctaatattaaaatacacacacacacacacacacacacacactgaaagtttttctctgagtgaataaactggtcatttggctgtataacaaatagagatgcaaccctacctagctgcctagatagtttaaaatacctaatcaaaatagtcacttttgaaaaccatctcaagaatttttactgccaagtacagttcatatatttaatattattaattctgatgtaaatgtagttaatatataatataaacaccaacaatttatacgtagaaactaatctatttgtagcttaagacagttttatcatcacttcaattttttacttattttattattcagaatgtcaaaatgttaatctttagaagtatattttttagcaaaatataattcacctattaaataaaatgaaggtgggaaatatagaaaatgcaaatatttaaattctccaagtatattaaaattgaattttagacagtactcctaacatacattttaagcaatttgccagttttgctatgatagcaatgacattacttctctttttctatgttactgaatagactagtgacttttctactataggcttaaaatttgttgaaagacccataaatgccagtaccatcaaagagatcttaaatttaaaaaggtcaaggaaaatactattttaaaaaacttttataatcattacgtttgtatttgtttgcagtcctaacatttacttattatatatttatgatatatcacatctttaagcaacttagatgtattaacattttcaagttgcatagtacaccacttgtaccaattataaatcaggctctactctaaaagttttatatataatatatttgcttttaatgctaacatatgtggttcataactttttgaaataaatgtaacttactagaacattatttgtcaaattgtatatcgaaaaaaatttctctttattctttagtaatatgcaacaaaaccaagagaggaaaatcatgagagctctgtatacagcttttaaaacttctagaaaaacatagaaaaaaaatcaytgtgagcttggtttagacaaagacaaagatttcttagctattacacctaaaactcaatatgttactggaattttttaaaatgtgctcttccaaagttacagacataatgaaaagacaaatcacagactggaagaaaatagtggcaaattacatatctaattaaaaatttgtataaaggaaatttaactccatctcaaaactcaacaattagaaaaaaataaataatgggtaaaaatttgaacattttagtaagaaaatatgtgtaatatatttaagcccatgataaaatgctaaacattattgaggattaggaaattcaaattacatacacaatgagacacacacacacacacacacacacacacacacaaagagacagagacagagagaggattaataagacctaaagctggggaaatcgaatttattgaatttgtggttaacactatacaagtgattcttgtactattctcacaattgtgtaagtttacatttatatcaaaattaaaagttacaaaataattcttagaaaaacatgccaggtgaggtggctcatgcctgtaatcccagcactttgggaggccaatgttgggggatcacctgaggtcaggagttcgagaccagcctggccaacatggtgaaacccagtctctactaaaatacaaaaacattagccacacatgatggtgtgtgcctgcaatcccagctactcaggaggctgaagcaggagaatcgcttgaagacagaggttgcagtgagctgagatcacaccactgcactccagcctgggagacagagaaagactccatctcaaaaaaaaaaagaaaaaaaaaagaaagaaaaaatataattatgtagcataaatattttacaatgattatgct

SEQ ID NO: 670558 - DNA, 2632 bp, Homo sapiens
ttacagcactgaatgaatcccaattataaaattttttattgtaaaaattattttaaagttacaaaataatttctaagtaacctttattcaggtatttctgaaatgatgtatgatatttactgcattaatttataatttattctctctcagtaacattcatacacatatttatatacatacctaaactctactataacaagaatcttgcaaacccataaaacaattatcaaaatactgtccttgatacagtattatatcataagcagactattcacatttttctaattttctcaataattttttatttttttagtccaggatccaaaataagatgtcatattattgtgttttaagaaggaagaggtttaaagaaattattgccctaaaaagcagatttttccatgaatctgctcttataagtagttaggttttctggtgtgtgtacaaaaataaaagatttctaactgtgcaatgtttgaccataagttctaaatatattattcctatatttgaatatgtgtaattcattatgacaattgctgcataataagtaaattatttaaacagtgtaaaattgaggaacacaaaagactataatggcaaaccaaatatataatgagcaaatatttattctacgtttatgtcagtagtggaagattttgcaactatacctatcataaaacacttaaaactatacctatatttctaatattaaaatacacacacacacacacacacacacacactgaaagtttttctctgagtgaataaactggtcatttggctgtataacaaatagagatgcaaccctacctagctgcctagatagtttaaaatacctaatcaaaatagtcacttttgaaaaccatctcaagaatttttactgccaagtacagttcatatatttaatattattaattctgatgtaaatgtagttaatatataatataaacaccaacaatttatacgtagaaactaatctatttgtagcttaagacagttttatcatcacttcaattttttacttattttattattcagaatgtcaaaatgttaatctttagaagtatattttttagcaaaatataattcacctattaaataaaatgaaggtgggaaatatagaaaatgcaaatatttaaattctccaagtatattaaaattgaattttagacagtactcctaacatacattttaagcaatttgccagttttgctatgatagcaatgacattacttctctttttctatgttactgaatagactagtgacttttctactataggcttaaaatttgttgaaagacccataaatgccagtaccatcaaagagatcttaaatttaaaaaggtcaaggaaaatactattttaaaaaacttttataatcattacgtttgtatttgtttgcagtcctaacatttacttattatatatttatgatatatcacatctttaagcaacttagatgtattaacattttcaagttgcatagtacaccacttgtaccaattataaatcaggctctactctaaaagttttatatataatatatttgcttttaatgctaacatatgtggttcataactttttgaaataaatgtaacttactagaacattatttgtcaaattgtatatcgaaaaaaatttctctttattctttagtaatatgcaacaaaaccaagagaggaaaatcatgagagctctgtatacagcttttaaaacttctagaaaaacatagaaaaaaaatcattgtgagcttggtttagacaaagacaaagatttcttagctattacacctaaaactcaatatgttactggaattttttaaaatgtgctcttccaaagttacagacataatgaaaagacaaatcacagaytggaagaaaatagtggcaaattacatatctaattaaaaatttgtataaaggaaatttaactccatctcaaaactcaacaattagaaaaaaataaataatgggtaaaaatttgaacattttagtaagaaaatatgtgtaatatatttaagcccatgataaaatgctaaacattattgaggattaggaaattcaaattacatacacaatgagacacacacacacacacacacacacacacacacaaagagacagagacagagagaggattaataagacctaaagctggggaaatcgaatttattgaatttgtggttaacactatacaagtgattcttgtactattctcacaattgtgtaagtttacatttatatcaaaattaaaagttacaaaataattcttagaaaaacatgccaggtgaggtggctcatgcctgtaatcccagcactttgggaggccaatgttgggggatcacctgaggtcaggagttcgagaccagcctggccaacatggtgaaacccagtctctactaaaatacaaaaacattagccacacatgatggtgtgtgcctgcaatcccagctactcaggaggctgaagcaggagaatcgcttgaagacagaggttgcagtgagctgagatcacaccactgcactccagcctgggagacagagaaagactccatctcaaaaaaaaaaagaaaaaaaaaagaaagaaaaaatataattatgtagcataaatattttacaatgattatgct

SEQ ID NO: 670559 - DNA, 1244 bp, Homo sapiens
ctaatgtttgtgaggaagcagaaaaaatcagaacagagaaaaggaaagtgtaaaaacaaggaatagaagcaaacaaactgctagtaaaaatgcattctttctagatagtggtttgggagtgctggtgaacaggagactcaatgatactactgaaaatcaaacatggtcatactccccagtatggtgcatttcatgaagtatcactctgacactagcactcttagattaagaagtactgaaaagatctttgccctgtgtatgctgccaatatgcatgaaaattgatgttgtttcaaataactattttaaacagaaaaaatttgttttgcttcaaacaataatgttgccatttacatgctttaaatatatgctaattttaaattattctgtgaattttgagagttctttttctggctataaagaatgatattctagcaaactatttctaccacccatatgaaataattataggtcataaaactgtagatttagagaggacagagtcctactttacataatataggcatttttatgtgcttcagtgtgaaattattatatctgactctggccttttactctctttatctgtttatttccatggtcccaaactgtggagatgaatacttaggctaaatataatacctcaaaccagcccatgactctttgagcagacaaatatttagaattcaaaaaaaagaataccttatgacagtaggtaataaagacaatcctggcttttcacacacctgatctgtttatttacatggtctcagactatgaagataaatacttacactaaatatgacacctcaaacaagcccaaggctctttgggcagacaactgtttagaattttaaaaagtaccatatggggaagcagagcaagatggccaaaatgaagcctctagcaatcatcccatacacaggaacagcaaatttaacaactatccacacaggaaagtaccttcataagaaacaaaaattgggttagtgatctcagtacctggtttttacatcatatcaagataaaaggattgcaatycctgggcaagtcatggtgctctgctgggctcagagccagtggatttggggtgcacacaacctagtgaggcatgagttggagtggccaagggagtgcttgcatcacccctcttccaactccaggcagtgcagcttatagctccagaaggagaggaaagagcctaaagtactttgtcttgacactggggataccagctgagctaca

SEQ ID NO: 670560 - DNA, 3396 bp, Homo sapiens
tttaacacagggatttccacacaggtctccatttcatgtactctgtagattgtatctttgcaaaccatttaagagttttctgactgacaaaataaagtaggctggaagtttaaaagaaagtcatgtctggcttctgacaggatcctagctttagatgtttctatacggtttgtataaatgccagccctcaaaaagctattcaatcttttttctttttctttttttttctttttaaaactttctgactagatcaagacaagccaggactgtagaagtatgacggggaataaaaaggtcaaattacacacaaaagcattaaggttcacttttaccagcatcagccaaggtgtgcattgacaagaaaatgtaatctgacagaaattaacagcaatgattcaaaacactgtgttcactacaaaatgggggtgggtggggtgggtattatgccacaaatgtggaaacatatggccaaataaaaatttttggctggtaaatatataaagaaatcttgaataattaaaagtaatatggggaacacattaattcaagaatgatctcattctcaaaccgtttgtttcaaagatatgttaagacatttaaaggactccaaaaagtgatgaattaattcattaaaaatgacatgagcaatattaaatgatagaattataataacaggaagaacatgttggtaattctatgggtagttcatttacttggaaaagtatagcatccctggctgggcacagtgtctcatacctgtaatcccagtgctttgggaggctgagttgggaggatagctcgaggccagaagtttgagaccagcctgggcagcatagcaagaccgtgtctttacaaacgattttatatatatgtgtatatatattmaattatatataaatatgtaaataatttatatataaaattatataaaatatgtaaataatttatatacataaaataaaagattttctggtaatatgaaaattgtactagctggaaaatataattatgtttatatatacataaaatctattaatacaatttatatatactatataaatatttatatattatacatattatacatatatagcattctttcgttactttttagtttccattttcctgtcaacacatctgagaataatgaatcattaatctagaaggttctctctatggaaatttcaaacattgaatttaaaactgtaagctatacccctacaaggtattttgtcatagcagcccaacagcaacaacataaaccagttgacgatggctcttaccatctcctggatcaacgatctcaacagtggcgactgtggggaattccaaggcagccagcacgggctctgagagtaccacctgaaaggtttcagactgctcatgctccccatcactcaggatccgcactcgccatgtggccctggtctggcctgggttgaactgcacttgtttctgtgctttgcccttgaagtctttgtctttttctgcagttctgtctcttgtgccaataccttcacaaaaacataatatcattttcttagtttcattttcgcttggattattaagattttccttgttaactttttgcatgtcattttatcctgaaaagcaaagttgatcctgctttgacctcatgaaatggaaaattgggaatgggtctgatgatgaaagtgtttcactgtaggtgttgggtagtttgtgattctgttctgcttttgcctcaattatggttttgctatatatgctttaagctacatttggattagaacttcttgtcaaacaagaccaagtaaatgtatattcacattgttcaatatccttactcctacaagttatacaatcttaaaactcttcacatttacttttgcatgtgttcctggatattataaaaaaaataagaaacattctctaactataaaatataagccaataagaaactcctccatgaaagaattctctgactcacaatctaagtcataaatggccaagtggaataataaaaagtgatagtattctctaagcacttaatggaactaagatcctttaaaaaatgtaattcagtgtttttcaacatggtcactgcaaaatttttctttctggaacaccccagaattccatgaaattaaataaacagaattggagagctaaatatatatggttattatgagcagtatgcttggcttactctggtagttcattcaaggtcaatttcagttagctgggaaggttgaaggatctctgggtctctaactacatcgcaagatgatctccattattaccatgccaggtactcaaaccatagggtacattatccaaaagcagtgaaaacattcaatgtcatagaaaaattataaaacggcaatggtacttggacttctatatccttaaatacagaaccagaacctcttaatgagtcaagttaatagaataattttcaaatatatttctctaaacctgagcattttcagagaagtgggtaagacagacagatgtaaaagagttggaaaaataaggctgggcatggtggctcaggtttatcatcccagcagtttggaagggcgaggtgggtggatcacttgagcccaggagttccagaccatcctgggaaacatggtgaaaccccatctctacaaaaaagacaaaaattagctgggtgtggtggcgcatgcctgtagtccttgctactggggaggctgaggtggatcacctgagccctaggaggtcaagactgtagtgagttgtgattatgccactgtgctccagcctgggtgagtgagagcctgcctcaaaaattaaaaatacataaatgcataaataaataaataaaagagggaaaaataaagtcttgtgatagattttttaaatcttgaaaataagttatttggaagattttgcatttagttaaaaattatacttttgaaaaattccttttgttcttcaaactagaaatgaaactgaactaaataagatccattcaaccacaaatattcattgagtacttattccatgccaggctctattccatgtgctggggctgtatcagagaacaaaacagacaaaaactcttgccttcgtagtgcttatataagagtcatttgaatatgtatttatatataggaatatatcaatgactgttattttaatcttaaagtgaagatgaaaaagattttattaaaaatatttctgtcttacagatctcagaacaataactaacataaatattgcatcatatttttcttttacagtagcaggtaaaacatgattcatttaatggcaagagaaaaaagggcacagaaccaggaattgcagggctgcatatcttgttgaatgctgtagacttcctgacagctctctggttccttgtgcacacagagttggttgtcagcacctctt

SEQ ID NO: 670561 - DNA, 1646 bp, Homo sapiens
agaaaggctcagtgaggcatttctatccaggggaggcgggtactctatgcctatttgttttacagacataccattaactattttaaggactaatgsgagcagaagacaaacatatttagtttgggacaaactggttgggtgcttaaaaacatagaaggatcaacatttctgtgatttttttttttctttttaacttcctgggccatgtgatggatcgtactgctaaccagccagcaggtagaatttgaggcgctgatctttctctctgcagctggacttttccgctagagactttttctccctgtcactttgggcttcaccagtccctgcattattaccacaagcacagaggactgtgtgcttcccttagctcatttctgatggaatgcaaagtagcattgtggatgagataggcattttcacattttttcaaataattttttttctgtcactgcttttggcaggctttgtagcctccaagcaagtagagaactgtattttattttcaaacagccagaaggagaatttcatgaaattacaatgattagcagtttgtagttagtgaattccaaggctgttggacatataatcagggggtgatgatactactccttcctgagggcagactgacttctggaaacttttaacatggcccagtgatttggagggatttgggagcaatgagctctttttttgttttttgtttgttcgtttggttggttggttttttatttttgagatagggtctggctctgtcacccaggctgcagtgcagtggtgtgatcttggctgactgcaacctccatttcctgggctcaagcaatcttcccacctcagcctttcaagtaattgggactacaggcacacaccaccacacctagctaatttttgtacttttgtagagatggggttttgccatgttgcccaagctggtctcgaactcctgagatcaaagcaatctacccaccccagcttcccaaagtgctgggattacaggtgtgagccactgtatccggccgtgatgagctctttgagtgaaaagtaaaccttggggaaaagaggaaaatatattggttggagagaccatgggggagagtcagacttaatttacccattaggatcatttcctgtaataagttgaaaagggatttaggctctattagagtagaactatatgaaaaaattgacagaaatttcaaagcgaatgaaagaaatgtacttcaaggactctcattagacagcaaattatcttccattagacaaggttcagctctagacaagacctacaggaagggagtatcaccagtaatcactggctttgccacacattttttacccccagtggctttgtagacacaaaacgatgccaggggtaggaccagaaacaactccactgtcagcccagtgctctctgctgcaaacatctgtgtattcctaggcaggatattggccatatatactctttgattttctatctaaggacccagagctctcctactttgtgattctggggtctctgttgggagatggacctgtatgccaaaaaagatgacgcgtaactatattatattgcatgtaagatccaaataggaggaaggaggaagaaatcaagtggagctgtgatgactagaacttgagtcaaatgt

SEQ ID NO: 670562 - DNA, 652 bp, Homo sapiens
ctccttaaattgcctcctagttgccatgtttttgaaaactgtttatgtaacagctgtggcaatgaagctttgttgttctgtgattacttgtcttgctaacatctgtcggttcctcctagaactctgtttacctaagttggtgaggctggtacctagaccaatgggctttaatatgataaatggcccactaaagtgaaaggagcaggcatacaatgttaatttccgttccatccaggaaaaaagaaaaaggttaccagctgtgaaaaaccacccgactagaagcaggtttctgattgtcagcccgctgagagataatcttgtcmgcatgacctgcagaagtggtaataatttgcaattatgtaccagcctttctcttagggcacacaaacagtttctaaatatttccctcaactcagtgaggcagagatgctgggatgttatcattttgcaattaaaaagtcatcttagaataaatgctttaataacctttctcatgttgcgcgtttgggaagcttctcgagattttttccaggagggaaatggcacctagtgatgttacgtgaacacataagagcttggtgctttcctgcttgtttttactctgggttattgcttaaattctgaagcagcgccattttgctttccttttgcg

SEQ ID NO: 670563 - DNA, 465 bp, Homo sapiens
atacatcatgttctcawcaagggctgcatgtttctttattgctgttttttccccagagacttagcttttctaggtgtgtagcatggctcttaaatacacacatttagcaactgtgcaaattcagtaaaaatggagagacttatttaaggaagacagtagggaaatgtctaaatagtgcagtgtaggccattcagttaaatttcagtatggctttcgatgcaggcaaagccgttttgcctttgattctcattttttaaattagattttaaaaattgagattctccttttttaaatgagattttaaaaattgagattctccttttttaaatgagattttaaaaattgagattctccttttttaaatgagattttaaaaattgagattctccttttttaaatgagattttaaaaattgagattctccttttttaaatgagattttaaaaattgagattctcatttttt

SEQ ID NO: 670564 - DNA, 465 bp, Homo sapiens
atacatcatgttctcaacaagggctgcatgtttctttattgctgttttttccccagagacttagcttttctaggtgtgtagcatggctcttaaatacacacatttagcaactgtgcaaattcagtaaaaatggagagacttatttaaggaagacagtagggaaatgtctaaatagtgcagtgtaggccattcagttaaatttcagtatggctttcratgcaggcaaagccgttttgcctttgattctcattttttaaattagattttaaaaattgagattctccttttttaaatgagattttaaaaattgagattctccttttttaaatgagattttaaaaattgagattctccttttttaaatgagattttaaaaattgagattctccttttttaaatgagattttaaaaattgagattctccttttttaaatgagattttaaaaattgagattctcatttttt

SEQ ID NO: 670565 - DNA, 465 bp, Homo sapiens
atacatcatgttctcaacaagggctgcatgtttctttattgctgttttttccccagagacttagcttttctaggtgtgtagcatggctcttaaatacacacatttagcaactgtgcaaattcagtaaaaatggagagacttatttaaggaagacagtagggaaatgtctaaatagtgcagtgtaggccattcagttaaatttcagtatggctttcgatgcakgcaaagccgttttgcctttgattctcattttttaaattagattttaaaaattgagattctccttttttaaatgagattttaaaaattgagattctccttttttaaatgagattttaaaaattgagattctccttttttaaatgagattttaaaaattgagattctccttttttaaatgagattttaaaaattgagattctccttttttaaatgagattttaaaaattgagattctcatttttt

SEQ ID NO: 670566 - DNA, 1837 bp, Homo sapiens
ctacataagcagttgatggtcctgcacagctttctcatttttgaaaatgggaagcgtgcttgctgtctcacaaagactgagataacgtatgaagtatttggtataggattaacctaatacctgttaaatttcctaaaggtaagtgtttatattcagaactttgaaaagacaatgaacatgttagcctataacctaaactcatagtataatattaattaaatagttaagcatatttatttctgattatacttgttcactcaagaacaacatacgtgcatcacaagtaataatgtcgctgaagtgttttctgatgctaaattccaatttctcttgactaacaaacttgcggaaaacccttggtcattattttttttgtattgttctttttgtattgtattttttgttcttgttctgcactaaaggctttttcatacttcttgctgggatcagcttgcatcagaatggttgtttctgtcataaagcttctatgataatttcagtgactactcaattctctcctctatagtcatctaaaatctagttttcaagtagcttttgttcaatgtagaattctggtaacagtataaactcctaaaagccaggcagtcctaggttttaatttcagtttttattagtttccagggatgctataacaaattgccaccttttaactgggtgacttaaaacaacagaaatatgttctttcacagttctggaggtcagaagtccaaaatcaaggtaccaacagtttggttccttctggagagtttgagggggaatctggcccacacctctcttcccagcttctgatggctgccagctaggcttggcattccttggcttgtagatgcatccctccaacctctgcctccatcttcacatcacctctctataactgtgtctaaattcttctgcctttcacttataaacatacctgtcattagatttaggtgttaccctaaatccacgatgatctcattttgggatgtttaacttaattacatctgcaaaaagacctttttttttttttttcaaacaaagtcgtgttcacaggttttatgggtcagacactgacatactttcgtagggccagtattcaacctgttacatggtcccagtggctttggattgtcactgaaattgaaaactgaattcatataagcccaaacaatgaaaggtatttgtcccctattgtaactgtaaggtagggtgaacatcagcactgaatgattcaacaactcaaaaatatcgtaagagatctggatgttttatttctagagacttttaggttcagggagtgcatgtgcaggtttgttacatgcgtaaattgcatgttgctgagatttggtgtatgaattgatcccgtcaccaagatagtgagcatagtaccggatagggttttcaacacacacctccttcctaaccttctgccacaaagagtccccagtgtctatggtttccatctttgtgtccatgtgcattcaatgtttagctcccacttataagtgacaacatgcaggattgtgttttctgttcctgtgttagtttgctaaggataatggcctccaactgcattcatgttgcggcaaaggacacaatttcattcctttttatgtctgtgtactatttcatggtgtatatataccacattttctttatctactccactgttgatgggcatctagattgattccatgtctttgctattgtgaacatacaagtagatgtgtgtttttggtagaattatttcttttcctttgggtatatatctatctatatctatatctatatctatatctatmtatctatcgtctatctatctatctatctatctatc

SEQ ID NO: 670567 - DNA, 1837 bp, Homo sapiens
ctacataagcagttgatggtcctgcacagctttctcatttttgaaaatgggaagcgtgcttgctgtctcacaaagactgagataacgtatgaagtatttggtataggattaacctaatacctgttaaatttcctaaaggtaagtgtttatattcagaactttgaaaagacaatgaacatgttagcctataacctaaactcatagtataatattaattaaatagttaagcatatttatttctgattatacttgttcactcaagaacaacatacgtgcatcacaagtaataatgtcgctgaagtgttttctgatgctaaattccaatttctcttgactaacaaacttgcggaaaacccttggtcattattttttttgtattgttctttttgtattgtattttttgttcttgttctgcactaaaggctttttcatacttcttgctgggatcagcttgcatcagaatggttgtttctgtcataaagcttctatgataatttcagtgactactcaattctctcctctatagtcatctaaaatctagttttcaagtagcttttgttcaatgtagaattctggtaacagtataaactcctaaaagccaggcagtcctaggttttaatttcagtttttattagtttccagggatgctataacaaattgccaccttttaactgggtgacttaaaacaacagaaatatgttctttcacagttctggaggtcagaagtccaaaatcaaggtaccaacagtttggttccttctggagagtttgagggggaatctggcccacacctctcttcccagcttctgatggctgccagctaggcttggcattccttggcttgtagatgcatccctccaacctctgcctccatcttcacatcacctctctataactgtgtctaaattcttctgcctttcacttataaacatacctgtcattagatttaggtgttaccctaaatccacgatgatctcattttgggatgtttaacttaattacatctgcaaaaagacctttttttttttttttcaaacaaagtcgtgttcacaggttttatgggtcagacactgacatactttcgtagggccagtattcaacctgttacatggtcccagtggctttggattgtcactgaaattgaaaactgaattcatataagcccaaacaatgaaaggtatttgtcccctattgtaactgtaaggtagggtgaacatcagcactgaatgattcaacaactcaaaaatatcgtaagagatctggatgttttatttctagagacttttaggttcagggagtgcatgtgcaggtttgttacatgcgtaaattgcatgttgctgagatttggtgtatgaattgatcccgtcaccaagatagtgagcatagtaccggatagggttttcaacacacacctccttcctaaccttctgccacaaagagtccccagtgtctatggtttccatctttgtgtccatgtgcattcaatgtttagctcccacttataagtgacaacatgcaggattgtgttttctgttcctgtgttagtttgctaaggataatggcctccaactgcattcatgttgcggcaaaggacacaatttcattcctttttatgtctgtgtactatttcatggtgtatatataccacattttctttatctactccactgttgatgggcatctagattgattccatgtctttgctattgtgaacatacaagtagatgtgtgtttttggtagaattatttcttttcctttgggtatatatctatctatatctatatctatatctatatctatctmtctatcgtctatctatctatctatctatctatc

SEQ ID NO: 670568 - DNA, 1837 bp, Homo sapiens
ctacataagcagttgatggtcctgcacagctttctcatttttgaaaatgggaagcgtgcttgctgtctcacaaagactgagataacgtatgaagtatttggtataggattaacctaatacctgttaaatttcctaaaggtaagtgtttatattcagaactttgaaaagacaatgaacatgttagcctataacctaaactcatagtataatattaattaaatagttaagcatatttatttctgattatacttgttcactcaagaacaacatacgtgcatcacaagtaataatgtcgctgaagtgttttctgatgctaaattccaatttctcttgactaacaaacttgcggaaaacccttggtcattattttttttgtattgttctttttgtattgtattttttgttcttgttctgcactaaaggctttttcatacttcttgctgggatcagcttgcatcagaatggttgtttctgtcataaagcttctatgataatttcagtgactactcaattctctcctctatagtcatctaaaatctagttttcaagtagcttttgttcaatgtagaattctggtaacagtataaactcctaaaagccaggcagtcctaggttttaatttcagtttttattagtttccagggatgctataacaaattgccaccttttaactgggtgacttaaaacaacagaaatatgttctttcacagttctggaggtcagaagtccaaaatcaaggtaccaacagtttggttccttctggagagtttgagggggaatctggcccacacctctcttcccagcttctgatggctgccagctaggcttggcattccttggcttgtagatgcatccctccaacctctgcctccatcttcacatcacctctctataactgtgtctaaattcttctgcctttcacttataaacatacctgtcattagatttaggtgttaccctaaatccacgatgatctcattttgggatgtttaacttaattacatctgcaaaaagacctttttttttttttttcaaacaaagtcgtgttcacaggttttatgggtcagacactgacatactttcgtagggccagtattcaacctgttacatggtcccagtggctttggattgtcactgaaattgaaaactgaattcatataagcccaaacaatgaaaggtatttgtcccctattgtaactgtaaggtagggtgaacatcagcactgaatgattcaacaactcaaaaatatcgtaagagatctggatgttttatttctagagacttttaggttcagggagtgcatgtgcaggtttgttacatgcgtaaattgcatgttgctgagatttggtgtatgaattgatcccgtcaccaagatagtgagcatagtaccggatagggttttcaacacacacctccttcctaaccttctgccacaaagagtccccagtgtctatggtttccatctttgtgtccatgtgcattcaatgtttagctcccacttataagtgacaacatgcaggattgtgttttctgttcctgtgttagtttgctaaggataatggcctccaactgcattcatgttgcggcaaaggacacaatttcattcctttttatgtctgtgtactatttcatggtgtatatataccacattttctttatctactccactgttgatgggcatctagattgattccatgtctttgctattgtgaacatacaagtagatgtgtgtttttggtagaattatttcttttcctttgggtatatatctatctatatctatatctatatctatatctatctatmtatcgtctatctatctatctatctatctatc

SEQ ID NO: 670569 - DNA, 1837 bp, Homo sapiens
ctacataagcagttgatggtcctgcacagctttctcatttttgaaaatgggaagcgtgcttgctgtctcacaaagactgagataacgtatgaagtatttggtataggattaacctaatacctgttaaatttcctaaaggtaagtgtttatattcagaactttgaaaagacaatgaacatgttagcctataacctaaactcatagtataatattaattaaatagttaagcatatttatttctgattatacttgttcactcaagaacaacatacgtgcatcacaagtaataatgtcgctgaagtgttttctgatgctaaattccaatttctcttgactaacaaacttgcggaaaacccttggtcattattttttttgtattgttctttttgtattgtattttttgttcttgttctgcactaaaggctttttcatacttcttgctgggatcagcttgcatcagaatggttgtttctgtcataaagcttctatgataatttcagtgactactcaattctctcctctatagtcatctaaaatctagttttcaagtagcttttgttcaatgtagaattctggtaacagtataaactcctaaaagccaggcagtcctaggttttaatttcagtttttattagtttccagggatgctataacaaattgccaccttttaactgggtgacttaaaacaacagaaatatgttctttcacagttctggaggtcagaagtccaaaatcaaggtaccaacagtttggttccttctggagagtttgagggggaatctggcccacacctctcttcccagcttctgatggctgccagctaggcttggcattccttggcttgtagatgcatccctccaacctctgcctccatcttcacatcacctctctataactgtgtctaaattcttctgcctttcacttataaacatacctgtcattagatttaggtgttaccctaaatccacgatgatctcattttgggatgtttaacttaattacatctgcaaaaagacctttttttttttttttcaaacaaagtcgtgttcacaggttttatgggtcagacactgacatactttcgtagggccagtattcaacctgttacatggtcccagtggctttggattgtcactgaaattgaaaactgaattcatataagcccaaacaatgaaaggtatttgtcccctattgtaactgtaaggtagggtgaacatcagcactgaatgattcaacaactcaaaaatatcgtaagagatctggatgttttatttctagagacttttaggttcagggagtgcatgtgcaggtttgttacatgcgtaaattgcatgttgctgagatttggtgtatgaattgatcccgtcaccaagatagtgagcatagtaccggatagggttttcaacacacacctccttcctaaccttctgccacaaagagtccccagtgtctatggtttccatctttgtgtccatgtgcattcaatgtttagctcccacttataagtgacaacatgcaggattgtgttttctgttcctgtgttagtttgctaaggataatggcctccaactgcattcatgttgcggcaaaggacacaatttcattcctttttatgtctgtgtactatttcatggtgtatatataccacattttctttatctactccactgttgatgggcatctagattgattccatgtctttgctattgtgaacatacaagtagatgtgtgtttttggtagaattatttcttttcctttgggtatatatctatctatatctatatctatatctatatctatctatctatcgtmtatctatctatctatctatctatc

SEQ ID NO: 670570 - DNA, 2631 bp, Homo sapiens
tttatgtaagggaaggctgaaggagaacttgaaaggtcatttgagggagaatgtggagaattagtctaccttctagccttcaagtctgaatagactggaatgactctaccttacaagcatgtctcatacattctttatgtaaatcttttctgcaaacctggcctggaggaaattctgacacccaacctaacacttgcaggatgtatttctttctttttccgcaagcttcattgaagataataatagcacacactcctaacatccctgagtgcttactgtgagcggacacggtcctaagcctcttacctgtatctttttcgtgtgatcctcataaacgccctatgaggtagatattattactatcctcactttctggatgagaaaaccgaggtgcaaagaacatgcctaaggtcatatagctaataagtgaaatagcagggatctaattctgcttctcattgaatcctcatacttttaaataaccattcacagggatactcccctatttctcatttcaagtttctctgtcggctaaataaccttcttccctctaagcctttctcctcttgtgacttcagtctgatatctcttctttaggtttctgatctccctaattaaatttttccccaatattctgtgaaacttctaatgtgttgttttaggtttaaatataggtcagcttgtatatgttatacgtatatgccctatatcacattgttatatgttttttcagctggagtatcacctatctgatctgcatgccttataactccatataagtgctataaagtttcaagtttctggtctattaagataaacccttatatctcaaattggaacctcagccttgagatatggcttttcatgttagcagctatatccatgcattccatcccttatgcaaatttgtcacaaagctttgcgaggcttggtgcttctgatgttgccgctttccttagctgcaggcagtcatcacgctctgttaagatggtggcaaagcagtgaagtttctgtgactcccctgaatrgcaaccagttccatttttcctctaaactcaggaggcatctggttcatgacctgattcctcacaccttaatcgtgaagatggtgctgatcacagtagcacacacccatagtcccagccaccgaggagactgagatgggagaatcccttgaggccaggaatttgaggctgtagtgcactatgagcctctgaatagccactgcactccaacctgggcaacataacaagactcttctcttaaaaaagagaaaaaaagaagatggtaagttgggcttttttatcaaacaaaacttgtgttcattgggctaacaaatacatagagtgtctactactagccagacatgttgtaagtgctagctctaagtcagttaagaaaacagataataaatctctgtctcttgaatattattctctggtgaggggttatagatacatgatatattaattatgtcagagaacttggcaaatgagaaataggaagttcattcagctaaattaattcaacaactcttcgttaaataccaaatatgtattgtacagtgtttatcagttgttggagttaaagcaggaaccagaaagatatgattccagccatcatgttacttacattctcgtgcccatcatttaactgtttgttctcacatgcatttcttaccattctcctgctcctttgaaggtgggagagaagaggaaagtaatctttacagagtacatttcctagattcccctgccaaatggcacttgatcagtttttcaagagcagcaggcactaaccaaagtctggggaaacacaagaaaggagtgaccttgcctcttcctttctctgtcgcaggtgctggctgcctttcctctaaactctagctcctgctagcctggctgtaaccccgattgcacctcctcctttctaggctcttgtgcctccagcccttgggatagcagtggcttttgttctgtgttgcctacaatctctgtttaacttctcagccttcatgatccatgtggccaaatccttgaattaaattttcttttcgaaagacctaaactagttttgttttttctcatgggcccctaagtggggaagtaagttttaaatgagatattacaaatgtgattagcaaaacaaaagtagcagtgaggtactatagattgtataagaagagccctagtttgctggggctgccaaagcaaactgtaagaatcttggtgacttatacaacagaaacttattttctcagagttgtaggggcaggaagttcaagataaggtgtctgcaggtttgtttcttctgaggcctctctcctgggccgccttctccctgttgtcttcaccatggtcatgtctcagtgcttgcgtatcactttgtctcctcttataaagagactggtcagattggattgggacccacccaaatagcttcactttaccttaatcacatctttaatggttctctttttaaatacagtcacattctgaagtgttgggacttcaggctccaacatatgaattttagagggtactcaattcaatccataacactgacctagttgaaaggtcaggtaggctcagctaagaaaggcatcaacaaatagagtagcagggaagacat

SEQ ID NO: 670571 - DNA, 2631 bp, Homo sapiens
tttatgtaagggaaggctgaaggagaacttgaaaggtcatttgagggagaatgtggagaattagtctaccttctagccttcaagtctgaatagactggaatgactctaccttacaagcatgtctcatacattctttatgtaaatcttttctgcaaacctggcctggaggaaattctgacacccaacctaacacttgcaggatgtatttctttctttttccgcaagcttcattgaagataataatagcacacactcctaacatccctgagtgcttactgtgagcggacacggtcctaagcctcttacctgtatctttttcgtgtgatcctcataaacgccctatgaggtagatattattactatcctcactttctggatgagaaaaccgaggtgcaaagaacatgcctaaggtcatatagctaataagtgaaatagcagggatctaattctgcttctcattgaatcctcatacttttaaataaccattcacagggatactcccctatttctcatttcaagtttctctgtcggctaaataaccttcttccctctaagcctttctcctcttgtgacttcagtctgatatctcttctttaggtttctgatctccctaattaaatttttccccaatattctgtgaaacttctaatgtgttgttttaggtttaaatataggtcagcttgtatatgttatacgtatatgccctatatcacattgttatatgttttttcagctggagtatcacctatctgatctgcatgccttataactccatataagtgctataaagtttcaagtttctggtctattaagataaacccttatatctcaaattggaacctcagccttgagatatggcttttcatgttagcagctatatccatgcattccatcccttatgcaaatttgtcacaaagctttgcgaggcttggtgcttctgatgttgccgctttccttagctgcaggcagtcatcacgctctgttaagatggtggcaaagcagtgaagtttctgtgactcccctgaatagcaaccagttccatttttcctctaaactcaggaggcatctggttsatgacctgattcctcacaccttaatcgtgaagatggtgctgatcacagtagcacacacccatagtcccagccaccgaggagactgagatgggagaatcccttgaggccaggaatttgaggctgtagtgcactatgagcctctgaatagccactgcactccaacctgggcaacataacaagactcttctcttaaaaaagagaaaaaaagaagatggtaagttgggcttttttatcaaacaaaacttgtgttcattgggctaacaaatacatagagtgtctactactagccagacatgttgtaagtgctagctctaagtcagttaagaaaacagataataaatctctgtctcttgaatattattctctggtgaggggttatagatacatgatatattaattatgtcagagaacttggcaaatgagaaataggaagttcattcagctaaattaattcaacaactcttcgttaaataccaaatatgtattgtacagtgtttatcagttgttggagttaaagcaggaaccagaaagatatgattccagccatcatgttacttacattctcgtgcccatcatttaactgtttgttctcacatgcatttcttaccattctcctgctcctttgaaggtgggagagaagaggaaagtaatctttacagagtacatttcctagattcccctgccaaatggcacttgatcagtttttcaagagcagcaggcactaaccaaagtctggggaaacacaagaaaggagtgaccttgcctcttcctttctctgtcgcaggtgctggctgcctttcctctaaactctagctcctgctagcctggctgtaaccccgattgcacctcctcctttctaggctcttgtgcctccagcccttgggatagcagtggcttttgttctgtgttgcctacaatctctgtttaacttctcagccttcatgatccatgtggccaaatccttgaattaaattttcttttcgaaagacctaaactagttttgttttttctcatgggcccctaagtggggaagtaagttttaaatgagatattacaaatgtgattagcaaaacaaaagtagcagtgaggtactatagattgtataagaagagccctagtttgctggggctgccaaagcaaactgtaagaatcttggtgacttatacaacagaaacttattttctcagagttgtaggggcaggaagttcaagataaggtgtctgcaggtttgtttcttctgaggcctctctcctgggccgccttctccctgttgtcttcaccatggtcatgtctcagtgcttgcgtatcactttgtctcctcttataaagagactggtcagattggattgggacccacccaaatagcttcactttaccttaatcacatctttaatggttctctttttaaatacagtcacattctgaagtgttgggacttcaggctccaacatatgaattttagagggtactcaattcaatccataacactgacctagttgaaaggtcaggtaggctcagctaagaaaggcatcaacaaatagagtagcagggaagacat

SEQ ID NO: 670572 - DNA, 1748 bp, Homo sapiens
ctggatggaccgtgacatcactacattccactcttcctggtgagggggagggaccacatcagcatgatgtccgagtcaccgctccatgataggggarggaaaaacagagctgggacccaggtccttggagacaccagtgcacacagcctagggaggtccaccttgaggcagcaggagggaagggaagagtcagcagcagggagccccaggattcaccagcctaaagtcacccagggatgactggtgagggtggggtctggggctgtgggacccaggtccttggagatgtgagcccaaaaagccctgggaggtcaagcttggggtggcaggagatgagggcccagtaaaggagcggggagccccaggattcacctgcccaaagtcaccctggggtgattggtgagggcagagactgggctgcttgctgaaggggtggggctgactgacaaaactttggtgggggtagcccagaggcaccggtgtgggggtcccagtccggtgaacctcgggagtggtatggactctggcagcagtcttgtcgttggagaggatctatggctgggttgggggtccgtgacctggtgtgtttttacctttctcttggctgctgccaatttactttgtcgagtttcttctgccatcgcagggtggggagggaggcgggcttggggccacatcagcaaaatcccaccaagcactgatcaacacctccagtcacctaccaggtagctgtgcgactgagccagaggaggcgtaaccagggatgcagtagaaggcagaataggggcgtggccttaatgctccaagcccattggttaatgagaaagatgaaagggaaagggggcgtggccaggcatcatgtgtccagagggacctttggctcacaaggaaagctgcccatgcaaccactgtccccacccactctaagagaggggagaggccgccaactctgggagaggggcagggccggcttttgctttaaaagcttttaaaaaatatatatgtgtatactttatatatatgtgtgtctgtgtgtgtgtacctgtgtgttcctccagagctgtcttcatgatccagcttctatgcaaggtctatgattttggcctatatttttcatagagtacaaaaattaccagtattaccttaaccgagatacagatcctatgaagatggaaaatccatagcatgcttgatgattactgaagcagactatattatccaacattccaataagataaaataatcacaatgacttctcttttttggaaaaatgtttctcttattctcctacgttattgtgaagactttttttcttaaacaagaaacatgtgtaatatttgtaaaaacacaaagcttttgggccgggtgcagtggcttatgcgtataattccagcactttaggagcctgaggctggcggatcatgaggtcaggagattgagaccatcctgactaaaaaggtgaaaccacatctctactaaaaatacaaaaaattagccaggcgtggtggtgggtgcctgtagtcccagctacttgggaagctgaggcaggagaatggcgtgaacccaggaggtggagcttgcagtgagctcagatcgtgccactgcactcgagcctgggctacagagcgagactccttctcaaaataaataaataaataaataaataaaacttctatttctttcactttctaatataattttaatatctcctcctgggatttcactaagacacattttggacctcattc

SEQ ID NO: 670573 - DNA, 1748 bp, Homo sapiens
ctggatggaccgtgacatcactacattccactcttcctggtgagggggagggaccacatcagcatgatgtccgagtcaccgctccatgataggggagggaaaaacagagctgggacccaggtccttggagacrccagtgcacacagcctagggaggtccaccttgaggcagcaggagggaagggaagagtcagcagcagggagccccaggattcaccagcctaaagtcacccagggatgactggtgagggtggggtctggggctgtgggacccaggtccttggagatgtgagcccaaaaagccctgggaggtcaagcttggggtggcaggagatgagggcccagtaaaggagcggggagccccaggattcacctgcccaaagtcaccctggggtgattggtgagggcagagactgggctgcttgctgaaggggtggggctgactgacaaaactttggtgggggtagcccagaggcaccggtgtgggggtcccagtccggtgaacctcgggagtggtatggactctggcagcagtcttgtcgttggagaggatctatggctgggttgggggtccgtgacctggtgtgtttttacctttctcttggctgctgccaatttactttgtcgagtttcttctgccatcgcagggtggggagggaggcgggcttggggccacatcagcaaaatcccaccaagcactgatcaacacctccagtcacctaccaggtagctgtgcgactgagccagaggaggcgtaaccagggatgcagtagaaggcagaataggggcgtggccttaatgctccaagcccattggttaatgagaaagatgaaagggaaagggggcgtggccaggcatcatgtgtccagagggacctttggctcacaaggaaagctgcccatgcaaccactgtccccacccactctaagagaggggagaggccgccaactctgggagaggggcagggccggcttttgctttaaaagcttttaaaaaatatatatgtgtatactttatatatatgtgtgtctgtgtgtgtgtacctgtgtgttcctccagagctgtcttcatgatccagcttctatgcaaggtctatgattttggcctatatttttcatagagtacaaaaattaccagtattaccttaaccgagatacagatcctatgaagatggaaaatccatagcatgcttgatgattactgaagcagactatattatccaacattccaataagataaaataatcacaatgacttctcttttttggaaaaatgtttctcttattctcctacgttattgtgaagactttttttcttaaacaagaaacatgtgtaatatttgtaaaaacacaaagcttttgggccgggtgcagtggcttatgcgtataattccagcactttaggagcctgaggctggcggatcatgaggtcaggagattgagaccatcctgactaaaaaggtgaaaccacatctctactaaaaatacaaaaaattagccaggcgtggtggtgggtgcctgtagtcccagctacttgggaagctgaggcaggagaatggcgtgaacccaggaggtggagcttgcagtgagctcagatcgtgccactgcactcgagcctgggctacagagcgagactccttctcaaaataaataaataaataaataaataaaacttctatttctttcactttctaatataattttaatatctcctcctgggatttcactaagacacattttggacctcattc

SEQ ID NO: 670574 - DNA, 1748 bp, Homo sapiens
ctggatggaccgtgacatcactacattccactcttcctggtgagggggagggaccacatcagcatgatgtccgagtcaccgctccatgataggggagggaaaaacagagctgggacccaggtccttggagacaccagtgcacacagcctagggaggtccaccttgaggcagcaggagggaagggaagagtcagcagcagggagccccaggattcaccagcctaaagtcacccagggatgactggtgagggtggggtctggggctgtgggacccaggtccttggagatgtgagcccaaaaagccctgggaggtcaagcttggggtggcaggagatgagggccyagtaaaggagcggggagccccaggattcacctgcccaaagtcaccctggggtgattggtgagggcagagactgggctgcttgctgaaggggtggggctgactgacaaaactttggtgggggtagcccagaggcaccggtgtgggggtcccagtccggtgaacctcgggagtggtatggactctggcagcagtcttgtcgttggagaggatctatggctgggttgggggtccgtgacctggtgtgtttttacctttctcttggctgctgccaatttactttgtcgagtttcttctgccatcgcagggtggggagggaggcgggcttggggccacatcagcaaaatcccaccaagcactgatcaacacctccagtcacctaccaggtagctgtgcgactgagccagaggaggcgtaaccagggatgcagtagaaggcagaataggggcgtggccttaatgctccaagcccattggttaatgagaaagatgaaagggaaagggggcgtggccaggcatcatgtgtccagagggacctttggctcacaaggaaagctgcccatgcaaccactgtccccacccactctaagagaggggagaggccgccaactctgggagaggggcagggccggcttttgctttaaaagcttttaaaaaatatatatgtgtatactttatatatatgtgtgtctgtgtgtgtgtacctgtgtgttcctccagagctgtcttcatgatccagcttctatgcaaggtctatgattttggcctatatttttcatagagtacaaaaattaccagtattaccttaaccgagatacagatcctatgaagatggaaaatccatagcatgcttgatgattactgaagcagactatattatccaacattccaataagataaaataatcacaatgacttctcttttttggaaaaatgtttctcttattctcctacgttattgtgaagactttttttcttaaacaagaaacatgtgtaatatttgtaaaaacacaaagcttttgggccgggtgcagtggcttatgcgtataattccagcactttaggagcctgaggctggcggatcatgaggtcaggagattgagaccatcctgactaaaaaggtgaaaccacatctctactaaaaatacaaaaaattagccaggcgtggtggtgggtgcctgtagtcccagctacttgggaagctgaggcaggagaatggcgtgaacccaggaggtggagcttgcagtgagctcagatcgtgccactgcactcgagcctgggctacagagcgagactccttctcaaaataaataaataaataaataaataaaacttctatttctttcactttctaatataattttaatatctcctcctgggatttcactaagacacattttggacctcattc

SEQ ID NO: 670575 - DNA, 1372 bp, Homo sapiens
  misc_feature 933, 934: n = A,T,C or G
atatgtatttgctgaggaaattatacaattttcttaawttttttttaacaaaaattgtggtttcaagggaccaaacttgaatactacaccttcatgttctaagaatcaggggacttatataaaacctcagttgcctgataaggactacatcaaagtgaaaagccatgggaaagaactagaaagtatacttttgaccctagttctgtaaagtttccttatgccacaggtaatacacatcgcaattcctgccaaattctttccctcacctctgtttatggtctcgattccataaataggagaagggcatgaatttgctttagttagatagacagatagatggatagagagatagatggatggatggatggatggatagatagatagacagagataaagacagagacaaagatggagacagagatggacatagagacagatttgcagaagataagttctaggtgaactagtgtcaacattaaagtggtatgcctacatctaactattctggagagaaaaacatacctcaaagaaattgacttaaatatatacagagaaaaagtttaagctgaaagctactgcctttttatatgagacactttaggaaattacttggggggcaagagagaaaatgggtggacatagctcagaggttacacagtagcagatatgtaggatgaacaagcctagaaatataatgtacaacgcgagaaatataggtaataaaattgtgctgtatttgggattcacgctaaatgagattttaagctcctcttgccaccaaacaaaaagaaaacgggtaactatctgagttgaaggatacgttaatttgcttcactgtagtaattttttttaaccatctatatgcatcccataaaatcatgttgtataccttaaatacacagaatacaatttatttaacataaaaaactactnncaatattttctcatttttaatatgctcacccaaagaaagcattaatttgcatctttgatgttaaacagatagcctaatcaagtcactatcaagatcaagactaaaagttacagcttttttcttttgatgcctttcagatatatctatttatatataaaaatatatatacacacacacatacatacacacacacacacacatatatatgtagttatgtgtgtgtgtatatatagttacagttttggccaggtgcaatggctgacacctgtaatctcagccctttgggagaccaaggctgaaggcttgcttgaggccaggagtttgagaccagcctgggcaacgaagcaagaccctatctctacaattttttttttttaacaaaattagccagggatgatggcatgcacttgtagtcccagatacttgggaggctgaggc

SEQ ID NO: 670576 - DNA, 1372 bp, Homo sapiens
  misc_feature 933, 934: n = A,T,C or G
atatgtatttgctgaggaaattatacaattttcttaatttttttttaacaaaaattgtgstttcaagggaccaaacttgaatactacaccttcatgttctaagaatcaggggacttatataaaacctcagttgcctgataaggactacatcaaagtgaaaagccatgggaaagaactagaaagtatacttttgaccctagttctgtaaagtttccttatgccacaggtaatacacatcgcaattcctgccaaattctttccctcacctctgtttatggtctcgattccataaataggagaagggcatgaatttgctttagttagatagacagatagatggatagagagatagatggatggatggatggatggatagatagatagacagagataaagacagagacaaagatggagacagagatggacatagagacagatttgcagaagataagttctaggtgaactagtgtcaacattaaagtggtatgcctacatctaactattctggagagaaaaacatacctcaaagaaattgacttaaatatatacagagaaaaagtttaagctgaaagctactgcctttttatatgagacactttaggaaattacttggggggcaagagagaaaatgggtggacatagctcagaggttacacagtagcagatatgtaggatgaacaagcctagaaatataatgtacaacgcgagaaatataggtaataaaattgtgctgtatttgggattcacgctaaatgagattttaagctcctcttgccaccaaacaaaaagaaaacgggtaactatctgagttgaaggatacgttaatttgcttcactgtagtaattttttttaaccatctatatgcatcccataaaatcatgttgtataccttaaatacacagaatacaatttatttaacataaaaaactactnncaatattttctcatttttaatatgctcacccaaagaaagcattaatttgcatctttgatgttaaacagatagcctaatcaagtcactatcaagatcaagactaaaagttacagcttttttcttttgatgcctttcagatatatctatttatatataaaaatatatatacacacacacatacatacacacacacacacacatatatatgtagttatgtgtgtgtgtatatatagttacagttttggccaggtgcaatggctgacacctgtaatctcagccctttgggagaccaaggctgaaggcttgcttgaggccaggagtttgagaccagcctgggcaacgaagcaagaccctatctctacaattttttttttttaacaaaattagccagggatgatggcatgcacttgtagtcccagatacttgggaggctgaggc

SEQ ID NO: 670577 - DNA, 894 bp, Homo sapiens
ttgagtaagatacttaatccctctgtgactcactgttctcaaatgtaagtgaagataatttgtaactcaaaaaaaatgaaaaagttttctctaagattgcaaatcctaaggataatttcattttaatatcagttatttagtctggatacaccataatgcagactaattttccctctgcttaaagaccacacaaaaacattaccaataaaatttacttgtgtatcaacttttactcctgagacttcatcgtttgtttggttaaaaaaaaaaaaaaaaaaaaaagcgcactagaccgggcacagtggcccatgtctgtgatctcacttacggaggccaaggcaggtggatgagtttgagaacaacctgggcaacatggaaaaaccccgtctctacaaaaaaaaaatataaaaattagtcaggtgtggtggcacataactgtggtcccagctactccagagagtgaggcgggaggattgcttgagcccacgcagaggttgcagtgaaccaagatggcaccactgcactccagcctgggtgacagagcaagaccctgtctcaaaaaaaaaaaaaaaatcactataaaattgaaattcacaacaaaatgtgcatacttaaccttctttttatttatttatttatttttaatattttgagacaacatcttgctatgttgcctaggctggtyttgaactcctgggttcaaaccatcctccagtcttgacttcccaagtactgggactacaggtgtgagccaccagccccgccagccctgttacactattcttggcccctcaagtgactgtatgaattttaggatcagcctctcgagttccacaaaaaaattctattgggatttgtgtaggaatttcttgaatttatagattaatttgttga

SEQ ID NO: 670578 - DNA, 1848 bp, Homo sapiens
caaatagttagcaaaggatattgaatgttcccaaaacaaagaaatgataaatgtttgcaatgatggatatgctaattaccatcacctcatcagggtaattaaatatatacactatgagtattgaaacatcactatgtacccataaatatgcacaattattatgtgccaattaaaaaaataaaataaaattatgataataaaagcttcatatttgtggtgtagagttaaattgagagggtaatttattatttgaaattcttctattagaaaaatacgtaggtttaaaagtcaatgaaaaaataaacaaaacgtaatttgaaaaaataaaataacaggtaatgaaagaaataaatgaaattgaaagtaaataaattcacaaagtgaaaagttcctttgaaaaaatcagtaaagttgttacatactagtaagactaagaaaaaaggactgataaaagaagaaatatcattacagaacctctatatttaaatgataataactattatgaacaattccatactcaagaatttggcagcttaaagttctktaaagagacaaattaccaaagcttatttaagaacaaattcataatgtgaatttttctgtatctatatgtatccagatagtctaggttttctaatttctggcctatggttgctcatagtagcctctaatgatccttacaatttcaacaaagaaattcagaagaaattgaaaaatttattgaagcagataaaaacggcaacacaacataccaaaacctatgggatacagcaaaaagcagtagtaagagggaaatgtatacctataatttccaagatcaaaaaagtgaaaaacctcaaataaataacctgatgatacatctttttttaaggtcactataaattttaatctatgatataaaatattacctacagatataattgaacatcaggtatcagaaaataaaacataacaatgaaatgcaattttgtaaatacttctatggtacaagcattattttcctcagattcaaccttttaattgtgttttgtttgctttctgaaaatcacactttataaagaacacaagtagagcttgttaaaatgattgtcacagatgtactgtttactaattcaaaaaatactacattcattcgctcatatcaattttattcattaattatgaagaagaaaatataatattccatgcttgtcatgaaatagcggtttcttcttccagtctaatcagggaactaataaatgcttagttcatggcaaaacttccatttgatttacattgacttaattacctcttagggtctagcctcatcaatggagaaaaagcactttttcttgaggcaacagcacattaacagcactgaatacaaaatatggcaaattcaatggctgtcagcattgctttaggaattttgagactataaaaaaactataaccatgaataaaagaaaagggcttattaatatcttctttttgggagagtgatacattctgaaggtttcttgttattctgttgaatagcaaggacttccaaacttaagtgtcttaaggctgaaaattagttacattcctcagattttagccttattaatgaaattccaaaagtattataagatttagtatgtcttgaaattataaatttgtaacagatatttttcaaaatacatgccttcaaacaacttaaatgcaaaaatcattcattcttaataatacctagcagttcatcccttgcttcccagaagtactcatacaaacatgtgaatttaaaaaatagatttttctgttcaaaaaataaagcttctgcccttttaaaaacttgtcaggctttcatttgccaaaatgttgaaaactg

SEQ ID NO: 670579 - DNA, 1848 bp, Homo sapiens
caaatagttagcaaaggatattgaatgttcccaaaacaaagaaatgataaatgtttgcaatgatggatatgctaattaccatcacctcatcagggtaattaaatatatacactatgagtattgaaacatcactatgtacccataaatatgcacaattattatgtgccaattaaaaaaataaaataaaattatgataataaaagcttcatatttgtggtgtagagttaaattgagagggtaatttattatttgaaattcttctattagaaaaatacgtaggtttaaaagtcaatgaaaaaataaacaaaacgtaatttgaaaaaataaaataacaggtaatgaaagaaataaatgaaattgaaagtaaataaattcacaaagtgaaaagttcctttgaaaaaatcagtaaagttgttacatactagtaagactaagaaaaaaggactgataaaagaagaaatatcattacagaacctctatatttaaatgataataactattatgaacaattccatactcaagaatttggcagcttaaagttctgtaaagagacaaattaccaaagcttatttaagaacaaattcataatgtgaatttttctgtatctatatgtatccakatagtctaggttttctaatttctggcctatggttgctcatagtagcctctaatgatccttacaatttcaacaaagaaattcagaagaaattgaaaaatttattgaagcagataaaaacggcaacacaacataccaaaacctatgggatacagcaaaaagcagtagtaagagggaaatgtatacctataatttccaagatcaaaaaagtgaaaaacctcaaataaataacctgatgatacatctttttttaaggtcactataaattttaatctatgatataaaatattacctacagatataattgaacatcaggtatcagaaaataaaacataacaatgaaatgcaattttgtaaatacttctatggtacaagcattattttcctcagattcaaccttttaattgtgttttgtttgctttctgaaaatcacactttataaagaacacaagtagagcttgttaaaatgattgtcacagatgtactgtttactaattcaaaaaatactacattcattcgctcatatcaattttattcattaattatgaagaagaaaatataatattccatgcttgtcatgaaatagcggtttcttcttccagtctaatcagggaactaataaatgcttagttcatggcaaaacttccatttgatttacattgacttaattacctcttagggtctagcctcatcaatggagaaaaagcactttttcttgaggcaacagcacattaacagcactgaatacaaaatatggcaaattcaatggctgtcagcattgctttaggaattttgagactataaaaaaactataaccatgaataaaagaaaagggcttattaatatcttctttttgggagagtgatacattctgaaggtttcttgttattctgttgaatagcaaggacttccaaacttaagtgtcttaaggctgaaaattagttacattcctcagattttagccttattaatgaaattccaaaagtattataagatttagtatgtcttgaaattataaatttgtaacagatatttttcaaaatacatgccttcaaacaacttaaatgcaaaaatcattcattcttaataatacctagcagttcatcccttgcttcccagaagtactcatacaaacatgtgaatttaaaaaatagatttttctgttcaaaaaataaagcttctgcccttttaaaaacttgtcaggctttcatttgccaaaatgttgaaaactg

SEQ ID NO: 670580 - DNA, 1848 bp, Homo sapiens
caaatagttagcaaaggatattgaatgttcccaaaacaaagaaatgataaatgtttgcaatgatggatatgctaattaccatcacctcatcagggtaattaaatatatacactatgagtattgaaacatcactatgtacccataaatatgcacaattattatgtgccaattaaaaaaataaaataaaattatgataataaaagcttcatatttgtggtgtagagttaaattgagagggtaatttattatttgaaattcttctattagaaaaatacgtaggtttaaaagtcaatgaaaaaataaacaaaacgtaatttgaaaaaataaaataacaggtaatgaaagaaataaatgaaattgaaagtaaataaattcacaaagtgaaaagttcctttgaaaaaatcagtaaagttgttacatactagtaagactaagaaaaaaggactgataaaagaagaaatatcattacagaacctctatatttaaatgataataactattatgaacaattccatactcaagaatttggcagcttaaagttctgtaaagagacaaattaccaaagcttatttaagaacaaattcataatgtgaatttttctgtatctatatgtatccagatagtctaggttttctaatttctggcctatggttgctcatagtagcctctaatgatccttacaatttcaacaaagaaattcagaagaaattgaaaaatttattgaagcagataaaaacggcaacacaacataccaaaacctatgggatacagcaaaaagcagtagtaagagggaaatktatacctataatttccaagatcaaaaaagtgaaaaacctcaaataaataacctgatgatacatctttttttaaggtcactataaattttaatctatgatataaaatattacctacagatataattgaacatcaggtatcagaaaataaaacataacaatgaaatgcaattttgtaaatacttctatggtacaagcattattttcctcagattcaaccttttaattgtgttttgtttgctttctgaaaatcacactttataaagaacacaagtagagcttgttaaaatgattgtcacagatgtactgtttactaattcaaaaaatactacattcattcgctcatatcaattttattcattaattatgaagaagaaaatataatattccatgcttgtcatgaaatagcggtttcttcttccagtctaatcagggaactaataaatgcttagttcatggcaaaacttccatttgatttacattgacttaattacctcttagggtctagcctcatcaatggagaaaaagcactttttcttgaggcaacagcacattaacagcactgaatacaaaatatggcaaattcaatggctgtcagcattgctttaggaattttgagactataaaaaaactataaccatgaataaaagaaaagggcttattaatatcttctttttgggagagtgatacattctgaaggtttcttgttattctgttgaatagcaaggacttccaaacttaagtgtcttaaggctgaaaattagttacattcctcagattttagccttattaatgaaattccaaaagtattataagatttagtatgtcttgaaattataaatttgtaacagatatttttcaaaatacatgccttcaaacaacttaaatgcaaaaatcattcattcttaataatacctagcagttcatcccttgcttcccagaagtactcatacaaacatgtgaatttaaaaaatagatttttctgttcaaaaaataaagcttctgcccttttaaaaacttgtcaggctttcatttgccaaaatgttgaaaactg

SEQ ID NO: 670581 - DNA, 1848 bp, Homo sapiens
caaatagttagcaaaggatattgaatgttcccaaaacaaagaaatgataaatgtttgcaatgatggatatgctaattaccatcacctcatcagggtaattaaatatatacactatgagtattgaaacatcactatgtacccataaatatgcacaattattatgtgccaattaaaaaaataaaataaaattatgataataaaagcttcatatttgtggtgtagagttaaattgagagggtaatttattatttgaaattcttctattagaaaaatacgtaggtttaaaagtcaatgaaaaaataaacaaaacgtaatttgaaaaaataaaataacaggtaatgaaagaaataaatgaaattgaaagtaaataaattcacaaagtgaaaagttcctttgaaaaaatcagtaaagttgttacatactagtaagactaagaaaaaaggactgataaaagaagaaatatcattacagaacctctatatttaaatgataataactattatgaacaattccatactcaagaatttggcagcttaaagttctgtaaagagacaaattaccaaagcttatttaagaacaaattcataatgtgaatttttctgtatctatatgtatccagatagtctaggttttctaatttctggcctatggttgctcatagtagcctctaatgatccttacaatttcaacaaagaaattcagaagaaattgaaaaatttattgaagcagataaaaacggcaacacaacataccaaaacctatgggatacagcaaaaagcagtagtaagagggaaatgtatacctataatttccaagatcaaaaaagtgaaaaacctcaaataaataacctgatgatacatctttttttaaggtcactataaattttaatctatgatataaaatattacctacagatataattgaacatcaggtatcagaaaataaaacataacaatgaaatgcaattttgtaaatacttctatggtacaagcattattttcctcagattcaaccttttaattgtgytttgtttgctttctgaaaatcacactttataaagaacacaagtagagcttgttaaaatgattgtcacagatgtactgtttactaattcaaaaaatactacattcattcgctcatatcaattttattcattaattatgaagaagaaaatataatattccatgcttgtcatgaaatagcggtttcttcttccagtctaatcagggaactaataaatgcttagttcatggcaaaacttccatttgatttacattgacttaattacctcttagggtctagcctcatcaatggagaaaaagcactttttcttgaggcaacagcacattaacagcactgaatacaaaatatggcaaattcaatggctgtcagcattgctttaggaattttgagactataaaaaaactataaccatgaataaaagaaaagggcttattaatatcttctttttgggagagtgatacattctgaaggtttcttgttattctgttgaatagcaaggacttccaaacttaagtgtcttaaggctgaaaattagttacattcctcagattttagccttattaatgaaattccaaaagtattataagatttagtatgtcttgaaattataaatttgtaacagatatttttcaaaatacatgccttcaaacaacttaaatgcaaaaatcattcattcttaataatacctagcagttcatcccttgcttcccagaagtactcatacaaacatgtgaatttaaaaaatagatttttctgttcaaaaaataaagcttctgcccttttaaaaacttgtcaggctttcatttgccaaaatgttgaaaactg

SEQ ID NO: 670582 - DNA, 1117 bp, Homo sapiens
ataaaaatggcagtgaacattcttatataagtctttttgtggacatatgcactcgtttctcttgtgtacatgcttaggatggaatttctgaaggtaggcatagatatagctttagtagaagctgccaaacaggtttccaatgtgcttatacaattttatgctactgccagcttgacagttcttgtagctctacatctttaccaatactctgtataacacagcatttaactttaaatagagataaaacgatggtaagatccaaagaagtgtgcatgttcctgaagaacatcccgtaaagggcctattttattcatctgtttcgggcactgaaaaccactgcatggctggatgaggaaggaggcctggtacaactcccaagaaggcatgtgtccctcgggtgggctttgtttcccagaaactctggggaaggggtggagaggcaccttctgggccagctggtctcctctggcttttcttgtaccctagggctccctccaaagagacagagaacagcctggccggggagcagtatctcctactgcgcttgctgtgagccagccactctgccttctttcaggaattacaaaatccacaggtccccggcatycttatttatgtatttattcatttatgaggcatggttttcctcagctctgttggatgggtctctgtgaagggagcttggtgggggcgagtggccgctccctggaggaggcaggcccctggtcaggatctttggggctccaggtctcataagtggggggccaggctccctagagaaacccttcttggctagggctggggagcccaccagagtgacccaatcagttctcagggcctgtgatggggccaagtggttttgagaagccagtgttcagctccatcctaaagagcactcatgcacgttgaggaggagggccggggtgcacagctctgacctgagtcagacccacctcaggacttagcccagcaggaggcccagagtcactgaccataaaacgagcagatgcctcccccgtgctgatggagatgagtcttgggcatcaactctaataatttctaactgcacccagaaatactgattcacacagcaactagtgaataatagccttttaga

SEQ ID NO: 670583 - DNA, 1117 bp, Homo sapiens
ataaaaatggcagtgaacattcttatataagtctttttgtggacatatgcactcgtttctcttgtgtacatgcttaggatggaatttctgaaggtaggcatagatatagctttagtagaagctgccaaacaggtttccaatgtgcttatacaattttatgctactgccagcttgacagttcttgtagctctacatctttaccaatactctgtataacacagcatttaactttaaatagagataaaacgatggtaagatccaaagaagtgtgcatgttcctgaagaacatcccgtaaagggcctattttattcatctgtttcgggcactgaaaaccactgcatggctggatgaggaaggaggcctggtacaactcccaagaaggcatgtgtccctcgggtgggctttgtttcccagaaactctggggaaggggtggagaggcaccttctgggccagctggtctcctctggcttttcttgtaccctagggctccctccaaagagacagagaacagcctggccggggagcagtatctcctactgcgcttgctgtgagccagccactctgccttctttcaggaattacaaaatccacaggtccccggcattcttatttatgtatttattcatttatgaggcatggttttcctcagctctgttggatgggtctctgtgaagggagcttggtgggggcgagtggccsctccctggaggaggcaggcccctggtcaggatctttggggctccaggtctcataagtggggggccaggctccctagagaaacccttcttggctagggctggggagcccaccagagtgacccaatcagttctcagggcctgtgatggggccaagtggttttgagaagccagtgttcagctccatcctaaagagcactcatgcacgttgaggaggagggccggggtgcacagctctgacctgagtcagacccacctcaggacttagcccagcaggaggcccagagtcactgaccataaaacgagcagatgcctcccccgtgctgatggagatgagtcttgggcatcaactctaataatttctaactgcacccagaaatactgattcacacagcaactagtgaataatagccttttaga

SEQ ID NO: 670584 - DNA, 1117 bp, Homo sapiens
ataaaaatggcagtgaacattcttatataagtctttttgtggacatatgcactcgtttctcttgtgtacatgcttaggatggaatttctgaaggtaggcatagatatagctttagtagaagctgccaaacaggtttccaatgtgcttatacaattttatgctactgccagcttgacagttcttgtagctctacatctttaccaatactctgtataacacagcatttaactttaaatagagataaaacgatggtaagatccaaagaagtgtgcatgttcctgaagaacatcccgtaaagggcctattttattcatctgtttcgggcactgaaaaccactgcatggctggatgaggaaggaggcctggtacaactcccaagaaggcatgtgtccctcgggtgggctttgtttcccagaaactctggggaaggggtggagaggcaccttctgggccagctggtctcctctggcttttcttgtaccctagggctccctccaaagagacagagaacagcctggccggggagcagtatctcctactgcgcttgctgtgagccagccactctgccttctttcaggaattacaaaatccacaggtccccggcattcttatttatgtatttattcatttatgaggcatggttttcctcagctctgttggatgggtctctgtgaagggagcttggtgggggcgagtggccgctccctggaggaggcaggcccctggtcaggatctttggggctccaggtctcataagtggggggccaggctccctagagaaacccttcttggctagggctggggagcccaccagagtgacccaatcagttctcagggcctgtgatggggccaagtggttttgagaagccagtgttcagctccatcctaaagagcactcatgcacgttgrggaggagggccggggtgcacagctctgacctgagtcagacccacctcaggacttagcccagcaggaggcccagagtcactgaccataaaacgagcagatgcctcccccgtgctgatggagatgagtcttgggcatcaactctaataatttctaactgcacccagaaatactgattcacacagcaactagtgaataatagccttttaga

SEQ ID NO: 670585 - DNA, 1477 bp, Homo sapiens
actagattctcttgaaaagacagtaacagaaaccttcagaggtggagtgcgagaaaagcccacccttccgccagcttgtgatttagaaaggtgcattcactcagcaaacgttgagcacatacgggccagggacggttcttcacagcgggaatagaggtcagaaaaggcagacaggagcccttggccccgaggtttccattctagtgggcctttaactctcgggctctcagagctaacagaaacctctgatactctctaactctacctcaggaaacgcaagcccaagaaggagagtttacagcaggtcctggacgagggattaacataaaaacacaatgacaaatctcatttaaacttcacaaatgtaaggaaaacaataccactcgtattttacggatgtgaaaagagaggcccaaagagctcaagcaatttgcgctaaatcatatccctagcagatggaggggtaggattcaaacccagaattcttagccagtacctggcagttcttccacaatcttaacaattaccctccaccaccccttgggccctctgtccccaggagcccggccagccaagactcacatcctcaggcgagtggcaaccaccagaagtggttgtctcagggttagtgccattatttattttcttctttttggtgtcgcttgctgctgtaccaacactagggttggtctggggatgatggtctgtcaactgtggaaaggaagagcagtgatactcatgagaactacaagctcctacagtcacatcctgctttacagtttatactaaatactcttatagaccatctgatttaatgccaccaactgtaggaaatgttgtcacaatcacttagtgactgagagagattgataccatggctgaaaaaaaaggcagtaatggaacttaaactcagtcttctgactctgagctctgggattttgccctaaatcagcagctgccagggaccaaaaccagaggcagaggtagaaaagcaaatattaagtaggcaggaactgtgcactatgtggtttagggttattcaccctcacacgtctgttagtgttaaaaagtacaccagtacctctcaaacctttacatcaatgtctcctcatggcagaaggcagcctttctgctaaatctgggaatttaacagaaagaggacaacccaagcctcatttcagagagaagtcttgtatacgcttataaatctatgtgactttcatccctaagtacattaatgttttgtctctcaatagaatcaagggaaactgatgcttsagaaagatgccccatatttatcctgtggcactcaaagtaccccaggttgagatgagatgaggaagactcaagctaagttcagtttcccaagatctgttccacagaagataagcagatctcactccagaaccagtgactgaggggcactctggtcccagaacaatggagaattcaaatctgaggtgcagaactgagaaaa

SEQ ID NO: 670586 - DNA, 699 bp, Homo sapiens
gagatattcttgaggtatctaaaatacatactcttcctatcaaaatcaataaatagatggatgtaagtaagataaagtcagggcaactgattttgcatgtgagtgtacacacagacacatatccaggttttctccatctgttctcagttgctgaattattagactcagctgaccgcttgactgtgtttaatctgataaacagactcttaacaagaagaacaatgttttaaaaactggactgttcctcctacttctcagcatgcatcagccactctctttccccatcctatctcctgccaaattggtctctacttatctgttccacttggagacactatttgatgttgttgtaaatgacwtaaatgaatattcactctacctgctttcatattaattcagttttcataggatggtctctgtgggatcaagcaaaaggacttagtggaatatctcttatgactccataaagtaaagaatgtggtgagtttagcagagtgcaccttcctttactaaatgtgaatgatgtgtcagtatagggggccagagtgaaaagtcctaacatatgcttgtttgggcagccaacaattggtcacattgcacatttcatgttacaaaggagcctcatggtagtataaatgagggtcaggaaaagacacttaactgtgctctgggctttaaaatggagccagggcaagaatt

SEQ ID NO: 670587 - DNA, 619 bp, Homo sapiens
agcccttgcacttataaagaaaccttcctcaaaaaggaagtgtacaaartgatgacgctacaatagtttatttcaacatactaaaccaaaaaaataagaaaacaactaatttatttggaaaaaaaaaattctgtacatgcaaggttggcttgattgaccataatgtatttcagcaaaaaaaaattagatacaccacacataataaagctttctatgtacacagtaaatagtaaataactttgctaagtgaccagacatttgaaaaaatgaaaacacagttgtaaaacaaagtacataagaatattgtgaccttatttaactgtacaaaaagcaatcattctctccagccttccattttcacttacattttctttaacaggattaagccccaaattgaagggattaaatcctttcttcctaatgccttgggaatatcagattctctttcaaatctttaactgtttacaaaggagcagagcacttaaagggaaatggtgggaaagaaagagatttcaattctgtgccactcatctagattctgctggggaagatttcccaagtccactatcaattcagtcaacttggtttaaaaacataatacctgattgtaggactaatt

SEQ ID NO: 670588 - DNA, 1391 bp, Homo sapiens
aggggaatttttttactggttcagaattccttttctcttaattttaatatttttcctttaattctcacccttaattattcaatttaaaaaaagaagcctgcttttttaacggactttattctcctttaattttttatgttctccttgaaaaccttaagctttttacccagagtgcttaattattcattcactcactcattcattcattcactcaacaaatatatattaactaccaaccataacgaattaggcatggtctttctagtttacctggtttgactgctaagagctttagcagaggtacagagaaaaagctgttagatgtcataagaggtagttaccatttcccaatgggggactgaagcaaggcaacatacaggaatttagcatttggactcagattgagagacaggttttggatttgtgttgtaggtggattaaaaaaaaagtttgaacacagtggaaacaaaaaaggccagaaggaggaggttagcaagaaaatgctcttaactgtgagcaagtggattttggaatagccaaacataattgagatgatgtaggtcacaatgattttaagaattgaatgggagtggaataaaatttaccccacaattacatactttgcttcttcattgcttgacggttatcatcaaactaactattcttcaattcctttggcaaggagtggaatctggactctggcaccagagggtcgatttccttccagttctcctttctattttttttttgcttttgtttctttactttgaactcctcacagtcttggaaaaaagagggcttgcagagactttttcattttgtttttatattgcccaaattgtactcacatggatagagtagtaccatttaattgtttccctctaaatatgcacagttcccagaggtattttaatcagatagctttatgccctgttgtttgcagtttccaactttttgttttctattactttctgtttatttagaatgttgctgcctcttcttttcttctctccattttctccctgtcttcatttgctcaccacccatcttggatcaacctctaatatgaatattcaaaatagttgagtaagtcaagttctgtctctgaaaatctcttgacyaaaaaaacagattaaaaaataatatcactgacccttttagaggctgagctctgtttcagaaaacattaaggaatgccttcaacattttctcttgtttagttgcatcatttacttgagtccactgggatgattggcattcacgatgtgtgggctggagaccatcaaaaggaaatgttttgtgtggaaatagaatttactctgtgtgtggcagtttgaataagttccctttctctttggctaaagcatctttaccaagcacaatctaatgca

SEQ ID NO: 670589 - DNA, 595 bp, Homo sapiens
ttttaaatcataagaaaaactttgtttgatttttttaaaagataattccccaaatgttcaaggaggcaaaagcctaatacaatctagaatactgaaacttcattagttgccattacagagaacaatgaaaccatgaaacctaaccactcatgtgacaccttcagtaacagttttattttcgtaaatgttagtgcagataatcttgtcatttaacaaaacatagaaataaaaatatgttttcttttgactgaggcagcttaaatattgwagaaagagcactggactaggagtcagaaatcctagatataaaacttgcgtaagccctgtagtttctgtcaatttttgggaaaataatatctctagtctgaattttttctctatctagttgaagtattaaacttgatcatatatgggtccctttgaatattcaattctgtatttttaagcctatatgtcttacagttaccacctctgtgattcttcaattatgctgactcattctccaaatatctatgtacaatatgcacactagttgtgtatcaggaattttaccctatagcaatggcttgcttgccaaataaatcttgttgactca

SEQ ID NO: 670590 - DNA, 595 bp, Homo sapiens
ttttaaatcataagaaaaactttgtttgatttttttaaaagataattccccaaatgttcaaggaggcaaaagcctaatacaatctagaatactgaaacttcattagttgccattacagagaacaatgaaaccatgaaacctaaccactcatgtgacaccttcagtaacagttttattttcgtaaatgttagtgcagataatcttgtcatttaacaaaacatagaaataaaaatatgttttcttttgactgaggcagcttaaatattgaagaaagagcactggactaggagtcagaaatcctagatataaaacttgcgtaagccctgtagtttctgtcaatttttgggaaaataatatctctagtctgaattttttctctatmtagttgaagtattaaacttgatcatatatgggtccctttgaatattcaattctgtatttttaagcctatatgtcttacagttaccacctctgtgattcttcaattatgctgactcattctccaaatatctatgtacaatatgcacactagttgtgtatcaggaattttaccctatagcaatggcttgcttgccaaataaatcttgttgactca

SEQ ID NO: 670591 - DNA, 2614 bp, Homo sapiens
  misc_feature 1646: n = A,T,C or G
gcatcttctcatttgggcctctcaactcaccctagaagttagtaccattgtgcccatttgagaggtgcgaacactgaggctcagcaactgacttgtcagggtcatatgaccagtcagcagtagcatctcgattcaaacccagattgtcgtcactcagattcagactctcaactctacacagttctgccttcccaagaccagccacctctcttaaaagtagatttttaaaagtcaatcctctgatttctttctaagtatacatatttttttcctatcattcataaagcatttgtttcaagcaaaaaaactgaaaacctcgctgttcaagtagaaaatccagctatggctctataattctgaaattcccgttccaggaaatgtatactgttgactttttcaaaagattagtgagctgtgagccctctcctgagaggattacatcttacttcagggcgaccaggtggctcctgatgttctgaaatactcgaacttggccacacactctggaattttaaattagttaccagtatttactaacaaaggaaaacaacccatgtatataaaacacatacacccgcacacaaacaccctttattggttgccagataatgatttgtctgaagtgtgttgtctgagttggtgtgcgaatttcgtattataaaagcaaatgacaatagcattccaacagggacctaggccaaagtcaagaggaaagaatatccaaacgtagcattagcattccagaagtcaaatgactattattatgtcagtggggcaaaagcctatgcccattgagctgtttgtacatgacgcagtcatattgcactaacagacatttcactaataatgaaaaccagtaggaggctgagcgtaaagctggatgttatgactcgcgactgtagattacctgaatccagtaaatttactgtctcccacatctattgttctttttacaatattgttccacctctgcctcaaacaatacaatggaaaaggcgttatggatggcayatgtacaaagagtcaaacacctgccctatatttccaactttcaccttgcttcgcaaattatagcacaatgttacagcaacagcaaattttagtcttacagctgcccacttctgctgtgcaaaggacaagattaggaggattttggaaagaaagcaaaaaaaaaaatccacctccctagggacataataaatgcatttgtcattgtgcccctgccacactaaatgtgcataacatacactgccttaattttatgaactaattatgggatcaaagtgacaaaaattccaagtctctcttgttcatgaataatgaagtgggacagtataagtgagaggatggcctgagaaccaaggcttcccaggtgccacatatcgtcctaaacaactgaaatgctgcccaagggggcatcgggattagaggttatctgcagctggcttctgaacaagctctttcagcaagggaaatggctgggtatgctgggatctcctgtggcataaggacctcactctgggctgtggggcagatgtggcaaccccaattccttgggtgatgggcttctctgggcatctccccccatgctcagggagaagggagctgatctctaggggaagggtgcatatcttgacagaggccgncgccactgcagccttcctcctgctctgaagtgctctcatcaggggtcagctggggatcatttgcctacatgccaatgcctggcactcacccattcatgcacttgctcattcaccaagtacacatgtatgtatgcagccaggccccacagaagctcaatgaagattacctgaagagcttgtatttgtatattgcaactaggaatgacaacaacaactcactggcaggagccaatgtgccaggcacagtgctaagtgctttgcatattttatttcatttaaccttcatcacagcctataagatagaaggtactggtctcctttctcatttaagggtataggttcagaaatgttaaactacaaggcaacgctgaagaggaaatgtcagatctgggactcaaatccaagcccatctgactccaaggctatgccctctcagctgttaacccaggctttaattgtttctgaattaatatcccagatgtttctcatttaatcctcccaaacacctgtgagatcgaaaattcaggtattatgcacattcttttcaaataggaactaaggtcagaaaggatcacgcaaagacaagaaaatatagcactgtggccagatgtgtagaccctgctcagtcaccttggggaggctgcttcagttctgccagcctcagcttcgcaatctgtaaaatggggtgaatggtagtccctacctcattaggttgctgggagaatttaatgggatgtcataagtaaagggcttatcacagtacctggaatgcagaaactacagcattgagcgttacctgtttttactattagattaagcaatttgcccagggccacggtggaaatgcacacagaaaagataaaaagagagatgccactgcttaaggccaatgacccttcctttaacaacacagcatctccaaagatgtgaatctttgaaaatgctccaagctcttgacctgttactca

SEQ ID NO: 670592 - DNA, 2614 bp, Homo sapiens
  misc_feature 1646: n = A,T,C or G
gcatcttctcatttgggcctctcaactcaccctagaagttagtaccattgtgcccatttgagaggtgcgaacactgaggctcagcaactgacttgtcagggtcatatgaccagtcagcagtagcatctcgattcaaacccagattgtcgtcactcagattcagactctcaactctacacagttctgccttcccaagaccagccacctctcttaaaagtagatttttaaaagtcaatcctctgatttctttctaagtatacatatttttttcctatcattcataaagcatttgtttcaagcaaaaaaactgaaaacctcgctgttcaagtagaaaatccagctatggctctataattctgaaattcccgttccaggaaatgtatactgttgactttttcaaaagattagtgagctgtgagccctctcctgagaggattacatcttacttcagggcgaccaggtggctcctgatgttctgaaatactcgaacttggccacacactctggaattttaaattagttaccagtatttactaacaaaggaaaacaacccatgtatataaaacacatacacccgcacacaaacaccctttattggttgccagataatgatttgtctgaagtgtgttgtctgagttggtgtgcgaatttcgtattataaaagcaaatgacaatagcattccaacagggacctaggccaaagtcaagaggaaagaatatccaaacgtagcattagcattccagaagtcaaatgactattattatgtcagtggggcaaaagcctatgcccattgagctgtttgtacatgacgcagtcatattgcactaacagacatttcactaataatgaaaaccagtaggaggctgagcgtaaagctggatgttatgactcgcgactgtagattacctgaatccagtaaatttactgtctcccacatctattgttctttttacaatattgttccacctctgcctcaaacaatacaatggaaaaggcgttatggatggcacatgtacaaagagtcaaacacctgccctatatttccaactttcaccttgcttcgcaaattayagcacaatgttacagcaacagcaaattttagtcttacagctgcccacttctgctgtgcaaaggacaagattaggaggattttggaaagaaagcaaaaaaaaaaatccacctccctagggacataataaatgcatttgtcattgtgcccctgccacactaaatgtgcataacatacactgccttaattttatgaactaattatgggatcaaagtgacaaaaattccaagtctctcttgttcatgaataatgaagtgggacagtataagtgagaggatggcctgagaaccaaggcttcccaggtgccacatatcgtcctaaacaactgaaatgctgcccaagggggcatcgggattagaggttatctgcagctggcttctgaacaagctctttcagcaagggaaatggctgggtatgctgggatctcctgtggcataaggacctcactctgggctgtggggcagatgtggcaaccccaattccttgggtgatgggcttctctgggcatctccccccatgctcagggagaagggagctgatctctaggggaagggtgcatatcttgacagaggccgncgccactgcagccttcctcctgctctgaagtgctctcatcaggggtcagctggggatcatttgcctacatgccaatgcctggcactcacccattcatgcacttgctcattcaccaagtacacatgtatgtatgcagccaggccccacagaagctcaatgaagattacctgaagagcttgtatttgtatattgcaactaggaatgacaacaacaactcactggcaggagccaatgtgccaggcacagtgctaagtgctttgcatattttatttcatttaaccttcatcacagcctataagatagaaggtactggtctcctttctcatttaagggtataggttcagaaatgttaaactacaaggcaacgctgaagaggaaatgtcagatctgggactcaaatccaagcccatctgactccaaggctatgccctctcagctgttaacccaggctttaattgtttctgaattaatatcccagatgtttctcatttaatcctcccaaacacctgtgagatcgaaaattcaggtattatgcacattcttttcaaataggaactaaggtcagaaaggatcacgcaaagacaagaaaatatagcactgtggccagatgtgtagaccctgctcagtcaccttggggaggctgcttcagttctgccagcctcagcttcgcaatctgtaaaatggggtgaatggtagtccctacctcattaggttgctgggagaatttaatgggatgtcataagtaaagggcttatcacagtacctggaatgcagaaactacagcattgagcgttacctgtttttactattagattaagcaatttgcccagggccacggtggaaatgcacacagaaaagataaaaagagagatgccactgcttaaggccaatgacccttcctttaacaacacagcatctccaaagatgtgaatctttgaaaatgctccaagctcttgacctgttactca

SEQ ID NO: 670593 - DNA, 2614 bp, Homo sapiens
  misc_feature 1646: n = A,T,C or G
gcatcttctcatttgggcctctcaactcaccctagaagttagtaccattgtgcccatttgagaggtgcgaacactgaggctcagcaactgacttgtcagggtcatatgaccagtcagcagtagcatctcgattcaaacccagattgtcgtcactcagattcagactctcaactctacacagttctgccttcccaagaccagccacctctcttaaaagtagatttttaaaagtcaatcctctgatttctttctaagtatacatatttttttcctatcattcataaagcatttgtttcaagcaaaaaaactgaaaacctcgctgttcaagtagaaaatccagctatggctctataattctgaaattcccgttccaggaaatgtatactgttgactttttcaaaagattagtgagctgtgagccctctcctgagaggattacatcttacttcagggcgaccaggtggctcctgatgttctgaaatactcgaacttggccacacactctggaattttaaattagttaccagtatttactaacaaaggaaaacaacccatgtatataaaacacatacacccgcacacaaacaccctttattggttgccagataatgatttgtctgaagtgtgttgtctgagttggtgtgcgaatttcgtattataaaagcaaatgacaatagcattccaacagggacctaggccaaagtcaagaggaaagaatatccaaacgtagcattagcattccagaagtcaaatgactattattatgtcagtggggcaaaagcctatgcccattgagctgtttgtacatgacgcagtcatattgcactaacagacatttcactaataatgaaaaccagtaggaggctgagcgtaaagctggatgttatgactcgcgactgtagattacctgaatccagtaaatttactgtctcccacatctattgttctttttacaatattgttccacctctgcctcaaacaatacaatggaaaaggcgttatggatggcacatgtacaaagagtcaaacacctgccctatatttccaactttcaccttgcttcgcaaattatagcacaatgttacagcaacagcaaattttagtcttacagctgcccacttctgctgtgcaaaggacaagattaggaggattttggaaagaaagcaaaaaaaaaaatccacctccctagggacataataaatgcatttgtcattgtgcccctgccacactaaatgtgcataacatacactgccttaattttatgaactaattatgggatcaaagtgacaaaaattccaagtctctcttgttcatgaataatgaagtgggacagtataagtgagaggatggcctgagaaccaaggcttcccaggtgccacatatcgtcctaaacaactgaaatgctgcccaagggggcatcgggattagaggttatctgcagctggcttctgaacaagctctttcagcaagggaaatggctgggtatgctgggatctcctgtggcataaggacctcactctgggctgtggggcagatgtggcaaccccaattccttgggtgatgggcttctctgggcatctccccccatgctcagggagaagggagctgatctctaggggaagggtgcatatcttgacagaggccgncgccactgcagccttcctcctgctctgaagtgctctcatcaggggtcagctggggatcatttgcctacatgccaatgcctggcactcacccattcatgcacttgctcattcaccaagtacacatgtatgtatgcagccaggccccacagaagctcaatgaagattacctgaagagcttgtatttgtatattgcaactaggaatgacaacaacaactcactggcaggagccaatgtgccaggcacagtgctaagtgctttgcatattttatttcatttaaccttcatcacagcctataagatagaaggtactggtctcctttctcatttaagggtataggttcagaaatgttaaactacaaggcaacgctgaagaggaaatgtcagatctgggactcaaatccaagcccatctgactccaaggctatgccctctcagctgttaacccaggctttaattgtttctgaattaatatcccagatgtttctcatttaatcctcccaaacacctgtgagatcgaaaattcaggtattatgcacattcttttcaaataggaactaaggtcagaaaggatcacgcaaagacaagaaaatatagcactgtggccagatgtgtagaccctgctcagtcaccttggggaggctgcttcagttctgcmagcctcagcttcgcaatctgtaaaatggggtgaatggtagtccctacctcattaggttgctgggagaatttaatgggatgtcataagtaaagggcttatcacagtacctggaatgcagaaactacagcattgagcgttacctgtttttactattagattaagcaatttgcccagggccacggtggaaatgcacacagaaaagataaaaagagagatgccactgcttaaggccaatgacccttcctttaacaacacagcatctccaaagatgtgaatctttgaaaatgctccaagctcttgacctgttactca

SEQ ID NO: 670594 - DNA, 2614 bp, Homo sapiens
  misc_feature 1646: n = A,T,C or G
gcatcttctcatttgggcctctcaactcaccctagaagttagtaccattgtgcccatttgagaggtgcgaacactgaggctcagcaactgacttgtcagggtcatatgaccagtcagcagtagcatctcgattcaaacccagattgtcgtcactcagattcagactctcaactctacacagttctgccttcccaagaccagccacctctcttaaaagtagatttttaaaagtcaatcctctgatttctttctaagtatacatatttttttcctatcattcataaagcatttgtttcaagcaaaaaaactgaaaacctcgctgttcaagtagaaaatccagctatggctctataattctgaaattcccgttccaggaaatgtatactgttgactttttcaaaagattagtgagctgtgagccctctcctgagaggattacatcttacttcagggcgaccaggtggctcctgatgttctgaaatactcgaacttggccacacactctggaattttaaattagttaccagtatttactaacaaaggaaaacaacccatgtatataaaacacatacacccgcacacaaacaccctttattggttgccagataatgatttgtctgaagtgtgttgtctgagttggtgtgcgaatttcgtattataaaagcaaatgacaatagcattccaacagggacctaggccaaagtcaagaggaaagaatatccaaacgtagcattagcattccagaagtcaaatgactattattatgtcagtggggcaaaagcctatgcccattgagctgtttgtacatgacgcagtcatattgcactaacagacatttcactaataatgaaaaccagtaggaggctgagcgtaaagctggatgttatgactcgcgactgtagattacctgaatccagtaaatttactgtctcccacatctattgttctttttacaatattgttccacctctgcctcaaacaatacaatggaaaaggcgttatggatggcacatgtacaaagagtcaaacacctgccctatatttccaactttcaccttgcttcgcaaattatagcacaatgttacagcaacagcaaattttagtcttacagctgcccacttctgctgtgcaaaggacaagattaggaggattttggaaagaaagcaaaaaaaaaaatccacctccctagggacataataaatgcatttgtcattgtgcccctgccacactaaatgtgcataacatacactgccttaattttatgaactaattatgggatcaaagtgacaaaaattccaagtctctcttgttcatgaataatgaagtgggacagtataagtgagaggatggcctgagaaccaaggcttcccaggtgccacatatcgtcctaaacaactgaaatgctgcccaagggggcatcgggattagaggttatctgcagctggcttctgaacaagctctttcagcaagggaaatggctgggtatgctgggatctcctgtggcataaggacctcactctgggctgtggggcagatgtggcaaccccaattccttgggtgatgggcttctctgggcatctccccccatgctcagggagaagggagctgatctctaggggaagggtgcatatcttgacagaggccgncgccactgcagccttcctcctgctctgaagtgctctcatcaggggtcagctggggatcatttgcctacatgccaatgcctggcactcacccattcatgcacttgctcattcaccaagtacacatgtatgtatgcagccaggccccacagaagctcaatgaagattacctgaagagcttgtatttgtatattgcaactaggaatgacaacaacaactcactggcaggagccaatgtgccaggcacagtgctaagtgctttgcatattttatttcatttaaccttcatcacagcctataagatagaaggtactggtctcctttctcatttaagggtataggttcagaaatgttaaactacaaggcaacgctgaagaggaaatgtcagatctgggactcaaatccaagcccatctgactccaaggctatgccctctcagctgttaacccaggctttaattgtttctgaattaatatcccagatgtttctcatttaatcctcccaaacacctgtgagatcgaaaattcaggtattatgcacattcttttcaaataggaactaaggtcagaaaggatcacgcaaagacaagaaaatatagcactgtggccagatgtgtagaccctgctcagtcaccttggggaggctgcttcagttctgccagcctcrgcttcgcaatctgtaaaatggggtgaatggtagtccctacctcattaggttgctgggagaatttaatgggatgtcataagtaaagggcttatcacagtacctggaatgcagaaactacagcattgagcgttacctgtttttactattagattaagcaatttgcccagggccacggtggaaatgcacacagaaaagataaaaagagagatgccactgcttaaggccaatgacccttcctttaacaacacagcatctccaaagatgtgaatctttgaaaatgctccaagctcttgacctgttactca

SEQ ID NO: 670595 - DNA, 2614 bp, Homo sapiens
  misc_feature 1646: n = A,T,C or G
gcatcttctcatttgggcctctcaactcaccctagaagttagtaccattgtgcccatttgagaggtgcgaacactgaggctcagcaactgacttgtcagggtcatatgaccagtcagcagtagcatctcgattcaaacccagattgtcgtcactcagattcagactctcaactctacacagttctgccttcccaagaccagccacctctcttaaaagtagatttttaaaagtcaatcctctgatttctttctaagtatacatatttttttcctatcattcataaagcatttgtttcaagcaaaaaaactgaaaacctcgctgttcaagtagaaaatccagctatggctctataattctgaaattcccgttccaggaaatgtatactgttgactttttcaaaagattagtgagctgtgagccctctcctgagaggattacatcttacttcagggcgaccaggtggctcctgatgttctgaaatactcgaacttggccacacactctggaattttaaattagttaccagtatttactaacaaaggaaaacaacccatgtatataaaacacatacacccgcacacaaacaccctttattggttgccagataatgatttgtctgaagtgtgttgtctgagttggtgtgcgaatttcgtattataaaagcaaatgacaatagcattccaacagggacctaggccaaagtcaagaggaaagaatatccaaacgtagcattagcattccagaagtcaaatgactattattatgtcagtggggcaaaagcctatgcccattgagctgtttgtacatgacgcagtcatattgcactaacagacatttcactaataatgaaaaccagtaggaggctgagcgtaaagctggatgttatgactcgcgactgtagattacctgaatccagtaaatttactgtctcccacatctattgttctttttacaatattgttccacctctgcctcaaacaatacaatggaaaaggcgttatggatggcacatgtacaaagagtcaaacacctgccctatatttccaactttcaccttgcttcgcaaattatagcacaatgttacagcaacagcaaattttagtcttacagctgcccacttctgctgtgcaaaggacaagattaggaggattttggaaagaaagcaaaaaaaaaaatccacctccctagggacataataaatgcatttgtcattgtgcccctgccacactaaatgtgcataacatacactgccttaattttatgaactaattatgggatcaaagtgacaaaaattccaagtctctcttgttcatgaataatgaagtgggacagtataagtgagaggatggcctgagaaccaaggcttcccaggtgccacatatcgtcctaaacaactgaaatgctgcccaagggggcatcgggattagaggttatctgcagctggcttctgaacaagctctttcagcaagggaaatggctgggtatgctgggatctcctgtggcataaggacctcactctgggctgtggggcagatgtggcaaccccaattccttgggtgatgggcttctctgggcatctccccccatgctcagggagaagggagctgatctctaggggaagggtgcatatcttgacagaggccgncgccactgcagccttcctcctgctctgaagtgctctcatcaggggtcagctggggatcatttgcctacatgccaatgcctggcactcacccattcatgcacttgctcattcaccaagtacacatgtatgtatgcagccaggccccacagaagctcaatgaagattacctgaagagcttgtatttgtatattgcaactaggaatgacaacaacaactcactggcaggagccaatgtgccaggcacagtgctaagtgctttgcatattttatttcatttaaccttcatcacagcctataagatagaaggtactggtctcctttctcatttaagggtataggttcagaaatgttaaactacaaggcaacgctgaagaggaaatgtcagatctgggactcaaatccaagcccatctgactccaaggctatgccctctcagctgttaacccaggctttaattgtttctgaattaatatcccagatgtttctcatttaatcctcccaaacacctgtgagatcgaaaattcaggtattatgcacattcttttcaaataggaactaaggtcagaaaggatcacgcaaagacaagaaaatatagcactgtggccagatgtgtagaccctgctcagtcaccttggggaggctgcttcagttctgccagcctcagcttcgcaatctgtaaaatggggtgaatggtagtccctacctcattaggttgctgggagaatttaatgggatgtcataagtaaagggcttatcacagtacctggaatgcagaaactacagcattgagygttacctgtttttactattagattaagcaatttgcccagggccacggtggaaatgcacacagaaaagataaaaagagagatgccactgcttaaggccaatgacccttcctttaacaacacagcatctccaaagatgtgaatctttgaaaatgctccaagctcttgacctgttactca

SEQ ID NO: 670596 - DNA, 1710 bp, Homo sapiens
tttctctgaaaataaagttttcctattttattgctaagtaaatgaccactcctaggtcaaaatgctgatacccaagatttaaaactggttgtagaatttgtatttttttktgtgtgtgagaagtgtcaaaagggtcttttgatagtactaaatttttatgtagttgacttttaaatacagttattaaaattttgccagtttggcatattctatgtcataactccatttacttcttatgctaaagatgatcattcactagcactaggtagcctcaccaaatgacttaactatacggtataatgtagaggattattgtctacagtaggaagctactaatgttacaatagttcggtgttttaagtttttttagtacagtactctaaactacacagccatctaattttcccattttccttttctcatcaaaaagcttaatcaattgtctttattatattcttataaataccctcaggaaaggtgagcaatcatgaaatagaaaaaggagccagagaaggaggaaagaggaaaggaagagaaatataataaagaggaggggaaaatcaaaaatggaagaagggaaagatgaaggaagacagagaaggggggtcagagggaatggggaaaggaaagaagaagaaaagaaagtaagcaaaggaggaggtgcaaatggaggtaaaggaaggatggaggaaaagaaggcagttgggcaggaaggaagaaaagaaggaaagaaggaaaaggaaattgcacgagtgttgcttgttaatgctttatattaaaatgaagaaaatattacctataagctactcaaaaatgaaagttgatttgaaaaaaatcaaaggggcatggataatatatatctgaaaagcatatttataataaatagaaacactcaatatacattagaatgacttaagtagcacacatagatgagagaaatatataaagattcacagcagaaaataatgataagtagaagcggaaaaaagcattgggaattttatttgctggattgttggtttcatgatacaaaacactgggaataatgttgtgggactgacgatggggattcatctttaaagctcttgttgtaattttgtgtacataaaaatgaatttgattatggaacaaagaatttcatgactaaattaagagataaggctcttttctgtcagaatatacttgcatcattactttaatctttttttatatttttgacaaaaacaaagataatataccaatggtagaagtttacatctataaacagtgtaacaattgataagttatttacttggctgttgaaaataatctttcagaagacaaataaacagctgacaaataaaactgctaatctagacaacaatgtggcaaatagaaaatccttggaagtaatctaagcgccaagaaacatgaaaaaaagcatgtaaatttgaaagtcgtaataaataaggaacactgaacataaatggtcagggccttagactagtaatctaaaaattgtcatttcacacattttgtgttgtcatttttatcatcaatttaaataactgctacttaatgtgtcaacttacaaaaatgaagagatttaaaagtgtaataagagtactttagggagtcattttatttctaataatttgatactatatatttagttgctatttatttgatgactatatgtattttatctcatatatttagtttttgtctgtt

SEQ ID NO: 670597 - DNA, 1710 bp, Homo sapiens
tttctctgaaaataaagttttcctattttattgctaagtaaatgaccactcctaggtcaaaatgctgatacccaagatttaaaactggttgtagaatttgtatttttttttgtgtgtgagaagtgtcaaaagggtcttttgatagtactaaatttttatgtagttgacttttaaatacagttattaaaattttgccagtttggcatattctatgtcataactccatttacttcttatgctaaagatgatcattcactagcactaggtagcctcaccaaatgacttaactatacggtataatgtagaggattattgtctacagtaggaagctactaatgttacaatagttcggtgttttaagtttttttagtacagtactctaaactacacagccatctaattttcccattttccttttctcatcaaaaagcttaatcaattgtctttattatattcttataaataccctcaggaaaggtgagcaatcatgaaatagaaaaaggagccagagaaggaggaaagaggaaaggaagagaaatataataaagaggaggggaaaatcaaaaatggaagaagggaaagatgaaggaagacagagaaggggggtcagagggaatggggaaaggaaagaagaagaaaagaaagkaagcaaaggaggaggtgcaaatggaggtaaaggaaggatggaggaaaagaaggcagttgggcaggaaggaagaaaagaaggaaagaaggaaaaggaaattgcacgagtgttgcttgttaatgctttatattaaaatgaagaaaatattacctataagctactcaaaaatgaaagttgatttgaaaaaaatcaaaggggcatggataatatatatctgaaaagcatatttataataaatagaaacactcaatatacattagaatgacttaagtagcacacatagatgagagaaatatataaagattcacagcagaaaataatgataagtagaagcggaaaaaagcattgggaattttatttgctggattgttggtttcatgatacaaaacactgggaataatgttgtgggactgacgatggggattcatctttaaagctcttgttgtaattttgtgtacataaaaatgaatttgattatggaacaaagaatttcatgactaaattaagagataaggctcttttctgtcagaatatacttgcatcattactttaatctttttttatatttttgacaaaaacaaagataatataccaatggtagaagtttacatctataaacagtgtaacaattgataagttatttacttggctgttgaaaataatctttcagaagacaaataaacagctgacaaataaaactgctaatctagacaacaatgtggcaaatagaaaatccttggaagtaatctaagcgccaagaaacatgaaaaaaagcatgtaaatttgaaagtcgtaataaataaggaacactgaacataaatggtcagggccttagactagtaatctaaaaattgtcatttcacacattttgtgttgtcatttttatcatcaatttaaataactgctacttaatgtgtcaacttacaaaaatgaagagatttaaaagtgtaataagagtactttagggagtcattttatttctaataatttgatactatatatttagttgctatttatttgatgactatatgtattttatctcatatatttagtttttgtctgtt

SEQ ID NO: 670598 - DNA, 1710 bp, Homo sapiens
tttctctgaaaataaagttttcctattttattgctaagtaaatgaccactcctaggtcaaaatgctgatacccaagatttaaaactggttgtagaatttgtatttttttttgtgtgtgagaagtgtcaaaagggtcttttgatagtactaaatttttatgtagttgacttttaaatacagttattaaaattttgccagtttggcatattctatgtcataactccatttacttcttatgctaaagatgatcattcactagcactaggtagcctcaccaaatgacttaactatacggtataatgtagaggattattgtctacagtaggaagctactaatgttacaatagttcggtgttttaagtttttttagtacagtactctaaactacacagccatctaattttcccattttccttttctcatcaaaaagcttaatcaattgtctttattatattcttataaataccctcaggaaaggtgagcaatcatgaaatagaaaaaggagccagagaaggaggaaagaggaaaggaagagaaatataataaagaggaggggaaaatcaaaaatggaagaagggaaagatgaaggaagacagagaaggggggtcagagggaatggggaaaggaaagaagaagaaaagaaagtaagcaaaggaggaggtgcaaatggaggtaaaggaaggatggaggaaaagaaggcagttgggcaggaaggaagaaaagaaggaaagaaggaaaaggaaattgcacgagtgttgcttgttaatgctttatattaaaatgaagaaaatattacctataagctactcaaaaatgaaagttgatttgaaaaaaatcaaaggggcatggataatatatatctgaaaagcatatttataataaatagaaacactcaatatacattagaatgacttaagtagcacacatagatgagagaaatatataaagattcacagcagaaaataatgataagtagaagcggaaaaaagcattgggaattttatttgctggattgttggtttcatgatacaaaacactgggaataatgttgtgggactgacgatggggattcatctttaaagctcttgttgtaattttgtgtacataaaaatgaatttgattatggaacaaagaatttcatgactaaattaagagataaggctcttttctgtcagaatatacttgcatcattactttaawctttttttatatttttgacaaaaacaaagataatataccaatggtagaagtttacatctataaacagtgtaacaattgataagttatttacttggctgttgaaaataatctttcagaagacaaataaacagctgacaaataaaactgctaatctagacaacaatgtggcaaatagaaaatccttggaagtaatctaagcgccaagaaacatgaaaaaaagcatgtaaatttgaaagtcgtaataaataaggaacactgaacataaatggtcagggccttagactagtaatctaaaaattgtcatttcacacattttgtgttgtcatttttatcatcaatttaaataactgctacttaatgtgtcaacttacaaaaatgaagagatttaaaagtgtaataagagtactttagggagtcattttatttctaataatttgatactatatatttagttgctatttatttgatgactatatgtattttatctcatatatttagtttttgtctgtt

SEQ ID NO: 670599 - DNA, 2023 bp, Homo sapiens
attgcctgatgctgaggtttggggtatgaatgattctgtcatccgggtactgagcatagtatccaaaggactgccacgttcttagtatttcttattactttaaaaattctgtactcaaatgctgatctctagctccagatttcaggagtacttttgtttggctgcataaagacaagactatgccaggaatagattagatgctattacccattttggaaattcgtataccagatatattttcttgatgctcatgtgtaacttccattagtgttaatgagagttgcactcatgcatggtgtggagaatagatccattacctctaaagggcagtttccgttttaatatgttgctcaacttttattacatgtttcctttttgtttatattacagactcactcctttatttatagaaaggggtatataactgcaggattaaacacctttgctggaaatttcttcagaayagtttttaagctatgatggtgtggaactgtcacaactactttttgaagtctctcttcttgtaaaactgttaacattctggatgcatttggatccaataaaataatttagatttaaattagacaatcactgcagtagttactgaatcaattgttcatattcaccagtattttcaaatgtacaaaaagtagtttccccagcaacttaggctgatgtttgaatagaagggaaaataagctattcattaaaacttaggtctttctataatgttgggccaagttgtatagtcacaaaatattttggatttttattttattttattttattttatttttatttatttattttattttgacagggtctggctctgttacccaggctggagtgcagtggtgtgatcttggctcactgtaacctccacctcacaggctcaagccatcctcccacctcagccttccaagtacctgggactgcagatgtgtgccaccaggccctgctaatttttgtattttttgtaaagatggggtttcgccatggtgcccaggctgatcttgaactcctgaggtcaagcaatctgcccacctcagccccacaaagttttgggattacaggcgtgagccactgcacccagctgaaaatattttgtgtttctcaaatgtggtttaaatctttaaagaaaagaaagagagaaaagaaaggaattgtaatgtttttgacaattgttataaggacaggtttaaataatagtagaaaataatcgtaaagattgtacaattatatcctatattccccacttccatatggatttcgtcttagatattccttcatcactgctatggatgacgaaatgaaccagccttcaacaagacaattatttattgatataaaccataaaatgttaatactttactgtctcatgtggtaaagaatactatgttgaatcaagaaagtaccacttacacacaacattccttccatgttactttgttgtaaaatattaataaaacagcttttgatgtttatcattgctttataataatgaatgtgtaaatgatatttccatttaaacaattagagcttggaaaataatgaatccctactgataaacctcccaaacctgttccctttttagttgtcctctgatgaaaacatggcagatgtattcccgttgcttcaacccactccttgaagacatcgtgattctttcactcacgaccttctgctaatatgtcaaagggcattaaatcttatatgactgtgagctctaaatccaatatgactgttttcgttttaagaagaggaaaacttggaaatagacacagacacattagggagaaggccatgggaagacagaggcagggactggcatgacgtatttataaaccaaggaatgtctgatattgctggcaaccatagaagaagcaaggaagaattttttccagagacctcagtggaaccatggccctgcctacacctttttttctgatttctagcctctaaaactatgaaagaatacgttaatgttgttttagccactcagtttcttttttttttttttttt

SEQ ID NO: 670600 - DNA, 668 bp, Homo sapiens
tgtaatttaaaattccaatctgctttataataacccatacttatctcattaaagtttgcagcaagatcctcccaggaaagtgaagcggagaaaatggaggtagaaactgtaagtttctggaggacaggagctgaatcttgttatctaaatatgaaggatttaacacatttttagaaaactatgtagtgatgttttgtggactatattccacattctcakatctcacatctataaacaacctttaaggagaattttcatgctggatgcacaacatccagctggcagattagtgagggttaaatgaatgtgaatataagaccgtgaaataactatgaaataagagcattttggttggtacacactattcctatgacaaaatcttttaaatctcaaaagatgtacaatctccttttcctggtacaaggattaccaaaaatttcacatacgatgatggttttattttattttacctcgaatttcagcctctaacttcaacattcatatatcccaaaagtaagcaatccatgaacagctccacaatttagggttattaattagaataaagttagcagtttgactacagagttcagcctgttttcttgtgattctttaatgcgattgactgcctgcaaacatttaaatgattcccctgccacttgtctatgtat

SEQ ID NO: 670601 - DNA, 668 bp, Homo sapiens
tgtaatttaaaattccaatctgctttataataacccatacttatctcattaaagtttgcagcaagatcctcccaggaaagtgaagcggagaaaatggaggtagaaactgtaagtttctggaggacaggagctgaatcttgttatctaaatatgaaggatttaacacatttttagaaaactatgtagtgatgttttgtggactatattccacattctcatatctcacatctataaacaacctttaaggagaawtttcatgctggatgcacaacatccagctggcagattagtgagggttaaatgaatgtgaatataagaccgtgaaataactatgaaataagagcattttggttggtacacactattcctatgacaaaatcttttaaatctcaaaagatgtacaatctccttttcctggtacaaggattaccaaaaatttcacatacgatgatggttttattttattttacctcgaatttcagcctctaacttcaacattcatatatcccaaaagtaagcaatccatgaacagctccacaatttagggttattaattagaataaagttagcagtttgactacagagttcagcctgttttcttgtgattctttaatgcgattgactgcctgcaaacatttaaatgattcccctgccacttgtctatgtat

SEQ ID NO: 670602 - DNA, 668 bp, Homo sapiens
tgtaatttaaaattccaatctgctttataataacccatacttatctcattaaagtttgcagcaagatcctcccaggaaagtgaagcggagaaaatggaggtagaaactgtaagtttctggaggacaggagctgaatcttgttatctaaatatgaaggatttaacacatttttagaaaactatgtagtgatgttttgtggactatattccacattctcatatctcacatctataaacaacctttaaggagaattttcatgctggatgcacaacatccagctggcagattagtgagggttaaatgaatgtgaatataagaccgtgaaataactatgaaataagagcattttggttggtacacactattcctatgacaaaatcttttaaatctcaaaagatgtacaatctccwtttcctggtacaaggattaccaaaaatttcacatacgatgatggttttattttattttacctcgaatttcagcctctaacttcaacattcatatatcccaaaagtaagcaatccatgaacagctccacaatttagggttattaattagaataaagttagcagtttgactacagagttcagcctgttttcttgtgattctttaatgcgattgactgcctgcaaacatttaaatgattcccctgccacttgtctatgtat

SEQ ID NO: 670603 - DNA, 613 bp, Homo sapiens
taaagagctctgacttattttctgtgctcataaaacaaccacttaatgggagacaatttatagtccttatccttccatcagtgaaaagtaccaagttaccagcccatatttaaatcttagttctttgataataatactactgatatatatatttaataatatttatatagatatattttataatactgagatataaaatactgctactgagatatatatatatctcagtattattcttatatatgtatttcagtagtagcatttaatatatatatctcagtattttatatattgagtatatataatatatatctcagtagtagttttttaatatatatatatcagtggtattattatatattactattatattaatagtattattatatgtcaratatgtctttttatatatcagtactattattattaaatataatcatatatttatataaatatatattctatacatttaataatattaaacacatatttaataataatattaagatgtatatttatgtcagttatataaatctaagtatgatacaatttatatccttaaagtgtttaaagatttatatccttaaagtatattaagatagctgtcataaaa

SEQ ID NO: 670604 - DNA, 1045 bp, Homo sapiens
tggttattaggagctccagtgaaagtaaagagttctcttagatgaattagatgtcttcactgttgttcactaatcttttataaattgagacattatttacttctagcaaattctgaaatcttaaatatataacctgatgaatatttatgtatgtatacatccattgaaaaccacccagatcaagatttagaatatttaattactctgaaattttcccttatcttatctttcccttcccttacctcatctcaggtaaatagactttaccaccaaaggtaattaatattctggcttttattgctatatatagttttgtctgttcttgaagtttgtataattttgtgactggcttcttttgctcaacaagatgatttggacatatatccatgttgttgtatggatcgtagtttgttcttttatattgtttatgattgcatgaatataccataattggcatatccattcttctcctagtagacattttaatatttctagtgtttttctattatgaatacaattgccagtaacattcttattcacgtctttttgtggacatatatgttcatctctcttgaatatatatataaacacacatatatatatgagagaattgataaatcgaaaggtaataatgcatatgtttaatgttttaggaaatttctagacagttttccaaaatgtttgtactattttaaaatctttcaacaatatatgagaatttcagttgcttcccacagcatccccaatatttgatattatattactatactttttaatagagtttgagtgtgatccatttgggaaaaaraaagctttagaatacatagaaggacttcagaatcagttgatagaatagaatttcctttcatttttattttcttaattataaaataaattttggaaagtttactataggtattgaaaaatttctttttttcgcttttcctcacaaactttattttttgacaaaaattcactcagagttgcgtcttgccattaaattctctcaggcatatccaacattcttccatcgacccccaagaga

SEQ ID NO: 670605 - DNA, 657 bp, Homo sapiens
tttaactcacttctatcagcaatttccctcagctcaaaaaatactgcaatcaaaatcatttctgatgaaaatgccactgttttaaatgtctacttataataaaatgagcctacttataaatgatagagctatttatggtatggcagtaacttcacaaaataacatgattcttagaaatgtgtggtctttggcccagcctggcttttaaaccctcaaagccaaatatattatggatgtcttggaagaaagtaaactaggtacttggaacacacttggaaatgcaatcacaggtcacagaggtcttctttgtggttatgacttcaaatagtagaggtattcagcggagctgaactctgcctttcaagctaggtagattggatttttctcttaaagtttgtagggaatcagtgtccataaataaaaagggaatgaaaactgtgactggaaactgagaatgttgatggacartgattcagctctgagctgcttcggcttttcttccctggtctttctattgtccagcaaatgaaacacactataaaaccacaagaaaaaaaaacaaagtattggactgggggaggagagagaggccttgtgatcctaagaaaaactatgtaaccagcagcctaagcaaaacagggaaggatgcacattctt

SEQ ID NO: 670606 - DNA, 1489 bp, Homo sapiens
acaaacaaacaaacaacaacaaaaaaaaccttaaagacagggagggtaagttctagaatctggactccctactctggtgagatcgttggtgctcttttttttttctttctttctttctttttttttttgtttttgagacagagtcttgttatgttacccaggctgcagtgcagtggcgtgatctccgctcactgcaagctctgcctcccggattcacgccattctcctgcctcagcctcccgagtagctgggactacaagcgcccgccaccacgcccggctaattttttagtatctgtagtagagatggggtttcaccgttacccaagatggtctcaatctcctcacctcatgatccgcccacctcggcctcccaaagttctgggattataggcgtgagccaccgcacctggccggttggtgctcttatgagggagtagggctgggtttagctacaagcatatgtcaccagttctaactagtgggtaatttctaagcagtggttctcaaacttgagcatactccaagtcacctgaagggcttgttaaaatgcagattgctggtcccaccccccagcttttctgattccacaggtggggccgagaaattgcatttccaacgagttccctgtgactgtgatgccatgatattggtctgaggaccacactttgagaatcactgttctaagggatcagtttcaatggatcccatttggcccagcttatagattgctagaggtcagggaactggagacactcaaataggaatcaagaggcttctgctgggttggagggtgaattccagtgccttcctcacctcgtgactatagatcaggatttcctggtgaatatgttacccctccccgccctacctcaaaggactggctcctgggagcctgtgttcaggaaaggtggcacacagagaactaaaatggtctcttggccaagaggagaagagagtttgatcagcacagaggggaaagaatctgcagctggtaggcaggcagactggatgcccagagcgagggaaaggggcaaaccttgatgacactgggcacatgcagcttgggagtttctaggccaaaacaggcatcgattccacagaacatcaggatggagaaaacaatggaaaagtcagccaccagggcccggacctgcagacaggagatgagcaagtaaaagaagtgagtaaagcacccacccagctccaggcagccccagtcctccggcagcaaagaggtgaactattacagtctgggctctgaaggcagcagaactaggctcaaatccaggctctgctccttgctaactgtgtgagcttggggaagcgtgtcatctctccaagactcaatttccttctctgtaaaatggagatgatggtagtatctccctcaaaggtgtaagtgaactgtgacacatttagagtgcttggcatatggtggtcaatgtgggakctgttatgatccatatggccatggcagccactgctga

SEQ ID NO: 670607 - DNA, 609 bp, Homo sapiens
agaattagagtagatgtctgtcaaccagcttcccaaattagggagttaatgaaagacaatattaagaattgtttatcagtaacagatactatacaatttgacagataatatataccatgaatctataatcacatgactcctcaaaagtttatatacaataaatggaaaatgttactcatattatgacagaaggcacaagtagggagagtttaaatgaattccaccaagtcataggctgggataatgttactaagtcttaggccagacccacaatttctcccaagcarttagtcaacttaacagagcaatctgactttaggtgaacattttgtggcaccttgattctgtaggcaatttcaactgcttttaaataacacttcctccaggcttcagaggcattgtcactttatgggatggaggaattaggctattacatatcacaaagctcatggtaactgaatgatcacattaattccaattagttcagatgtgagcaagatcctgaataaaaaagacagcctgaagcactgaggaaaaaaatctaaaatggaaatacattgagttaccaagaggattctaatgtgctaccactgcaatcttatttaataa

SEQ ID NO: 670608 - DNA, 1162 bp, Homo sapiens
caccttcagttgtaataagccccatgtgtcaagggcatagctaggtggagataatcgaattatggggtcagtttcccccatactgttctcatggtagtgaataagtctcacaagatctgatggttttataactgggagttttcctgcaaaagttctcttgcctgccaccatataagacatgactttgctcctcattcgccttctgctgtgattgtgagccctccccagcaatgtggaactgtgagtcaattcaacctgtttcctttataaattacccagtcttgggtatgtctttattagcagtgtgagaacagactaatacagcatcctttactaccccgtagtttcagggtcctcttctgataaaaagggatagtgggatggagtaagcaaagtcaaatttgacactttttctagcactcttgaactacatcaagatttgccactttttctagccctcttgtactacctcagtgtctttgcactccctctccttccaactctcatacagcatgatttctgggtcttaaattaggcatttataaaattatacaaataaagctacttgccatattatctctcttggagtgtatttgcattacaagctttatctaattgtgtatttaaggctttgcttcctatggaaggaagagcagactccagggaggaggtgggagatggagggcctttttcttaaccctggaatcacatctctgccccatgcataaggcagccctgtggggaattgttatgtgcattgctctcgagtaacaggtgagaatggagttccaagaacagcagtattaggaaggtgagtagtgggaggctgcaggataaggattggcctaagccttggggactaaagagccaagggggtggcytaagccttggggactaaagagccaagccttctgtggtatcaggaccacctccttaagttgttaaatcccatgaccagaagaacctggaaagagtttcagggggacaccaggtgagaaaatcaagccccgtgtgaaaaggtcacagaaatttccatcgttccactgagaaaagggatggcaataaggatttttaacatccgtgagtaaaaagaaaaaattatgggcagttggtcctttgccagaggacagaattcagaagacagctttggaacataatgtga

SEQ ID NO: 670609 - DNA, 2073 bp, Homo sapiens
cactcactcactgactcatctagagcaacctccagtcctgtaacctccattcatagtaagtgccctatacaggtggaccatattttcttttataccatatttttacagtaccttttctgtgtttaaatatgttcagayacacaaatgcttaccattgtgttacagctgcctacagcattgagtacaggaacatgctgcccaggttttcagcccacgagccacaggctacagtggagtaggctatccatctaggtctgtgtaagtgcactctgtgatatttgcgtatcagtgaagtcatctaaggacacacttctcagaacacgtctctatcatgaagcattggatgactgtatattctcacacttcctcccatgcttcttgagggcaggatcttcactttcaagcagcaacataatcctatcccatgggagggagagtgtgactaagcctttttcactcacgctctaattggtctccaccatttctttttattattatttattatttttttattttattttatttataatcaggattttattttggaataatatgttctcactcataggcgggaactgaacgatgagaacacttggacatagggcggggaacatcgcacccgggggcctgttatggggtcgggggaggggggatggacagcattaagagaaatacctaatgtacatgatgagttgatgggtgcagcacacccacatggcacatgtatatatgtatgcaacaaacctgcatgttgtgcacatgtaccctagaacttaaagtataatttaaaaaaaaaagaaaaagaaaacattttctagaaactaggtcttcaccatttctataatggatgcaattcacctcagagaaaagtctctaccatcttctttactatattcctcctcttcctttgacactggaagagggtgggtgatgggaaggacgagggatacatagacaacattgttgggatttggggaatgaaggcaaagcagagaagaagtagggaaaaccttatactgctttccttttccaacttcccataccctagccccttaccataaataatgggaagcaacatgactgactgaatcaaaggctatgaatagtttttctcaccctcattaagacaaacacactgaatattaagttgcaaccaccttcataagcgcatgttacttaacagccaaggagtagttacaaagcttttcacatattcttaaaagcatccaatacagtaaaaccttgcatgcttactcaaaagatactgtgctgaaaacagatcccatccaataaggtgagaatactcaactccttatttacggctaaagatgaacagacttaggcccatgatgtatgcttataatgattttctatcatcttgatttgcccatatacagccttctctaaatcagcaaagaaggacattatcaaaagcatatggagtgtcaacaaagacttaatccaaaaatcagggaatattctgaaagtacaaagctgatgatcactcacaaagatgttgatgtccttatgtctattcatttatctgtttgaatcaaagggttagtggaggaggagggggaaggatgggagaagcctaggcatgattaacaataggtgcaagacaggatgagctagattaaactgctccatatgcaaattatacaagtctgattgcatcaaaccatgcccagtttaatgagtacagtaagacgcctttatctctgcttggatatgttcctaaaaggaagactgctcccagataaagcacggtttaataagaagatttttcattacagagtcgatgaacatttgcatatctctccctgagcttggggcctcttctctatgttgtgtctcagtctctttcaatctctcgcctgtttttctctccctctgtcaaattccctccccttgcacccaccagcctgtctcttattcacatggctattctcattcctcattttttttttcgtaaactgaagtcagtaaacatttgcatgttgttggcatatattttaggaatgtgtatactcagtgcaaattaaagagagtcctacacagatgagattaaaa

SEQ ID NO: 670610 - DNA, 2073 bp, Homo sapiens
cactcactcactgactcatctagagcaacctccagtcctgtaacctccattcatagtaagtgccctatacaggtggaccatattttcttttataccatatttttacagtaccttttctgtgtttaaatatgttcagacacacaaatgcttaccattgtgttacagctgcctacagcattgagtacaggaacatgctgcccaggttttcagcccacgagccacaggctacagtggagtaggctatccatctaggtctgtgtaagtgcactctgtgatatttgcgtatcagtgaagtcatctaaggacacacttctcagaacacgtctctatcatgaagcattggatgactgtatattctcacacttcctcccatgcttcttgagggcaggatcttcactttcaagcagcaacataatcctatcccatgggagggagagtgtgactaagcctttttcactcacgctctaattggtctccaccatttctttttattattatttattatttttttattttattttatttataatcaggattttattttggaataatatgttctcactcataggcgggaactgaacgatgagaacacttggacatagggcggggaacatcgcacccgggggcctgttatggggtcgggggaggggggatggacagcattaagagaaatacctaatgtacatgatgagttgatgggtgcagcacacccacatggcacatgtatatatgtatgcaacaaacctgcatgttgtgcacatgtaccctagaacttaaagtataatttaaaaaaaaaagaaaaagaaaacattttctagaaactaggtcttcaccatttctataatggatgcaattcacctcagagaaaagtctctrccatcttctttactatattcctcctcttcctttgacactggaagagggtgggtgatgggaaggacgagggatacatagacaacattgttgggatttggggaatgaaggcaaagcagagaagaagtagggaaaaccttatactgctttccttttccaacttcccataccctagccccttaccataaataatgggaagcaacatgactgactgaatcaaaggctatgaatagtttttctcaccctcattaagacaaacacactgaatattaagttgcaaccaccttcataagcgcatgttacttaacagccaaggagtagttacaaagcttttcacatattcttaaaagcatccaatacagtaaaaccttgcatgcttactcaaaagatactgtgctgaaaacagatcccatccaataaggtgagaatactcaactccttatttacggctaaagatgaacagacttaggcccatgatgtatgcttataatgattttctatcatcttgatttgcccatatacagccttctctaaatcagcaaagaaggacattatcaaaagcatatggagtgtcaacaaagacttaatccaaaaatcagggaatattctgaaagtacaaagctgatgatcactcacaaagatgttgatgtccttatgtctattcatttatctgtttgaatcaaagggttagtggaggaggagggggaaggatgggagaagcctaggcatgattaacaataggtgcaagacaggatgagctagattaaactgctccatatgcaaattatacaagtctgattgcatcaaaccatgcccagtttaatgagtacagtaagacgcctttatctctgcttggatatgttcctaaaaggaagactgctcccagataaagcacggtttaataagaagatttttcattacagagtcgatgaacatttgcatatctctccctgagcttggggcctcttctctatgttgtgtctcagtctctttcaatctctcgcctgtttttctctccctctgtcaaattccctccccttgcacccaccagcctgtctcttattcacatggctattctcattcctcattttttttttcgtaaactgaagtcagtaaacatttgcatgttgttggcatatattttaggaatgtgtatactcagtgcaaattaaagagagtcctacacagatgagattaaaa

SEQ ID NO: 670611 - DNA, 2073 bp, Homo sapiens
cactcactcactgactcatctagagcaacctccagtcctgtaacctccattcatagtaagtgccctatacaggtggaccatattttcttttataccatatttttacagtaccttttctgtgtttaaatatgttcagacacacaaatgcttaccattgtgttacagctgcctacagcattgagtacaggaacatgctgcccaggttttcagcccacgagccacaggctacagtggagtaggctatccatctaggtctgtgtaagtgcactctgtgatatttgcgtatcagtgaagtcatctaaggacacacttctcagaacacgtctctatcatgaagcattggatgactgtatattctcacacttcctcccatgcttcttgagggcaggatcttcactttcaagcagcaacataatcctatcccatgggagggagagtgtgactaagcctttttcactcacgctctaattggtctccaccatttctttttattattatttattatttttttattttattttatttataatcaggattttattttggaataatatgttctcactcataggcgggaactgaacgatgagaacacttggacatagggcggggaacatcgcacccgggggcctgttatggggtcgggggaggggggatggacagcattaagagaaatacctaatgtacatgatgagttgatgggtgcagcacacccacatggcacatgtatatatgtatgcaacaaacctgcatgttgtgcacatgtaccctagaacttaaagtataatttaaaaaaaaaagaaaaagaaaacattttctagaaactaggtcttcaccatttctataatggatgcaattcacctcagagaaaagtctctaccatcttctttactatattcctcctcttcctttgacactggaagagggtgggtgatgggaaggacgagggatacatagacaacattgttgggatttggggaatgaaggcaaagcagagaagaagtagggaaaaccttataytgctttccttttccaacttcccataccctagccccttaccataaataatgggaagcaacatgactgactgaatcaaaggctatgaatagtttttctcaccctcattaagacaaacacactgaatattaagttgcaaccaccttcataagcgcatgttacttaacagccaaggagtagttacaaagcttttcacatattcttaaaagcatccaatacagtaaaaccttgcatgcttactcaaaagatactgtgctgaaaacagatcccatccaataaggtgagaatactcaactccttatttacggctaaagatgaacagacttaggcccatgatgtatgcttataatgattttctatcatcttgatttgcccatatacagccttctctaaatcagcaaagaaggacattatcaaaagcatatggagtgtcaacaaagacttaatccaaaaatcagggaatattctgaaagtacaaagctgatgatcactcacaaagatgttgatgtccttatgtctattcatttatctgtttgaatcaaagggttagtggaggaggagggggaaggatgggagaagcctaggcatgattaacaataggtgcaagacaggatgagctagattaaactgctccatatgcaaattatacaagtctgattgcatcaaaccatgcccagtttaatgagtacagtaagacgcctttatctctgcttggatatgttcctaaaaggaagactgctcccagataaagcacggtttaataagaagatttttcattacagagtcgatgaacatttgcatatctctccctgagcttggggcctcttctctatgttgtgtctcagtctctttcaatctctcgcctgtttttctctccctctgtcaaattccctccccttgcacccaccagcctgtctcttattcacatggctattctcattcctcattttttttttcgtaaactgaagtcagtaaacatttgcatgttgttggcatatattttaggaatgtgtatactcagtgcaaattaaagagagtcctacacagatgagattaaaa

SEQ ID NO: 670612 - DNA, 668 bp, Homo sapiens
agcgctgggcggcagaattctaagaagcctttcctgccgactcttctgtttcgtggaggcagtctaacttccacctcacagagagccaccagaaggaaagcctacgttcccttctctcttcccatgtctttttattcctctccttcctggccagcatttgacagtggaatgtcttcccaggatgtacacattttccccaataatcttgaacacttcccatttacctctagagcatctttcttgtcctgattaaggaggtatccttctcttgctctctctcagttgaggttattttgtaggaaaaaatgattgcagccagggcttgaaagtggcagggaataagtttgagtgtcccctatctttcctcatgacagtgctggagcattagcacaaagcctgtctrtcatcatgggaaataatcccacccaaacacactgggaagacgtgagggtgtctccttggtcttattagcctagcagaaggacagaaagatgaagggatgtggggttgcggggaatgagaagcgctgaacacctggaatttgttcccttgggccgacaggttgcagcttgcttgctgttctccctctgtctgagaacacttcgtatttaacactctctaattctgcttgcacatcctctacttccttccttcttttcatctctcaa

SEQ ID NO: 670613 - DNA, 604 bp, Homo sapiens
ttttaactgggcccatctgagtagaagaagaatagatctcattctaggtttaatttgtactttttttactcacattttaaacatccatttacatttctttttctacaaactacctctttatatacctttgcccatggatcttttctcattgacagttaagatctctttttgtatttagaagattagctttgatgtcaaagacactgtgtattttcccagtttgtcctttgtctattactttgtttagagcagggcaacactggtggtgaggacttgctttccacaaccaaggagcagtctgccccaaagataaattcaaattcttgcttcttgcaaggttgctttaaaatggtaagttttttcctcctagtattggcatattttwaaaaaaaaagccttgaattcagagtcaggatgccccttttaattaatatctaaataagaacaaatgaacaatgagatcagaatctctgtaatctgagtacgttacacagaagataaagaataacagggccttcctggaaagggccatctttgtaacatgtttattataaataacaatttatatgaatgaacttaatgtaggaaacactcagctcctttg

SEQ ID NO: 670614 - DNA, 1954 bp, Homo sapiens
tgttattaaatggaatttaaatgccaaacttatagataaaattagacacccagtatgcctgttaattaggaagggctgtgctttttaggaaaatggcagtttgtgtggagggtgagtataagaacagctcctcctgagactagggattattttcattaaggaaaagggaaagagaagagaagaaaagaaggtataaaagcaaaaaaggagggtgtaatgaggaaacagtaaaaggtcaccactccacattttgaaagttgtcacctctataacttactaacatttttaataaagtaaaaagcccaagaagtgcttgatacaaaaggtggattggttatagtcactaagattagggaaataaagggtgatgacggcaaaaaaagtggcaataaaacactgacgacaaagagaagtaaaaaggtgtggggtgggggtgtgtgtgtgtgagagagagagagagagagagagaatgaggcacaataaaattttgaggaggggagttactggatataaggtttgggtcaggtataacctgggatcagggagagcccagctgaaacatatttatatatataaaatagtaacctttttatggtgtgtcacatttagttcttcctgtcatttgatggtgtttttattcttgtaatatggaaatatgtattttgcatttaataacctattttttaaatagccactaatttatctcgccatccacaaaagggataaatatgttattctggtttctttgagtattacattgtatagtctagtttctggtagattcatattttatgttctatttttgaacccattgtaatttactgatatggctctagtgacaatagatctaagttaatttgtttcgatataattgaaaaagttatttcattctctattgtactactccagtttgtaataaaataagtcattataatggcttgaatcaataactgaccaatttttgaaacccccattttttttttttttttgagatagtcttctgttgcccagactggaatgcagtggcacaaacacagctcactgcagcctcaccttcctgggcttaagcgatccccttgcctcagtctcctgagtagctgggactacaagcgtgcattaccacactgggctaatttttaaattttttctagagatggggtctgtcaacattgcccaggctggtctcaaactcttgggctcaagtgatcctcccgccttggcctcccaaagagctgggattacaggtgtcagccactgtgccctaccccgtgttataaacatggtataataaatttttgrcaataaattttatttacttaaaattacataaattttatgttatgtatattttaccacataattacgtaaattttgttgttacataaatttattataacatttatgatcttaaacacttttaagtgtgtagttcagtagcattacatacatccacactgttgtgcccataataaaattgtaaagcctggccttaccattataatcttttaaggagccattatttgtcatatttctccctttcaaatgggtttcactatcactcaaaatctgtcagggatataatttagcaataggaatcatagaatttagagtaaaaaagtataagaggagtgaccttgttcaactttgtcatttacatgcgacataacaggccaagagaaaatgaatcactttcccaagtcacctttagttaatagcagagccaggactctgaccctggcctatgctgactagctccaaacatacagtaataaaaaagaaactgcccaaagagttcctgttacttttaatcccttacttacagatttatgctactccacactacaataatcttttattttgtggattttaaagcggcaggtcaaaattttcaaagggcataggagtagaagtttgccacctacaggtcaaaagaaagaagacatctttagatttt

SEQ ID NO: 670615 - DNA, 604 bp, Homo sapiens
gccatgtgattggtgtcatactggagttttttacaggtgctaggagactacagaataggacatatccattattaaatgaaaaggctgggaatatttctaggaggggtgagttttgagctaagttttggagtatagatagaagataaccacatgagcaaggtattggcaagggagagacaaaagagaatgatattctgggtagaatgtcattccaggactgaggcatgaaacagccatgcctgttctaaacacttaagtcctacacacctagagcaatcaagaaaacccaggctgagaaactctatagatcaaacaatccaatttctttagcaagtaattgcaagggagaaaaaaggatggaaggaagacatgacatgaaaacagctaaaaattcatatattttcaaaggccaaactaaagtagactattttagaatacctatttctatgataaaaactattaagaaaaataaagaagtgactgaaataagtctacactttcattggggaagacagtctgtgatagagacagggcatagaacgcttctgaggtggctggyaaagttctgttttatgacctgagcaacagttataagaatgttcac

SEQ ID NO: 670616 - DNA, 641 bp, Homo sapiens
cctgcttctcttcttaggcaccacaaatctcaaaccctttctccctccacccccagctctaatgaaatgtgcagggactggatgactggaagccccagcctgggtctctgctgtctaatcctggctcaagtactgacaagtcaaatcacttgacccccatgaatctccttaagaaaatcgtggtgttgaatcagtgtgtctattccaactaaaaaaattatttcatttgaattaactgagtctttgcctccactgtgtttcgttctccgtcctcccarcaacccagcattcagaatacatgtgtctttgtctttccctttaggatctaagtcagagaagccttcatagggagatagataatagggattcttgctatctcccctaaaggggaaggggaggaaaccttgaatggagagaattttttgaggaataaagaagtgagaaactgaatttcaagagtctcagtctgaacatagcaaaccaaggggtgaagaatttatcagtagtcatgggtggtaaactgaaaaagggaagctgactaagtaaaatcccggaaaccagaagaggaagatgtaagtgacgctctaacatgaagggtttttgggcatcccaatcagcagaatttctacctgccttctgat

SEQ ID NO: 670617 - DNA, 641 bp, Homo sapiens
cctgcttctcttcttaggcaccacaaatctcaaaccctttctccctccacccccagctctaatgaaatgtgcagggactggatgactggaagccccagcctgggtctctgctgtctaatcctggctcaagtactgacaagtcaaatcacttgacccccatgaatctccttaagaaaatcgtggtgttgaatcagtgtgtctattccaactaaaaaaattatttcatttgaattaactgagtctttgcctccactgtgtttcgttctccgtcctcccaacaacccagcattcagaatacatgkgtctttgtctttccctttaggatctaagtcagagaagccttcatagggagatagataatagggattcttgctatctcccctaaaggggaaggggaggaaaccttgaatggagagaattttttgaggaataaagaagtgagaaactgaatttcaagagtctcagtctgaacatagcaaaccaaggggtgaagaatttatcagtagtcatgggtggtaaactgaaaaagggaagctgactaagtaaaatcccggaaaccagaagaggaagatgtaagtgacgctctaacatgaagggtttttgggcatcccaatcagcagaatttctacctgccttctgat

SEQ ID NO: 670618 - DNA, 596 bp, Homo sapiens
ctacttcaaaactcatctgtctaacttattttcactaataagtgtaacttgcctggaatttggcagatctaagctgggcttgggctagatggtttcaagcctgagtcattaagatgtgaaatttacagaaacaacagaggattgaggaacaagttaaaggacactctaatggtgcagtctgcataatgcagtagtatgaaattctacaaaaaaccaagatgaaaggaggatcagatttaagagacatactaatcaaatttggacctgattgggttctgattgaaactaaaaataaatgtcatgacacttacaagacaattggaaatttgaacactacatattttaacgtataatgttacttatttaatataaaattatattttagatgtgatagtattgtggttacgtatcttgtatagatacaacctgaatttacaaaaggaatgatttgtctgatttgattcaaattaatatgggagcagagaaaggaatgktttagattaaccacggttttccatgagttgaaatatacttacttagcagaatattgagctatagttgccatataataaactgcacgtgtttaaaatgtgcag

SEQ ID NO: 670619 - DNA, 596 bp, Homo sapiens
ctacttcaaaactcatctgtctaacttattttcactaataagtgtaacttgcctggaatttggcagatctaagctgggcttgggctagatggtttcaagcctgagtcattaagatgtgaaatttacagaaacaacagaggattgaggaacaagttaaaggacactctaatggtgcagtctgcataatgcagtagtatgaaattctacaaaaaaccaagatgaaaggaggatcagatttaagagacatactaatcaaatttggacctgattgggttctgattgaaactaaaaataaatgtcatgacacttacaagacaattggaaatttgaacactacatattttaacgtataatgttacttatttaatataaaattatattttagatgtgatagtattgtggttacgtatcttgtatagatacaacctgaatttacaaaaggaatgatttgtctgatttgattcaaattaatatgggagcagagaaaggaatggtttagattaaccacggttttccatgagttgaaatatacttacttagcagaatattgagctatagttgccatataataaactgcacgtrtttaaaatgtgcag

SEQ ID NO: 670620 - DNA, 596 bp, Homo sapiens
ctacttcaaaactcatctgtctaacttattttcactaataagtgtaacttgcctggaatttggcagatctaagctgggcttgggctagatggtttcaagcctgagtcattaagatgtgaaatttacagaaacaacagaggattgaggaacaagttaaaggacactctaatggtgcagtctgcataatgcagtagtatgaaattctacaaaaaaccaagatgaaaggaggatcagatttaagagacatactaatcaaatttggacctgattgggttctgattgaaactaaaaataaatgtcatgacacttacaagacaattggaaatttgaacactacatattttaacgtataatgttacttatttaatataaaattatattttagatgtgatagtattgtggttacgtatcttgtatagatacaacctgaatttacaaaaggaatgatttgtctgatttgattcaaattaatatgggagcagagaaaggaatggtttagattaaccacggttttccatgagttgaaatatacttacttagcagaatattgagctatagttgccatataataaactgcacgtgtttaaaatgtrcag

SEQ ID NO: 670621 - DNA, 679 bp, Homo sapiens
tattgacatttggcaaccttgctaaactcttacaaattccaataatttcactgtggatcgcctgcagttccaggggttggtaaactatgagctgtgaaccaaatctaacttgaggcctgtttgggcaggctaagaaggttcttaccttttcataaatggttgtaaaagcaaacaaacaaacaamcaaaaaatatatatatatatatatatatatatatggcatagtatgtgactagagagcctaaaatacttgctgtgaaaaaagcagacaatacagaaattaactagaaattattaagataattgacacagagggagactctttgtaaattatcttaagaagttcttaagacaacattgttctcattccggcagttttatttttcacttttaatcaactttaagcctattaactgttttctatcattcaatatcctctttttgctgcagttaaaaatctgcaaaagtagattcttcaaactaagatatagtgactctgtcaagcccagtttcaaaaagcatgtgacaagactatattgccaagtttaaacatatgctctatagcagaaatagggaagaaattcacttattactttatccatgtaagatttattaaacatgtaacttcgttggaaccaacaaagctactttcatgtttttatgttgttctttttagata

SEQ ID NO: 670622 - DNA, 679 bp, Homo sapiens
tattgacatttggcaaccttgctaaactcttacaaattccaataatttcactgtggatcgcctgcagttccaggggttggtaaactatgagctgtgaaccaaatctaacttgaggcctgtttgggcaggctaagaaggttcttaccttttcataaatggttgtaaaagcaaacaaacaaacaaamaaaaaatatatatatatatatatatatatatatggcatagtatgtgactagagagcctaaaatacttgctgtgaaaaaagcagacaatacagaaattaactagaaattattaagataattgacacagagggagactctttgtaaattatcttaagaagttcttaagacaacattgttctcattccggcagttttatttttcacttttaatcaactttaagcctattaactgttttctatcattcaatatcctctttttgctgcagttaaaaatctgcaaaagtagattcttcaaactaagatatagtgactctgtcaagcccagtttcaaaaagcatgtgacaagactatattgccaagtttaaacatatgctctatagcagaaatagggaagaaattcacttattactttatccatgtaagatttattaaacatgtaacttcgttggaaccaacaaagctactttcatgtttttatgttgttctttttagata

SEQ ID NO: 670623 - DNA, 679 bp, Homo sapiens
tattgacatttggcaaccttgctaaactcttacaaattccaataatttcactgtggatcgcctgcagttccaggggttggtaaactatgagctgtgaaccaaatctaacttgaggcctgtttgggcaggctaagaaggttcttaccttttcataaatggttgtaaaagcaaacaaacaaacaaacaaaaaatatatatatatatatatatatatatatrgcatagtatgtgactagagagcctaaaatacttgctgtgaaaaaagcagacaatacagaaattaactagaaattattaagataattgacacagagggagactctttgtaaattatcttaagaagttcttaagacaacattgttctcattccggcagttttatttttcacttttaatcaactttaagcctattaactgttttctatcattcaatatcctctttttgctgcagttaaaaatctgcaaaagtagattcttcaaactaagatatagtgactctgtcaagcccagtttcaaaaagcatgtgacaagactatattgccaagtttaaacatatgctctatagcagaaatagggaagaaattcacttattactttatccatgtaagatttattaaacatgtaacttcgttggaaccaacaaagctactttcatgtttttatgttgttctttttagata

SEQ ID NO: 670624 - DNA, 679 bp, Homo sapiens
tattgacatttggcaaccttgctaaactcttacaaattccaataatttcactgtggatcgcctgcagttccaggggttggtaaactatgagctgtgaaccaaatctaacttgaggcctgtttgggcaggctaagaaggttcttaccttttcataaatggttgtaaaagcaaacaaacaaacaaacaaaaaatatatatatatatatatatatatatatggcatagtatgtgactagagagcctaaaatacttrctgtgaaaaaagcagacaatacagaaattaactagaaattattaagataattgacacagagggagactctttgtaaattatcttaagaagttcttaagacaacattgttctcattccggcagttttatttttcacttttaatcaactttaagcctattaactgttttctatcattcaatatcctctttttgctgcagttaaaaatctgcaaaagtagattcttcaaactaagatatagtgactctgtcaagcccagtttcaaaaagcatgtgacaagactatattgccaagtttaaacatatgctctatagcagaaatagggaagaaattcacttattactttatccatgtaagatttattaaacatgtaacttcgttggaaccaacaaagctactttcatgtttttatgttgttctttttagata

SEQ ID NO: 670625 - DNA, 1403 bp, Homo sapiens
caataggaagctgtgagtagtttggtgattttcaaactcgtttttaaggcaaagaaaagcctttagttgaaggaaattatatgcataaggtgtaaaaatagagctccctgtttgggagtgagtgaaggtcgacacctaagagcctgaagccctttggctacccttctccccatcctgtgccatcgccagatgacctgagggagccccgtggaaccactaaccaggaatactcaatgtgggcaccctggcccagcagataggcatcaccccggaatgtgtaagacctcctgaatcagaatccgcattttaacaagactgcagattgagaacttctgatctggagcctttctaatcactgacaacatccgcagtgggaaaagcaaccacrctggctctgagggccactgtctatcttggctctgccctgcaccccagtcgggagctttaccacgccagcagactggcctgtgttcccatttcctcagctgaaaggtggaaagaatattacattaatgaggacagttcatgtgagcttacgctaggacttcatttaatctcacaatctgaaattaattctcacaattctgacaaccacgtcaggagcactgtagacattacgaccaccctaggttttaaatatggaaatgaaggcaaacggaggtgaggtgaacatttgtgactacccagccctgaaatggcagcttttctgactaaaaatccagaggactgcccccatttcagcgccatcctctcagggctgtggcaggggtgacatgccacaaagtcatgcttcctaaacatccctaccgacacagcccccatggaaaagagatgaatggctggccggccgggcgtggtggttcacgcttgtaatcccagcactttgggaggccgaggtgggcagatcacttgaggtcaggagttcaagaccagcctggccaatatggtgaaaccctatctctactaaaaatacaaaaattagccaggcatggtggcgcgcacctgtagtcccagctactcgggaggctgaggcaggagaattgcatgaacccaggaggtggaggttgcagtgagccaagatcgtgtcactgcactccagcctgggtaacagagtgagactccatctcaaaagaaaaaaaaaaaaaagagagagatgaatggctgagggtcgatgggcgtggctcggagatgcccactgcaaaatctaaactctaaatccctgggtttattcttaacaatttatacaagttttgcattcacttcctcatatagctgagtttatttaatataaaaataatgtttcgagaaacagagcttgaagcaaaaccagtgtttctgaaagaaacactgtttttgctgatcccaagcactccaccaacaccctccagggggcaagcaactga

SEQ ID NO: 670626 - DNA, 1403 bp, Homo sapiens
caataggaagctgtgagtagtttggtgattttcaaactcgtttttaaggcaaagaaaagcctttagttgaaggaaattatatgcataaggtgtaaaaatagagctccctgtttgggagtgagtgaaggtcgacacctaagagcctgaagccctttggctacccttctccccatcctgtgccatcgccagatgacctgagggagccccgtggaaccactaaccaggaatactcaatgtgggcaccctggcccagcagataggcatcaccccggaatgtgtaagacctcctgaatcagaatccgcattttaacaagactgcagattgagaacttctgatctggagcctttctaatcactgacaacatccgcagtgggaaaagcaaccacactggctcygagggccactgtctatcttggctctgccctgcaccccagtcgggagctttaccacgccagcagactggcctgtgttcccatttcctcagctgaaaggtggaaagaatattacattaatgaggacagttcatgtgagcttacgctaggacttcatttaatctcacaatctgaaattaattctcacaattctgacaaccacgtcaggagcactgtagacattacgaccaccctaggttttaaatatggaaatgaaggcaaacggaggtgaggtgaacatttgtgactacccagccctgaaatggcagcttttctgactaaaaatccagaggactgcccccatttcagcgccatcctctcagggctgtggcaggggtgacatgccacaaagtcatgcttcctaaacatccctaccgacacagcccccatggaaaagagatgaatggctggccggccgggcgtggtggttcacgcttgtaatcccagcactttgggaggccgaggtgggcagatcacttgaggtcaggagttcaagaccagcctggccaatatggtgaaaccctatctctactaaaaatacaaaaattagccaggcatggtggcgcgcacctgtagtcccagctactcgggaggctgaggcaggagaattgcatgaacccaggaggtggaggttgcagtgagccaagatcgtgtcactgcactccagcctgggtaacagagtgagactccatctcaaaagaaaaaaaaaaaaaagagagagatgaatggctgagggtcgatgggcgtggctcggagatgcccactgcaaaatctaaactctaaatccctgggtttattcttaacaatttatacaagttttgcattcacttcctcatatagctgagtttatttaatataaaaataatgtttcgagaaacagagcttgaagcaaaaccagtgtttctgaaagaaacactgtttttgctgatcccaagcactccaccaacaccctccagggggcaagcaactga

SEQ ID NO: 670627 - DNA, 1403 bp, Homo sapiens
caataggaagctgtgagtagtttggtgattttcaaactcgtttttaaggcaaagaaaagcctttagttgaaggaaattatatgcataaggtgtaaaaatagagctccctgtttgggagtgagtgaaggtcgacacctaagagcctgaagccctttggctacccttctccccatcctgtgccatcgccagatgacctgagggagccccgtggaaccactaaccaggaatactcaatgtgggcaccctggcccagcagataggcatcaccccggaatgtgtaagacctcctgaatcagaatccgcattttaacaagactgcagattgagaacttctgatctggagcctttctaatcactgacaacatccgcagtgggaaaagcaaccacactggctctgagggccactgtcyatcttggctctgccctgcaccccagtcgggagctttaccacgccagcagactggcctgtgttcccatttcctcagctgaaaggtggaaagaatattacattaatgaggacagttcatgtgagcttacgctaggacttcatttaatctcacaatctgaaattaattctcacaattctgacaaccacgtcaggagcactgtagacattacgaccaccctaggttttaaatatggaaatgaaggcaaacggaggtgaggtgaacatttgtgactacccagccctgaaatggcagcttttctgactaaaaatccagaggactgcccccatttcagcgccatcctctcagggctgtggcaggggtgacatgccacaaagtcatgcttcctaaacatccctaccgacacagcccccatggaaaagagatgaatggctggccggccgggcgtggtggttcacgcttgtaatcccagcactttgggaggccgaggtgggcagatcacttgaggtcaggagttcaagaccagcctggccaatatggtgaaaccctatctctactaaaaatacaaaaattagccaggcatggtggcgcgcacctgtagtcccagctactcgggaggctgaggcaggagaattgcatgaacccaggaggtggaggttgcagtgagccaagatcgtgtcactgcactccagcctgggtaacagagtgagactccatctcaaaagaaaaaaaaaaaaaagagagagatgaatggctgagggtcgatgggcgtggctcggagatgcccactgcaaaatctaaactctaaatccctgggtttattcttaacaatttatacaagttttgcattcacttcctcatatagctgagtttatttaatataaaaataatgtttcgagaaacagagcttgaagcaaaaccagtgtttctgaaagaaacactgtttttgctgatcccaagcactccaccaacaccctccagggggcaagcaactga

SEQ ID NO: 670628 - DNA, 1403 bp, Homo sapiens
caataggaagctgtgagtagtttggtgattttcaaactcgtttttaaggcaaagaaaagcctttagttgaaggaaattatatgcataaggtgtaaaaatagagctccctgtttgggagtgagtgaaggtcgacacctaagagcctgaagccctttggctacccttctccccatcctgtgccatcgccagatgacctgagggagccccgtggaaccactaaccaggaatactcaatgtgggcaccctggcccagcagataggcatcaccccggaatgtgtaagacctcctgaatcagaatccgcattttaacaagactgcagattgagaacttctgatctggagcctttctaatcactgacaacatccgcagtgggaaaagcaaccacactggctctgagggccactgtctatcttggctctgccctgcaccccagtcgggagctttaccacgccagcagactggcctgygttcccatttcctcagctgaaaggtggaaagaatattacattaatgaggacagttcatgtgagcttacgctaggacttcatttaatctcacaatctgaaattaattctcacaattctgacaaccacgtcaggagcactgtagacattacgaccaccctaggttttaaatatggaaatgaaggcaaacggaggtgaggtgaacatttgtgactacccagccctgaaatggcagcttttctgactaaaaatccagaggactgcccccatttcagcgccatcctctcagggctgtggcaggggtgacatgccacaaagtcatgcttcctaaacatccctaccgacacagcccccatggaaaagagatgaatggctggccggccgggcgtggtggttcacgcttgtaatcccagcactttgggaggccgaggtgggcagatcacttgaggtcaggagttcaagaccagcctggccaatatggtgaaaccctatctctactaaaaatacaaaaattagccaggcatggtggcgcgcacctgtagtcccagctactcgggaggctgaggcaggagaattgcatgaacccaggaggtggaggttgcagtgagccaagatcgtgtcactgcactccagcctgggtaacagagtgagactccatctcaaaagaaaaaaaaaaaaaagagagagatgaatggctgagggtcgatgggcgtggctcggagatgcccactgcaaaatctaaactctaaatccctgggtttattcttaacaatttatacaagttttgcattcacttcctcatatagctgagtttatttaatataaaaataatgtttcgagaaacagagcttgaagcaaaaccagtgtttctgaaagaaacactgtttttgctgatcccaagcactccaccaacaccctccagggggcaagcaactga

SEQ ID NO: 670629 - DNA, 1628 bp, Homo sapiens
tgctcaaagtaagttataacttcaaagacatgagccacaggtacgtgggccctatgactgtgatgctttataaaagcttagggctttcatttcaccaaagttcaaatatcaaaaactatttaaaacaaggccatcactactatataaagatatccaagtccctactttttctttagattcttataaatgaagaattatggatataggaataagaatttatactcagaatagtgatgttctccatgtaacaatgaaactatttcatttattttatttatctgtccctgagatgagactgttaatcaaaatgaaaatactgaaaaaaaagtaaaaaccaacagaaaaaaactagcaaacttatctaaaactctgcccttctcaacagtgtaaagtttaaccgaatatacgtaatggttccgcgttctacctgcacctacctaggtcctctagaagaccaagtatattgatttgcaggtaatttctctctcagtgaatactcagcaaccatcatatcaggagaaacataagcaccaacacctgtgggatggatttaatcattaagaaaagaaaacaaacggggatcctgattccaaatccactgttcacttgagtaaactgcctaatctctcaacaccagtcctctctctaatacgatggaagaataaaatttaataaggaaacaasgaaagtctactatgtaccagacattttactaagaactttgcttttggatacaaaatacctatctcccaggattatttatcccaggatattttagactaaatatgctaatgcacctaaaagcatgcatgtgtatttctatgaaaccacttatttcagtccactttaaattacggtcagttctagatgtgctggttcccctaccagactataagtttcctgaggacacacttaaggtgtacagtgtcttacgtgtagcagagatacaggtaacatttcattaactattgttttttgtttgcttgtttctaaacaaatctatttctaaaacaggaaactaacctatcacacttgatgtagttccacctggacaaccaactgtagacaggcatggaccattatttccagcacttgaaacataaattatattatgcttccatactgcttcattaattacttcacaaattctcctgaaaaagagagaattcctttgaacatataatcagcctctattcccaaagtgtatatagtaccaaaaccttgtttaaatatatggctacataaattttggtacatccacccttggtggaacatgatacagccattctaagtgatataccctacttgggctttagggtagggaagcagttataaggccaaattaaatgtggggaaaatgctaggtgcaaaacaatatatatgggaaaatatactacaaggtagtaaaatattagtagtgactcgggcaataggtggttctatttccatcccccagttaacatagtcctgaagacacacctcagaagattcgtacatacaattatgagtagaaattgaccaaaagaaccagtatcttttgtggaaaaggtaactaaggcactaggaagaacttaagagcaagattttaaagtgtaagaaacgtgcttagagcttgccagcaaacaaga

SEQ ID NO: 670630 - DNA, 1628 bp, Homo sapiens
tgctcaaagtaagttataacttcaaagacatgagccacaggtacgtgggccctatgactgtgatgctttataaaagcttagggctttcatttcaccaaagttcaaatatcaaaaactatttaaaacaaggccatcactactatataaagatatccaagtccctactttttctttagattcttataaatgaagaattatggatataggaataagaatttatactcagaatagtgatgttctccatgtaacaatgaaactatttcatttattttatttatctgtccctgagatgagactgttaatcaaaatgaaaatactgaaaaaaaagtaaaaaccaacagaaaaaaactagcaaacttatctaaaactctgcccttctcaacagtgtaaagtttaaccgaatatacgtaatggttccgcgttctacctgcacctacctaggtcctctagaagaccaagtatattgatttgcaggtaatttctctctcagtgaatactcagcaaccatcatatcaggagaaacataagcaccaacacctgtgggatggatttaatcattaagaaaagaaaacaaacggggatcctgattccaaatccactgttcacttgagtaaactgcctaatctctcaacaccagtcctctctctaatacgatggaagaataaaatttaataaggaaacaacgaaagtctactatgtaccakacattttactaagaactttgcttttggatacaaaatacctatctcccaggattatttatcccaggatattttagactaaatatgctaatgcacctaaaagcatgcatgtgtatttctatgaaaccacttatttcagtccactttaaattacggtcagttctagatgtgctggttcccctaccagactataagtttcctgaggacacacttaaggtgtacagtgtcttacgtgtagcagagatacaggtaacatttcattaactattgttttttgtttgcttgtttctaaacaaatctatttctaaaacaggaaactaacctatcacacttgatgtagttccacctggacaaccaactgtagacaggcatggaccattatttccagcacttgaaacataaattatattatgcttccatactgcttcattaattacttcacaaattctcctgaaaaagagagaattcctttgaacatataatcagcctctattcccaaagtgtatatagtaccaaaaccttgtttaaatatatggctacataaattttggtacatccacccttggtggaacatgatacagccattctaagtgatataccctacttgggctttagggtagggaagcagttataaggccaaattaaatgtggggaaaatgctaggtgcaaaacaatatatatgggaaaatatactacaaggtagtaaaatattagtagtgactcgggcaataggtggttctatttccatcccccagttaacatagtcctgaagacacacctcagaagattcgtacatacaattatgagtagaaattgaccaaaagaaccagtatcttttgtggaaaaggtaactaaggcactaggaagaacttaagagcaagattttaaagtgtaagaaacgtgcttagagcttgccagcaaacaaga

SEQ ID NO: 670631 - DNA, 1446 bp, Homo sapiens
tattattataatactacctttgtaaaagagaattagtaccctgaaagagcactttgaaccattctgggagagggttttatataaaaataktattcaaatcatcattcaaaatacacaaagcgtttagtaaacctctgaccactgggaaagtaaatatgcttgtcaaaagctctgttgagttagcaacctcagaatgcatcactgtgccttttgctcagttcattcaaatatacaacctagttacacatttatatttttcatttattttttaccttactatacattttcatttatatttttccctaactaccttgctactcaaagtgtggcctgcagaccagcagcattgacatcacctggaagcttgttagacatgcagcctgtaagaccacacctgatgtactgaatcagaatcagcaatttaacaagatccccaggtgatttgtatgcacattacattttgagaagcattgctgtaaagttttacccaaagcaatgagagttaaatgaggaatttcagtgcagagaagaaatatagtacttatgaaaaaagagcgaatttgttaaagttcaggagaatggtcatgtagcagctgatggcaatagagtcagacagacttagcctccagctctgcctctcaccacctgtgtacatgaaacacttcttagtcccaccgcacaccctctcaacctgcctttttactccagccattgctgtgggaaccaacactgcaaacctgtaacctggtaatacctcacctcagctgctctaggtagctatcactttcacccagggtttcactgttgcccccatgagagatgcctttgggaacctgctcagtcattctaagccatctacatgccttgaagtcagaattctccctcatggggcaacccttgaccaaacctgaatgacagctgcattccattctaaggtgcattttatgagacctctcggaccgttcccagcagaataagccccatttgcccatagcagtggctagctgtatatagaactgtggctttcttctaaccagcagaatatgcaaagacagtagaacatcattcttgtgatgacattacattatatacagctctctctttctaacagactcactacttattatctctccttagctggctctgaagaattaaatggtcatgttgggaaagccacatggcaaggagctgagagtggcctctaggaactgagagtagactccagccaacagccagcaagaagccagggccctcaatcatgccacagggaggtgaattctatcaacacagcaagtaagcttcaaagcagatttttccccagttgagccattggataaggctgcagcctggcaacaccttgattgcaaccatgtgaggccctgagccaaggacccagtaagccatgccctgcatcctgcccactgaaactgtgagataattaatgtg

SEQ ID NO: 670632 - DNA, 1251 bp, Homo sapiens
ataatgaggcgtgtctgatttgcccatcaagaccaggaattcagttttttaggtttctttggggtctcattgggatctattcaatagatagagggggatctattcaatcagttgcggggcttagaattttatttttggtttacaaaaccataaactggcccataaatatagagcctcacagttattcaagtcagagtctttcctactgccctgctagaatatttgtcaccagtgtgaaggaaatcaaaatattttacctcaaaatatattttttgacatatgaaatagctgccacagggctagcccactgaaatggcccccaaaagctgccttctgtgggggaaatttgcatcttagagaatctccgtaaatgcagccatgacttctctttctaggcttttcctggatctagtttaaattaattaagaatctgacaccttaaaaagtctaaaaagaaacatttcccatctattctttctgatggctactgcctaggaggcttcatctacctaacatggacggcttgtcctctctccactctcttttcgcccctctcctctctctctcctcttcttttttgagatggagtctcgttctgtcactcaggctggagtgcggtggcatgatctcagctcactgcaacctccgcctcctgggttcaagcgattctcctgtctcagccttctgagtagctgggattacaggcgcccaccaccatgcctggataatttttgtatttttagtagagatggagtctcaccaggttggccaggctggtctcaaactcctgacctcaggtgatccgcccgctttggcctcccaaagcactgggattacagacgtgagccacaatgcacagctgggcccccattctttctataacctcaagatggtgttcactggggtttgagtcttcattctgaagactcctgtggatacaagttaaataactttgtatgccttttctcctattaatcagttgtcctcatgtctgatttttcagcaactttagcaagaccattggcccccacaagagtattgagaaaatataaagagattattatatgctgttttgcttttgtttgtttctatgttttgctttttgggggaaagaggagacaaaagaaggtggaaatgaggagtaaaaagttcaacatagaatgtcgatttgcwgtatttactgattacagcaggaaacataaatcctcttgcttattattaaaaaatacagccctgaatgtgtgtcctaca

SEQ ID NO: 670633 - DNA, 618 bp, Homo sapiens
gatttaacacttttttgtgaaatagtaggccgtaatcaattaataaatggttatttttagaagatactttctccactgatgatcaacattggcaaagttaaatacacccttagygctatagaagtatttagaaatatgtgtggtaaattaaggccaaaatatattatattcatttttaaattaaaaaaattaaaattaacacattgtagttgtgcatgtttataaggtataatttggtctttcaataactctttaacatattgattttatttcctttggatttttacccaggagtgggattgctgaatcacatggtaattccatttttaattttttgagaaacttccctactgttttttataatggctgtactaatttacatttgtgccagtggtgtgtgagtgttcttttttctctacatcctctccaacacttattttcttttgtctttttgatagtagccattctgactgaagtagggtaatatattattatggttttgatttgcatttccctgatgattagtgatgtgaagcattttccatattcctgttggccatttgtaggtcttctttgaaaaactattaagatgttttactcatttttaatctttttttg

SEQ ID NO: 670634 - DNA, 641 bp, Homo sapiens
ttaaaaaatattctttatctgatttctcttcataatctctgtagcaactttttcattgtgggttttcaataaacctggaaataatatatctattaacaacacaatgcaaaggaaaatgacttttaaaaagagataaactgtcgtatttttattttaggactctataattaatgattgaaaatgccttaaaagacccttatgggaaactgttaaaagtgttttgtttgtttgtttttaaataaaaagttatttagcatgaacatacctagaaaaatgaaatgagttgtataaattcagtgtgtaaatgtaaatgaataaaataatatgtgttagatggggtgactggtaatataccagcagtcctgccataaacaactttaaaactggaaaaacatgtgaagcaaacattttcaggcagcagccaacagcagtgcaagactgtgcacactgacagaagggaatctctycctatgctcccatgattgcccagctttctgacagccaattccctgactatggtgcaaggagccccagtctgaggagagaatgtggtactcagagaaaccgaagagacagagatcagagttgagggcagcttaggcaggatagagtagggcatgaaagacaagggaaattggcaa

SEQ ID NO: 670635 - DNA, 635 bp, Homo sapiens
ttaaaatactataaaataaagagaaataaagtaaaatacaactactaaagtaatctacaagaagggggaattgaaatgactcttgcctgcatgtttagacttaactctcagtacttcatatgccacatttcattcacactgtgtgtttcctcaaaaattctcattcatgtggtccttacaacacatgattctctcttcctgtatattctttccagctttgcaacctattccacttaagagttattcatcttttagaatgaagctcagattttgtctcctttaagtagagtgattgtattttattcaaacaaggacaacttgaagtgagaaggatattctrttgataaccacatattataagaggtataaatggtataaccagttctgttctgggcaaactagtgggtgaggacatttttgtctaaagtccctcttagcactataggttatatgtaatagttatctcaattctgcttaaaaaatcattctccacaaataaaactttataagtcaacttacttttaaatgttcataacgttattctgatcctagtcagaagcgttcaatgtgagaatttttattatctttttacaaagctatagctttgcatttgagagaaaaaagtaccttacatt

SEQ ID NO: 670636 - DNA, 635 bp, Homo sapiens
ttaaaatactataaaataaagagaaataaagtaaaatacaactactaaagtaatctacaagaagggggaattgaaatgactcttgcctgcatgtttagacttaactctcagtacttcatatgccacatttcattcacactgtgtgtttcctcaaaaattctcattcatgtggtccttacaacacatgattctctcttcctgtatattctttccagctttgcaacctattccacttaagagttattcatcttttagaatgaagctcagattttgtctcctttaagtagagtgattgtattttattcaaacaaggacaacttgaagtgagaaggatattctgttgataaccacatattataagaggtataaatggtataaccagttctgttctgggcaaactagtgggtgaggacatttttgtctaaagtccctcttagcactataggttatatgtaatagttatctcaattctgcttaaaaaatcattctccacaaataaaactttataagtcaacttacttttaaatgttcataacgttattctgatcctagtcagaagckttcaatgtgagaatttttattatctttttacaaagctatagctttgcatttgagagaaaaaagtaccttacatt

SEQ ID NO: 670637 - DNA, 647 bp, Homo sapiens
ttttttccttgtagtgtttcttgacatcaactggctgaggcttccatctgcaaaggcagttaagatccatgtaggctgtaaaatgagtgggtgagattttagcctttatattgtcagcgtttaacaacaatagaggctaatactttagctatttgaaattcyttcctcttgccacacttcaaagggcatacaattccaaaaagagtgaagatgagacataccaagagctaatctcttggactcatgtgccatgtttatactgttaagagccactttctacaatatagtttcaaattgactctgatttggtaactgaataggctgtaactgtggcataagatttccaaggtacagactaagactgaattgatccataaaaggatggttgatttaattaatcaacagataatcaagcggtgaggagagaggcatactgcactggaaatggctcttatttgaacctaggcttaaggaatattgaaggagactatcacaaagttaaaaccataaattcaacaatggaatgttttaagcttcattcatcttagaaataaagtttgcagataatatgaaaaaaattcaagagttaaatatagggggattgaaatgtcataaatgattatgtctcaggaaatggttttaccttt

SEQ ID NO: 670638 - DNA, 591 bp, Homo sapiens
catgtaaatgacaagttcatgggtgcagcacaccaacacgacacatgtacacctatgtaacaaaactgcacgttgtgcacatgtaacccagaacttaaagtataattaaaaatatatattccaacaacaaaagaggtggacaaaatgaaacaacaaacgtygacaactgtttaggttggtcaatgggtaaataaagggccataagctaataaataaatacataaataaataggtgaatatgtagagagagtgacaaatagtaaggaaaacaagagaccagggaagaataagaagtgtccacctagggaagaattagtgaccaaggaagtccttaatgatgggaatggaactcaaagggatgacaaaagaatgtgaaaaagcagacacataaggccaacacaaaaatgaagacaaaagagaaaactagagagaccaaaaatgaattagagactgggcctggtattatgtctcctactagggagtctgagcatacaaaatctagaggattaggtgaagaaaggacaagtctggaactgagagaggagtaagaaagagaatgaataaaacaccacaagcagtgctcacccccca

SEQ ID NO: 670639 - DNA, 591 bp, Homo sapiens
catgtaaatgacaagttcatgggtgcagcacaccaacacgacacatgtacacctatgtaacaaaactgcacgttgtgcacatgtaacccagaacttaaagtataattaaaaatatatattccaacaacaaaagaggtggacaaaatgaaacaacaaacgtcgacaactgtttaggttggtcaatgggtaaataaagggccataagctaataaataaatacataaataaataggtgaatatgtagagagagtgacaaatagtaaggaaaacaagagaccagggaagaataagaagtgtccacctagggaagaattagtgaccaaggaagtccttaatgatgggaatggaactcaaagggatgacaaaagaatgtgaaaaagcagacacataaggccaacacaaaaatgaagacaaaagagaaaactagagagaccaaaaatgaattagagactgggcctggtattatgtctcctactagggagtctgagcatacaaaatctagaggattaggtgaagaaaggacaagtctggaactgagagaggagtaagaaagagaatgaataaaacaccacaagcartgctcacccccca

SEQ ID NO: 670640 - DNA, 639 bp, Homo sapiens
gccatgcatttgttaatgataactcattatctttagtgttaaagtaagatggcttcttagaaggaattttgtctgctgatccatagtgaaagcaaaataaatatttttctttgttttaaagttgattgcctctagagatttataatgacatgtctagaagccatcacttcctctcctgagccacagtttgcactgtacttgattcaacatttcactaattcctttacattaaaaaaatgtaatatttaattttttttcaaagttgtttttgtttgtttgtttgtttgttttgcgatggactctgtcatccgggctggggggcagtggtgcgatctcggctsattgcaacccccacctccagggatcaagtgattctcctgcatcagcctccagagtagctgggattacagacgtgcaccaccacccctggctaattttgtatttttagtagagatggggtttctacatgttgccaggctggtctcgaactcctggcctcatgtgatccaccggcctcagcctcccaaagtgctgggattacaggcgtgagacaccacaccagctttttttaaacatttttgatctatggttggttgaatctgtggatgtgaaacccacaaatacagagggccaactgta

SEQ ID NO: 670641 - DNA, 639 bp, Homo sapiens
gccatgcatttgttaatgataactcattatctttagtgttaaagtaagatggcttcttagaaggaattttgtctgctgatccatagtgaaagcaaaataaatatttttctttgttttaaagttgattgcctctagagatttataatgacatgtctagaagccatcacttcctctcctgagccacagtttgcactgtacttgattcaacatttcactaattcctttacattaaaaaaatgtaatatttaattttttttcaaagttgtttttgtttgtttgtttgtttgttttgcgatggactctgtcatccgggctggggggcagtggtgcgatctcggctcattgcaacccccacctccagggatcaagtgattctcctgcatcagcctccagagtagctgggattayagacgtgcaccaccacccctggctaattttgtatttttagtagagatggggtttctacatgttgccaggctggtctcgaactcctggcctcatgtgatccaccggcctcagcctcccaaagtgctgggattacaggcgtgagacaccacaccagctttttttaaacatttttgatctatggttggttgaatctgtggatgtgaaacccacaaatacagagggccaactgta

SEQ ID NO: 670642 - DNA, 639 bp, Homo sapiens
gccatgcatttgttaatgataactcattatctttagtgttaaagtaagatggcttcttagaaggaattttgtctgctgatccatagtgaaagcaaaataaatatttttctttgttttaaagttgattgcctctagagatttataatgacatgtctagaagccatcacttcctctcctgagccacagtttgcactgtacttgattcaacatttcactaattcctttacattaaaaaaatgtaatatttaattttttttcaaagttgtttttgtttgtttgtttgtttgttttgcgatggactctgtcatccgggctggggggcagtggtgcgatctcggctcattgcaacccccacctccagggatcaagtgattctcctgcatcagcctccagagtagctgggattacagaygtgcaccaccacccctggctaattttgtatttttagtagagatggggtttctacatgttgccaggctggtctcgaactcctggcctcatgtgatccaccggcctcagcctcccaaagtgctgggattacaggcgtgagacaccacaccagctttttttaaacatttttgatctatggttggttgaatctgtggatgtgaaacccacaaatacagagggccaactgta

SEQ ID NO: 670643 - DNA, 499 bp, Homo sapiens
ataggtggctttattagctaatctcttcacaaatgaagttgattgggaactaaaattaatacgttgcaaacattttccaaccttaaactccttaaatgtcagtctttagatgtcttctacatttaatgtcccaaagaaaaagactagttagggtttcttcgtgttttggtaacctattttgtatatttttttagcagtttttcttggaggttttgtttgactcaaaatgatcgagaaaacattcactagtatagtagggtggtgatttcttttcaataacttttcttggtggactctgaatccttaatttacaacttcagtctttcttgtattgtaatgtgtttgaatacttcctctgttcaatttttccakgttctttggacatcattgggttgcattcttctagtcaccttcctctagtcacagtggcttgaccacactagatgtggtataatttactttggttgaattttataaaaagctgaggtaaaagccatac

SEQ ID NO: 670644 - DNA, 642 bp, Homo sapiens
acaggccatggagtcagttctgttttaataggaggaagaaatataccttcacattactgttatttcagaaaaaataatgaatcaaggaaatataatctcgttcatataagtaaatactctatttctctaaagtttttatagtaatactgaataatactcaaatatgagtacttgaaatatagccaccatgagtcatttaagtaaaaattgtttaaggttgttatcactacatggttaaaaktttaatatgaagacattattcttttaaccatgtatttctctccggcatagtgcctgatttattctcccagctcagagataatcacttcagttgctaatattgtatgaaacagtatcttcactttaatatgtgctatatttgtgtatgatattcaatgtatgtgaaaggtgaattattttctattgcaaggatgattttaaactgttctttgcagactccttgaaggtaaataatatcctagttctgtgaaaggtaaggttgtacttagaaattatcttctttttacaaatagcataattcttttagtatagagtaaaagagcttcaatctagtccgttgtaaacttcctcatatcccactctaacaatttggcaaggaggacttcacttggctgctgcttg

SEQ ID NO: 670645 - DNA, 600 bp, Homo sapiens
tcagccttgcatgagtactgaaagggaaagacagaagggaaggtgtatatcaaaggaagagttcatagccttaggcaaagtaaagagaactctatctcagaaacggagaaacgggaatacaggggtaaggataaaagttggatgttttgtatgaaagtcttttggatggacacttaaaattattacccagtgtaaataaaggtgttaaaagacacacagacagggagtagagagtgctaacaagacagtagttaatataatgaagtgttggagttacagtcttctcagggagaccaacaggaagtaggttcataacagatgtcgatagagctgtcagagcttttttattctagactttatgcagaaagcatagaaatgacagcataaaaattgagactactgagatacggasttaggaatataagtgcatacttttttgaagtgtactttaaaaatacattatgaaatagaatagcatacataaaatttaatattaaacctaatctaatattaaatgccacatgtaaaagaaaactaaatatacttttttctctcatgagtcacttattcacaagtgatttatatagctgttgcataaat

SEQ ID NO: 670646 - DNA, 635 bp, Homo sapiens
ttttttggaaacagagttttgctctttcacccaggctggagtgcagtgtcgcgatctccactcactgcaacctctacctcccggttcaagtgattctcctgcctcagcctccaaaatagctaagatgacaggcttgtgccaccacacccagctaattttttgtacttttagtagagacagggtttcaccatgttggttaggctcgtctcaactcctaacctcaaatgatctgcctgctacggcctccccaaagtgctgggattccaggcgtgagccaccacgcctggcsaagaatagatttttaatctattttgtttttcaaaaatcaaatctatggcctgagccttaatgtccattttgcccaattattgtggtttacagaagctgttcactttctctgtggctcatctaatgaagttccagatttagtcaagtgcaggtttctttatgcttgttaccagtgctttagttaaaccggaagcctcttgaagattaatactgtgacttgagactttaatgtagcccagtgtctagtgtgatgccctacggagtagacacaataataaaatgattatggatgtggctttcatgtgcataaaataattttattttattttatttttttgagatggagt

SEQ ID NO: 670647 - DNA, 635 bp, Homo sapiens
ttttttggaaacagagttttgctctttcacccaggctggagtgcagtgtcgcgatctccactcactgcaacctctacctcccggttcaagtgattctcctgcctcagcctccaaaatagctaagatgacaggcttgtgccaccacacccagctaattttttgtacttttagtagagacagggtttcaccatgttggttaggctcgtctcaactcctaacctcaaatgatctgcctgctacggcctccccaaagtgctgggattccaggcgtgagccaccacgcctggccaagaatagatttttaatctattttgtttttcaaaaatcaaatctatggcctgagccttaatgtccattttgcccaattattgtggtttacagaagctgttcactttctctgtggctcatctaatgaagttccagatttagtcaagtgcaggtttctttatgcttgttaccagtgctttagttaaacyggaagcctcttgaagattaatactgtgacttgagactttaatgtagcccagtgtctagtgtgatgccctacggagtagacacaataataaaatgattatggatgtggctttcatgtgcataaaataattttattttattttatttttttgagatggagt

SEQ ID NO: 670648 - DNA, 701 bp, Homo sapiens
aagtacttgaagaagaaagtatttcagtgatgagatggatttcaaaaattgtgagggacaaagattagcaaacagaagaaaatgttttctagatagggaacaaaactgatgaaaagttatagattaaagtttaaagagtagatggggagggccatagccaagaggcaggaaggcatgaatcagcctttttgaatgactttgtataaatggtgaaatggaggaagtagaatagaatagagaagatattatctctgtctttaaaaagcatggagtctgattatgagatgcataactaagaaatgaaatagattttaaaagttaaaatttaaaagtaaagaaaaaaaaaggaaacctacaattcaatgacatgtgtagtccttaccttcctaataatgggtaagaactggaataagttactmctactctcccaccttagtgatccaaggaaaagcaagtagggaatggtccaccgtgactactggctccgggaaaccactatgagcatcctgcttataaagacagcttaactcaaaggtcgttgctctctgtctcagagaaccataccttaagaaactgaccaagccagacctgaggacttctctccagtgtgagttcgctggtggtgattaaaagtggaacgctgactaaaggctttcccacattcactacattcataaggtttctctccggtgtggactctc

SEQ ID NO: 670649 - DNA, 701 bp, Homo sapiens
aagtacttgaagaagaaagtatttcagtgatgagatggatttcaaaaattgtgagggacaaagattagcaaacagaagaaaatgttttctagatagggaacaaaactgatgaaaagttatagattaaagtttaaagagtagatggggagggccatagccaagaggcaggaaggcatgaatcagcctttttgaatgactttgtataaatggtgaaatggaggaagtagaatagaatagagaagatattatctctgtctttaaaaagcatggagtctgattatgagatgcataactaagaaatgaaatagattttaaaagttaaaatttaaaagtaaagaaaaaaaaaggaaacctacaattcaatgacatgtgtagtccttaccttcctaataatgggtaagaactggaataagttactcctactctcccaccttagtgatccaaggaaaagcaagtagggaatggtccaccgtgactactggctccgggaaaccactatgagcatcctgcttataaagacagcttaactcaaaggtcsttgctctctgtctcagagaaccataccttaagaaactgaccaagccagacctgaggacttctctccagtgtgagttcgctggtggtgattaaaagtggaacgctgactaaaggctttcccacattcactacattcataaggtttctctccggtgtggactctc

SEQ ID NO: 670650 - DNA, 608 bp, Homo sapiens
cttcttcaccccattaaatgtttgttgggctcttaagtgccaggcaatagggacagaaaaataagatagtttctgttctggagaaacaatagttttttccagactaaaactggttatgaatcttgaagtatttgttttaggttgtgactagtgtatgtagcactatacctagtgtatgtagcacaacctaaaacaaatacttgaagatacatmaccaattttaaacatatactaaaaatctttccatctgggtgaccttgggcaagttatttagcctccctctaccctggtttcttcatctttaaaatggaacaaaaaggtccttctttgatactttcatccttttgaggctaattaccttattcaatgtccaatgtctgtattcagtacagaaaaacagccaccatttatagaactttgtgccaggatggcagcagagccaggatctgagtattaatctatatatgtttatagttccaaccattataccatgttgaaatttgtgcttttacatgtcttttcttcacagtatcccagcatattcttcataggcagagatggttggtttttttggtttttctgtgacagggtctcactctgttgcccaa

SEQ ID NO: 670651 - DNA, 608 bp, Homo sapiens
cttcttcaccccattaaatgtttgttgggctcttaagtgccaggcaatagggacagaaaaataagatagtttctgttctggagaaacaatagttttttccagactaaaactggttatgaatcttgaagtatttgttttaggttgtgactagtgtatgtagcactatacctagtgtatgtagcacaacctaaaacaaatacttgaagatacatcaccaattttaaacatatactaaaaatctttccatctgggtgaccttgggcaagttatttagcctccctctaccctggtttcttcatctttaaaatggaacaaaaaggtccttctttgatactttcatccttttgaggctaattaccttattcaatgtccaatgtctgtattcagtacagaaaaacagccaccatttatagaactttgtgccaggatggcagcagagccaggatctgagtattaatctatatatgtttatagttccaaccattataccatgttgaaatttgtgcttttacatgtcttttcttcacagtatcccagcatattcttcataggcagagatggttggtktttttggtttttctgtgacagggtctcactctgttgcccaa

SEQ ID NO: 670652 - DNA, 623 bp, Homo sapiens
aagtttgttaaattatacatcaagaacggatttcattgtagttctccctaaatgacctgtatttactattttaatgcttgcattatcctcaaaaacaaaaaattatgagggaggttcttatcttaaatttgcagaattcaaaactcccagagaaattgaatagttggccacaaaagtaaatctaggtctgtctttgcgaaacctttctatacccctaagtaaaacagacccattttacttgatttcagaaccattttttttttccccctggaagaatcgggacagccttacgggaaatcttcagaatttttttttttaacaacctctatgcctttttaaaaaataccatatattcttagattgccaaacaatatccatctactgataccagttagctatctttttttttattcagtgtcacaaattatccatttctgaaatagttctgccagtagaaaagccatctccttgtaaacaatttatttgctaactgcaaatgacctcctatttcttctcactctgtgatagtttcctaaaagatgtttaacaatcaaagatagatatttttattccaatyatcaaatacatttgaaaatacttttttaaaagcctgaatttaagaa

SEQ ID NO: 670653 - DNA, 2183 bp, Homo sapiens
cccattttcatttataccccttcctctggtggttggcctggagartatgtcgctctttccaacttagttttgcaaagggaaccagtgcccaaccactcagacagtgagctactgtgtgtaggtcagtactcacctttagcttttaagatctgtctagccacatttttaaggaaactttaggttgtctacttaatgagtgcctgctttgttctaaatactgagttgtaaactatgtctatgtgtgtaagttaatgtgaaaaagtaaacaaatatctggagaatgtgatcattatagaccattatgtaactcactgagcaaaaatagtagcaatatcactttagtaagagattttttttaaatcacttgtctgtagacatttgcctcaagtcttcagtttgcttagcctgtataaatacacctttagagaatgctgcattatgagggagtttattgcataatttttctcgtgtgttaaagactggggctttccatttgggtttagtctcttgtttgggcagcaggagatagataacttgtttagtatacttgtgttaactttctgttcccgaaggaatttctataccatgcatttattcatcatgctagaactcctttaaaaaacagccctgttgtcaacaatggaaaccatgcccttggaattccttgagtctacctatgtgacaccttttataattgttgagattgttaggtaaggaatgttcccaaagtgggtctttttcagctgtctttttattttccttgtgattatatgtgaaggtagatgacacattttcttttttacagatttttacatgagttagcccagattcctaattttgctgaacgtgcccagtgcataatcttcagatctgtcttttctgagggtatcacctccttgcacagaaaggtagagatcatcacgcgagcttctaaggtatgtttactgtctaatttaaaagatagccttgctctgaagagtaaagaagaaagtgggagagaccactttaatgccattatagaaacctttttggactcagattgtatgtttttctaagtgtaaatttgatgattatcttgcccgtgtgtgtgtgtatgagagagagggagagaaaaggagatgcagatggatgaagagggagaaggagggaaaaaaatgacacttttacagattccttctaaaaaattctgagtatcttccaaagtacatactggccactaaaaaccaatctaaatagcatggtctgtttcttattttacaatttggattgcagaagagattttgcttgagatccatacatttgatcatctgaaatgtgtcaacctaataagaggatcctagagacttgataagtgaaataaatgactgacagtgagtcattggcaaagaaatatttgttggctttactacactggtgttcattataaggttaaattctagcacctgcctttttctcacagttgacccatgctcttaaggacacgttattcttctccacaaatactgtagtactttgttccttatttggagaaatgattttttttcctctaagatatgagatatttcagtagagaataaatattactgaaatataattatacacgcactaataatacctgaaaggcaggagcagaaaaagaagtctgcctggagctgaattttttttctttctttctttctttcttttcttttgagacggagtctcattcttcttgcccaggctggagtgcagtagcgtgatctcggctcattgcaacctctgcctcaagggctcaagcgattctcctgcctcagcctcccaggtagctgggattacaggtgcctgccatcacgcccagctagtttttgtatttttagtagagatggggttttaccatgttggccaggctggtcttgaactccagacctcaggcaatccacctgcctcggcctcccaacgtgctgggattacaggcgtgagccaccgtgcccagccattactttttttaccctgaaataaagggggataaaatgtgaattaagaccataaagaaaaaaaatttcaattggaaaattgtacttgaagtaaaaaataaataaaaggacaaacaaatgagacagggagacaaagaaaatcctaagcagcttgaaattgtaaaagttaatagacaatacaacaagcacttaataaagtaagtttaataa

SEQ ID NO: 670654 - DNA, 2183 bp, Homo sapiens
cccattttcatttataccccttcctctggtggttggcctggagagtatgtcgctctttccaacttagttttgcaaagggaaccagtgcccaaccactcagacagtgagctactgtgtgtaggtcagtactcacctttagcttttaagatctgtctwgccacatttttaaggaaactttaggttgtctacttaatgagtgcctgctttgttctaaatactgagttgtaaactatgtctatgtgtgtaagttaatgtgaaaaagtaaacaaatatctggagaatgtgatcattatagaccattatgtaactcactgagcaaaaatagtagcaatatcactttagtaagagattttttttaaatcacttgtctgtagacatttgcctcaagtcttcagtttgcttagcctgtataaatacacctttagagaatgctgcattatgagggagtttattgcataatttttctcgtgtgttaaagactggggctttccatttgggtttagtctcttgtttgggcagcaggagatagataacttgtttagtatacttgtgttaactttctgttcccgaaggaatttctataccatgcatttattcatcatgctagaactcctttaaaaaacagccctgttgtcaacaatggaaaccatgcccttggaattccttgagtctacctatgtgacaccttttataattgttgagattgttaggtaaggaatgttcccaaagtgggtctttttcagctgtctttttattttccttgtgattatatgtgaaggtagatgacacattttcttttttacagatttttacatgagttagcccagattcctaattttgctgaacgtgcccagtgcataatcttcagatctgtcttttctgagggtatcacctccttgcacagaaaggtagagatcatcacgcgagcttctaaggtatgtttactgtctaatttaaaagatagccttgctctgaagagtaaagaagaaagtgggagagaccactttaatgccattatagaaacctttttggactcagattgtatgtttttctaagtgtaaatttgatgattatcttgcccgtgtgtgtgtgtatgagagagagggagagaaaaggagatgcagatggatgaagagggagaaggagggaaaaaaatgacacttttacagattccttctaaaaaattctgagtatcttccaaagtacatactggccactaaaaaccaatctaaatagcatggtctgtttcttattttacaatttggattgcagaagagattttgcttgagatccatacatttgatcatctgaaatgtgtcaacctaataagaggatcctagagacttgataagtgaaataaatgactgacagtgagtcattggcaaagaaatatttgttggctttactacactggtgttcattataaggttaaattctagcacctgcctttttctcacagttgacccatgctcttaaggacacgttattcttctccacaaatactgtagtactttgttccttatttggagaaatgattttttttcctctaagatatgagatatttcagtagagaataaatattactgaaatataattatacacgcactaataatacctgaaaggcaggagcagaaaaagaagtctgcctggagctgaattttttttctttctttctttctttcttttcttttgagacggagtctcattcttcttgcccaggctggagtgcagtagcgtgatctcggctcattgcaacctctgcctcaagggctcaagcgattctcctgcctcagcctcccaggtagctgggattacaggtgcctgccatcacgcccagctagtttttgtatttttagtagagatggggttttaccatgttggccaggctggtcttgaactccagacctcaggcaatccacctgcctcggcctcccaacgtgctgggattacaggcgtgagccaccgtgcccagccattactttttttaccctgaaataaagggggataaaatgtgaattaagaccataaagaaaaaaaatttcaattggaaaattgtacttgaagtaaaaaataaataaaaggacaaacaaatgagacagggagacaaagaaaatcctaagcagcttgaaattgtaaaagttaatagacaatacaacaagcacttaataaagtaagtttaataa

SEQ ID NO: 670655 - DNA, 2183 bp, Homo sapiens
cccattttcatttataccccttcctctggtggttggcctggagagtatgtcgctctttccaacttagttttgcaaagggaaccagtgcccaaccactcagacagtgagctactgtgtgtaggtcagtactcacctttagcttttaagatctgtctagccacatttttaaggaaactttaggttgtctacttaatgagtgcctgctttgttctaaatactgagttgtaaactatgtctatgtgtgtaagttaatgtgaaaaagtaaacaaatatctggagaatgtgatcattatagaccattatgtaactcactgagcaaaaatagtagcaatatcactttagtaagagattttttttaaatcacttgtctgtagacatttgcctcaagtcttcagtttgcttagcctgtataaatacacctttagagaatgmtgcattatgagggagtttattgcataatttttctcgtgtgttaaagactggggctttccatttgggtttagtctcttgtttgggcagcaggagatagataacttgtttagtatacttgtgttaactttctgttcccgaaggaatttctataccatgcatttattcatcatgctagaactcctttaaaaaacagccctgttgtcaacaatggaaaccatgcccttggaattccttgagtctacctatgtgacaccttttataattgttgagattgttaggtaaggaatgttcccaaagtgggtctttttcagctgtctttttattttccttgtgattatatgtgaaggtagatgacacattttcttttttacagatttttacatgagttagcccagattcctaattttgctgaacgtgcccagtgcataatcttcagatctgtcttttctgagggtatcacctccttgcacagaaaggtagagatcatcacgcgagcttctaaggtatgtttactgtctaatttaaaagatagccttgctctgaagagtaaagaagaaagtgggagagaccactttaatgccattatagaaacctttttggactcagattgtatgtttttctaagtgtaaatttgatgattatcttgcccgtgtgtgtgtgtatgagagagagggagagaaaaggagatgcagatggatgaagagggagaaggagggaaaaaaatgacacttttacagattccttctaaaaaattctgagtatcttccaaagtacatactggccactaaaaaccaatctaaatagcatggtctgtttcttattttacaatttggattgcagaagagattttgcttgagatccatacatttgatcatctgaaatgtgtcaacctaataagaggatcctagagacttgataagtgaaataaatgactgacagtgagtcattggcaaagaaatatttgttggctttactacactggtgttcattataaggttaaattctagcacctgcctttttctcacagttgacccatgctcttaaggacacgttattcttctccacaaatactgtagtactttgttccttatttggagaaatgattttttttcctctaagatatgagatatttcagtagagaataaatattactgaaatataattatacacgcactaataatacctgaaaggcaggagcagaaaaagaagtctgcctggagctgaattttttttctttctttctttctttcttttcttttgagacggagtctcattcttcttgcccaggctggagtgcagtagcgtgatctcggctcattgcaacctctgcctcaagggctcaagcgattctcctgcctcagcctcccaggtagctgggattacaggtgcctgccatcacgcccagctagtttttgtatttttagtagagatggggttttaccatgttggccaggctggtcttgaactccagacctcaggcaatccacctgcctcggcctcccaacgtgctgggattacaggcgtgagccaccgtgcccagccattactttttttaccctgaaataaagggggataaaatgtgaattaagaccataaagaaaaaaaatttcaattggaaaattgtacttgaagtaaaaaataaataaaaggacaaacaaatgagacagggagacaaagaaaatcctaagcagcttgaaattgtaaaagttaatagacaatacaacaagcacttaataaagtaagtttaataa

SEQ ID NO: 670656 - DNA, 649 bp, Homo sapiens
aattgtggtatatatcatcagcatgacagaaactatttaaagtaatgtggaagcagatattgacttattgaaacagaaactgatttatatggttgaataaaaaggtcaaattatgatcatactttgattaaaatatgtatatacgccaggcgtggtggctctgcctttaatcccagcactctgagaggccgaggtggatggatcagttgaggccaggagttcaagaccagccggccaacatggtgaaacctcatctctactaaaaatacaaaaattcgctggatgtggtggcatatgactataatcccagctacttgggaggccgaggcaggagaatcactcaaacctgggagctggrggttgcagtgagctgagatcacgccactgcattccagccttagcaacacagcgagattccgtctcaaaaaagaataaaaatacctgaaatagtacatcccaaaatgttaatcagtatttatctctgatgttttattttcgcctttcttcattttctattttcagtgaacagacattaattaatagttactaatttttaagtttaaaaaggccatcacttagtggagaatcaaggcttgatttcagccaggggcaaattcaagcagatagcacaaggcagccaggttccaca

SEQ ID NO: 670657 - DNA, 1466 bp, Homo sapiens
ggacacattaacccagtacactaatatgggtactgtcacaggatattaaatttggtcctaaatgtttattctggatgccaaagggaaacatgacggatgatataaatctcaatagctaataaaaggaaaataccagtttttcaagcaagaaagataacacatttttcccaagtactactacttattatttgagactatattcaacattggagagaaaactaaaaatttctatcccattctaaatgtatcctgatacctttacttgtatagtaaatatcccttattttttctcttttgaagtcagtatttgtagtagattttcctaaaatatatatagtcaaaactctattacatggacatgacttaaaagttatttccttttactataacatggaccctacttaagtcattagatagcagggaaccgctaattttgagaacctcagtggtatcctaaactatacacatgaattaaaaagaactataggctggacatggtggctcacgcctgtaatctcagcgctttgggaggccaaggtgggcagatcacgaggtcaggagtttgggaccagcctggccaacatggtgaaaccccgtctctactaaaaatacaaaaattagctggatacggtggcgtgcacctgtaatcccagctactcaggaggctgaggcaggagaatcgcttgagcccaggaggtagaggcagcagtgagccgcgatcgcaccactgcactccagcctgggcaatagagtgagactctgcccaaaaaaaacaaaaaacaacaaaaaaaaaacaaaaaaaaactgtacagtaagtcttggtttcatcttaaattcccattccaaactactggtaccttgtgttaagaggagcccctttcttacagaagcaagacagctataatcagttagtaatgtctaccggtgttttgaccatactatcatatttaataaagccatctggacctatgttttgttggcctctaatggtatcaatagcaaagttggatcttcttgtaccttttatcagaacattaagatgtaaccaactctttcaaaggatatatcatagtaaagtgttgccaatatagtatttgatttaaaaatccaaaattcttagctggttttagatttcctgtcaatggcctacaatgtcatattaatgcatttaaagtttttctattctcttttacaaacagggaacataaaaagtatttaaggcttttttgtttgattttagtctgatgtawgctcaagaaaatcttgaattttattttaaagcctaattataatctattcagtgactgggaagttcacaatgatttatgtgcagctacactggctcaagccatgaatttttatcaaaatctttatggaggtttagaaaggatataagcaagtattctacttggaaaatacaataaaccaaaagtaaaagaaacaaaggctttaataggctatgctat

SEQ ID NO: 670658 - DNA, 650 bp, Homo sapiens
caagaatctttcagtgaacaagacaaagccccagagcacatggaacttaaaagtaaacaaatgtagaatataatttcgtgtaaagatgagtactatgatgacaactaaaacagagcaggagaaaatagagtactaagagaagggctctattccatgaggccatcaggaaaagccctttgatgagaggaccttaagagttctaaagggagggaacaggccagtagagrgctaggggaagactgtttccaagcagagggtacagcaagtgaaaggcaaggagaaaggccttcggtttggaaatgaattaggtgcattcaaagaacaataagaaggttatgaggctggaacagaaggagcaaccgagaaagtggtgggcattgagatctaacagattggcagacaccagatcatgcggggaccaacagaccaggaatccatctagacagttactttgggcaggtacagttatttttacccaaaaaacattttaaagacacatctgttacaggcactgcaaaaactgatatttaaagattctcatatataatacccaggaaagaatacagtctgcctgttccttatatgtgacatactgccatgtttctcaaacaattcctgttttcttaagtgcccaaggatcctcaataatg

SEQ ID NO: 670659 - DNA, 621 bp, Homo sapiens
agagcaaagacgctgtgattattttctgaaaatttgaccccatatccccgtgcagttaatcaagcaattacttaatctaaaagtcaaaggggtctcctccccaacaaaccaagttccaaacttcaaatccctcttttaaaaaggttccaacccacacttagcagtaatagaaattacagatgagagagagaagacagaggtatatactatatagacattgtattaatatcttcttgtgacatttacaaaaattgaaccatattatactacagagaaaacctcaataaattccaactaataagtgttattcagaccatattcactgaccacaacagaaaaaaaaaagatacaaatagattaatgttatagaaagaaaygaggaatgagacccactcctgagagattaagccatccaaatttcactggtaaagggaaaaaagcaaaactacacttgtagaatatttaagagaataacaataatgggaacattacatatgtatgctaaagctggcatttctaattaaagaggaaaagatgttggaacaattagctggccttctgggagaaaataagtaaatttgtttcctttactgcataattctttaagctagatgaattcca

SEQ ID NO: 670660 - DNA, 597 bp, Homo sapiens
tgggcggcagagcaagactccgtctcaaaaaaaaaaaaaaaaatgagagcagaaatgaaaataactgaaaagaggaactcaatagagaaaatcaggagtgaatcctaatgtaaacggcggaccatrggtgatgatgtgtcaatgtggcctatcgattttaaagatgtaccaatgtggtatcagatgccaatagtgggggaggctgtgcgtgtgcagggatgggggcatttgggaacactgtactttctgctcaattttgctgtgaacctgaaactgctctaaaaaataaagtttattaaattttttaaaaagtgaccgcatagttctaaatctcaccccccttctctgtcctctagaaaaaaaaaattgaatttatcttttcaacactcttctaatacttcaaaacaaaatattcattcaaaacaagtctctcccctgagagtgtttaagaagttaattgtgctttcgttcccttaggatagactgactaaagagtctcccgggaggagcatgggaggcaggctccactctttgaccttggtagtagtcacattgttcattttatgactatttgttaaacattaaatgtacgtctca

SEQ ID NO: 670661 - DNA, 1176 bp, Homo sapiens
gaaaactgtttggaaaactggttttgccatagagtcaaacagttttaccctctgaccaaacaattccactgttttaaatatatacccatcaaatacatacataactaagaccaagaaacatgtaaagaattattctatgagtactattcacatagcccaaatcggcaaactacctaactgccatccaacaatagactgaattgtggtacataaacacaaataaaatatatgcagcaataagtataactgatctgcagtggacgtcaaaatgatacaataagtatgaatgagatgcagctacatttttgacccgcatcagaaatatggatgagcctcacaaaggtgattctgagtacaagaagccagacacacaaaacagtacataataatgagatattagttctgggtttcaaccttgattaagatacgcccacaatattgaggaagagagtggtctagagggaaatcaggacacaatttgagagaaaaaaattaccgtgcattacatactatttgatcttagtaatgtcacaatctacctggcttcattattcttctataaaatgggaataatgaaaccatacctcccaaaagcaaatggctatttcaaagaactcttgaggtcctacgtagctttaaaatctaaagctaatgaactaatgagatcatttcactactttgtatttttatcaataaaaacatgagtgactcttttaataaaaacagtaataacagttaacattgttctaagcactttacatttattacctattcagtgcttacacagccyctataaagtagatacaattgttatttccattatacatatgaggcaactgagtccatgagaggttaagcaatttgaccaaagtctcacagctaataagttgtggagtcagaattcagacccagaaaatccgacttgtaactcacagaattaactattcaatatgcaaagatattacagtaagtccactttaactaaaccaagatggcttttaaaattaagtttaaaataatctgatgtctaatcagcacatagaatattaaagtgtaatctatattatatactgaaactctgaccttgctcaaccaaaagaatgatgatttgtatttattcatataattctggactctgaggaaataccacttaaactaactgttgctactaggcaa

SEQ ID NO: 670662 - DNA, 608 bp, Homo sapiens
caaaacacctctggtgagcttagcaactggtcgataaaagtagatcacttagattaattataacagatggtttttttaaaaaaaaaaaaggaaagcaggctgtcaaacacagcactttcagatggaacttctctgagacctctaactaactgcaygttcctgaatgacttggaattctccttattaggaagatggagataatacgtacttatagagctgtaaagatcaaatgaggcacaaagtatgtgtcttgtaacctataggagaaatatggcttcattatggctgtaattactatggctttaacgatttggccttggcattcctgcctttggattttatcctctctgtttaactccagcacactattttaatggtccaggcaggaaattaagcccctcctcccaatgctttgtttatgtagattcaactaaagaaaaggcttggtttcttctgacttctttcccagaacaacaaccatcttgctattcatcagtatttatattcagataacgagctggagttgaagttaccgagggaaagtataaaggaagctgcaaaataggactgcccagaaatgcgcaaacaactccgatgaagcaagcctg

SEQ ID NO: 670663 - DNA, 583 bp, Homo sapiens
aaaaaggttttaaggttgtgaggaaataggtatgtgagtttcactcatcatcaccagttcttttagttatgtcacttggactcaaaagtacattttccataaaaaaatgaaacaaaatccatatttttaaatggagaaatgtaaaaagatgtgatctacaaaattattacttcttgttttctgccaaacagccagatttgtttttcaaatgtataattaattctaattaatcttgtgttcttgaaacactaactgctggagaagtttgagaaaatacaccagtatgcctgtctataktctgtagactaaaagcgctgttcagaagagatatatctgccacaggaatctcatgtgaacagagaggagagttgtgagactggaaaggatgaggaatcttctctgatgcattgtggatggcctgtgggcatagggcctctccttttaggtttatgttggtttccagccttagtgcctaagacctcagagaaaaaggtattctttgttttctttctttctttctttctttcttttttttgagacggaattttgctcttgttgcccaggctggagtccaatggcacga

SEQ ID NO: 670664 - DNA, 583 bp, Homo sapiens
aaaaaggttttaaggttgtgaggaaataggtatgtgagtttcactcatcatcaccagttcttttagttatgtcacttggactcaaaagtacattttccataaaaaaatgaaacaaaatccatatttttaaatggagaaatgtaaaaagatgtgatctacaaaattattacttcttgttttctgccaaacagccagatttgtttttcaaatgtataattaattctaattaatcttgtgttcttgaaacactaactgctggagaagtttgagaaaatacaccagtatgcctgtctatagtctgtagactaaaagcgctgttcagaagagatatatctgccacaggaatctcatgtgaacagagaggagagttgtgagactggaaaggatgaggaatcttctctgatgcattgtggatggcctgtgggcatagggcctctccttttaggtttatgttggtttccagccttagtgcctaagacctcagagaaaaaggtattctttgttttctttctttctttctttctttctttyttttgagacggaattttgctcttgttgcccaggctggagtccaatggcacga

SEQ ID NO: 670665 - DNA, 583 bp, Homo sapiens
aaaaaggttttaaggttgtgaggaaataggtatgtgagtttcactcatcatcaccagttcttttagttatgtcacttggactcaaaagtacattttccataaaaaaatgaaacaaaatccatatttttaaatggagaaatgtaaaaagatgtgatctacaaaattattacttcttgttttctgccaaacagccagatttgtttttcaaatgtataattaattctaattaatcttgtgttcttgaaacactaactgctggagaagtttgagaaaatacaccagtatgcctgtctatagtctgtagactaaaagcgctgttcagaagagatatatctgccacaggaatctcatgtgaacagagaggagagttgtgagactggaaaggatgaggaatcttctctgatgcattgtggatggcctgtgggcatagggcctctccttttaggtttatgttggtttccagccttagtgcctaagacctcagagaaaaaggtattctttgttttctttctttctttctttctttcttttttttgagacrgaattttgctcttgttgcccaggctggagtccaatggcacga

SEQ ID NO: 670666 - DNA, 1167 bp, Homo sapiens
gactttgtacagtgttctaagttttgctgcatcaaaaagaagtttaaatattttcatttaatgtggaaatatttttagatgaggaagatgattaagtgttgaaaatgtagcgatttgtttggcacaaagagaaaagaaatatgaagaatttttaataaaaatctgaccacaatggtgttggaacacaatctgtctgaaatacaagacagatactttatcccacaagctaagctgactttactaatagttttggacagttacaggtgtaattttagctactaaagggagcacaaattgtgttataagaatgcaatagaaacaatgggaaatgcaattaaatttttaaaagaaaaattgaatataaagttagcagagctaacacaaagcatatttttgtagcttttcaccaacaatgtatgtgaattcaagctattaagaaaatcagatttactttsgagcttcacatgtgaagagtgtgaaggttgtttttgctatgagtgctagctgcaaacattacataaaccttgcacctaatacaattattttagatatatttggtttacataatttaatccttaaagaaataccaaaaaaagaaagaaaaaatgttgatggatctggaaagaggcctatgcccaaaacccttgcttctctatagtcattgaggatgtttctcttttttttttttttttgcctacgtggctttaatttaccattctgagacacagtatgtgtggagaaaatatgtggagaaaaagcttttatgtgtttttttgattaaaaaaaaatcggtgccaccagcccatgagtgatcctaaaataacaaggcagttatgtgtgtgtgtgtgtgtgtgtgtatgctgaaaggaaaactttgggtaaggaaatagatttaagtttcaagtttccaaggatctatttaaatgacagcaaggaaaaaaatattgtaaaagtgatgaaaaatatcccagcagtatcctttcagaaagccatttaacttctggtggtttaagttgtgcaatgtaatttctacagcctttgaaatatgtgggcaccctcactgctatttatgttcccaatacttggaattgaatgctccattagggctctgagaagacaggagtttccagaagagtttggtaattgcccattcattactcaaaaaca

SEQ ID NO: 670667 - DNA, 1461 bp, Homo sapiens
tgaaccctagagaaattaagtgacctgttaaaggctacccatgtgaaaatacagtttatcattattctttagactgtaaaattgatccctatctttgagattggaaactatctcacagttactcattgcctactatgtgtcaggcataacttaagtgctttcccaaaatactctaacttaaaagacccttgaactcaaatggtttggctataaccatttgtccaaagagaaacctgaaatttagggaygttgagacagggttacaaagctagtaaaagttaaaatagagattcaaacctatgcagactaaaaacagaactcttcggatatcatgaagaaaatacgatcttccataagatcgccaaagtcaatttctttctctaggaaatttatatcagtaagtgatgctcatctatttgtttctccatatttttgccttgtaaaacttaccactaattagcaggtaactggaggtgttcaaacagagctgacagtcatctattaaagagttttgcaaatgttgagtagtatggatgtagcttctaggatgctacaaattttaggttgtttttgaaatgactttcactaggatacagtattgagaataattcttacagagtttccagtccgaaccatatgtgcaataccaatacaatttcataattaaggtggttttattgtgattgttcttcaaattgtatttcaacgcacatatttctctcccaatttcctctttttgtttaggttttgttggttatagcatcagaatagtaataagaatgttatcatttgaaaaccagacatcagaatatcagaactttttttgttttctaaagaaaaaatattaatagtgccatttagcctgggttttctctggtttccaaagcagaaaatgaggcaaaggtttatgtgcaggtagtttatttgaaagaacacagtaagggatggggtgataaaacatagaaagaaaaaaaagtactaggatgattgtcaagttggacactgagcttggtggttatggagacagaatttaatctccttcctttaccttctgaatagccatatgatatgcttctcagaggtatccacctggggtgagaagatgggagcatttatccacatgcatttgtctcttatgcattttctggttgtacaagggcgagcactgagtggattcccacaggttccccactctgtgttcagagaagtcctaagataagaagcaggaggaacaccaatgtgagctcagggcaagtccctttacattgcatctgcccaaagttggtaaaagcctgctcagaacaggtcactgtgaagcaagaggaggtcaagaggattcacagagaaatacaagagaggtccatttcaaatgctgattatacctttccattttattcctcatcctatatttctgaaagacagagaagcagatacaacacaacaggaagagaatctacagct

SEQ ID NO: 670668 - DNA, 651 bp, Homo sapiens
tctggcagaagaaatgttatgatcacgaaggtggtttttccagagcaaggcttagcagttttactgtggatgtgctgacccctgtgatttccccgaatgtgggaatcttgattacataatttgtggcagtggggaactgtgtctgtgttttyccctgggttgttgtcgttttaaaagtggattttgtttgctgtggaagcatatacaaggcgttagtataaactaataaacaggtctttgttcccatctgtaacttactttcaaagtaaagattttgccaggtagtggttggttctcacgcttgtaatctcagtagtctgtgagatgcattgataactttatgttaataccgctcgagctctggaatttgatgtcagtgtggtcaaataaggtggacccgtctctactaatctcttaacttttttttttgttctatagaaataaaactaagcttttcttttccctacgggagcccattgtaaacatttattaacagcaaacagtccactggagtgcatggcgggatcccggcttactgcaacctctgcctcctgccttcaagctattctcctgcctcagccagagaatactcgatctcctaagtaactgagattacaagcgcaggccactaaaaaattaggcccggctaat

SEQ ID NO: 670669 - DNA, 651 bp, Homo sapiens
tctggcagaagaaatgttatgatcacgaaggtggtttttccagagcaaggcttagcagttttactgtggatgtgctgacccctgtgatttccccgaatgtgggaatcttgattacataatttgtggcagtggggaactgtgtctgtgttttcccctgggttgttgtcgttttaaaagtggattttgtttgctgtggaagcatatacaaggcgttagtataaactaataaacaggtctttgttcccatctgtaacttactttcaaagtaaagattttgccmggtagtggttggttctcacgcttgtaatctcagtagtctgtgagatgcattgataactttatgttaataccgctcgagctctggaatttgatgtcagtgtggtcaaataaggtggacccgtctctactaatctcttaacttttttttttgttctatagaaataaaactaagcttttcttttccctacgggagcccattgtaaacatttattaacagcaaacagtccactggagtgcatggcgggatcccggcttactgcaacctctgcctcctgccttcaagctattctcctgcctcagccagagaatactcgatctcctaagtaactgagattacaagcgcaggccactaaaaaattaggcccggctaat

SEQ ID NO: 670670 - DNA, 651 bp, Homo sapiens
tctggcagaagaaatgttatgatcacgaaggtggtttttccagagcaaggcttagcagttttactgtggatgtgctgacccctgtgatttccccgaatgtgggaatcttgattacataatttgtggcagtggggaactgtgtctgtgttttcccctgggttgttgtcgttttaaaagtggattttgtttgctgtggaagcatatacaaggcgttagtataaactaataaacaggtctttgttcccatctgtaacttactttcaaagtaaagattttgccaggtagtggttggttctcacgcttgtaatctcagtagtctgtgagatgcattgataactttatgttaataccgctcgagctctggartttgatgtcagtgtggtcaaataaggtggacccgtctctactaatctcttaacttttttttttgttctatagaaataaaactaagcttttcttttccctacgggagcccattgtaaacatttattaacagcaaacagtccactggagtgcatggcgggatcccggcttactgcaacctctgcctcctgccttcaagctattctcctgcctcagccagagaatactcgatctcctaagtaactgagattacaagcgcaggccactaaaaaattaggcccggctaat

SEQ ID NO: 670671 - DNA, 651 bp, Homo sapiens
tctggcagaagaaatgttatgatcacgaaggtggtttttccagagcaaggcttagcagttttactgtggatgtgctgacccctgtgatttccccgaatgtgggaatcttgattacataatttgtggcagtggggaactgtgtctgtgttttcccctgggttgttgtcgttttaaaagtggattttgtttgctgtggaagcatatacaaggcgttagtataaactaataaacaggtctttgttcccatctgtaacttactttcaaagtaaagattttgccaggtagtggttggttctcacgcttgtaatctcagtagtctgtgagatgcattgataactttatgttaataccgctcgagctctggaatttgatgtcagtgtggtcaaatawggtggacccgtctctactaatctcttaacttttttttttgttctatagaaataaaactaagcttttcttttccctacgggagcccattgtaaacatttattaacagcaaacagtccactggagtgcatggcgggatcccggcttactgcaacctctgcctcctgccttcaagctattctcctgcctcagccagagaatactcgatctcctaagtaactgagattacaagcgcaggccactaaaaaattaggcccggctaat

SEQ ID NO: 670672 - DNA, 571 bp, Homo sapiens
tgcaagagaatgttctggttagatgttacatgcatatatttagtgatgaagtattatgatatctgaaacttacttccaaatagttcagcaaatattataaacactttaaatacataatatatatttcaaagaatcagtcaatattatcaatattatatgtacatatatgtagtgaaattacaaaatactaattgtatataggaaatgggtatatgggtatttattacaacattcttgtctatatgttttaaaattttcataataaaatattggaaggaaaacagtttattgcatctggtatactaacaatgaataaaataagctgttaattaacaggaatctattacttaacrcatgaaaagtgttctgaaaagtgtgaaatgctaatggaagcttcttttccatttatgtgcctcataattttagaaatactttatctccatttgtaatggtcatgacaagaaatttccaaccttgcagatcggattttgagtggttttcatttccttgtaactgtccaaattttgcaatttcataaaataagcatattgtactcatattcagaaatcat

SEQ ID NO: 670673 - DNA, 571 bp, Homo sapiens
tgcaagagaatgttctggttagatgttacatgcatatatttagtgatgaagtattatgatatctgaaacttacttccaaatagttcagcaaatattataaacactttaaatacataatatatatttcaaagaatcagtcaatattatcaatattatatgtacatatatgtagtgaaattacaaaatactaattgtatataggaaatgggtatatgggtatttattacaacattcttgtctatatgttttaaaattttcataataaaatattggaaggaaaacagtttattgcatctggtatactaacaatgaataaaataagctgttaattaacaggaatctattacttaacgcatgaaaagtgttctgaaaagtgtgaaatgctaatggaagcttcttttccatttatgtgcctcataattttagaaatactttatcyccatttgtaatggtcatgacaagaaatttccaaccttgcagatcggattttgagtggttttcatttccttgtaactgtccaaattttgcaatttcataaaataagcatattgtactcatattcagaaatcat

SEQ ID NO: 670674 - DNA, 571 bp, Homo sapiens
tgcaagagaatgttctggttagatgttacatgcatatatttagtgatgaagtattatgatatctgaaacttacttccaaatagttcagcaaatattataaacactttaaatacataatatatatttcaaagaatcagtcaatattatcaatattatatgtacatatatgtagtgaaattacaaaatactaattgtatataggaaatgggtatatgggtatttattacaacattcttgtctatatgttttaaaattttcataataaaatattggaaggaaaacagtttattgcatctggtatactaacaatgaataaaataagctgttaattaacaggaatctattacttaacgcatgaaaagtgttctgaaaagtgtgaaatgctaatggaagcttcttttccatttatgtgcctcataattttagaaatactttatctccatttgtaatggtcatgacaagaaatttccaaccttgcagatcggattttgagtsgttttcatttccttgtaactgtccaaattttgcaatttcataaaataagcatattgtactcatattcagaaatcat

SEQ ID NO: 670675 - DNA, 1361 bp, Homo sapiens
aaaaaaaattagccgggcatggtggcgagcccctgtagtcccagctactcaggaggctgaggcaggagaatggtgtgaacccgggaggcagaacttgcagtgagctgagattgtgccgctgcactccagcctgggtgacagaacgagactgcatctcaaaaaaaaaaaatgtattataatgtctttgtggaaaaaaaaaaaaacgatagaattacctagcccaaagaatttttgcatttaagaagaacatagctttgttgcctttacagcttggttaaccaagtaaacacactcttaaggcccaccgaaagtatgtgcttttgctattttaaaagcaaatttattcccatcaagactaactacggggacagtaggggaaagtgaggaattaatgtttaatggatatagagcttcagtttggaaagatgaaaaaaaatgtggtgatggttgcacaacaatgggaattacttaatgccactgaacatacatttaaaaatggataaaatggtaaatgttatgttatgtatgctttaytataataaaaaaaaagactaaatactagaacagccaacattttaaaacatcaactttggaagctggtaagtcttggatttttttgtttgttataggcttagaagtagttactgttattcacatcttcagaaaaacacacagatctgaaaaacatccttaattaaaacccactttaatagaattttctactgggtaaatgaaacttcataccaaactgtgctgtaaaatagctgaagtagcattttagacagactagtctacaatctcatttgaaccaaaagtgcaacctcatcaactgtatattgttctctttcatttttagaattgtaagtactggtccatgactttaaatattccaagtaaactcatgtttatacttcagtgtttacagaacacaaaacaactgtcctctgagatggagctttgataacttaacagcacatcaggacaggcagggagggcactccaaggacgtgtgtcttgcctattgttctgcctctcatccacttcacatcacagcccatatctaccatcagtatctgagtgctccataccctgtcgcatggagaacttagttagaaacatctaattcacctcacaccatcacctgtgaaatctagtacttcatcctcactattaaaaataaatttcagcgtttaattaaaaatcacatactagagagataatatcacataaaatagtatgcaagtgagtttttcttcattctcatttttgttacaaatacaatattttccatttatttaaaaaatgtaaacaaagaataaataaggggttattgtcaaacaaatctatctcatctaaaatta

SEQ ID NO: 670676 - DNA, 1429 bp, Homo sapiens
acctgtcttagcctcccaaagtgctcaagaatttcctctttaagttgcagagtctgtcacaacaaagaagcatcttattagagtacgtgaatggctgagggcttagagcagtgaagagagatcgaggtgaaagaagaagccagaagacagagagctggaagtagggagaggtgggggccctgagatgggaaagagatggagctggtgctgcagctaaggctgggaggaactccacaaatgacagaagagaagggtagtgtgagcaagaggccattcgtgaaaggctcctccattcaggctctgggttgagaaggggaagtgagtgccatctagttgccaaggtctttggtgttccccccacacacacacttgggcatattaatgcagacgtggctcactggctgtctcaactctccctcctctcacctccccaacaccttcactgcaccatgcccttaaactagatgcaacttactgagcaaccactaagggctgggcagggacctggagattttgcatgcattgcttcatttaaatctcaccacatccctatgggaggtattattagacccacaattacagatgaagagcctgaggctcagagaagttaaacagtcgcaccacaatgagtggcagaggtggtattccaacctaggtgtaactgattctaagctctttatttttccacagatccatgctctcatttatgaccatcatgacctgttttccaagccaaaaactacaagatgtgtgtgtgtgtgtgtgtgtgtgtgtgtgtgcgcgcgcatgttgatttgggagtatattgatgcacagaaattaattcacatttaattatgcacttaacaaatcatctgtaatgaaaataacagaatcttgtgaaatgagggctgtcacagaaaactcaggtcaaatattcaaggtaccattagaacaataatccctcgctatgattaccttatacaagaataatataaaaacaggtaatgttattttattatgtattataatgtatatcartcaatcaattattatgtatttgcctttgtttgcagatggtagccaccctgtagaattgtttacatacatggcttaccctcatcaagactacaggtgtcttcctcatctgcatgaatcctcacagaggctgtcatgtaaaaagtgctcaacgctgcttattaaataaatatttatctctgtccattcctttccttagagagatagcactctcagactctactgatgagagtattagcaacaggcaaaaaagcctgggcaacacagcaagaccccatttctaaaaaaaaaaaaaaattagctgtccatggtgtccggtgcctgtagtctcagctgcttgagagctataatcccaacacttagggaggctgaggtgggaggattgcttgagcctgggaggtccaggctgcag

SEQ ID NO: 670677 - DNA, 1429 bp, Homo sapiens
acctgtcttagcctcccaaagtgctcaagaatttcctctttaagttgcagagtctgtcacaacaaagaagcatcttattagagtacgtgaatggctgagggcttagagcagtgaagagagatcgaggtgaaagaagaagccagaagacagagagctggaagtagggagaggtgggggccctgagatgggaaagagatggagctggtgctgcagctaaggctgggaggaactccacaaatgacagaagagaagggtagtgtgagcaagaggccattcgtgaaaggctcctccattcaggctctgggttgagaaggggaagtgagtgccatctagttgccaaggtctttggtgttccccccacacacacacttgggcatattaatgcagacgtggctcactggctgtctcaactctccctcctctcacctccccaacaccttcactgcaccatgcccttaaactagatgcaacttactgagcaaccactaagggctgggcagggacctggagattttgcatgcattgcttcatttaaatctcaccacatccctatgggaggtattattagacccacaattacagatgaagagcctgaggctcagagaagttaaacagtcgcaccacaatgagtggcagaggtggtattccaacctaggtgtaactgattctaagctctttatttttccacagatccatgctctcatttatgaccatcatgacctgttttccaagccaaaaactacaagatgtgtgtgtgtgtgtgtgtgtgtgtgtgtgtgcgcgcgcatgttgatttgggagtatattgatgcacagaaattaattcacatttaattatgcacttaacaaatcatctgtaatgaaaataacagaatcttgtgaaatgagggctgtcacagaaaactcaggtcaaatattcaaggtaccattagaacaataatccctcgctatgattaccttatacaagaataatataaaaacaggtaatgttattttattatgtattataatgtatatcaatcaatcaattattatgtatttgcctttgtttgcagatggtagccaccctgtagaattgtttacatacatggcttaccctcatcaagactacaggtgtcttcctcatctgcatgaatcctcacagaggctgtcatgtaaaaagtgctcaacgctgcttattaaataaatayttatctctgtccattcctttccttagagagatagcactctcagactctactgatgagagtattagcaacaggcaaaaaagcctgggcaacacagcaagaccccatttctaaaaaaaaaaaaaaattagctgtccatggtgtccggtgcctgtagtctcagctgcttgagagctataatcccaacacttagggaggctgaggtgggaggattgcttgagcctgggaggtccaggctgcag

SEQ ID NO: 670678 - DNA, 690 bp, Homo sapiens
  misc_feature 2, 3, 4, 5, 6, 7, 8, 9, 10, 11, 12, 13, 14, 15, 16, 17, 18,19, 20, 21, 22, 23, 24, 25, 26, 27, 28, 29, 30, 31, 32,33, 34, 35, 36, 37, 38, 39, 40, 41, 42, 43, 44, 45, 46,47, 48, 49, 50, 51, 52, 53, 54, 55, 56, 57, 58, 59, 60,61: n = A,T,C or G
  misc_feature 62, 63, 64, 65, 66, 67, 68, 69, 70, 71, 72, 73, 74, 75, 76,77, 78, 79, 80, 81, 82, 83, 84, 85, 86, 87, 88, 89, 90,91, 92, 93, 94, 95, 96, 97, 98, 99, 100, 101: n = A,T,C or G
annnnnnnnnnnnnnnnnnnnnnnnnnnnnnnnnnnnnnnnnnnnnnnnnnnnnnnnnnnnnnnnnnnnnnnnnnnnnnnnnnnnnnnnnnnnnnnnnnnngattttttgtggttgttgttacttgtggttcagctaaaaacttttatatcttgtttttaaactttattagtgcaaacctagttttctcctttagtaagatagagtttgtctccactactaaagactgttttccctgtggccttcttgaatgctgagggatctttgaaggtcttgttagaaatytgaacagtttccatatctaagtgaactctgagagttgctcagtttagggttttgagggcatactttgttcaaccacttagatttttcagtttatgtatatagctctcattatttagcaaagactcaaagggtttccttaggcagattctaaggccattgttctgggtagttctctcttcttaaaaactctgttctgaaacttccagcctcttcagattctctaagttctatactctctcaccttgactcagcaagaaaattgtctttggtttagattttgctccctgatccatgattcagaatgagtgtttttgaaataatcttgaatgatgaaaatttttatcttacttgttttatcttttcttgggcatctcagacatgcactgcctggtgtctcatgtttaag

SEQ ID NO: 670679 - DNA, 1880 bp, Homo sapiens
catagattttaatagtacttgaaaaaaatatatatatatacatatgctttacatcacatgatagaaagttatttaatagagtcaaaaacttttatatattttaatagtacttaatatatatatgttttacatcacatgatagaaagttatttaatagagtcaatttatttccaggtcatcttttactccataattttaagatgttccctactagaatcaagactataccatatttattgaactatcttttattaccaagaagtcctattctaatcaggtacattcccattatcgagagtagttctccttccacaccactgtgtccttcactgtatgaataatacaccattatttttatttcttttatttacttttctattatgtcttagtcaatttgkgttgctgtatcaaaatgtgatagactgggtggcttgtgaacaacattttacagttctggagggtggaaagtctaagatgaaaatgcaggcagatttggtgtctgctaaggacctgtttcctgtttcatagaaggcaccttctggttgtgtcctcacatggtgacaaacaagatcccatgggcctcttttatagaggactaatcctatgaggataggattacctttttgtgatcacctcccagaggcccccacttaataccattaccttgggggttaggattttaacatgtgagttttgggtagacataaatattcagaccatggcatgtaatagatatttaattatataataagctatgttcctcttatgtatcctgaaaattgctcttgatttttgtactaatctttactcagattacctgtaacaggtaaaatcatagacacaaaatttttaagcatggaaataaagtaaatccaatataggaattatatagtatgaaaggaaaatacttattttcagttggttcctcatatgacatatatagatgggttgaatttagaactgacatttgcttcattaccatgtaatttcattttccttagttttacagggctcacaaattaggtttctcttaaaaagtaccttcgtggggaatggagagttatttagtggatagggagttcagctgggaagatgataaagtcctggagatgggttgtggtgatgtgtgcacaatagtgtgaacgtatttaatgacactgaactgacactaaaaaaaagttaaaatggtaaactttattttatgtacaatttatcccgcttttataaaaggaaaaatgtatcttttttattaaaacggggttgagagttttgggaactgtttttctactcctcatatcacccttgtgaaatagtaaaagattcatctggctttctttctcgtgtagattgtggggaaaaaaaaaaaaaatatatatatatatatatatatatatacacacactagaaagtgctattatcagttcaaagagatattagagctggccccaagcatgcacatttagaaatgttttggaaaagttaaatttaatgaaacaaagtgtatttcgtcacactggaagctagcgtctgcagtaaggctgacttcgacataaaaatgtagaatgatttgacttattttctactcataagtggattgctgttgtttgattctgtttatagaggatgtggcctaaaataaaacatataatatgtccaaaagcaaaacctacaattgtctggtgtcatgctttcataatttacttcattgatttattcatttattcattcattcatacagaagttttaagaaaccagctatatgtcaggctacattaagtccttaaaaaataaaaaaaatgagagtcacaaaactcaattcctgaatggatattcttctcatgtaaaaagattacttaactccaaggtctcttttatttaat

SEQ ID NO: 670680 - DNA, 1880 bp, Homo sapiens
catagattttaatagtacttgaaaaaaatatatatatatacatatgctttacatcacatgatagaaagttatttaatagagtcaaaaacttttatatattttaatagtacttaatatatatatgttttacatcacatgatagaaagttatttaatagagtcaatttatttccaggtcatcttttactccataattttaagatgttccctactagaatcaagactataccatatttattgaactatcttttattaccaagaagtcctattctaatcaggtacattcccattatcgagagtagttctccttccacaccactgtgtccttcactgtatgaataatacaccattatttttatttcttttatttacttttctattatgtcttagtcaatttgggttgctgtatcaaaatgtgatagactgggtggcttgtgaacaacattttacagttctggagggtggaaagtctaagatgaaaatgcaggcagatttggtgtctgctaaggacctgtttcctgtttcatagaaggcaccttctggttgtgtcctcacatggtgacaaacaagatcccatgggcctcttttatagaggactaatcctatgaggataggattacctttttgtgatcacctcccagaggcccccacttaataccattaccttgggggttaggattttaacatgtgagttttgggtagacataaatattcagaccatggcatgtaatagatatttaattatataataagctatgttcctcttatgtatcctgaaaattgctcttgatttttgtactaatctttactcagattacctgtaacaggtaaaatcatagacacaaaatttttaagcatggaaataaagtaaatccaatataggaattatatagtatgaaaggaaaatacttattttcagttggttcctcatatgacatatatagatgggttgaatttagaactgacatttgcttcattaccatgtaatttcattttccttagttttacagggctcacaaattaggtttctcttaaaaagtaccttcgtggggaatggagagttatttagtggatagggagttcagctgggaagatgataaagtcctggagatgggttgtggtgatgtgtgcacaatagtgtgaacgtatttaatgacactgaactgacactaaaaaaaagttaaaatggtaaactttattttatgtacaatttatcccgcttttataaaaggaaaaatgtatcttttttattaaaacggggttgagagttttgggaactgtttttctactcctcatatcacccttgtgaaatagtaaaagattcatctggctttctttctcgtgtagattgtggggaaaaaaaaaaaaaatawatatatatatatatatatatatacacacactagaaagtgctattatcagttcaaagagatattagagctggccccaagcatgcacatttagaaatgttttggaaaagttaaatttaatgaaacaaagtgtatttcgtcacactggaagctagcgtctgcagtaaggctgacttcgacataaaaatgtagaatgatttgacttattttctactcataagtggattgctgttgtttgattctgtttatagaggatgtggcctaaaataaaacatataatatgtccaaaagcaaaacctacaattgtctggtgtcatgctttcataatttacttcattgatttattcatttattcattcattcatacagaagttttaagaaaccagctatatgtcaggctacattaagtccttaaaaaataaaaaaaatgagagtcacaaaactcaattcctgaatggatattcttctcatgtaaaaagattacttaactccaaggtctcttttatttaat

SEQ ID NO: 670681 - DNA, 583 bp, Homo sapiens
cagaatggctaaaattaaaaagactaaaaatatcaagtatttttaagaatataaagcaattagaactttgatagatactgctgggaatgtagcattatcttttaaagccagacatacatacatcctgatacggtttggctgtcttcctacccaaatctcatcttgaattgtagttgcataatcccagtgtgtcatgggagggacccagtgggaggtaagtgaatcatgggggcaggttttcccatgcttttatctaaagagcttttattcatataagagaaaactgtttgtatccggctaaaaaatcatgtgagagttgaacagaatctgcaatctaagaaaaaaaaacagtaggcagtaagcagtttaaactcaccattaattaattgctaagtatctctaagtgaacgtgcagctaaaagctattaaatggtacrtatttactttagagtctaaaattcagtcataagaaagtaattaaaatatttcataaataagttcattgcagcattatttataataaattagaaacaacctaaatatctagaagtaaatatgttacatctatatgtatagtaaaatt

SEQ ID NO: 670682 - DNA, 1803 bp, Homo sapiens
tattgaattaggctatagagaatggaaataaaaaattctttataaagttgttttcaataatatagtttagcttcctactttcatattttaagggtattaaaataattaattcatcttctgacaaccctctttaacacctaatccaaaataaatcaacaaaatagaaagaaaactaagcaataggtacccatttgtcttagaaatagaaaataccttctttttcatctgtccctgcagatcttcagtcacattagttaactcttccacttttgctacagcaactctcagctctaatttggcttgcctaaaaaataaagtaaattaataaacactgttttcatagaccactaagaataaaaaattagaatagaaatctgaatttggtaaaatcagttctaactcttgtttatctaaaatggatccatggaataaattttggaagattcctttattactaatgaagtgcatgtagaagatataaagaggaaaaaatatagctgaatggcgaagggtatgaagtagaggtcatgaatgctgtacttgggtaaattatattatataccaaagtgattcaataagtttcttgaaaaagcactttatcatcttgatacattacctaacaagagctccagtgcactaagaagaatatacttatgtctataatatctttatagatggagatggagatatactgctgattggactttctatgaaaatgaacttaaacttcaataccttgatcattccatagacaccagaagtttgtattatgtaaacacaacataaattaaaacatttgttccaccataatacaatgtttattttcttcagagactgtattggcaacaaatgaaaaagataaatttttttgaacattctaacagaattaaataagtttcaatatcttcttaactcctcataggaaatgattttagaacaataatatgactttcttaaacagaaaaaatgatttttaatatcatcataattaagcattaagtgagtataaaaccctttgattatctaaagaacatacattttcaagaaaaaaatactgtagtgtaggaactgttccctatttcttaattacattttatgtatgtatctaaatgtaaatcatatttgtgctatagaacttacagaaattatttgatgcaaaattcacaagtaaatgttagttcatttccttttgactctttgtctttaaaactgcattacttatatagttataaatttcctacaatagaaaatacaaatctaataatagctgataatatctcaggtagttattagtgccagggactgttgtaaatgctttgcagtcatctcacttgacactcgataataactgtgaattaatactactattatatcaaactgaagtagaggagagcaaggttgatagaggtttactaatatgccctaggattcacaatacgtaataaaactagtatttaatgagtcccctatgacagactgcctaccctcacatggtcctaataatattttatatgatgaggcatttaagaaaatgttttgctttaaattaaccaagattataaaaaaaatcaaacaggccaggtgyggtggctcatgcctgtaatcccagcactttgggaggccgaggtgggaggatcacaaggtcaagagattgagcccatcctgaccaacatagtgaagccccatctctactaaaaatacaaaaattaggtgggtgtgatggcacgcgtgcctgtagtcccagctacttgggaggctgaggcaggagaatcgcttgaacctgggaggcagaggttgcagtga

SEQ ID NO: 670683 - DNA, 1434 bp, Homo sapiens
ttttttcaagccagggcatgtaaagaaaaatcattttgtaaactgtaaagcatcacataagtatttttacaatttctttaggtagatatttctaattataattacaataataggaatattcattaaccagaatttgaaaagtctgtaaatgagagctgaagagaggtatgaaaaccaacttatttaaagagcttcctctcaaaatacatagaaaagaggtcagaattagaattcctccatagtgctcaatgcacctagcaataaaagaaccaacagaagaataaaagaggtagatttccaaatggaatagatggccttgtgagataatgagttcttgtcaatagacgtgtaaagcaaaagctaaagctagatgtccactttgaaagagtgtagaatgattcttgctttgggtagaaaaaagtcttttaataaccattaagataccttcctgttgtaaaattctattctgattaatttatgatagacaaaattgacacctattttagtaacaggtcacatttaagggtattaacatttgattttacatagtgtttccactgtatttgagcaggtttcttcactggccataaactaataaacaattttgttttgttttgttttaaaagtcaggtaggaaatcaagcaaataaaaactttgaaggtttatttatacaaaataatgttaaagttgctctttagcactaaattcagctttcattgctgacaacattatagaaccaaatgatcactgtccagttctctaattagtttacctgttcaatagtgtaaccatcaaagatctatatattattaacataaataataaagtgattagaaattctaaatgctatagggtagagtcttaagcgttcccctctaaaacagtttcttcagagtgcaatttcttattgatatacaagaaaatgatgaaatccaagattaccttttgtttttgactttcaaatacatgaatctgggcctcagtcatatgttcctggtaaagcttgtgtagtctgtccaactcctgagaaacagtctgccagagttccacagcctgagttttttcctattaaaaaagtttgataactcattaaattatcagcaggctatttattgtatagtacaaatggatcattttcttttatagaataagttcttataaagtcataaaataaaatagaactgtgtaaagatggtattatagttatatttttgatatgaagttttattattaataatttagagagtaaacttgaagacataaagttccttattttgaaattgtgtttttactcagatttagctaaaattaaaatccttaacagagatgtagatttaaaccatgttctttgttscacaagaaagtataagccctagaaactgatgaagaagaaaactgcctcctggtaaagtacaatatttttttcctgatca

SEQ ID NO: 670684 - DNA, 1208 bp, Homo sapiens
tgctacacttttcttcaggtactctcaytctcatactgaactttgtaaatcctcctaaaagtccttttcacatgtactagcgctatttaattacataacctccattctcttcctgaaaagtatgttttgaatatgacttcacatccatcccaatcaacgctgccactattaactagcgaagtccttacgttttcaaattctgagaacctgtgtgccgccctcccagcttcatgatacctccaaccccttccagacagtaatcatataaggtacctgattataaattgtttggtgtaatttcagtcctctttcatggagctgcaactagataataaatatatagtttaagtgcttgggaggaaaagagcaatatttccaatgtctccccacaatctcacatattttcccctattgtatcaggctaacatggttccttttagccaaaattagtgctatataaataagaaaccttgtcgtctttcaataggagcattcaagcatttcacaaatctaacccatggactgtcccaagaaggtattagaaaaatatgaaataatgatatgaagcctaaagaaaaaatgattaacaccacctccccctattataatatcataccaagtcatatgcctccaagtcgaaggaattataacaggttcctattgtgctttccatgtttcataaatacacatgaaagctaccagagaaagccaaaaaagcacacttgtatacaggaatgtgtgtcactgagttctgcgaggccaccaccaataccctcctgaaagtatatgctgaagaatttacaatgtatccaaggcagcactagctataaacttaaaaaacaaaaatgaacactagccccaactagtttccataatcacatttaccatggcttttatagctgctgttctgacacgtgggtcttggtcactgaagtaatcccctataatcttctggacatctctggcagctaggccttctgcatcttttgtgacacttttctccaaagagccaagattgccaagtaactgcaggcacttatttcttacaccatgagacgtatctgtcagatgctattaaaaaaaaaaaaaaaaagaaaaaaagaaaaagaaaaaaaggacatgattaagatatcttaacaaacacagacaagaccagaaacaaaagcattgcagcaaccttaggggtgatttcaagacctatattctta

SEQ ID NO: 670685 - DNA, 1761 bp, Homo sapiens
tttgtttgaagcatttgaaaattagcttcagaaaggatatttgatgtgattggatctgttagactttcagagctggggaagcttagcattcttttggtccattttgcctccctatttcacagatgactaagcttagttccagagacggaaagcaaagggccctgggcacatatcaaagtattggcagtaggggggcaggatgttgggaaggatggcggtgaggcacccttactgtgttggagtcatgctaatacaggtatcatctcagctccaacttcatcacatcctagctgtgtgacttctgtctgarctttccttgcctgtaacatggggacattaggaggacctgagagctttcagtggtgtaggagtaatgagaacatattggtccattcaagggttaaactctgcagctttgcatttaactgcgagctttacagaggtgacttcagggttaaccaaacagccctgccaaggggccttgaggtttatgggagaaagaatcagaggttctgggcttatttttctcagctctattgtttggctgctgtcaagatgcgtcctctcctctgccttctcccttccagtcagcagaactgtcccctggtaggagatgttgtcatggcaatcagatttctccagcagttcggttgactttggctctattaactccagtactttaatcttaggagagcccacagaccagttgagaatgaggacacacctaaatcagactgagggacattcctgagccctgtccccatccccactcttgtggttaaatctttcctctaacactatgcatctattcctcagcagcagcggccatcacatcccttaggaaaccttctctgacagcctccaacccacatccacaaaaagacctgacccctcctacctttcagtcttccctctcagcacctacatgcttaagccgtctatttcgctgtctccactgtgagttccttgaaagcagggactgtgtcctgttcttctgtttggcacaaggtttgcatgtaataggcccaacatacattttgttgaatgaatgagtcactaagggaatgaagagtgaaggtattggaagactgaaggtaatttatgtaatgactaagagctcaagcttggagtaaaacggacctgagttcagattctgacatcatcacttaataaccagtcttagtgctcagcccagggtctggcacagagaggtggcctctaaaagttttgttgaacaaccaaacttaacttgcatttgcactgcacttcgcagtttgtgaagcagttttacacccacaatatgtagagttaccggccttttcattacgaagaatgttcccgttattatttaagtctcatgggcctatattttgaaaaacattcatcaaacaaatttcatttttgctgggcgtggtggcttgcatctgtaatcccacctgcttgggaggctcaggcaggaggaagccttgaagccaggagttcaagaccagcctgggcaacatagtaagacccgtctctaaaaaaatttttttacataaccagatgcagtgttgaatgtcctgtagtcccatctacttgggaggctgaggcaggaggatgacttgagcccaagttcaaggctgcagtgagttatgatcatgccactgcacacccagtctgggcaacaacagagcaagaccgcatctcttaaaaaaaaattcatttctggccggggctgtggctcacgcctgtaatcccaacactttgggaggccgaggtggg

SEQ ID NO: 670686 - DNA, 1761 bp, Homo sapiens
tttgtttgaagcatttgaaaattagcttcagaaaggatatttgatgtgattggatctgttagactttcagagctggggaagcttagcattcttttggtccattttgcctccctatttcacagatgactaagcttagttccagagacggaaagcaaagggccctgggcacatatcaaagtattggcagtaggggggcaggatgttgggaaggatggcggtgaggcacccttactgtgttggagtcatgctaatacaggtatcatctcagctccaacttcatcacatcctagctgtgtgacttctgtctgagctttccttgcctgtaacatggggacattaggaggacctgagagctttcagtggtgtaggagtaatgagaacatattggtccattcaagggttaaactctgcagctttgcatttaactgcgagctttacagaggtgacttcagggttaaccaaacagccctgccaaggggccttgaggtttatgggagaaagaatcagaggttctgggcttatttttctcagctctattgtttggctgctgtcaagatgcgtcctctcctctgccttctcccttccagtcagcagaactgtcccctggtaggagatgttgtcatggcaatcagatttctccagcagttcggttgactttggctctattaactccagtactttaatcttaggagagcccacagaccagttgagaatgaggacacacctaaatcagactgagggacattcctgagccctgtccccatccccactcttgtggttaaatctttcctctaacactatgcatctattcctcagcagcagcrgccatcacatcccttaggaaaccttctctgacagcctccaacccacatccacaaaaagacctgacccctcctacctttcagtcttccctctcagcacctacatgcttaagccgtctatttcgctgtctccactgtgagttccttgaaagcagggactgtgtcctgttcttctgtttggcacaaggtttgcatgtaataggcccaacatacattttgttgaatgaatgagtcactaagggaatgaagagtgaaggtattggaagactgaaggtaatttatgtaatgactaagagctcaagcttggagtaaaacggacctgagttcagattctgacatcatcacttaataaccagtcttagtgctcagcccagggtctggcacagagaggtggcctctaaaagttttgttgaacaaccaaacttaacttgcatttgcactgcacttcgcagtttgtgaagcagttttacacccacaatatgtagagttaccggccttttcattacgaagaatgttcccgttattatttaagtctcatgggcctatattttgaaaaacattcatcaaacaaatttcatttttgctgggcgtggtggcttgcatctgtaatcccacctgcttgggaggctcaggcaggaggaagccttgaagccaggagttcaagaccagcctgggcaacatagtaagacccgtctctaaaaaaatttttttacataaccagatgcagtgttgaatgtcctgtagtcccatctacttgggaggctgaggcaggaggatgacttgagcccaagttcaaggctgcagtgagttatgatcatgccactgcacacccagtctgggcaacaacagagcaagaccgcatctcttaaaaaaaaattcatttctggccggggctgtggctcacgcctgtaatcccaacactttgggaggccgaggtggg

SEQ ID NO: 670687 - DNA, 440 bp, Homo sapiens
gggacaagttgcaggcagagttggaggagatggcaaaacgggatgctgaggcccacccctggctttctgactatgatgaccttacgtcagctacctatgataaggtgaggtaaaaactcttagtttttcaggttccagaacttccttctttttaacgtctttcctttaatcctgaatttgaagggtgcttttaagtattttcttgagtccctttccacgaaaagaagtctgaataattcccttgcccttcctcttcagtgattgagtataaactttattcttgggatatagatgttaatgagactatctttgtcaataaygacagtccagtacataacacctgtgaaggaggtttgcacatgcttgctgcattaaaagcacagaggaagtagctctgcttggaggtcagattgggagctttttggtaagactgctgactc

SEQ ID NO: 670688 - DNA, 599 bp, Homo sapiens
gattttgatgcagtactgtggcttggtacaagagtgtccctgtccttgtccttgttcttaggaaatacacactgaagtatttaagggtaacaggtgaacaggtctgcaacttattcccaaatggtycagaaaaatatgtatataatacataatttatatatgtatgtacacacttcacagaggaaataagtcaaaaaaaggaaatgggatagcactttataattggagaatctcagtgataaaactgtagttttgcgtaccaattttacaacttttctgtaagtttaaaattattcaaaaataaaagttaaaaaataatttgatatgtttgttgtaatttagcatccagatatttttcttacaggagggctttttagactatcaatcactctatggcttctataacttaaaaaaaagtgattacatatggtacatattattctgtaacatgcttttttccttcaatatatccttgatatatttctatattaataaatataggtctatggagcaattattaatggctgcacaatattccatcacatggacataaaaaatgtattcaatcattttcctgttattggatacttaaggttcca

SEQ ID NO: 670689 - DNA, 599 bp, Homo sapiens
gattttgatgcagtactgtggcttggtacaagagtgtccctgtccttgtccttgttcttaggaaatacacactgaagtatttaagggtaacaggtgaacaggtctgcaacttattcccaaatggtccagaaaaatatgtatataatacataatttatatatgtatgtacacacttcacagaggaaataagtcaaaaaaaggaaatgggatagcactttataattggagaatctcagtgataaaactgtagttttgcrtaccaattttacaacttttctgtaagtttaaaattattcaaaaataaaagttaaaaaataatttgatatgtttgttgtaatttagcatccagatatttttcttacaggagggctttttagactatcaatcactctatggcttctataacttaaaaaaaagtgattacatatggtacatattattctgtaacatgcttttttccttcaatatatccttgatatatttctatattaataaatataggtctatggagcaattattaatggctgcacaatattccatcacatggacataaaaaatgtattcaatcattttcctgttattggatacttaaggttcca

SEQ ID NO: 670690 - DNA, 600 bp, Homo sapiens
tgtgaatgaactgtgatacatccattatacagcacattatattttgaacaatgatcagccttccatatttttctgtaacctattgttctttgctctctatgtcatgtccacactgggaactaggtctgtgtccacagcagacaggacaataattattttggttacaaggagagatataaattaataacttgcttgtttatattaaataaatgtttgttgaattgaatgaatgaatgatggtattttgctccttggcaaaattcttaagtaggagatatctttggtgcttgccttcctwttcctcatcccttctattatttctccctctcccaaggcactcaagcctttcatgttgaccagtctctcttgtgaaacaggaaaagtgacttgatacaaaccgtccttgtgaaatccgtgataactctctctggaatatttgcatgttgagaagacaatgggatagcaaaatttaacaaaagcagatgaatggcaaggggaggacaatttgggatgtaccagaggatgtttgcagccatctcatgttgtctgtgtgtagcagagacagaattcttaaatgatatagcagtaattaaaattatt

SEQ ID NO: 670691 - DNA, 635 bp, Homo sapiens
aaagtgcaggacagttcgtgtttcaagaattatataatactcagtcggcttagcccatgttttttcttttcaaactcacagtggcccccagctttatgtggagaataatgtgctcacagtaatgctgataggcacagcagtctcctatttcaggccacaagattcctcattacacccagctaatataatgttctgtgttgacacactgggctctccccaaacatcactacattgaatgttgtttcataggtgaaaagaggaaatttcagggtacaatcaggacaacaagaaactggtgtttgaagtgctatgacattatttcacaaactgtatatctcaatccaaagatattttatatagtagacactataaatttcacttcatttttttagtatctgctgaaatgtattttcttttattcctgtgaagacattagaatgaaaaattgaagtgttcccatcttgccaaatagtaatccttcatttcactgaaatccgcacttgccactgytgctttcaaaagcagcagtatttggcaaatgacctcactgaagattctgtttctcctatccccaccaacaatatttgtatgaagaaggcaaatatgcaatcctgcttgtcgtcctcatttgtatt

SEQ ID NO: 670692 - DNA, 1002 bp, Homo sapiens
ttaaaacttaaggtgttcaaaatgaactgtagtaatgccagaaataagttactaatcaaagtacataacttctatttttagagtgggtttaagttaatctttctttctttttttttttttttttttttttttttgagacagggtctcactctgtcgcccaggctggagtgcagtggtgcaatcatggctcactgcagccttgacctcctgggttcaagagatcctcttgcctcagccctccacgtagctgggagtacaggtgcacagcaccacaccagctaatttttttgtagagatggggttttaccatgttgtctgggctggtctcgaactcctgagctcaagtaatctgcccacctcggcctctcaaagtgctagaattacaggcatgagccaccacacccaacttgtttaatctttcaaacaactgtaaggttttgggttttaacgcatttggaaaaaagaaagggttatttaattcaagtgtttacaagaccacttctctaatttttaatattgtattagttctcctgagggtgtttttaaatatctacatagagaacaattcaaatatgggttctccaaaataatgctgcacttctccccttcccctccccttttctgagtatgtctgtcaaggaaggagagttatgtgaagggagccctagaagatttgtaattaaaacaaaggctctgatttggagcaatataataaagatccagtgttatggttgaagcactggccagagtaaatatggaagcagaaagcccctttagagatatcaatttgatactaatactaaatctgcagactatgattccacaaagwcatgcttacatgatccaaggataattagctacccatgtgagaaagggagcaaagagatggctgcacaactttgtgagaatactaaaaccgcctgaagagggttcaccataacttcagtttaaagggtaaactttattgtacataaattatatctcaatttaaaaaaaggaaca

SEQ ID NO: 670693 - DNA, 615 bp, Homo sapiens
cgaggcactggaatcagaaaagtcactgaaaggccatttgtcgggacctatcgggtgtcattaaaatgcccgcaccctttaagccagcaatcctatttttcttgaacttgtttattatgaaagtaattcaaaagcaaataaaaatccacatgcataaagatgctcatcatggtgtctacattctggagaaaaattagaaataaagtgtccaaaatagatagtcaacgtcacgtcaactcagtggacacawtagacattccttaaaaatactatcaaaatgaatcctgtctttggcatttccttacgggagcaagtggcggtgttttaggattttcagagctgctgcgttacattatttccaaaaggtttctctacccgtggagtctaccctggtccttttctgagtctcttaaattttcttttctcctgatccaccagaatcaggaatctgctctaatctcatgacttccctttggtgaccttcggcgtccacgctcatctttttccagatgcttttactttctctcccactatgactgtcatatgtcaaaacaggattataaaaagtgatgatttaatgtcaaatttaaaaatgatctttacgaaggatgcaca

SEQ ID NO: 670694 - DNA, 615 bp, Homo sapiens
cgaggcactggaatcagaaaagtcactgaaaggccatttgtcgggacctatcgggtgtcattaaaatgcccgcaccctttaagccagcaatcctatttttcttgaacttgtttattatgaaagtaattcaaaagcaaataaaaatccacatgcataaagatgctcatcatggtgtctacattctggagaaaaattagaaataaagtgtccaaaatagatagtcaacgtcacgtcaactcagtggacacaatagacattccttaaaaatactatcaaaatgaatcctgtctttggcatttccttacgggagcaagtggcggtgttttaggattttcagagctgctgcgttacattatttccaaaaggtttctctacccgtggagtctaccctggtccttttctgagtctcttaaattttcttttctcctgatccaccagaatcaggaatcygctctaatctcatgacttccctttggtgaccttcggcgtccacgctcatctttttccagatgcttttactttctctcccactatgactgtcatatgtcaaaacaggattataaaaagtgatgatttaatgtcaaatttaaaaatgatctttacgaaggatgcaca

SEQ ID NO: 670695 - DNA, 615 bp, Homo sapiens
cgaggcactggaatcagaaaagtcactgaaaggccatttgtcgggacctatcgggtgtcattaaaatgcccgcaccctttaagccagcaatcctatttttcttgaacttgtttattatgaaagtaattcaaaagcaaataaaaatccacatgcataaagatgctcatcatggtgtctacattctggagaaaaattagaaataaagtgtccaaaatagatagtcaacgtcacgtcaactcagtggacacaatagacattccttaaaaatactatcaaaatgaatcctgtctttggcatttccttacgggagcaagtggcggtgttttaggattttcagagctgctgcgttacattatttccaaaaggtttctctacccgtggagtctaccctggtccttttctgagtctcttaaattttcttttctcctgatccaccagaatcaggaatctgctctaatctcatgacttccctttggtgaccttcggcgtccacgctcatctttttccagatgcttttactttctctcccactatgactgtcataygtcaaaacaggattataaaaagtgatgatttaatgtcaaatttaaaaatgatctttacgaaggatgcaca

SEQ ID NO: 670696 - DNA, 1262 bp, Homo sapiens
cagggatattgcattctgtcctcactgtcttgaggatcttcctccccggctcatcactccccatgggcagctgccagggtaggcgctgtcaccttctgttgacaacagtcagtagctcctaaggactaaaactgttcagcccagcattcagctctttggaggagtccatctgtcccccagcacatccaggagtaaggattccgactggtccactcctcatcctggtgtcttcagcttctctgctgccatgttctttgctgggatggctgcttcccaactccacctccagaatcaaggatattcctccaagcccagctcgaatgcttgatctgcctggagccttcctggtcatccttgggtgacctggagctggtgctgttagagcacttctgctctgccctgatgtgcagttgttgtgaatgggccactccatagtttatccttcctcacacccctggggcatagtaccctattcaagtttgtccaatgagtgcatgggtgaattaatgaatgaatgaacaaatgagtctttgccctagacaacttaaggtcctcactctgcattaggagcctccatttttctccagatggttgaaataaccagcctctgaaggagccaatggtttggtcactgctctctcagcaaattacagtcactgtcacttagcatggagagtggacgttgcacatcactgtgaaaccttgcagaggaggagagggcaggttcatcagaagaaagaaaggacaaaatgactccttatgaagcattttgtgccttctgtgagaaaacatgtatttagatcagataaactctagtcaaaatacaaaaaggaaaaatgaaagacctctgaaataggaacaatctcttgaagaggcaaatgactcaaaactgctcagtggctctttcagaaaatctaagtaaagttccctgacaacagaaactgaagagattgcctggttcatcttgtagtcttccaaaacagcagataatttctgaatctcagatgttgaatcagtrcaacgggatggatttcttgttcctaagtgttaaatgatcacatacataaaagagtctgagcctgagcaacataatgagaccctgtctctacaaaaaaaaaaaaaagattagccaggcgtggtggtgcacactgatagtcccagctactcaggaggctgagggaggcggatcacttgagctagagagttcaaagctgcagtgagccatgtttgtgccactgcactccagcctgggcaacaaagtg

SEQ ID NO: 670697 - DNA, 1262 bp, Homo sapiens
cagggatattgcattctgtcctcactgtcttgaggatcttcctccccggctcatcactccccatgggcagctgccagggtaggcgctgtcaccttctgttgacaacagtcagtagctcctaaggactaaaactgttcagcccagcattcagctctttggaggagtccatctgtcccccagcacatccaggagtaaggattccgactggtccactcctcatcctggtgtcttcagcttctctgctgccatgttctttgctgggatggctgcttcccaactccacctccagaatcaaggatattcctccaagcccagctcgaatgcttgatctgcctggagccttcctggtcatccttgggtgacctggagctggtgctgttagagcacttctgctctgccctgatgtgcagttgttgtgaatgggccactccatagtttatccttcctcacacccctggggcatagtaccctattcaagtttgtccaatgagtgcatgggtgaattaatgaatgaatgaacaaatgagtctttgccctagacaacttaaggtcctcactctgcattaggagcctccatttttctccagatggttgaaataaccagcctctgaaggagccaatggtttggtcactgctctctcagcaaattacagtcactgtcacttagcatggagagtggacgttgcacatcactgtgaaaccttgcagaggaggagagggcaggttcatcagaagaaagaaaggacaaaatgactccttatgaagcattttgtgccttctgtgagaaaacatgtatttagatcagataaactctagtcaaaatacaaaaaggaaaaatgaaagacctctgaaataggaacaatctcttgaagaggcaaatgactcaaaactgctcagtggctctttcagaaaatctaagtaaagttccctgacaacagaaactgaagagattgcctggttcatcttgtagtcttccaaaacagcagataatttctgaatctcagatgttgaatcagtgcaacgggatggatttcttgttcctaagtgttaaatgatcacatacataaaagagtctgagcctgagcaacatartgagaccctgtctctacaaaaaaaaaaaaaagattagccaggcgtggtggtgcacactgatagtcccagctactcaggaggctgagggaggcggatcacttgagctagagagttcaaagctgcagtgagccatgtttgtgccactgcactccagcctgggcaacaaagtg

SEQ ID NO: 670698 - DNA, 1262 bp, Homo sapiens
cagggatattgcattctgtcctcactgtcttgaggatcttcctccccggctcatcactccccatgggcagctgccagggtaggcgctgtcaccttctgttgacaacagtcagtagctcctaaggactaaaactgttcagcccagcattcagctctttggaggagtccatctgtcccccagcacatccaggagtaaggattccgactggtccactcctcatcctggtgtcttcagcttctctgctgccatgttctttgctgggatggctgcttcccaactccacctccagaatcaaggatattcctccaagcccagctcgaatgcttgatctgcctggagccttcctggtcatccttgggtgacctggagctggtgctgttagagcacttctgctctgccctgatgtgcagttgttgtgaatgggccactccatagtttatccttcctcacacccctggggcatagtaccctattcaagtttgtccaatgagtgcatgggtgaattaatgaatgaatgaacaaatgagtctttgccctagacaacttaaggtcctcactctgcattaggagcctccatttttctccagatggttgaaataaccagcctctgaaggagccaatggtttggtcactgctctctcagcaaattacagtcactgtcacttagcatggagagtggacgttgcacatcactgtgaaaccttgcagaggaggagagggcaggttcatcagaagaaagaaaggacaaaatgactccttatgaagcattttgtgccttctgtgagaaaacatgtatttagatcagataaactctagtcaaaatacaaaaaggaaaaatgaaagacctctgaaataggaacaatctcttgaagaggcaaatgactcaaaactgctcagtggctctttcagaaaatctaagtaaagttccctgacaacagaaactgaagagattgcctggttcatcttgtagtcttccaaaacagcagataatttctgaatctcagatgttgaatcagtgcaacgggatggatttcttgttcctaagtgttaaatgatcacatacataaaagagtctgagcctgagcaacataatgagaccctgtctctacaaaaaaaaaaaaaagattagccaggcgtggtggtgcacactgatagtcccagctactcaggaggctgagggaggcggatcamttgagctagagagttcaaagctgcagtgagccatgtttgtgccactgcactccagcctgggcaacaaagtg

SEQ ID NO: 670699 - DNA, 489 bp, Homo sapiens
cttgaaagtgggttcattatcaaaagttgaattttgccccctactccctctttctctcttgccctctcttggctcttctgccacgcaaagaacagcattgcttcctgcctctggagaatgcaaggcgccgtcttggaagtgggagttggacccttaccagataccaaaccttctggtgccttgatcttggacttcccagcttccagaatgctaagaaattaatttctattctttataaattacccagtctgtggtattctgttatagcagtacagaaataagacacttacaaaatctgccctttccacccgccacactcatastgctatcccatacatattttggagttatttcaaccatggaggaaattaacaaaccaataatttaaagtgtagtttctattctctctctctatctcgctcgctcactctctcctgttataaacagatttactgtgatgctaatcaggcctaaacttcagggcagttc

SEQ ID NO: 670700 - DNA, 666 bp, Homo sapiens
ttttctgatatccttcagtttgaagtacttagcacaccaaagagctgtctttggagtatcgtgctctgagtcccagcatttgtaaggccaggtggaagagaagtgctggctcattaactcacacaactgtttcttgagagtcctgtgtgtgtctggtgctgtttgatgctctgagcaaaggttatcttcagagagaatgactgtccaagatgctgatgccactcgggatgatgaagagaggttgcaatgggagaaggatgcaaacagccaccagatgtttgctcagaggcccacacttagacctcagaagattgtcaaggggtaatctcgtggcacagaaggcaagagacaagtgygttggtaacactgtgcatgtcttagctaagtgtctatgtttacagaggtttcccttaaaagtttcctcttctggcattctttgtcaagagaatgtactcttttccttcactgctgtctttgtgacttaaagctgtggatggtttaacattttgaagttcaattatagataggaaaccaatgttgaaattggaaactgatctagaggaatccttttgattcagatgtgctatgtcccttttaaatttgtgtaagtttctagtaagggaggtaaagcatgatttattgtcatcactgggatttcaggacagg

SEQ ID NO: 670701 - DNA, 664 bp, Homo sapiens
  misc_feature 272: n = A,T,C or G
tccctgttttcagcctctctccttacctgtgccatcttggtgtttccagtgtctgaatatttccagagtttaacatggtgacttagcttgcttctcattgatagtgccattgaggcattattttgaccctcctgcaccctcttggtccgtcttgtttctgcatttgtgtattacagcataaggttataggcgtttcctaatgctattgaatttagcttcaatagcaaagttgtgtttctggttctcatcctgcttacagtttggggtaattntggagaaaataaggagacagaaatgtctttactgtctttgaacatgaatatgttggtattaacttttacatcagaataccttaggaatgggacgttgtactctgtggctaaataaaataacacctggatattaaagaaacccagaaagccttctttttctttttacaataattgggtttgrttttcttggaagtctgaactcctgcttactattgactgtatgttcagttgcctcagactgtcaacatcaaacgttagctaaaggtgccaagcatttctgggaggagaattgataagggaaatagagcctcctctttgaagaggctttgactgtgtgggtctctctctttgagatcagtgcctcatgctacttgtgataatttataagagtt

SEQ ID NO: 670702 - DNA, 1008 bp, Homo sapiens
attctgctgacattagcatcagtggttctcatctcatccctgcaccaatccactgtgcaacctcaggtgagtattttgcctctagaggcttcagtttagactcacataaaatgaggaagtgtctaaagccaccttcagaacaaacattacacgttcctggcgggaaagtttaatatgttgtacrttaatcatggctatttcagttgagatctgattttctcattaaacatcatgggtttacattcctcctcttaacaccaagatgacttcaggaatcaaatttaaattacgttgtagcctggaagctaattttgttattgggatcaagtaccttaaatgttcaatatttggcccagaagtccaattcttggaattcattttaagaaaataatcaagatgtggtcaaagcattaggtacaaggatgttcattacagcattatttataaatgtggggggcagggagtaaatataacatctaacaagagaaatgtttctataaattatgatacagtcatagggtagaatattatatagtcatgaaaaaatacctgtatcaaaaaatatttaatgacagagaaagtatgatatatgttaaataaaacaagagataaaggacagaaaacttgatacaacacacacacacacacacacacacacacacaaacacacacacacacatcccagaaaatgattagaaggaaatacatagatcaaattgttaatcagtgatactaattttaatgatttataggatgcttttattttctttatattttctgcactttctaaattttcttccatatgcacaactgcttttatcaacagaaggggaaaagcattattttaaagagctactgtggattcagacataataaagacaatacatttgcggaaacatatggtgaaggaaaacataacaggccaacatctcagcaaagaaaccagcaccatcccccagaagcagggcctgtgtgaaaactgggagaggtcaggacttcaggtgaaaa

SEQ ID NO: 670703 - DNA, 1008 bp, Homo sapiens
attctgctgacattagcatcagtggttctcatctcatccctgcaccaatccactgtgcaacctcaggtgagtattttgcctctagaggcttcagtttagactcacataaaatgaggaagtgtctaaagccaccttcagaacaaacattacacgttcctggcgggaaagtttaatatgttgtacgttaatcatggctatttcagttgagatctgattttctcattaaacatcatgggtttacattcctcctcttaacaccaagatgacttcaggaatcaaatttaaattacgttgtagcctggaagctaattttgttattgggatcaagtaccttaaatgttcaatatttggcccagaagtccaattcttggaattcattttaagaaaataatcaagatgtggtcaaagcattaggtacaaggatgttcattacagcattatttataaatgtggggggcagggagtaaatataacatctaacaagagaaatgtttctataaattatgatacagtcatagggtagaatattatatagtcatraaaaaatacctgtatcaaaaaatatttaatgacagagaaagtatgatatatgttaaataaaacaagagataaaggacagaaaacttgatacaacacacacacacacacacacacacacacacaaacacacacacacacatcccagaaaatgattagaaggaaatacatagatcaaattgttaatcagtgatactaattttaatgatttataggatgcttttattttctttatattttctgcactttctaaattttcttccatatgcacaactgcttttatcaacagaaggggaaaagcattattttaaagagctactgtggattcagacataataaagacaatacatttgcggaaacatatggtgaaggaaaacataacaggccaacatctcagcaaagaaaccagcaccatcccccagaagcagggcctgtgtgaaaactgggagaggtcaggacttcaggtgaaaa

SEQ ID NO: 670704 - DNA, 534 bp, Homo sapiens
gggggcggggggaaggccgaatcaagaacagcttacacaggaggaggctctggttaaaaacaaatctgtaccactgtggtctgtgtggtctagagggaagcacagtgggctgggagatttggattctagatctaacccttccagtaaccatgaaaccccaaggcaagagatttcaattttcctgcctccattttctatttgtaagacagcaataattctacatgtctcttctacctcaaaagtatgccaatacagagataaagcatgggaaaaatctgagttatagggaagaaaagtagtataggcaataattaagcatgttaatgacaacaagtgctgatttaacaattttttaaaacctcactattctgattagatcaagacaagtgggagggagagccactcaaccacagagtggcaagcgggtygtcggcaagtaaaggcaaggcattgcgactgtgaccctgattgcccatgcacacagcctgaatctctccaacagaacgaactcagccaggccaggcataaatctga

SEQ ID NO: 670705 - DNA, 620 bp, Homo sapiens
gaaattaaggaatccttcactrcactgaggtcataaagacattctcctacatgtgttcctaaaatatttgttgttttgtctttcacatttaagtatttaatccaaccaaaattgacttttctgtatggttgaagtatgagtctaatttcatttttctcaatatggttatccaattgcttcagaaacatttattgaaaactatttttacccactgatctgcaatattatctctgtcatatttggacattctgtttctggagacattattatgatgcattggtctattagtatatccctacattaattccatactatgttttagctttacaattagacttgatatctggtggagcaaatttttcaagaatggctgttttgaggcctttgctcttccatgtaaattgtattttatgtatgtattttctcaagctttattaaagtataaatgacaaataaaaattgtatatatttacggtatacaaagtgatgctttgatattgaatgtgtatacgctgtgaaatgctaattaacatatctagtatttcacatacttttcattttttgtgtggtgagagtatttaggatctactcacttaacaattttcaagtatacattatta

SEQ ID NO: 670706 - DNA, 620 bp, Homo sapiens
gaaattaaggaatccttcactacactgaggtcataaagacattctcctacatgtgttcctaaaatatttgttgttttgtctttcacatttaagtatttaatccaaccaaaattgacttttctgtatggttgaagtatgagtctaatttcatttttctcaatatggttatccaattgcttcagmaacatttattgaaaactatttttacccactgatctgcaatattatctctgtcatatttggacattctgtttctggagacattattatgatgcattggtctattagtatatccctacattaattccatactatgttttagctttacaattagacttgatatctggtggagcaaatttttcaagaatggctgttttgaggcctttgctcttccatgtaaattgtattttatgtatgtattttctcaagctttattaaagtataaatgacaaataaaaattgtatatatttacggtatacaaagtgatgctttgatattgaatgtgtatacgctgtgaaatgctaattaacatatctagtatttcacatacttttcattttttgtgtggtgagagtatttaggatctactcacttaacaattttcaagtatacattatta

SEQ ID NO: 670707 - DNA, 620 bp, Homo sapiens
gaaattaaggaatccttcactacactgaggtcataaagacattctcctacatgtgttcctaaaatatttgttgttttgtctttcacatttaagtatttaatccaaccaaaattgacttttctgtatggttgaagtatgagtctaatttcatttttctcaatatggttatccaattgcttcagaaacayttattgaaaactatttttacccactgatctgcaatattatctctgtcatatttggacattctgtttctggagacattattatgatgcattggtctattagtatatccctacattaattccatactatgttttagctttacaattagacttgatatctggtggagcaaatttttcaagaatggctgttttgaggcctttgctcttccatgtaaattgtattttatgtatgtattttctcaagctttattaaagtataaatgacaaataaaaattgtatatatttacggtatacaaagtgatgctttgatattgaatgtgtatacgctgtgaaatgctaattaacatatctagtatttcacatacttttcattttttgtgtggtgagagtatttaggatctactcacttaacaattttcaagtatacattatta

SEQ ID NO: 670708 - DNA, 1541 bp, Homo sapiens
agggtgttgagtgcaattggcagttctggttccatttggtaatctgggtaatttcccaaagacttcatcagtccaggtaacacgacctttccattctaccacaaaattcaaaccctaacaaaaaagtcagattctggtttagcccttcctccatctttcctgacctggggctgattgtgtaacaccttcctgccttagctttcctatctccattgtgcagatatagtagttgccttagcttatttcatcaagatgttaatgaatgcaataatataggaagttattcaaacttgtagaaaaacgctgtgtttgccaacatggtggaaatactgacaatgaaatttgatgaacaaagactggttttctgttactctcaacgttagctcatacrtcacggaagttgcaagtcagccaccgctccctcttctgtaaggagcaaagtatattttcaaacatggaagcatctggttaaatattaaatagaagagtcattcttctgaggtctcgcattgacagcatttaggtggcagttaagtcagatggccgttgactttgacggccatgcatttatggtgatgtataaataataactgacagcaaccctgtggcaatctttccaccagtcttgcccctctttgcactttcttcagaggtttatgcacacacacactttgcctgaccatcataatagctattgtcttctccccgccccatttctttcaacagatgtgtccatttttagttaatgcaaaggaaatgacagcttttaaaggtagtctttcacagtgggaaagagctgcattaactgtaaaaaccttttagttgcacaatttttatattcagactctcctccctagacattgcttctccatgtctgcatttccctttaagcttactggttattagaagggattgctttggggctgcaaaggaggagttcacagcagcagcagcaacagctgagaaactttagctctaggttccttggccagggaatagcagcattgaaagcctttgacaaagtaatatttgtgtgttcaaaaaacgttttatggaaacgtttgttgtgccaacctgtgcttaaaatgctaatggtatttgcctaggccatcagccaaataaaaacggattcatacatgtaaagtagaaggacacttgaaataataacttacgctttcagattgtctcaaagtgtgatcagtatgtgagttaacgagactgggagatccacagggccactgtggggaaaagcttcagccatgaactgaccccagatgaatccatccaggagcgaaaccttgcatgtttgcagtgtgggaaaatctcctgtgacagttttcaactggtgtcgctgtgggagagtccacacaggggcaatgattctcaggtgtttggaatgtggaaaaagctttccaggcaatggagaatgtcagctcaatgtaccaactcatgagtaagtgagaagacccaaggatgcagttcatgtgggaaagattctggaaggcggttggtcaccctgaacccacctggcatggaaggct

SEQ ID NO: 670709 - DNA, 650 bp, Homo sapiens
actcctgacctcaggtgatccacctgtcttggcctcccaaagtgctggggttacaggcaggagccacagagcctggctggaagttttattaatttaaatttcaataaccacatgtgttgagcggctactgcactggacagtgcagcactggagcacatgctttatagaatattgttggccgaccccaggttggcaagattctttagaatcacttcgtcaaccttactggcctaatttttcaaagtacaaatctgtggaatggtgccgccatataatactcagcaactggaataagatacataagtctagagtgcttaaaaactcgagtaagacatgtgaatggcagggggtgggaggcaaggggagggaaagtattaggacaaatacctaatgcacacagggcttaaaacctagatgatgggctgggcgcggtggctcacgcctgtaatcccagcactttgggaggctgaggcgggcrgatcacgagctcaggagatcgagaccatcctggctaacacgatgaaaccccgtctctactaaaaatacaaaaaattagctgggcatggtggtgggcacctgtagtcccagctactagggaggctgaggcaggagaatggcgtgaacccgggaggcggaggtttcagtgagcc

SEQ ID NO: 670710 - DNA, 966 bp, Homo sapiens
aattcttgtatgtaaaatggggacactacaaataaacataataactggatactgatataaaggaatttgcactctaatattaatcataatagctacatattaaaaacctctattaccatatatactctcacttagtacttgtaaaaatcctgccaaccagttatttatttgaattttacatatgagggaaagaggaacatagagaataagtaattagctttaaatcacatgtctattaagtgatcttggcttagatatggaccccaggttcttaatcactacattatatttactctgagcctaatgaacaaaacaaaacataaagacagggtagaataaattcacagcagttaatgcacttcagagctcagataagggagtatgagtcaggaaatgcttgctatgwcatttcagttatgaagtaggatttaaggaaactgaggcttagagaacttagattaattgtcctttgtaggagtgagagaacatatttaactttggtttaatatgaagaagactttctttggggaaacagtagaattttttctctagaaaaaaaaggctggtaaagatagcacttgactttaaatattgccctgagtagtttgaactgatttttgtccaagaggcagtgaagatgcatggaatgtttttaaacatagcacttatgtcacaaaaggtattgattaatttggcatgactgcctttgaggccatgatagttaaaaactgattaaaatatcttggaaaagcgtttctcaaagtgtatttcacaaaacactagtttctagaggttataagaggtttttttttaagttgctatgttgagataagactgggaattttggattaaacaagtcaaagaggtttctttattggaagatatctctgctaatgagtatgttaaatctctaaaatggggcaaggcgtgtggcatttctaaaatatatttaatcataggaagccc

SEQ ID NO: 670711 - DNA, 598 bp, Homo sapiens
tgccttttgattaccacttttatttgttcatgagcattgtcaaaagtgtattttatgtcacagaatacatccttcgaagaataggatgtgccaggatcaattgctaagctgaaaagctagcagtgaccaaagaacaccaacaaagaaacccagcctccaaaagagaaaagtcattctgacataacagctacagaactgacaagtgttaaggacaaacatattaaaatttttatgctttcagagtctatgatacttcttattaattgaataattgttttgtttagaggaaagtaagtactgtcttcttgtgcatgaggggacacatgaagtgagggggcttaatatctgccttttttcatataacatttaattaataatgaatctacaaattaattttattggttcatttttttttctgtgtaatacaccacccaaaaacttagtagcttaaaaccaccttttatttacctcacgattctgtggttctgaaatttgggctggactcagatgatgaagacttctgctaaacttgacttgactcactcrccagcctgtggtcagttgacatgttggcttggggctggttggtctgagggtc

SEQ ID NO: 670712 - DNA, 722 bp, Homo sapiens
gtgtgtgtgtgtgaataccactattcttccagactcccaaccagtgcataagaactagtagaattttaataataagctatatgtagcttggccaattgactgtacactacttattttgaagtatttttgaaaagcatttaaattgctcactataaacaaaaaatcttacaagtaaaccaaattattagttttagaaaatatttcttacagaacttattttaatttttgttttgaaattatattaaacttattatgtgtaagaaacagtaagcgacatgacaactgtacaaatgattcatacataatccctaaattctattaacctaaatattccttatttaggttaataggacattcctttatcattccttatcatctttatcattccttatcattagaacattccttatcatcttactttttaccaggtatagaccttaaaattaataatactttaaattgaaatacagagaggttaagtaattttcacaagttcacgtgacaattagggataaaatgacttcaaattcaggcaatttaatttcagagttcactgcttcccagcccaccttcaagtatctcaaggtctaattttgatttgcactgttctatatataatattttataawattcatttttaaaatagacacggtctcatggcattgacaatccaaggtcatgggatttattcacgttgtgttctaatgaacaaacaactgata

SEQ ID NO: 670713 - DNA, 747 bp, Homo sapiens
agttttctgtcacagcaaaaaaatcttcatcttaatttaagctaaatttacataaaaactctaaaaatcagtactctttacaactctatttttttaataaactataactatatatgtggtctataaatttatttatttatcttgtctacaagtttatcttgcaaatgtttatcgaataactaaaatgaagaaactctctctgtgggggacatctgctctttgaccggacagatatcacttgcctgactccttgataaatgccctcgtgtgttccatcagagattactccttccccgtttcygtggcactggagagcctgtcaatccaggcctttcctgccactccctcaccctgccaagagaatatgacccaatccagtccactcttccaagactggaatttattttagaaactaatttcaacttataaaagtaacagaaatcatgcacaaattctgttcacctagatttgctaagggcaccacactggtttaatcactcattctctaactctgcggacatcaatattttttttaatttcaggagtaagttgcaaagacatttaacactacatactttggtgtaatttcctaaaaaaaatcccagaacattgtagtacataatctcagcaaaattataaaatttcagaaaattaagtgacttattaattttaataattttaataatttttaataaattaaaattaataataagtttaacaatattaatattgtattatatatataat

SEQ ID NO: 670714 - DNA, 640 bp, Homo sapiens
taagagattatgtcagctggtggcttcttatctataaattaattgcattaagaaattatctattactagttttaaaaggatttcatttaaatgattctatttggagaaaaaaacaaaatggatatggagtttgttagatgccttttagccttttcctttaacctatgttctgtggaatgcagttgtgggagatcattcgtargtgttcaaagaaaataaaagggttccatagtcaagtaactttgggatatgctgtgttccataacctcctcatgacgatttacagtactcccagatcaaagagtttacaacctaaagtctgttgtcatactcctaaattacaagttacaacatcaaaaacactcaataaatagtcattgcatgactgaaagactggaagaacaaatagaactgtaagaaactgatttgattctagtgaaattcccctccctttctttcaccctcctcccaaaacagcatggaaggtggagtggagcaacttacaggtaatggcagtgggtagacagcagtgtgctttcaagcacatctcagccctgaggagtataaatcccatccatagctggaaaaatagcctgagatacgaaaagttttacccagcaaattccagtttattggttca

SEQ ID NO: 670715 - DNA, 655 bp, Homo sapiens
aaagatataaacaggcaattaatggtagtaatgtgtatgtccgcagttccagaacttcgctgaacattggaatcatatggagatctttaaaaatagtattgttgcctggctctcagatactctgatgtaattggtatggtgtataacttgggcactggaatttttagaagcttctctgatgattctaaagttcaagaaaggttgggaatcaatggactatgcaataagtctatataaaagattattgctaataatttaaagactgtaaattaaaacaaaaaagagatgccacgtttcatttatcagattggcaaggataaaaaattgataagacgtagtgttggtgagggtgtgaggaagagtcagtaaaatgttggtgataggatgtagattagagcaaagtttttggagggcaatttggtaatcttatgaatatgcaaaccttgcactgcctttgactcagcaactgtatttctaggaatttattttacacaaacacttgctcaaatcctcaaagatatttgatttggtattattcccataatattttaatttttgttgttgttatttgcctgtttggtttaaygagggatagggcttagaagtggttgatgggtaaaaggaaaaaaaaagttgttgatgaatggaaatagca

SEQ ID NO: 670716 - DNA, 636 bp, Homo sapiens
ccccagacctatatagaatactggttcaaccaaacaaagcattcacactaattatgtttatgcacaagcaggatgaatttgaagtgcaggccagaggagccagcctagggagtgggggcaggaagaggcagggattgcttaatctgaggggcgacttcaggtacagagaggaacatgaaccatcaggcatcatagcatgtcccaaggacactcacttcctgtttcccattcaagctccatgatctaagaatttcatgtcaacctggaactgcggctgccctcacccaggtggtgcacaacacagatttggkacagatcctctcaggaccctccctctaagaaagcccagcattagggaaggggcctgtgttagttcaggtgctctaaagtggccaagatgggattatttgtgccagagacttgttaaagtaaacacctgtgaatgaggaaggaaaggggcaggagagccttcagattgtaataccatttggacacctatgaaaggagacagggaaggaaggggcgatggaaggaagggcctcagactcagttctaagaaaattccagcccggctgatgggagtcctggagccatagttgcccattagaggggtcccatatcccacaggaatgggca

SEQ ID NO: 670717 - DNA, 636 bp, Homo sapiens
ccccagacctatatagaatactggttcaaccaaacaaagcattcacactaattatgtttatgcacaagcaggatgaatttgaagtgcaggccagaggagccagcctagggagtgggggcaggaagaggcagggattgcttaatctgaggggcgacttcaggtacagagaggaacatgaaccatcaggcatcatagcatgtcccaaggacactcacttcctgtttcccattcaagctccatgatctaagaatttcatgtcaacctggaactgcggctgccctcacccaggtggtgcacaacacagatttgggacagatcctctcaggaccctccctctaagaaagcccagcattagggaaggggcctgtgttagttcaggtgctctaaagtggccaagatgggattatttgtgccagagacttgttaaagkaaacacctgtgaatgaggaaggaaaggggcaggagagccttcagattgtaataccatttggacacctatgaaaggagacagggaaggaaggggcgatggaaggaagggcctcagactcagttctaagaaaattccagcccggctgatgggagtcctggagccatagttgcccattagaggggtcccatatcccacaggaatgggca

SEQ ID NO: 670718 - DNA, 1273 bp, Homo sapiens
aggaaaaactgttgtttatttttaacttacacaccagtgtctttaagtttgaaataaactttaaacatttgaaatgacataaacaaacacagtggactaattgctaaatgagagcatcgtggggatgtgatgatcatgtgaataacatggcattgccgcacatgaatattatggacagagctgcaggtggacttgatcttttggccagatggggttgaatgagacttcaaaatatcttggccataatgaataaagttaaattcttctcccctgtagctttttgttgctgttatttattttttatttttactttattttttaaattgtaactacagatagaaaaggtttcctgggattaggatatgtaattatttaggcatgaaacaaagagttgttttagaaattttactatcattaggaggaagcttaaaaagacaggaattccattgtcttgtaagaagtaagaaatatttattgattcccaaatggagctgaaaaaaaacctttcctcttttagaaagttgtgaatgacccagcgagagctctagtaagctttactgaaccaagctgctaatagttatttaatgttattcttcagtgtgaaagaatctccgtagattttccttttaatctctttgaattgcaggctcataaacctctctgatgagtcctgccagtgttttcttagatcccactgttgagasaatggagccacagaattctttcacctcttgttgtcagacaaatccaatagaacacaaggtcagaagggcctatacttctaaaggttgaaagattctttttcaagtaagcacatacattatttgattttaacattatatttctcaagaacctctctttataatgtactgacttctttatgtaaatagatttggaagtttttcttgtttccatatttggctaagcttgtaagcacagcacagggtatgaacagaccttaatgttcctagatacctcagaaaaagttgaacccatttacttcaaaagaatcaggaatcttttagtatcattggactcattataagagtataccatatgccagacaatgctttttatttccgaatggccgtattttgtttcaaaatgcttactaccattctatgtcaaaaattccagatttaatatcttggatctgttcatttaattaaatcactctctaaatcagtttatgttttctcaacccttttagtagtgtcatgttaacaggggaactttaggagataggatttacttttctagatacctattaaaa

SEQ ID NO: 670719 - DNA, 1273 bp, Homo sapiens
aggaaaaactgttgtttatttttaacttacacaccagtgtctttaagtttgaaataaactttaaacatttgaaatgacataaacaaacacagtggactaattgctaaatgagagcatcgtggggatgtgatgatcatgtgaataacatggcattgccgcacatgaatattatggacagagctgcaggtggacttgatcttttggccagatggggttgaatgagacttcaaaatatcttggccataatgaataaagttaaattcttctcccctgtagctttttgttgctgttatttattttttatttttactttattttttaaattgtaactacagatagaaaaggtttcctgggattaggatatgtaattatttaggcatgaaacaaagagttgttttagaaattttactatcattaggaggaagcttaaaaagacaggaattccattgtcttgtaagaagtaagaaatatttattgattcccaaatggagctgaaaaaaaacctttcctcttttagaaagttgtgaatgacccagcgagagctctagtaagctttactgaaccaagctgctaatagttatttaatgttattcttcagtgtgaaagaatctccgtagattttccttttaatctctttgaattgcaggctcataaacctctctgatgagtcctgccagtgttttcttagatcccactgttgagagaatggagccacagaattctttcacctcttgttgtcagacaaatccaatagaacacaaggtcagaagggcctatacttctaaaggttgaaagattctttttcaagtaagcacatacattatttgattttaacattatatttctcaagaacctctctttataatgtactgacttctttatgtaaatagatttggaagtttttcttgtttccatatttggctaagcttgtaagcacagcacagggtatgaacagaccttaatgttcctagatacctcagaaaaagttgaacccatttacttcaaaagaatcaggaatcttttagtatcattggactcattataagagtataccatatgccagacaatgctttttatttccgaatggccrtattttgtttcaaaatgcttactaccattctatgtcaaaaattccagatttaatatcttggatctgttcatttaattaaatcactctctaaatcagtttatgttttctcaacccttttagtagtgtcatgttaacaggggaactttaggagataggatttacttttctagatacctattaaaa

SEQ ID NO: 670720 - DNA, 1002 bp, Homo sapiens
ccccacattcttaagtaaaaatgtgtaggccccatgttgttttttagagacttgccaactcctatactgtattatcatagtcatggggatttttgttgttatttgttccataactgttttctcaaactatttccaaatgattttactggaaacgtttttttwaaactggcaataaattttggcataaaaattttaatcttttctgacactctttctattcttcatttaaatcagaaatctaaaattatgctctgacaaagtacatgtaaaatgaatattctagtgtattaatactattttataaataaagtaggatcaacggtatattgatatgaatgattattgacgtgtttgcaatagttcttggatttcatctgagaaactactcccttcagtaggtgatataaataataatgtatattaaatataggagcaaggatattaatcaacaagtcaaagtcctggtaattaattagttataaactaattagtttagaaattatagataaatattttctttgggggaggcaagccaaacacattctctattattagacaaaatttttcttaaaaaatgagagaatgtttatgataatgctttaatattgtataatcaaaacacatagttaataatcatgagattctgtgcttatttacggtaaattcactctgctctacacaagcacatgatattttcctatatctatggccaaccttatgtcttagtattccatattactttgtcttattgttttcttttaaaatgtgttagaaatatcatatatgacagtatcttttcttacattttatattatggtataatgcatttttaaagcttatttatagactttcttctttgtttccatatgtcaatgggggaaaatttccttgctaaaaaaatactctggcacttgctaaaacagtagggaaaactttagtcaagactattgcaatagggatattgcaataggaaataaaggtgaggcttagctatgaatatgg

SEQ ID NO: 670721 - DNA, 1060 bp, Homo sapiens
atatatatatatakgctacatatatatatttcatacatatatgaaatatgtgaaatataggctacatacatatatatttcatcagtctattctaggtaccttgatatgccctaaaaaactcaatgttgtgcttttctaagttcttctataaatgggcaaacaaatatgaaatattaattatcatccaaaaaatgccataaggccatggtgaaggtggcttgaatatcctcaggctttctaacacttaaagttattatgtagtatccagggaggaagcgaagtattgccctcaaaagggcaacaaaataccaattcccagagctcaaacttgcatttcaaaattattctcattgaattaataacaaaatacatttttatttcattgtttctagctagtgaactttgtcttagttatcctgctaactagcaccttggttttattttttccattgactactactgctttgttgccctggaagcttttcacccaatattcccattagaggtatgtcgtgattatagaaatttgattcagtgtctcatatttgctttcattctgtttaacagtgaaaccagctcaggtgaataattttttgcacgtgtcttcctttaatccttcagatgactttttgcttctaacttatatgtgttctgttaggcttaggagagattaggacagtttttgataaaatgatgctaacaataaattggcttaaaacatggaaacttagtatttctgaggagaagttgtactggctttaaatatctcaaatattagtgtaataaaaatggtaaatgtagtcccaacctctctttgaaactatgtcagaagttcttttcagatttttattagagattttatactttatttcaggcagaagttttaacaagaagtatctatagacatgggaacagatgaagatagggatcactttcaaaagaagatataagaggacagatatgacatgaatagtttcagtgcagcctcctgcttctacatctggatgaaaagtccttctgaggtctttccaactctgaatctctcagaggaatatgttta

SEQ ID NO: 670722 - DNA, 1060 bp, Homo sapiens
atatatatatatatgctacatatatatatttcatacatatatgaaatatgtgaaatataggctacatacatatatatttcatcagtctattctaggtaccttgatatgccctaaaaaactcaatgttgtgcttttctaagttcttctataaatgggcaaacaaatatgaaatattaattatcatccaaaaaatgccataaggccatggtgaaggtggcttgaatatcctcaggctttctaacacttaaagttattatgtagtatccagggaggaagcgaagtattgccctcaaaagggcaacaaaataccaattcccagagctcaaacttgcatttcaaaattattctcattgaattaataacaaaatacatttttatttcattgtttctagctagtgaactttgtcttagttatcctgctaactagcaccttggttttattttttccattgactactactgctttgttgccctggaagcttttcacccaatattcccattagaggtatgtcgtgattatagaaatttgattcagtgtctcatatttgctttcattctgtttaacagtgaaaccagctcaggtgaataattttttgcacgtgtcttcctttaatccttcagatgactttttgcttctaacttatatgtgttctgttaggcttaggagagattaggacagtttttgataaaatgatgctaacaataaattggcttaaaacatggaaacttagtatttctgaggagaagttgtactggctttaaatatctcaaatattagtgtaataaaaatggtaaatgtagtcccaacctctctttgaaactatgtcagaagttcttttcagatttttattagagattttatactttatttcaggcagaagttttaacaagaagtatctatagacatgggaacagatgaagatagggatcactttcaaaagaagatataagaggacagatatracatgaatagtttcagtgcagcctcctgcttctacatctggatgaaaagtccttctgaggtctttccaactctgaatctctcagaggaatatgttta

SEQ ID NO: 670723 - DNA, 647 bp, Homo sapiens
aaactatttgttctgaatacaagctttttatccaatatatgctttacaaatgttttcttctgtctaaggctagactcttttctggctttcaacagcatgttttgaagaccaggtatttttaattttgattaaatccaactcaacatatttgttttttgaataagtcctgtttttgatgtaattttaagaaacactaacctaactcaaaattatgaatgtactacttttaaaactatataatttgggtggttacatttaggtctatgaaccacttttagttaatttttgaaaaagatagtatcaatatataaaacagtatgagggaaaataccatgactaatatatccctttccccattatttagtacttaaacatttttttctaaacaatgtttccaaattttccgtgaaaaagtcttatacatcttttgctagaacatacatgttatgacttttcaatgtattgcaacttgttttatggctcagaatatggactatcttaaaaaggcttgtgtgcttttgaaaatcatatgtattctgcttttttttttgagrtgattattccataaatgccattaggttcggctttggttgatagcattattcaaactttctgtatctttacttattttctgtatattccatcaa

SEQ ID NO: 670724 - DNA, 656 bp, Homo sapiens
tacaatagtaagactgttacagtcttgtgttacagaaacatgagtgggtgagaatgagataaatcataaatataagggaatataaatttctgatttagggtgtgtgtgctttatatatacatacatatatttaatgtatatgtatacaaggagagggagaaagactttaagtattgtaaattttggcatttataaaatattttataacagaaaaacataaaccattaaagaaaaaggagaagggattagtgtggagcttgcctgagtactggtttggcaggcttgcacggcacataattaggcaacatattagcactggcttctaattcttatcttaygttgtatggattatggtaaactttctgaaagcttaatcacatgtaatgtaggaaattatctgacccttcccaataattactataaagaataaatgaagttacattggtgaaaacattcctagaactttattttcaaacatgttgtttcagaagacttgtgtcagaaaaatcttagttattaaaaatctttaatcaggattaaaaaagaggtatgtttccttagataagttttcccttatcttgttttattttttttaaatattgcattgtcatagacttttttttttccctaaatatgtgaggtaagaaatccaggta

SEQ ID NO: 670725 - DNA, 2163 bp, Homo sapiens
agaaacccaatgatcttcattggttcaaatgtcaggagctgaggggtcccatctaaaatgctgataaacagagctataaaggatgccttctatgctgaaacacaaaactcctgtccttaccttttatgctcttatctatgtgcccaaggaaccatgtaatccccagtacaagagtagatcgtataatttacacatatatagtggatcagagacctaatgtagagacgacagccatgcccagtcttacccagccacactcacaaatcaaatcctcctgcttatcagctttgggctagattttgaacttggcttaattttaaccctttttctggcacctacaattttgtttggaaactaggcttgcactaggaccataggcttgcattacatagatttagaatattcctattttactcttcatccttggacagaatttagctctctttctctcccttgccctttctgcctattgattccaaaggcaacgttgcctctagattgggggcccagagataggattcaaatcaaagtatatcgaattgcaaagcaattctcactgttgcataacctctccgagtcagttaccctatcttaaaactaatcaaaatgtcaaagacttataaagaataatttatataattaacttacataaagcactttgtaaaatgccctgaatggtataggcgcttaataaatgctggccatagttttttatcctttgctatattccctaacaaaccaaacaaaaatcaaagcacagtcttttcatggggcttattggaaaaatggtcatcataccctctttccctctattgttcctgtgacatattttaagtatttataattgctgttcagattggtgacaattttcatttcacaaaatgactcttcttacaattatgcttaaagtcctctctaaatggttcttaaatgtrttaattatgcaagatttatcacctgacatatgaaaggctaacttttcaaatgatttcagagtaaatggaatgctaagccctctcccaaccagtaatagtaatgtgttcatttgaaccaggtcacgagcctgcctgcctagagaagtgaagcccctggaatgtctctgaagcaaacgggcaggtgtgtctgcatgaaaaaaggcaaaatcgaccatggagcattgggttaaatgcaggatgataggcgactctgcaactcactttacaatcacttaaccccttttggtcctttgagacctaaaggtgctgctgacaagaaatgcaagcctgtctgtataggtattatgagtccaggataatggtcacatagcactttggaaataaaaagtatttaacccttctagcatgttcctcagtcaagaacaaaaaaaggtaacttttaaaagctcaaataagtatgtattcccctgtgggggggaaaagaaacttctggctgaatttaatattactaacaaaactacaactgtaataggagtacttgaaggaacaatttgagcttactcaaatttgtgtccttagaaggcagtaaataagtttatcattttgacaggtaagaccgcctgaggtgctttgaacaaaaataggacactgtctttctgatcgaatgctttcatctgaagacttcttcccatatccacaacagtactttgaactcaaatgacatttgttttatatattaaatgaagggttccattttcttgtctttgttttcactagtgtccaaaaaattgtttctacatgaagtagtaggacccccaaaaaactcagtaaattattacagccctaatagaacaagcaaaggtaaagaaatggaccccaaattcaagatcaaaatccattaaaaagctacacccatgcattaatggctttgttaagaaccaaacagaaacatcttttttcctcactccacccccttcagctttactaaaataagcccaaggagcaccatgtcattgatacttttctttgagaatatcagggacaatttaattgaacacataatagaatcatttacctttgtggaccgctgtatacactttccaaagtattttcacatatattattacatattagcttaaatcttttacaatcagggaaactgatgtatacagaagttaaacatctagctctcagttattaggcttattcatgtgaactcatgaagaga

SEQ ID NO: 670726 - DNA, 2163 bp, Homo sapiens
agaaacccaatgatcttcattggttcaaatgtcaggagctgaggggtcccatctaaaatgctgataaacagagctataaaggatgccttctatgctgaaacacaaaactcctgtccttaccttttatgctcttatctatgtgcccaaggaaccatgtaatccccagtacaagagtagatcgtataatttacacatatatagtggatcagagacctaatgtagagacgacagccatgcccagtcttacccagccacactcacaaatcaaatcctcctgcttatcagctttgggctagattttgaacttggcttaattttaaccctttttctggcacctacaattttgtttggaaactaggcttgcactaggaccataggcttgcattacatagatttagaatattcctattttactcttcatccttggacagaatttagctctctttctctcccttgccctttctgcctattgattccaaaggcaacgttgcctctagattgggggcccagagataggattcaaatcaaagtatatcgaattgcaaagcaattctcactgttgcataacctctccgagtcagttaccctatcttaaaactaatcaaaatgtcaaagacttataaagaataatttatataattaacttacataaagcactttgtaaaatgccctgaatggtataggcgcttaataaatgctggccatagttttttatcctttgctatattccctaacaaaccaaacaaaaatcaaagcacagtcttttcatggggcttattggaaaaatggtcatcataccctctttccctctattgttcctgtgacatattttaagtatttataattgctgttcagattggtgacaattttcatttcacaaaatgactcttcttacaattatgcttaaagtcctctctaaatggttcttaaatgtgttaattatgcaagatttatcacctgacatatgaaaggctaacttttcaaatgatttcagagtaaatggaatgctaagccctctcccaaccagtaatagtaatgtgttcatttgaaccaggtcacgagcctgcctgcctagagaagtgaagcccctggaatgtctctgaagcaaacgggcaggtgtgtctgcatgaaaaaaggcaaaatcgaccatggagcattgggttaaatgcaggatgataggcgactctgcaactcactttacaatcacttaaccccttttggtcctttgagacctaaaggtgctgctgacaagaaatgcaagcctgtctgtataggtattatgagtccaggataatggtcacatagcactttggaaataaaaagtatttaacccttctagcatgttcctcagtcaagaacaaaaaaaggtaacttttaaaagctcaaataagtatgtattcccctgtgggggggaaaagaaacttctggctgaatttaatattactaacaaaactacaactgtaataggagtacttgaaggaacaatttgagcttactcaaatttgtgtccttagaaggcagtaaataagtttatcattttgacaggtaagaccgcctgaggtgctttgaacaaaaataggacactgtctttctgatcgaatgctttcatctgaagacttcttcccatatccacaacagtastttgaactcaaatgacatttgttttatatattaaatgaagggttccattttcttgtctttgttttcactagtgtccaaaaaattgtttctacatgaagtagtaggacccccaaaaaactcagtaaattattacagccctaatagaacaagcaaaggtaaagaaatggaccccaaattcaagatcaaaatccattaaaaagctacacccatgcattaatggctttgttaagaaccaaacagaaacatcttttttcctcactccacccccttcagctttactaaaataagcccaaggagcaccatgtcattgatacttttctttgagaatatcagggacaatttaattgaacacataatagaatcatttacctttgtggaccgctgtatacactttccaaagtattttcacatatattattacatattagcttaaatcttttacaatcagggaaactgatgtatacagaagttaaacatctagctctcagttattaggcttattcatgtgaactcatgaagaga

SEQ ID NO: 670727 - DNA, 2163 bp, Homo sapiens
agaaacccaatgatcttcattggttcaaatgtcaggagctgaggggtcccatctaaaatgctgataaacagagctataaaggatgccttctatgctgaaacacaaaactcctgtccttaccttttatgctcttatctatgtgcccaaggaaccatgtaatccccagtacaagagtagatcgtataatttacacatatatagtggatcagagacctaatgtagagacgacagccatgcccagtcttacccagccacactcacaaatcaaatcctcctgcttatcagctttgggctagattttgaacttggcttaattttaaccctttttctggcacctacaattttgtttggaaactaggcttgcactaggaccataggcttgcattacatagatttagaatattcctattttactcttcatccttggacagaatttagctctctttctctcccttgccctttctgcctattgattccaaaggcaacgttgcctctagattgggggcccagagataggattcaaatcaaagtatatcgaattgcaaagcaattctcactgttgcataacctctccgagtcagttaccctatcttaaaactaatcaaaatgtcaaagacttataaagaataatttatataattaacttacataaagcactttgtaaaatgccctgaatggtataggcgcttaataaatgctggccatagttttttatcctttgctatattccctaacaaaccaaacaaaaatcaaagcacagtcttttcatggggcttattggaaaaatggtcatcataccctctttccctctattgttcctgtgacatattttaagtatttataattgctgttcagattggtgacaattttcatttcacaaaatgactcttcttacaattatgcttaaagtcctctctaaatggttcttaaatgtgttaattatgcaagatttatcacctgacatatgaaaggctaacttttcaaatgatttcagagtaaatggaatgctaagccctctcccaaccagtaatagtaatgtgttcatttgaaccaggtcacgagcctgcctgcctagagaagtgaagcccctggaatgtctctgaagcaaacgggcaggtgtgtctgcatgaaaaaaggcaaaatcgaccatggagcattgggttaaatgcaggatgataggcgactctgcaactcactttacaatcacttaaccccttttggtcctttgagacctaaaggtgctgctgacaagaaatgcaagcctgtctgtataggtattatgagtccaggataatggtcacatagcactttggaaataaaaagtatttaacccttctagcatgttcctcagtcaagaacaaaaaaaggtaacttttaaaagctcaaataagtatgtattcccctgtgggggggaaaagaaacttctggctgaatttaatattactaacaaaactacaactgtaataggagtacttgaaggaacaatttgagcttactcaaatttgtgtccttagaaggcagtaaataagtttatcattttgacaggtaagaccgcctgaggtgctttgaacaaaaataggacactgtctttctgatcgaatgctttcatctgaagacttcttcccatatccacaacagtactttgaactcaaatgacatttgttttatatattaaatgaagggttccattttcttgtctttgttttcactagtgtccaaaaaattgtttctacatgaagtagtaggacccccaraaaactcagtaaattattacagccctaatagaacaagcaaaggtaaagaaatggaccccaaattcaagatcaaaatccattaaaaagctacacccatgcattaatggctttgttaagaaccaaacagaaacatcttttttcctcactccacccccttcagctttactaaaataagcccaaggagcaccatgtcattgatacttttctttgagaatatcagggacaatttaattgaacacataatagaatcatttacctttgtggaccgctgtatacactttccaaagtattttcacatatattattacatattagcttaaatcttttacaatcagggaaactgatgtatacagaagttaaacatctagctctcagttattaggcttattcatgtgaactcatgaagaga

SEQ ID NO: 670728 - DNA, 758 bp, Homo sapiens
  misc_feature 5, 6, 7, 8, 9, 10, 11, 12, 13, 14, 15, 16, 17, 18, 19, 20,21, 22, 23, 24, 25, 26, 27, 28, 29, 30, 31, 32, 33, 34,35, 36, 37, 38, 39, 40, 41, 42, 43, 44, 45, 46, 47, 48,49, 50, 51, 52, 53, 54, 55, 56, 57, 58, 59, 60, 61, 62,63: n = A,T,C or G
  misc_feature 64, 65, 66, 67, 68, 69, 70, 71, 72, 73, 74, 75, 76, 77, 78,79, 80, 81, 82, 83, 84, 85, 86, 87, 88, 89, 90, 91, 92,93, 94, 95, 96, 97, 98, 99, 100, 101, 102, 103, 104: n = A,T,C or G
atcannnnnnnnnnnnnnnnnnnnnnnnnnnnnnnnnnnnnnnnnnnnnnnnnnnnnnnnnnnnnnnnnnnnnnnnnnnnnnnnnnnnnnnnnnnnnnnnnnnnagttaaaaaataatgtattgtactttcctatctcaactaaaatataacttattgactatttcctaatatcagagcacattattttaatctactttagtacaatttaatgtgggtaattttattaactctaagaagaatttagaaatgagagagataaaggaagaataaacagatttaaataaatatgacaagtcaatcaaaatatgtgttcttaccacttcacaagttggcataayaaggttttcacagttacattctaaaaggcaaaaatcaacatatttacattgatcaaaataattaacttattataatgaaaccttaaaatatgaaaattagttaccacagtgccatgttgggcaacattgaccagatacattttctttcacaagattcatatcttctgcacagttgagtaatggcataggacaaaggtttggttcacatactaaaaagaaaaattacatgggtaaagatgaattttatagagttgccatttctcattacctaccatttagttcactgccattacaataatgcatggattcatatttcccaagtgctacctctcccaccgtcagattgccatgtgttggtgaagataaaacaattgacatataaacaggtacaaaaagagtactggtgctaggatagctc

SEQ ID NO: 670729 - DNA, 630 bp, Homo sapiens
gccaccagctaagccaactgtgcccatgtttacaggtattgttataattttagacaacaaaagtagcactatgtagtttaagtgttggcttaatttatgtaatttaggtgttactatagctgctatcattaatactacctatgggctaggaaacccagcagtcacttttgcttcattaagcttgtccattggctcaacatgccatgttttctagaacttctggcctcaaaggattcttctgcctgagacccccaagtgctgagattacaggcatgagccacactgcactgggctacgtgcctcattttctgagtggcttctgcatttggtccacctcgttcttcatttcagttcgtgtagattccttggacttccctcacatctaaaaacctaaattctacttttaggtttgattaaatcccacttagattttcacagtgattaaattggctctaatgaaacagacataaatcagggttttctttattgcttccatttccatgtttgcattctgtctctggctctggaggaggcattctgggctcctasccttgctttcctcccgccctgtgaagcttgcctcagggaaggatttaataaatccactcacagtgaggctcaacaaactta

SEQ ID NO: 670730 - DNA, 593 bp, Homo sapiens
aacatgataattttttaaatgcccattgtattacccaaaattccatatagagaatcctaaatgactatctaaattcagctctaggaaatacacgtgtaactgcattatcttcttactcaaatgcctaaactttcttttatgggaaaatgagaagtacagaacccaactgaccaagaaaataagcctcagacaaggggagaagctgctctgggttgtctggctgtttcaaggctcccctggtgctctttccactgccctttctgctaccacctgctgccttttgaggaatctaagcccagaaaaagcaacaygggttgataaagccattgcgctggaaagaattcctatggttcaaacacttgttagtgaattctgaatgaatagaattgttccagcccacaatttacttgttctggcataatccagccaggaaataataaaaactgagtctctctataattatttagattggaaggtagattattccacagtatttctaggttaaaacataaaaaaaaaaaaaccttccaccaaatacgaaaacatcccctgccccaaaattctcatgtcatatttttggcagataggaaact

SEQ ID NO: 670731 - DNA, 611 bp, Homo sapiens
gatataaatcatctcttgatattatatttctacattaccctatctttaagataatactattaatgtatcaaaatgtgtgaacaagtggttgaataaattatatttaaaatttgcaatgttcctcattttgcttgctttgagaatagggtaataagcttttggttttcttcaagctgttcaggaagaggtatgtatttgtaataacaaattttgccttctcaacctctatcctctataaagatgagtcattaaaatgcctcatagtcaataaggattggagtgggagggataagggcaaaaaactgtgattgaagagatatatcataatatttgggataaagaactaaatatgcacggtattatgattcactttattttttctgtccataatagattttatatttgcatacaytttaatttgaggaataaattgaaaatggaataaaatattgaaatatattgatcaaatatatattgcataatttacctaaatacttgttcttttatgccaaatcaaagcaaaatacagagctatcatgataataggttatcttatattttattgataatttaaggcaaacactcaggattttctgctttttagtgatacc

SEQ ID NO: 670732 - DNA, 612 bp, Homo sapiens
gacacaaagaaggaaacaagagacactggggcctattacatggtgggggatgggagaagggtgaggatagaaaaactacctattgagtgttatgctgattacctaaatgacaaaatgtcccgtacaccaaagccccacgacatgcaatttgcccatgtggaaaattgcacgtgtacctcttgaacctaaaataaatttggaaggaaaaaaaaatgctgttaagttcctaaaaaaggaaaaattatttctaaatatacatcaactatgaattttcaactaaacatacttctaactttatatcactaaaaacaaaagtaaatataagaataattaccaaaaatttacttgcaaataaaattatatagattccttttaagtaaagacatttttcatagatcagcaatttagtaggtttaataccaagcacaattgagattctctctaaaataatatttcaaattgtttgtttatttactatttttttttatccatcctcccaccattatgtgtgggcaccagaacagcaggggctaaactagtaaaaacgattttcaactagagtaaattaataaaattattttaattaattwatttatttctgagacagtctca

SEQ ID NO: 670733 - DNA, 1593 bp, Homo sapiens
gataaaatctctgcttgtgaatagcagaaaatatcacgttgtgcaaacacattaagctattgaaaaaatgacctctaaatctctactaggtctaatgttctaagatcagctgaaatgccaaactctgtgctgctccatgttgaagaattcataaatatttgaggaatgaaaatatgcaaataatgtctttatccctttagatatcaaagccaatacttttgtaactattctgcatctaaaaaggttcagactacaaatttttgcttgattttgaaaacaactcaagcctctgcacttatacatccccattcatttgcaatttaaatgaagctccttgtgagataaaatttatctacaaaatgaataacagtgcactgatatacggtgggcaaggggcattaagaagaagtggatatatcaaaacagtctcaggagctacctgacttactcccctttgcaattctggaacactcacgtatacatatgaaaaatgaagtttattaccttgagaaagagaacatttggaacaaatctattaaaatgaatgctctttccacttcatcccacccccattcacagaataccctttgacagccaatggaatatagagaaaagaactaaaattgatcttaacttataggtctatactaaaagttgtatgttaaccccattctcagcatcaacgcacacaaaagggttgattgaatactaaatgtattttatgattttcaagtatggaaaaaaaatgagtattttctgtgtgtgctctgagaaaaaaatctgcaagaatttatgtgggataccaacaaacwcatccacgatatttaccccacaatagttttaaaattcatacattagaaaatacctttttaggggctggcacggtggctcaggcctgtaatcccagacctcgaagcgggcggattacaaggtcaggagattgagaccatcctggctaacacggtgaaaatccgtctctactaaaaatacaagaacaaaattacccgggcatggtggctcatgcctgtaatcccagcactttgcgaggctgaagtgggcggatcatgaggtcaagagattgagaccatcctggataacacggtgaaaccctgcctctactaaaaaatacaaaaaattagccgggcatggtagcaggcgcctgcagtcccagctactctggaggctgaggcaggagaatggcatgaacccgggaggcggagcttgcagtgagccgagatcgcgccactgcactccagcttgggcgacagagcgagacccagtctcaaaaaaaaaaaaaaaaaaaagaaaatatctttataattatttcgccaataaatgttgatgctgaagtggtctatttcaggatggtagcaatataaatattggctaaatataaataaaaactatttaaagttctacatatggaaagaagggaacattttttttcttgctttgagagttaatatttccataatatttgatggtgtgttacctgcatattcttaacgaaagtggtatttattaaagagactattttatgaaaggtattaaacacagaaaaatactgcaacaatggcataaagcttaaaaata

SEQ ID NO: 670734 - DNA, 470 bp, Homo sapiens
acatttatatttaaactaaaacaaatttaagaaatattagatgatatagcagttcttttagtgatatcatataaaggaagtcaaaaataatttacatagaacagtgtcaatatgtatatcatgtttaatattcataatgactaattacgtaatagcatattaacgtaacgtaggcacaatagcctaaaataatgtcaagattttgaatatgtgaaaaatattgcaacaccttytttataatcattacatatcacataagaatataaatttaaaagcaaaaaaattatattctgtcaaagtggagtttattatactgtatttattttatttaaataaatttatttatattcttaagttcaatacccaggctggtattgaactcttggactcatgtgatcctcctgccttggcctcccaaagtgttggaattacaggcctgagccaccatgccagtaatgtacaatatttct

SEQ ID NO: 670735 - DNA, 1227 bp, Homo sapiens
actttggttttttgttttgttttttaattcttgactactgtgataagatgaacataagtcaaaaacaaaaatacctgttttgcaggccctttataatcaatccaggagagacaccagggtttcttggaagaggcactctccaatgttgaataactgaattgactaccaagaatacaagtttggagttatatttccaataagaaataatttcttattttcctgaaataattaatgaaactttgtaatttctccacttttcagtttttcttgctggtaaatcttgsctcatttataagtgttatgcatgtttatctttataatatttttccctattggaaaacactgcagtaaatattgatggcttactactctgatattgtgaaatcaaaatcatgcagacaaatcagacaaatacatgatttctattcatttccaacaatacaagaaactaaatggaacaaaattaacctcagctttttttaagtattacattttctaataacctatgccctgagatgtgctaatggaattatcttacagaagaggacataattttgttgacacaaaacgtatccctttgtgaccaaatgtcaaatgtatgagtgttacctcttagggttttagtgttggcatgttgataagattgcacactatgaaagctatatgaatgttcattattattattattattattattattacacatatagcatttaaatagtgttttcttcaaaatcatcataattgtccttgcatttgcttttatttttaacatgatgaccagggatcagaaatggcaagaatcaaaaactgatggaagagagggaatgtatttttaggtggtttaatttcattaaatcaattatgctcttaaaagattacaaaagtgaaattcttattaatctagaatagtaaatttgaattagcattgaaaaacaacttgacaacaaagaaaattattgctatgataaatgttttgagtttcctttaatacttcaggaatgttgccattcaacatagcatatgaactgttttcttccaatgttctcaatgttgttttcatgcaaagagtcttgatgaatacaacagttcactgtgattttttataaacccctattcttctgctcagaagacacctgtgaccttcctctaggattcactgacctcaggaatttgtaatttgctaaactgtgtctcgctactcacctgagcataagagcctagatt

SEQ ID NO: 670736 - DNA, 1227 bp, Homo sapiens
actttggttttttgttttgttttttaattcttgactactgtgataagatgaacataagtcaaaaacaaaaatacctgttttgcaggccctttataatcaatccaggagagacaccagggtttcttggaagaggcactctccaatgttgaataactgaattgactaccaagaatacaagtttggagttatatttccaataagaaataatttcttattttcctgaaataattaatgaaactttgtaatttctccacttttcagtttttcttgctggtaaatcttgcctcatttataagtgttatgcatgtttatctttataatatttttccctattggaaaacactgcagtaaatattgatggcttactactctgatattgtgaaatcaaaatcatgcagacaaatcagacaaatacatgatttctattcatttccaacaatacaagaaactaaatggaacaaaattaacctcagctttttttaagtattacattttctaataacytatgccctgagatgtgctaatggaattatcttacagaagaggacataattttgttgacacaaaacgtatccctttgtgaccaaatgtcaaatgtatgagtgttacctcttagggttttagtgttggcatgttgataagattgcacactatgaaagctatatgaatgttcattattattattattattattattattacacatatagcatttaaatagtgttttcttcaaaatcatcataattgtccttgcatttgcttttatttttaacatgatgaccagggatcagaaatggcaagaatcaaaaactgatggaagagagggaatgtatttttaggtggtttaatttcattaaatcaattatgctcttaaaagattacaaaagtgaaattcttattaatctagaatagtaaatttgaattagcattgaaaaacaacttgacaacaaagaaaattattgctatgataaatgttttgagtttcctttaatacttcaggaatgttgccattcaacatagcatatgaactgttttcttccaatgttctcaatgttgttttcatgcaaagagtcttgatgaatacaacagttcactgtgattttttataaacccctattcttctgctcagaagacacctgtgaccttcctctaggattcactgacctcaggaatttgtaatttgctaaactgtgtctcgctactcacctgagcataagagcctagatt

SEQ ID NO: 670737 - DNA, 1946 bp, Homo sapiens
ggccattgttaaacttcagatgttcatagaaaagtaacttgtcttagttttcttaataacatattaatgcacagtattatctaatcaccaaatccttagaaaacgtatttcgtggaaatgattttttaaattacattggccattaggtatttatattagttaatctgaatgtaatgtttatttagttctattatggataaaaatatttagtctagtaatgtcatatcaattatgaaaaatataaattactctgagataatgagaatctattctgtcacatcgattatgataaaattaagagtaatagctaacacttttcctccaaaatacttgatatgccagacactgatcaaagtaaaatagatgtattctctcactttattttcacaaaacctatgagaaaacatctatttttatcactattttatagctgtcaacctaaataagaaaggttaaccaaattatctaaagcaatttttatgtcatcttaaaacaaatacaataaaatagaagtataaatatttaatttaatatggttctaggtttttaaatcaaattttattgaaattataaagtagaattctaatgatatgtaacttggtttagattcttggatttggtgttatagtgaattctgtgtgagtgtgtgtgtgtgtgtgtatgtgcatacttattcataagacacaaagcttattttttaattaagataactttataaaatgttattatttttagaattgtttatgtgtttcttgacacatttatttcactgaccaagtgttagacaaattctatgagataatagccaatcacgatgcagttattgttttcccatgcacaattctatatgaatttataaactgtgcacactttcaactagaagtatatttgtgttttgttaggaaatgacatctttttttcctcattaacaaacaattggatacatttgttaacaaccagtaattgttcatttttttgttgggttgaaactgctgtttgaaatgaacccatatctgcaggctttctacattagtagatatcagtaaattgaggtaattttattgttagttaataccaattatggtaaaacattgactgcttacaagtgtcaatcattgtgtttaaaccatgcaaaaaaataaaaaagaaagaaagaaagaaaacaagcaaacaagagcagtcattctcatctcagaaaactagcagtctaacaaaggagggcaaacggtttttaaagggccagatattwgatttaggctttataagacatacattctctgccccaactcctcaactctgccacagcagcactaaagaagccataaacaacaagcagtgagtgttccaataaaattgtaattacaaaaacaagtagtgaactggatttggcccttgctctgtagtttgccaacccctaatctgagtgctgcaacgaggcagaagtggtaggaaagttaacttatataaaattttagtaattgttggagacattaatgcaacaggtgttactgtaaaggagtatatcaagatctgccaaaatactttacagatgtattaactactctttgattgttttaataatctgatatactgtaactctgactctcaatatctctacagtgaaaataatgatttggcatattctttaaaatataataaatagacaaattggaaataaatgttacgtagcaatttttattagaatttcattttagtgacagcagtcaaatcctcagacatttagtagtactacaaattaaaatattgtcagtgctacaaaagaaaatatataaaaattgtctactttttctttgaaaagatccattggaattttatttggaaataatcatctatcttcattagtgtttgcaaatttattggaagtttatgttttgtttactttttttgatataaaaaagaatagatacatttctagaaatgaaagt

SEQ ID NO: 670738 - DNA, 1946 bp, Homo sapiens
ggccattgttaaacttcagatgttcatagaaaagtaacttgtcttagttttcttaataacatattaatgcacagtattatctaatcaccaaatccttagaaaacgtatttcgtggaaatgattttttaaattacattggccattaggtatttatattagttaatctgaatgtaatgtttatttagttctattatggataaaaatatttagtctagtaatgtcatatcaattatgaaaaatataaattactctgagataatgagaatctattctgtcacatcgattatgataaaattaagagtaatagctaacacttttcctccaaaatacttgatatgccagacactgatcaaagtaaaatagatgtattctctcactttattttcacaaaacctatgagaaaacatctatttttatcactattttatagctgtcaacctaaataagaaaggttaaccaaattatctaaagcaatttttatgtcatcttaaaacaaatacaataaaatagaagtataaatatttaatttaatatggttctaggtttttaaatcaaattttattgaaattataaagtagaattctaatgatatgtaacttggtttagattcttggatttggtgttatagtgaattctgtgtgagtgtgtgtgtgtgtgtgtatgtgcatacttattcataagacacaaagcttattttttaattaagataactttataaaatgttattatttttagaattgtttatgtgtttcttgacacatttatttcactgaccaagtgttagacaaattctatgagataatagccaatcacgatgcagttattgttttcccatgcacaattctatatgaatttataaactgtgcacactttcaactagaagtatatttgtgttttgttaggaaatgacatctttttttcctcattaacaaacaattggatacatttgttaacaaccagtaattgttcatttttttgttgggttgaaactgctgtttgaaatgaacccatatctgcaggctttctacattagtagatatcagtaaattgaggtaattttattgttagttaataccaattatggtaaaacattgactgcttacaagtgtcaatcattgtgtttaaaccatgcaaaaaaataaaaaagaaagaaagaaagaaaacaagcaaacaagagcagtcattctcatctcagaaaactagcagtctaacaaaggagggcaaacggtttttaaagggccagatatttgatttaggctttataagacatacattctctgccccarctcctcaactctgccacagcagcactaaagaagccataaacaacaagcagtgagtgttccaataaaattgtaattacaaaaacaagtagtgaactggatttggcccttgctctgtagtttgccaacccctaatctgagtgctgcaacgaggcagaagtggtaggaaagttaacttatataaaattttagtaattgttggagacattaatgcaacaggtgttactgtaaaggagtatatcaagatctgccaaaatactttacagatgtattaactactctttgattgttttaataatctgatatactgtaactctgactctcaatatctctacagtgaaaataatgatttggcatattctttaaaatataataaatagacaaattggaaataaatgttacgtagcaatttttattagaatttcattttagtgacagcagtcaaatcctcagacatttagtagtactacaaattaaaatattgtcagtgctacaaaagaaaatatataaaaattgtctactttttctttgaaaagatccattggaattttatttggaaataatcatctatcttcattagtgtttgcaaatttattggaagtttatgttttgtttactttttttgatataaaaaagaatagatacatttctagaaatgaaagt

SEQ ID NO: 670739 - DNA, 1946 bp, Homo sapiens
ggccattgttaaacttcagatgttcatagaaaagtaacttgtcttagttttcttaataacatattaatgcacagtattatctaatcaccaaatccttagaaaacgtatttcgtggaaatgattttttaaattacattggccattaggtatttatattagttaatctgaatgtaatgtttatttagttctattatggataaaaatatttagtctagtaatgtcatatcaattatgaaaaatataaattactctgagataatgagaatctattctgtcacatcgattatgataaaattaagagtaatagctaacacttttcctccaaaatacttgatatgccagacactgatcaaagtaaaatagatgtattctctcactttattttcacaaaacctatgagaaaacatctatttttatcactattttatagctgtcaacctaaataagaaaggttaaccaaattatctaaagcaatttttatgtcatcttaaaacaaatacaataaaatagaagtataaatatttaatttaatatggttctaggtttttaaatcaaattttattgaaattataaagtagaattctaatgatatgtaacttggtttagattcttggatttggtgttatagtgaattctgtgtgagtgtgtgtgtgtgtgtgtatgtgcatacttattcataagacacaaagcttattttttaattaagataactttataaaatgttattatttttagaattgtttatgtgtttcttgacacatttatttcactgaccaagtgttagacaaattctatgagataatagccaatcacgatgcagttattgttttcccatgcacaattctatatgaatttataaactgtgcacactttcaactagaagtatatttgtgttttgttaggaaatgacatctttttttcctcattaacaaacaattggatacatttgttaacaaccagtaattgttcatttttttgttgggttgaaactgctgtttgaaatgaacccatatctgcaggctttctacattagtagatatcagtaaattgaggtaattttattgttagttaataccaattatggtaaaacattgactgcttacaagtgtcaatcattgtgtttaaaccatgcaaaaaaataaaaaagaaagaaagaaagaaaacaagcaaacaagagcagtcattctcatctcagaaaactagcagtctaacaaaggagggcaaacggtttttaaagggccagatatttgatttaggctttataagacatacattctctgccccaactcctcaactctgccacagcagcactaaagaagccataaacaacaagcagtgagtgttccaataaaattgtamttacaaaaacaagtagtgaactggatttggcccttgctctgtagtttgccaacccctaatctgagtgctgcaacgaggcagaagtggtaggaaagttaacttatataaaattttagtaattgttggagacattaatgcaacaggtgttactgtaaaggagtatatcaagatctgccaaaatactttacagatgtattaactactctttgattgttttaataatctgatatactgtaactctgactctcaatatctctacagtgaaaataatgatttggcatattctttaaaatataataaatagacaaattggaaataaatgttacgtagcaatttttattagaatttcattttagtgacagcagtcaaatcctcagacatttagtagtactacaaattaaaatattgtcagtgctacaaaagaaaatatataaaaattgtctactttttctttgaaaagatccattggaattttatttggaaataatcatctatcttcattagtgtttgcaaatttattggaagtttatgttttgtttactttttttgatataaaaaagaatagatacatttctagaaatgaaagt

SEQ ID NO: 670740 - DNA, 1332 bp, Homo sapiens
taaatttatgtgttgaaaaatgcacaacaaaaagtaagaaatacaagtttagactgagwaaatattttcaatactgcattataaacaaaagtataatgtacttacttatacaatgagacttaataaagcattaagaaaaatagaaacaataggcaaagcataagatttggcaagatacattggatggaatgcagatggccaataaatgtatgaaaaaatgtttaactttttaaataaaagaactacaaattagaaaaaaaaaaaagagagagaaaagaagaggcacgggctggccgcggtggctcatgcctgtaatcccagcactttgggaggccgagacgggtggatcgtgaggtcagaccatcctggctaatacggtgaaactctgtctctactaaaaatacaaaaaattagccgggcgtggtggcgggcgcctgtagtcccagctactcgagaggctgaagcaggagaatggcatgaacccgggaggcagagcttgcagtgagccgagattgcgccactgcacaccagcctgggcgacagagcgagactctgtctcaagaaaaaaaaagaaaagaaaagaaaaagaagaggcatgattgctttcctaatgtgaggatattgatgcctcctgtgagacaaattgcctaggcattagttctcaagtgagttatctgtctgagctcttccaaagacccttgatgaagcccttttctctgcaagggccctagaggaggaggatgtcctccgactttccatagttcctctcgctctctgtctgttccccatctgacagtctcttactgttccagctgtgtccactttattggagggacacacattcttattggatgcactagcagtgccttctctttgcagatatctgttgcaggctgctccagccagccttcttcaaatttccccagaagaaaagccagggtcacacatcagctttcccacgaatgatttcatagcattcttctttgatcgaaacagcaaattggagttatggatttctgcttctcagcaagcacaccggatgacaatgagtctccccttcttgtagtcacttaaaattgctaaaattggttttctttatgccctgcttacttggcttggggaggggagcactgactagcatttctctaaatctgggaaaatggtatatattgtcttcagctttatgattttaggggcgggactatgacaaaactgtgtcattcaattcctgttacatatatttatacttatatttaacaaccttgtgtcagagggatgctattattgttactgttttacaattaagaaactgaagcttggagatgttaaatg

SEQ ID NO: 670741 - DNA, 1332 bp, Homo sapiens
taaatttatgtgttgaaaaatgcacaacaaaaagtaagaaatacaagtttagactgagtaaatattttcaatactgcattataaacaaaagtataatgtacttacttatacaatgagacttaataaagcattaagaaaaatagaaacaataggcaaagcataagatttggcaagatacattggatggaatgcagatggccaataaatgtatgaaaaaatgtttaactttttaaataaaagaamtacaaattagaaaaaaaaaaaagagagagaaaagaagaggcacgggctggccgcggtggctcatgcctgtaatcccagcactttgggaggccgagacgggtggatcgtgaggtcagaccatcctggctaatacggtgaaactctgtctctactaaaaatacaaaaaattagccgggcgtggtggcgggcgcctgtagtcccagctactcgagaggctgaagcaggagaatggcatgaacccgggaggcagagcttgcagtgagccgagattgcgccactgcacaccagcctgggcgacagagcgagactctgtctcaagaaaaaaaaagaaaagaaaagaaaaagaagaggcatgattgctttcctaatgtgaggatattgatgcctcctgtgagacaaattgcctaggcattagttctcaagtgagttatctgtctgagctcttccaaagacccttgatgaagcccttttctctgcaagggccctagaggaggaggatgtcctccgactttccatagttcctctcgctctctgtctgttccccatctgacagtctcttactgttccagctgtgtccactttattggagggacacacattcttattggatgcactagcagtgccttctctttgcagatatctgttgcaggctgctccagccagccttcttcaaatttccccagaagaaaagccagggtcacacatcagctttcccacgaatgatttcatagcattcttctttgatcgaaacagcaaattggagttatggatttctgcttctcagcaagcacaccggatgacaatgagtctccccttcttgtagtcacttaaaattgctaaaattggttttctttatgccctgcttacttggcttggggaggggagcactgactagcatttctctaaatctgggaaaatggtatatattgtcttcagctttatgattttaggggcgggactatgacaaaactgtgtcattcaattcctgttacatatatttatacttatatttaacaaccttgtgtcagagggatgctattattgttactgttttacaattaagaaactgaagcttggagatgttaaatg

SEQ ID NO: 670742 - DNA, 1332 bp, Homo sapiens
taaatttatgtgttgaaaaatgcacaacaaaaagtaagaaatacaagtttagactgagtaaatattttcaatactgcattataaacaaaagtataatgtacttacttatacaatgagacttaataaagcattaagaaaaatagaaacaataggcaaagcataagatttggcaagatacattggatggaatgcagatggccaataaatgtatgaaaaaatgtttaactttttaaataaaagaactacaaattagaaaaaaaaaaaagagagagaaaagaagaggcacgggctggccgcggtggctcatgcctgtaatcccagcactttgggaggccgagacgggtggatcgtgaggtcagaccatcctggctaayacggtgaaactctgtctctactaaaaatacaaaaaattagccgggcgtggtggcgggcgcctgtagtcccagctactcgagaggctgaagcaggagaatggcatgaacccgggaggcagagcttgcagtgagccgagattgcgccactgcacaccagcctgggcgacagagcgagactctgtctcaagaaaaaaaaagaaaagaaaagaaaaagaagaggcatgattgctttcctaatgtgaggatattgatgcctcctgtgagacaaattgcctaggcattagttctcaagtgagttatctgtctgagctcttccaaagacccttgatgaagcccttttctctgcaagggccctagaggaggaggatgtcctccgactttccatagttcctctcgctctctgtctgttccccatctgacagtctcttactgttccagctgtgtccactttattggagggacacacattcttattggatgcactagcagtgccttctctttgcagatatctgttgcaggctgctccagccagccttcttcaaatttccccagaagaaaagccagggtcacacatcagctttcccacgaatgatttcatagcattcttctttgatcgaaacagcaaattggagttatggatttctgcttctcagcaagcacaccggatgacaatgagtctccccttcttgtagtcacttaaaattgctaaaattggttttctttatgccctgcttacttggcttggggaggggagcactgactagcatttctctaaatctgggaaaatggtatatattgtcttcagctttatgattttaggggcgggactatgacaaaactgtgtcattcaattcctgttacatatatttatacttatatttaacaaccttgtgtcagagggatgctattattgttactgttttacaattaagaaactgaagcttggagatgttaaatg

SEQ ID NO: 670743 - DNA, 622 bp, Homo sapiens
ataccctacctcctaaaatcatcacttttgaggtcaagacttcaacatacaaatttggyggaaacacatttagtactatgcagttttgcatcctgaaatattttaaggaatgtataaaactattaacattgtagtgttaattacaagtgaacaatttattcagtgttatttggttaatattagctatgtgtttaaattctttttaatcacttaaaaactcatggcctttaatgaaatatattgcaataagtatcattactggatttgtttaattttttttgaaattataaagtacaacttttaaaaaatgaaaccagggtgaactaaaaatttttccataatgcaatgaatgtaacatttcagcacaatgtctcttacacatttgacatatgcctatgccatcattttacttttcttcacaccgatttttacctaatttttaaaaatttaatattataccatatttacattaattgcttcatagactccacatatatactttggtttactgaacaaatattttatcatttagttgctttaaaagctatgctcagccttatgtatattacaaataatatacattataataatatggctcactctttgccctaagactgtctta

SEQ ID NO: 670744 - DNA, 676 bp, Homo sapiens
gtttatccccatgaacttgcctgctgtgcccttgtggacctgtatggttgacaaaggcgatgcaggtacggtgtctggctgcggtagacgttcagtccacagtagcttctcatatcctcagggatggtcaaagggctctcatcctatctgcacggtggcacttgccataacacacttcatctccctgtgactgccctttcaccacatgagttttccaagcacacatcacaaacacctcctcttattcacaagcacttctggcacttggcttactgcttggcacagaggacttcctcaacaaaccgagtcacggattttcaaaaaatatattgcatatgtatatttgattgtatgaaattatgttcatggycaggtgtggtggctcacacctgtaatcctagcactttgggaggctaaagcaggcggattgcttgagctcaggagtttgagaccagcctgggcaacatggcgaaacccagtatctacaaaacaaacaaacaaacaaaaaattagccagccatggtggtgtactcctgtagtactagctactggggaggctgatatgggaggataatttgagcccaggaggtcaaggctgcagtgagctgtgattgagccactgcaccctagcctggcaaatagagtgagatgctatctcaaaataaataaataaata

SEQ ID NO: 670745 - DNA, 646 bp, Homo sapiens
ccatgctggccacccacctgctctgacctcagggcaccatgttcttttgagcctgtccatgaatatctgggacatgagggtctcccaatgcccctcctacttcccagctcatggcaattgtgtccactggctcctgacacctggcctctgtctttctaagctccagtacccaaattgccctgggtggtcccagttctgtaatagccccttctacagccagcctgacctacagagtaagtccacactgcctgcctccaccatgcaggaagctttggggactgatgtgtctcctgggccctcatatggatggcagctctctgcaggtctccagcctcatgctgaatgtcttctgcgatgtgctccctgcttctccgtgcctttcacaagcccttcaacatctgctatgtgaatgctggtattgccaccacacacaggggccatcgaatgttccttgctccctggagacatcctagggacattccacaccaccgcccaggggccctgcaacactgagccctgtggtcggggtagcastcccaagttcatccccttccaccacaccgggctctgtctcccttgcattcctgcgcaaataccttctccatccagcattctgctttctcccctacccctgctggtgggactg

SEQ ID NO: 670746 - DNA, 658 bp, Homo sapiens
ctcttaccccagggactcaccacctatgcagtgggctccacaaactagttatcaagtctgatttctaaaagacccactctgcacacgcacgtgctacacacccacggcatctgtggccaaatcaggatctagagccagggagacagaggcatcattcaaaacagatgcatagttaactggccaccaggtctgtggagaatctgggaatcctcaacactccatgcacaaatggtttccagtttccagaaataaacacaactaacccaggatgctccaaaggctttaataaccagaacatggcagagtcaaggaagccaacgggagatgttgaagcacggagactcgcaggagcagggctccactcttcagatccgaaggcaaaagcaaggcctgtgcagctggagcctyggggaggcccacctggtgggagctggagtcatgggggcatccgcccaaccagcaggagatgatgaaaaaatagcaagacctcgcttctcccatccccagtcctcctgtggtgttgatcgttggctgaacccaactgggtggccgtggaagcctggggaaagggtcttggggaaggggtcctggggaaggtgttctgtcgagtagagtagcccttaggctgtcaaatcagggaaaacatgggaaacctggg

SEQ ID NO: 670747 - DNA, 556 bp, Homo sapiens
cattcggggcatctgagcatgagatggggtttctgacagcaacttaagggccaggaagggccagaatctgccaaggcccgtgtcccagggtggggccgatggaacccaaggtagagggagtcagcggtccacacagagagagctccagccttaggccccactgtgcagaccgaatccgaaggaagagagtccttcatcctacatgccacatccctccactgaacttgggagcaaatccattttccaaacatgaggtgactctcactttgcaatggatcacaaggggctgggctttccagagtcagcaggctaaagaagtcatcctggctcagcctcccccaacccctggtaactggtgagtttattttttatttttatttttattattattatactttaagttttagggtacatgtgcacaatgtgcaggttagttacatatgtatacatgtgcaatgctggtgtgctgcacctactaactaactcgtcaccyagcattaggtatatctcccaatgctatccctccccccttcccccaccccacaacagtccccag

SEQ ID NO: 670748 - DNA, 1262 bp, Homo sapiens
tggcagttattagtttatatatatttggccctgcaaatgaaacctgccatccacaccaccaaaaaacaagcaaaagcttgatagtactgaagactgttcagaagggagtaaaacaccagcctcgcccatgtttgccaatgacccattaatccttgctgtccacaccctgccacactaatattcttgggtcacgggggtgagacagagcacacagcaacacatagccaaatgccctgcctcacatggtcacgccaggcactcttgttcccaccttcaccccatgcctgctcctttccctaggacacttgccacatacgtgcaagtcaccaagatgatctgtccctatctttcgtgtttatgtgtctataagcatacattctgttgaaaatgtgaaacattacttacttaaattgtagaatgataagtgagtagaagtttaaggttattttgaagcattaaatagttggtatggacttcagtttagcyagttacagaatggtttgcctcatttttattgagttatttgaaataagaaaacctttagcacagtggtgatacactactatactgaacttttgacaaatttgttttgagtttacatttttacagataatttgtatctttccttaaacctcagtaagcgacattgatcaaatcactgccatctttgatgtcaaacttctggactttaccattaagggctcaaattatactttcagacttttgctcattgcctccaacacaaacccccatcccagagagacccacctggtccctgcctctgagcacagatgactttactcaggccacccagattaccacagtttgggaatcaccgtcccttcagggtcagctctagctcttctctctctccccaaagccctcccatggatgctgcggccctaataacttctctctacctgtacagtctcaaagcattgcttgccagtaccacactcttggcaaccatgtacaagcctttgacaagcctttcgttgttatttgacctttgtgctgtttacttttcaggttcaatgggttttccttttctttatacaagtctatcactgccactgcttgggcttatggccatgatcagaatgtttggtggaggagggagggtgataaaggaaatgaagggaggaaaagcattttcctaagcccactgcaaaaactggaaccagaggagacggagaatgttaactccttgtatatatgtgtgagaaagaacctgagctggaattaaaacagaggcactccct

SEQ ID NO: 670749 - DNA, 596 bp, Homo sapiens
catggcacatgtatacatatgtaactaacctgcacattgtgcacatgtaccctaaaacttaaagtataataataataaaataaaaaaaagaaaaakaaagtttttaaatttatattatttacttttaaaacattttcttaataagacacaaacacatacagtagctgaggcctacacagggtcaggattatcaatattactgtcttctgcctttatatcttgtcccactgtaaggtcttccagggcaataacatgcatggaactttcatcttctaagataacaatgcttccttatagaatacctcctcaaggacctgtctgaggctgtttaatggttaactctttctctctctcctctctccatatatatatatatatatatatatatatatatatatatatatatatatgaattgtttggctcattataatcttatgggaccactgttctgtaggtagttcatcattgaccgaaatgttgttattaggcagggcatgattgtatattatttttatttaccactgaatggcaatattaaatatgttacaagaatggtttggatattaaatccttattattcttattattgttattg

SEQ ID NO: 670750 - DNA, 596 bp, Homo sapiens
catggcacatgtatacatatgtaactaacctgcacattgtgcacatgtaccctaaaacttaaagtataataataataaaataaaaaaaagaaaaataaagtttttaaatttatattatttacttttaaaacattttcttaataagacacaaacacatacagtagctgaggcctacacagggtcaggattatcaatattactgtcttctgcctttatatcttgtcccactgkaaggtcttccagggcaataacatgcatggaactttcatcttctaagataacaatgcttccttatagaatacctcctcaaggacctgtctgaggctgtttaatggttaactctttctctctctcctctctccatatatatatatatatatatatatatatatatatatatatatatatatgaattgtttggctcattataatcttatgggaccactgttctgtaggtagttcatcattgaccgaaatgttgttattaggcagggcatgattgtatattatttttatttaccactgaatggcaatattaaatatgttacaagaatggtttggatattaaatccttattattcttattattgttattg

SEQ ID NO: 670751 - DNA, 1355 bp, Homo sapiens
acaagctaaaataagtaaacacaaaacaaaagatagtgaccaaaatctttagcaagaagaggtgcrtcacaaaaggaaagaggaacaggaatgacctgatatgaaactataaggtacccctgtaagagatatgaatggaggctgctacagtaagtctaaggccaacaatgtagagagaaacagatgaaatttttctttgtattgttaaattaaaatgcaaacattcgagcttcccagcttccacatcaaagtagaaaaaaaaagaaatttgcatgagaaatgtttgtctagcttttatgaaggatgacagaaaaaattattgtttctcaaagcagtttttctaaaagtacatttgtaaaatggacaatgtgcctcaagttacaaaaaattattttattattctctatgtaaatatgtttcccatgagtacatttaatgatgtttagactaacaattttgtttaaattttaagcgaataagataaactttgaaactgggaaaaaaacaaatagcaaagctagcataattttagtgccagtggtgcacaggagatcctgattctccagcttctcagtcatggcaaaaggaacaacagtcccagctctgtcgtttttctggaggagttctagcaatcatttagaagatcagcccaagacctgctccaccaactctccaatcgtgtaagaaactaattctatatattaaattttgtttgcctatattacctaaagatttattcttataatctataatggaaaattgaaatattgagtatgctgatgaaaaagattacattttcttaaacaaatgttcactcctaaatgacaaattcaattataggaacaaatttaggtaggcataaaaagagaaaagtgaaaatacaattgaaaaattgaggctgggcatggtggctcacacctgtaatcccagcactttgggaggccgaggcgggtggatcacgaggtcaggagatcgagaccacggtgaaaccccgtctctactaaaaatacaaaaaattagctgggcacgatggcgggcgcctgtagtcccagctactcgggaggctgaggcaggagaatggcgtgaacccaggaggcggagcttgcagtgagccgagatcccaccactgcactccagcctgggcgacagagcgagactctgtctcaaaaaaacaaacaaaaaagaaaaattgaagcaactccacatgcattccagctttacagagtgaaagtgtacatgaaattttattgagacaataatttataatgtataattaactcaaggattaatattatttgacacaattttgagcatactaaaaggtaactggattttataatctaattaaaaagtca

SEQ ID NO: 670752 - DNA, 1355 bp, Homo sapiens
acaagctaaaataagtaaacacaaaacaaaagatagtgaccaaaatctttagcaagaagaggtgcatcacaaaaggaaagaggaacaggaatgacctgatatgaaactataaggtacccctgtaagagatatgaatggaggctgctacagtaagtctaaggccaacaatgtagagagaaacagatgaawtttttctttgtattgttaaattaaaatgcaaacattcgagcttcccagcttccacatcaaagtagaaaaaaaaagaaatttgcatgagaaatgtttgtctagcttttatgaaggatgacagaaaaaattattgtttctcaaagcagtttttctaaaagtacatttgtaaaatggacaatgtgcctcaagttacaaaaaattattttattattctctatgtaaatatgtttcccatgagtacatttaatgatgtttagactaacaattttgtttaaattttaagcgaataagataaactttgaaactgggaaaaaaacaaatagcaaagctagcataattttagtgccagtggtgcacaggagatcctgattctccagcttctcagtcatggcaaaaggaacaacagtcccagctctgtcgtttttctggaggagttctagcaatcatttagaagatcagcccaagacctgctccaccaactctccaatcgtgtaagaaactaattctatatattaaattttgtttgcctatattacctaaagatttattcttataatctataatggaaaattgaaatattgagtatgctgatgaaaaagattacattttcttaaacaaatgttcactcctaaatgacaaattcaattataggaacaaatttaggtaggcataaaaagagaaaagtgaaaatacaattgaaaaattgaggctgggcatggtggctcacacctgtaatcccagcactttgggaggccgaggcgggtggatcacgaggtcaggagatcgagaccacggtgaaaccccgtctctactaaaaatacaaaaaattagctgggcacgatggcgggcgcctgtagtcccagctactcgggaggctgaggcaggagaatggcgtgaacccaggaggcggagcttgcagtgagccgagatcccaccactgcactccagcctgggcgacagagcgagactctgtctcaaaaaaacaaacaaaaaagaaaaattgaagcaactccacatgcattccagctttacagagtgaaagtgtacatgaaattttattgagacaataatttataatgtataattaactcaaggattaatattatttgacacaattttgagcatactaaaaggtaactggattttataatctaattaaaaagtca

SEQ ID NO: 670753 - DNA, 1355 bp, Homo sapiens
acaagctaaaataagtaaacacaaaacaaaagatagtgaccaaaatctttagcaagaagaggtgcatcacaaaaggaaagaggaacaggaatgacctgatatgaaactataaggtacccctgtaagagatatgaatggaggctgctacagtaagtctaaggccaacaatgtagagagaaacagatgaaatttttctttgtattgttaaattaaaatgcaaacattcgagcttcccagcttccacatcaaagtagaaaaaaaaagaaatttgcatkagaaatgtttgtctagcttttatgaaggatgacagaaaaaattattgtttctcaaagcagtttttctaaaagtacatttgtaaaatggacaatgtgcctcaagttacaaaaaattattttattattctctatgtaaatatgtttcccatgagtacatttaatgatgtttagactaacaattttgtttaaattttaagcgaataagataaactttgaaactgggaaaaaaacaaatagcaaagctagcataattttagtgccagtggtgcacaggagatcctgattctccagcttctcagtcatggcaaaaggaacaacagtcccagctctgtcgtttttctggaggagttctagcaatcatttagaagatcagcccaagacctgctccaccaactctccaatcgtgtaagaaactaattctatatattaaattttgtttgcctatattacctaaagatttattcttataatctataatggaaaattgaaatattgagtatgctgatgaaaaagattacattttcttaaacaaatgttcactcctaaatgacaaattcaattataggaacaaatttaggtaggcataaaaagagaaaagtgaaaatacaattgaaaaattgaggctgggcatggtggctcacacctgtaatcccagcactttgggaggccgaggcgggtggatcacgaggtcaggagatcgagaccacggtgaaaccccgtctctactaaaaatacaaaaaattagctgggcacgatggcgggcgcctgtagtcccagctactcgggaggctgaggcaggagaatggcgtgaacccaggaggcggagcttgcagtgagccgagatcccaccactgcactccagcctgggcgacagagcgagactctgtctcaaaaaaacaaacaaaaaagaaaaattgaagcaactccacatgcattccagctttacagagtgaaagtgtacatgaaattttattgagacaataatttataatgtataattaactcaaggattaatattatttgacacaattttgagcatactaaaaggtaactggattttataatctaattaaaaagtca

SEQ ID NO: 670754 - DNA, 1355 bp, Homo sapiens
acaagctaaaataagtaaacacaaaacaaaagatagtgaccaaaatctttagcaagaagaggtgcatcacaaaaggaaagaggaacaggaatgacctgatatgaaactataaggtacccctgtaagagatatgaatggaggctgctacagtaagtctaaggccaacaatgtagagagaaacagatgaaatttttctttgtattgttaaattaaaatgcaaacattcgagcttcccagcttccacatcaaagtagaaaaaaaaagaaatttgcatgagaaatgtttgtctagcttttatgaaggatgacagaaaaaattattgtttctcaaagcagtttttctaaaagtacatttgtaaaatggacaatgtgcctcaagttacaaaaaattattttattattctctatgtaaatatgtttcccatgagtacatttaatgatgtttagactaacaattttgtttaaattttaagcgaataagataaactttgaaactgggaaaaaaacaaatagcaaagctagcataattttagtgccagtggtgcacaggagatcctgattctccagcttctcagtcatggcaaaaggaacaacagtcycagctctgtcgtttttctggaggagttctagcaatcatttagaagatcagcccaagacctgctccaccaactctccaatcgtgtaagaaactaattctatatattaaattttgtttgcctatattacctaaagatttattcttataatctataatggaaaattgaaatattgagtatgctgatgaaaaagattacattttcttaaacaaatgttcactcctaaatgacaaattcaattataggaacaaatttaggtaggcataaaaagagaaaagtgaaaatacaattgaaaaattgaggctgggcatggtggctcacacctgtaatcccagcactttgggaggccgaggcgggtggatcacgaggtcaggagatcgagaccacggtgaaaccccgtctctactaaaaatacaaaaaattagctgggcacgatggcgggcgcctgtagtcccagctactcgggaggctgaggcaggagaatggcgtgaacccaggaggcggagcttgcagtgagccgagatcccaccactgcactccagcctgggcgacagagcgagactctgtctcaaaaaaacaaacaaaaaagaaaaattgaagcaactccacatgcattccagctttacagagtgaaagtgtacatgaaattttattgagacaataatttataatgtataattaactcaaggattaatattatttgacacaattttgagcatactaaaaggtaactggattttataatctaattaaaaagtca

SEQ ID NO: 670755 - DNA, 1422 bp, Homo sapiens
tgaaggtaaaatatgcccacatgtcatatgcaaaatgacattgatgtgagagccatttcctctcatttacataagacaaagttccttccatgccaaacttctctagaaacaatatctggaaaagcacaggtgaaggagaggtatgacagaagaatcccaaactggatactgaacgcagaacttgttgcccttgtctagcaagttcagattgccataaggaagtcaccatgagtggtaggttaaatggccattgctacattaaactttctcttaatatcacttcaaacatttaaaaatatatattagaagaaatgstaccattttcaattaattctattttactggtttctctttctgttaatataaatatgcatagctcttttcttcaaatacaaagctgttggaaatttctaggaactaattatcaagaggaagaagaatattaacaatataccttgaagtttgtatttcttttagtcatagcatttttagatattcatttaaacatgaaaaatattggaacaatcttgttttaccaacaaaacaacagattcctagatataatttttatttagtcaggcttctcatttttttcagtcctcaattcttttttcttctattgtctaaaggacatcttaccatgctgcatccctgttgtcttcagtaaggatggcaccaagttcaagagactgaagaagagacctggagccagtgaatgagacatagagtttactgaggggacttacatacagggcagtccactggtaggaggctggacagcagaagtgctaccatttataaaaagcatgcagtttatacagactaggtgagtctgcatgctcagggtatgcttaaattaagttattcctgtcaggtttgtctaccgtaccctcctccccagcagaccctggaatgccgctcacattctcaccgtgtcattcctccacgatttccctgggccaggtatgggggggaacattgcagccagatctcatagcagcaacacaaattacaacaaaacagaataacaaatacaataacagtcataacgttttcccaagtgcttgggagttgaccttacatgctcagtggcaggcctacggtggagaggacagctcttcgcacacccaacagtctggatgttttctggagagatgccaccatctgcacccagttggcaaagaggtttgctgcacaccatccaacaagatgacacccaggtatttgattgataagcctggcccctggactttgtgttgaccacccatcctctgttctccaagtgagacagcaaggtgattgttgcagtttgtaagctggaaaaacactcgaagttaatggaaaacatgtaccctccccctctgggatgatatttccaggggaagatggtaaaggcccgttgttcttatgtttgagggagcg

SEQ ID NO: 670756 - DNA, 593 bp, Homo sapiens
cattccctgatcataggcatggacagccagcccaaggtctcccccgcggatctccccttccctgatcataggcatggacagccggcccagggtctcccccatggatctcccattccctgatcataggcatggacagccagcccagggtctcccccgcggatttccccttccctgatcataggcatggacagccggcccagggtctcccccgtggatctccccttccctgatgctatcatcttrgtattcacggggtttgctctgacttactggcttcctcaccagttgtgctggatccttattggctttggtaaggatggcaccaggttcaagaggctgaagaaaagacctggagccagtgaacaggatacggggtttattaaggaaactttcatacagggccattgagcggtggcaggctggacaggaggagcactgtcatttgtcaaaagcatgcagtttacacagatctggtgcaggtacattctcaggctttgcttaagtgatttccacaggtgcatctgctacacatatctccacttcatcataaaagcagaattgtgttcccctgtccttttcccagctttttcata

SEQ ID NO: 670757 - DNA, 593 bp, Homo sapiens
cattccctgatcataggcatggacagccagcccaaggtctcccccgcggatctccccttccctgatcataggcatggacagccggcccagggtctcccccatggatctcccattccctgatcataggcatggacagccagcccagggtctcccccgcggatttccccttccctgatcataggcatggacagccggcccagggtctcccccgtggatctccccttccctgatgctatcatcttagtattcacggggtttgctctgacttactggcttcctcaccagttgtgctggatccttattggctttggtarggatggcaccaggttcaagaggctgaagaaaagacctggagccagtgaacaggatacggggtttattaaggaaactttcatacagggccattgagcggtggcaggctggacaggaggagcactgtcatttgtcaaaagcatgcagtttacacagatctggtgcaggtacattctcaggctttgcttaagtgatttccacaggtgcatctgctacacatatctccacttcatcataaaagcagaattgtgttcccctgtccttttcccagctttttcata

SEQ ID NO: 670758 - DNA, 593 bp, Homo sapiens
cattccctgatcataggcatggacagccagcccaaggtctcccccgcggatctccccttccctgatcataggcatggacagccggcccagggtctcccccatggatctcccattccctgatcataggcatggacagccagcccagggtctcccccgcggatttccccttccctgatcataggcatggacagccggcccagggtctcccccgtggatctccccttccctgatgctatcatcttagtattcacggggtttgctctgacttactggcttcctcaccagttgtgctggatccttattggctttggtaaggatggcaccaggttcaagaggctgaagaaaagacctggagccagtgaacwggatacggggtttattaaggaaactttcatacagggccattgagcggtggcaggctggacaggaggagcactgtcatttgtcaaaagcatgcagtttacacagatctggtgcaggtacattctcaggctttgcttaagtgatttccacaggtgcatctgctacacatatctccacttcatcataaaagcagaattgtgttcccctgtccttttcccagctttttcata

SEQ ID NO: 670759 - DNA, 619 bp, Homo sapiens
ccagtaaaatattaatgttcattcagctctcctttgtgctggcatatccaggttttcatccactgtggctgactgaaaagcatggccatgctattttgtagctttcctatcgggacatgatctatttctccaccccttcactctgggctgaacttgtgatttgcggtgactaacagaatgcggtgaaagacccccaagaggccttgcctcttctgccttcactttcctgggacgttgctgccttcatgagaggaagtcaatgatcctctttgagaytgaaagacgacctggaaaggaggagctcttgcggttcacccagctgagctcagcctaatccaacacagctgaacccatgcaagatcagcaaaagcacctcttggcccacccagagagctgtgagaaatgtaagtcagtccgatttggggtaccttgtctggcagtattgaataactaatgaaccttcaattttaacaagcctgccctttggcacacacactcacccgcacactgattcaaacaacaaactatgcgaggcccaggacgtgaccaggtggcatgtcagtaaatacctgtttccaggccctttacgaacttttcaatactcactagagctgcacaa

SEQ ID NO: 670760 - DNA, 1635 bp, Homo sapiens
gaagtatttgcttgccttttggaactcaaagttcaaaaccttctattgtcatctttaaataactaatttttaagttaatttctagttggtcctatgaaaatactaccacacaatgtggagataaagaaaacatttacagaaaaattgtccatatggacacattttaaacagatgatctaattagcataacagccaccaaactggtaaataaacagttttgtttatttgctgcttaatcagcatccattcagaattctgtaatattgtttagtaaaacagtttatttccatccataaatgtattttataaatttatgcccagtaaacttccaggtaaaccatcgaaatattaactgttttctaaaagtgatggtctttttttttaagctgctttctatagtgaattgatgaaagttaatgaagattaaaatgcttattctataataaaagccaatgccggcatgctgatatataatctctatagatcaaaaaatattcatgccttattctcagatttttaatagtggctctaagcagtcttaaaaatttattatttagacaccttatcctatattttaaaaatattttcttagtatactgtggatgttatacaagtcatataatggatagagaatttcttacataaatttacaatataatttttttaaataaaacttttgtgaaattattttcaaatgttataaatgttaatgagttttgttatattggttccaatatttctcatatatggaaaatgtcattttccctgggaattaatatttggagctggtgtttaagaaaaaccatgtttgatgttggaaaatgctatgtccggtataactatagatgtttggaaagcagctcagttatgctaaagataaagaaaggagagaaaaatgacagaaggggaggtttgaacaaaacaaaataatacctgaaaatgttgaatggatatgtaatatttgtgaatgtttatgttctctatttcaccattatttaaacatttatattttcaaagggagacaataattatattttgaaatcattttgtttttttatagagtgctgtattttttcttttcaatttcaatttggtgagcaaacaaaatcagtcagattattatacataattaggtttcctttttgagatttgttgaaactctttatcctttatgtatgtatttcaagtagtataataaaaaagaaatataaaatgattagatatacataaaagtattgtagattatgtttttcatattttctttcttttaatgtattttgcagatatasccattccagattatgatttcacaaactaagatgactctcagcagggaatcgttactgcatgtcgttttcatcaaagggagcttagtttatttgcctatctgaatattgacattatattactaatttacacattggggaaagggtcaagagaactccaaatttttgttgacttgatattaacctgaaaggggaatgttaataactgacaaaatatatccacagtagttagacatcaagttgtgtttgtttttttaatctacttcatattattgaattatttagatagatgatagatagatagatagatagatagatagatagatagatagatgatagatagatagat

SEQ ID NO: 670761 - DNA, 1964 bp, Homo sapiens
tgcacgtatacatccagatggcctgaaacaagtgaagaatcaaaagaagtgaaaatggctggctcctgccttaactgatgacattactttgtgaaattccttctcctggctcagaagctcccccactgagcaccttgtgacccccgcccctgcctgccagagaataaccccctttgactgtaattttccactacctacccaaatcctataaaacggccccaccccatcttccttcactgactctctttttggattcagcctgcctgcacccaggtgaaataaacagtcttgttgctcacaaaaagcctgtttggtggtctcttcacactgatgcactgatgcatgacaatgccatgctatcagtaagcatgtctctgagtcctgggccccaggtcaccacaggagaatccaatggatccttacaggttgcttaaaagggatagtttgttgtagtcctgaaataataaagtaatgtcctattctccacttaccatgtagtattgcttttgttaaataatccattggggcttgggtagtttaggtgggtcctttaggcaggatatgccccactgttatggcttgaattctgagttgtcaaagagtatgtccccttaggcaatggtgatttttgtgttacaagaagtcggggggtcaatgccaataatgcactcacaagtgagaaccatggtcactaacatccaatatggaccaaagccacatcacaggtagataagcactactggtcaatgcattcattctaaaaccttccagtgtcaccagtttttctccctaagaggacctggaaatattatgtggactcatgtatcaaaaaaaaaagtctgaatttctttcttttctcctcttaccttgacagaaatataaggcctttggcctccatttggggaccctgagaccttggtcccatttctgactctgccattcagcccaagacattggatttgcaatgtcctttcatcaaagaaatatacctggcctttctctatatctgtcctttagataatgagtctccctttctgtgaaggcctttatcacatgtattgattccttctcagatgcctcaaggaagatctgaggacccctttcttctttctctctcaggtgccttagtgtctggttgagtacacacttccctcactctctgcccccatgaatgacagggtaattaaataaatatccccaaccaaggaacctatgctcctctatttcctctttgccttttgtttgccttgatccatgcagccatctcattcacatctgtgggaagtggcagacctacatcccacttatcacccttccttcttctgaaaatattcaatccccatgcccccaggctgccgtctttcccctgggctgggtactaggaagtatcacccctcctgcttctcaaataagctatgattacattagatggggccctgcttgctggacgcattttgtggattaggtttactgtgtgctgcttaccagcttgtctgagtgcaggagacagaatacactcatatgcaacaagttacacaaagcagatttgtgacttacaggtaggcagcwagggacaaaagaatgctaggatctatgatgagctggttcctgaagactcgagaaagctgtctagggcacattgagtctcagctgtgcattccccacttgcaccacagctgaggggctcttattattttttttttttttgaggtggagcttggttcttgttgcccaggctggagttcaatggcatggtctcggctcactgcaacctctgcctcctgggttcaagcgattctcgtgcctcagcctcccaagtagctgggattataggcgcctgccaccactctaagttttttatatttttagtagagacggggtttcactatgttggccaggctgatcttgaattcctgacctcagggtgatccacccaccttgcctcctaaagtgctgggattaca

SEQ ID NO: 670762 - DNA, 1964 bp, Homo sapiens
tgcacgtatacatccagatggcctgaaacaagtgaagaatcaaaagaagtgaaaatggctggctcctgccttaactgatgacattactttgtgaaattccttctcctggctcagaagctcccccactgagcaccttgtgacccccgcccctgcctgccagagaataaccccctttgactgtaattttccactacctacccaaatcctataaaacggccccaccccatcttccttcactgactctctttttggattcagcctgcctgcacccaggtgaaataaacagtcttgttgctcacaaaaagcctgtttggtggtctcttcacactgatgcactgatgcatgacaatgccatgctatcagtaagcatgtctctgagtcctgggccccaggtcaccacaggagaatccaatggatccttacaggttgcttaaaagggatagtttgttgtagtcctgaaataataaagtaatgtcctattctccacttaccatgtagtattgcttttgttaaataatccattggggcttgggtagtttaggtgggtcctttaggcaggatatgccccactgttatggcttgaattctgagttgtcaaagagtatgtccccttaggcaatggtgatttttgtgttacaagaagtcggggggtcaatgccaataatgcactcacaagtgagaaccatggtcactaacatccaatatggaccaaagccacatcacaggtagataagcactactggtcaatgcattcattctaaaaccttccagtgtcaccagtttttctccctaagaggacctggaaatattatgtggactcatgtatcaaaaaaaaaagtctgaatttctttcttttctcctcttaccttgacagaaatataaggcctttggcctccatttggggaccctgagaccttggtcccatttctgactctgccattcagcccaagacattggatttgcaatgtcctttcatcaaagaaatatacctggcctttctctatatctgtcctttagataatgagtctccctttctgtgaaggcctttatcacatgtattgattccttctcagatgcctcaaggaagatctgaggacccctttcttctttctctctcaggtgccttagtgtctggttgagtacacacttccctcactctctgcccccatgaatgacagggtaattaaataaatatccccaaccaaggaacctatgctcctctatttcctctttgccttttgtttgccttgatccatgcagccatctcattcacatctgtgggaagtggcagacctacatcccacttatcacccttccttcttctgaaaatattcaatccccatgcccccaggctgccgtctttcccctgggctgggtactaggaagtatcacccctcctgcttctcaaataagctatgattacattagatggggccctgcttgctggacgcattttgtggattaggtttactgtgtgctgcttaccagcttgtctgagtgcaggagacagaatacactcatatgcaacaagttacacaaagcagatttgtgacttacaggtaggcagctagggacaaaagaatgctaggatctatgatgagctggttcctgaagactcgagaaagctgtctagggcacattgagtctcagctgtgcattccccacttgcaccacagctgaggggctcttattattttttttttttttgaggtggagcttggttcttgttgcccaggctggagttcaatggcatggtctcrgctcactgcaacctctgcctcctgggttcaagcgattctcgtgcctcagcctcccaagtagctgggattataggcgcctgccaccactctaagttttttatatttttagtagagacggggtttcactatgttggccaggctgatcttgaattcctgacctcagggtgatccacccaccttgcctcctaaagtgctgggattaca

SEQ ID NO: 670763 - DNA, 1964 bp, Homo sapiens
tgcacgtatacatccagatggcctgaaacaagtgaagaatcaaaagaagtgaaaatggctggctcctgccttaactgatgacattactttgtgaaattccttctcctggctcagaagctcccccactgagcaccttgtgacccccgcccctgcctgccagagaataaccccctttgactgtaattttccactacctacccaaatcctataaaacggccccaccccatcttccttcactgactctctttttggattcagcctgcctgcacccaggtgaaataaacagtcttgttgctcacaaaaagcctgtttggtggtctcttcacactgatgcactgatgcatgacaatgccatgctatcagtaagcatgtctctgagtcctgggccccaggtcaccacaggagaatccaatggatccttacaggttgcttaaaagggatagtttgttgtagtcctgaaataataaagtaatgtcctattctccacttaccatgtagtattgcttttgttaaataatccattggggcttgggtagtttaggtgggtcctttaggcaggatatgccccactgttatggcttgaattctgagttgtcaaagagtatgtccccttaggcaatggtgatttttgtgttacaagaagtcggggggtcaatgccaataatgcactcacaagtgagaaccatggtcactaacatccaatatggaccaaagccacatcacaggtagataagcactactggtcaatgcattcattctaaaaccttccagtgtcaccagtttttctccctaagaggacctggaaatattatgtggactcatgtatcaaaaaaaaaagtctgaatttctttcttttctcctcttaccttgacagaaatataaggcctttggcctccatttggggaccctgagaccttggtcccatttctgactctgccattcagcccaagacattggatttgcaatgtcctttcatcaaagaaatatacctggcctttctctatatctgtcctttagataatgagtctccctttctgtgaaggcctttatcacatgtattgattccttctcagatgcctcaaggaagatctgaggacccctttcttctttctctctcaggtgccttagtgtctggttgagtacacacttccctcactctctgcccccatgaatgacagggtaattaaataaatatccccaaccaaggaacctatgctcctctatttcctctttgccttttgtttgccttgatccatgcagccatctcattcacatctgtgggaagtggcagacctacatcccacttatcacccttccttcttctgaaaatattcaatccccatgcccccaggctgccgtctttcccctgggctgggtactaggaagtatcacccctcctgcttctcaaataagctatgattacattagatggggccctgcttgctggacgcattttgtggattaggtttactgtgtgctgcttaccagcttgtctgagtgcaggagacagaatacactcatatgcaacaagttacacaaagcagatttgtgacttacaggtaggcagctagggacaaaagaatgctaggatctatgatgagctggttcctgaagactcgagaaagctgtctagggcacattgagtctcagctgtgcattccccacttgcaccacagctgaggggctcttattattttttttttttttgaggtggagcttggttcttgttgcccaggctggagttcaatggcatggtctcggctcactgcaacctctgcctcctgggttcaagcgattctcgtgcctcagcctcccaagtagctgggrttataggcgcctgccaccactctaagttttttatatttttagtagagacggggtttcactatgttggccaggctgatcttgaattcctgacctcagggtgatccacccaccttgcctcctaaagtgctgggattaca

SEQ ID NO: 670764 - DNA, 1001 bp, Homo sapiens
ccagttttgttcttcttctgccactccttcttgcttgcatcttgttgctggcagagtcctcttgtacttcaagaaagcgaggtgattttgtctgcttctagagcaggtccgtaccaagtaatagagtcactttagcctttacttggtgggtaaggcctgatcatagtattgtgtcagataacgcctaagaatgacctctgaagagcgttgacccatttgagtgcccagtctyagtcgtcatgtttaagtccagtgagccttgtgatagttgttctcagattgcagtttcttatgttttgagtttgaagctgattttcagaatgttcttagaaaaaaaactgcatttttttcctttctggatctgctttgtttggctgctgggatagataagcacgggcttaaaaaatgtgttcctaccagttttcttgcctttcctattgtactctgaatttccctccctacctccctcactgtcttcctctttcctttctttcctttctctctaccaggccatttttcaaatttacatcaaatatacctcaagtgttggtatatgagaacatctgtcactcctcttatctgagaagtgaccgtttatttttaagatgatgacagacctatttttagatatgttttcagtacaattttgaacagcaaccttttagttaaacatcttccagtgttagcaaggtgagaaatgttcataggcgagcctgctgttctatgtcaccatgttttgtatccccttgtcccccaggaactctttcgtttcccctctagtttttgggtgtgcatgcttggagtctgcagtgggtggtttgtaaaactggaccattctgccttgctatgagttgttcataaaagcctcattcttttctctgaccctttagcttttgcattcaccctccttcccacctacctctccagggactatcgactgacataataatcccgggagaatgactcccctcatagaaagactaaagcatccatcccctcat

SEQ ID NO: 670765 - DNA, 1001 bp, Homo sapiens
ccagttttgttcttcttctgccactccttcttgcttgcatcttgttgctggcagagtcctcttgtacttcaagaaagcgaggtgattttgtctgcttctagagcaggtccgtaccaagtaatagagtcactttagcctttacttggtgggtaaggcctgatcatagtattgtgtcagataacgcctaagaatgacctctgaagagcgttgacccatttgagtgcccagtctcagtcgtcatgtttaagtccagtgagccttgtgatagttgttctcagattgcagtttctwatgttttgagtttgaagctgattttcagaatgttcttagaaaaaaaactgcatttttttcctttctggatctgctttgtttggctgctgggatagataagcacgggcttaaaaaatgtgttcctaccagttttcttgcctttcctattgtactctgaatttccctccctacctccctcactgtcttcctctttcctttctttcctttctctctaccaggccatttttcaaatttacatcaaatatacctcaagtgttggtatatgagaacatctgtcactcctcttatctgagaagtgaccgtttatttttaagatgatgacagacctatttttagatatgttttcagtacaattttgaacagcaaccttttagttaaacatcttccagtgttagcaaggtgagaaatgttcataggcgagcctgctgttctatgtcaccatgttttgtatccccttgtcccccaggaactctttcgtttcccctctagtttttgggtgtgcatgcttggagtctgcagtgggtggtttgtaaaactggaccattctgccttgctatgagttgttcataaaagcctcattcttttctctgaccctttagcttttgcattcaccctccttcccacctacctctccagggactatcgactgacataataatcccgggagaatgactcccctcatagaaagactaaagcatccatcccctcat

SEQ ID NO: 670766 - DNA, 1001 bp, Homo sapiens
ccagttttgttcttcttctgccactccttcttgcttgcatcttgttgctggcagagtcctcttgtacttcaagaaagcgaggtgattttgtctgcttctagagcaggtccgtaccaagtaatagagtcactttagcctttacttggtgggtaaggcctgatcatagtattgtgtcagataacgcctaagaatgacctctgaagagcgttgacccatttgagtgcccagtctcagtcgtcatgtttaagtccagtgagccttgtgatagttgttctcagattgcagtttcttatgttttgagtttgaagctgattttcagaatgttcttagaaaaaaaactgcatttttttcctttctggatctgctttgtttggctgctgggatagataagcacgggcttaaaaaatgtgttcctaccagttttcttgcctttcctattgtactctgaatttccctccctacctccctcactgtcttcctctttcctttctttcctttctctctaccaggccatttttcaaatttacatcaaatatacctcaagtgttggtatatgagaacatctgtcactcctcttatctgagaagtgaccgtttatttttaagatgatgacagacctatttttagatatgttttcagtacaattttgaacagcaaccttttagttaaacatcttccagtgttagcaaggtgagaaatgttcataggcgagcctgctgttctatgtcaccatgttttgtatccccttgtcccccaggaactctttcgtttcccctctagtttttgggtgtgcatgcttggagtctgcagtgggtggtttgtaaaactggaccattctgccttgctatgagttgttcataaaagcctcattcttttctctgaccctttagcttttgcattcaccctccttcccacctacctctccagggactatcgactgacataataatcccgggagaaygactcccctcatagaaagactaaagcatccatcccctcat

SEQ ID NO: 670767 - DNA, 614 bp, Homo sapiens
atttcaacataaagggtccctgttgcacaatggctgacgtgagaagtcaaataaatatcataagcatctaggagggatcactcaggaaaaaaagaagtcacattagttattgtartaaaaataacaataaaaaatggattaaacaggtattggagaactgaaacagttaaaaaaagaaaaaaaaagacagaacagaaacagtgactaccaaaggcagctaccattccatagagccaggggaactaagggaagaggttggccttatttgaacctacacctattagtttgagccagggccagcttcacggctgcgcaacctatgcagtcacatggcaccctgtgcacagaagggtctggcttatgttctgctttcactgtctgatgaacaatttttgaacaagggaccctcatttttcatttcacaccgttatggaactggtcctggtttgaatcatatgaaatgtctctgtttttagatcaagatgttcaactaccagcaatgttatatggtaaataataaaagcttatagaggggttgtgtggaactgaagctcaaaatgctaggagaagggtgctggctagctagtgccgtggggtccctgagaatgattcca

SEQ ID NO: 670768 - DNA, 654 bp, Homo sapiens
tatatgcctactctaagaccattctgccaatgatagtgttgaacctgcaagtcctgctgataaatatacatcagggtagcaaatgctaagggcatgagatttgaggaaagagatggtatttttaaggagtcatcctctggttttattcatacattttgtgmaatagtcacctggatcagaacttcttctgggaggctcactggactgttccttttggttagcaagatatacgccttcttctttatcttgactaagactccttaactaataagtaataaaaccgagacttgaacccagcccagtctgactctagaacctatacttttaaccattaatatcagctgatattagttctgacaaataaatgtcaaatgaacactgaatgcaattaaatggtgccttctcattgtcttctttgagacagcatagcatagtggttcaatattgattcaatagctatttattaactgtttatttattagataagagcaagtgttcttttttttgagacaagctctcactctgtttctcaggctaagtgtagtggcacaatcctaggtcactgcagcctcaatctccttggcttaagagatccttctccctcagtttcctgagtaaataggacaacaggtgtgttccatcatgcccaattaa

SEQ ID NO: 670769 - DNA, 654 bp, Homo sapiens
tatatgcctactctaagaccattctgccaatgatagtgttgaacctgcaagtcctgctgataaatatacatcagggtagcaaatgctaagggcatgagatttgaggaaagagatggtatttttaaggagtcatcctctggttttattcatacattttgtgcaatagtcacctggatcagaacttcttctgggaggctcactggactgttcyttttggttagcaagatatacgccttcttctttatcttgactaagactccttaactaataagtaataaaaccgagacttgaacccagcccagtctgactctagaacctatacttttaaccattaatatcagctgatattagttctgacaaataaatgtcaaatgaacactgaatgcaattaaatggtgccttctcattgtcttctttgagacagcatagcatagtggttcaatattgattcaatagctatttattaactgtttatttattagataagagcaagtgttcttttttttgagacaagctctcactctgtttctcaggctaagtgtagtggcacaatcctaggtcactgcagcctcaatctccttggcttaagagatccttctccctcagtttcctgagtaaataggacaacaggtgtgttccatcatgcccaattaa

SEQ ID NO: 670770 - DNA, 654 bp, Homo sapiens
tatatgcctactctaagaccattctgccaatgatagtgttgaacctgcaagtcctgctgataaatatacatcagggtagcaaatgctaagggcatgagatttgaggaaagagatggtatttttaaggagtcatcctctggttttattcatacattttgtgcaatagtcacctggatcagaacttcttctgggaggctcactggactgttccttttggttagcaagatatacgccttcttctttatcttgactaagactccttaactaataagtaataaaaccragacttgaacccagcccagtctgactctagaacctatacttttaaccattaatatcagctgatattagttctgacaaataaatgtcaaatgaacactgaatgcaattaaatggtgccttctcattgtcttctttgagacagcatagcatagtggttcaatattgattcaatagctatttattaactgtttatttattagataagagcaagtgttcttttttttgagacaagctctcactctgtttctcaggctaagtgtagtggcacaatcctaggtcactgcagcctcaatctccttggcttaagagatccttctccctcagtttcctgagtaaataggacaacaggtgtgttccatcatgcccaattaa

SEQ ID NO: 670771 - DNA, 654 bp, Homo sapiens
tatatgcctactctaagaccattctgccaatgatagtgttgaacctgcaagtcctgctgataaatatacatcagggtagcaaatgctaagggcatgagatttgaggaaagagatggtatttttaaggagtcatcctctggttttattcatacattttgtgcaatagtcacctggatcagaacttcttctgggaggctcactggactgttccttttggttagcaagatatacgccttcttctttatcttgactaagactccttaactaataagtaataaaaccgagacttgaacccagcccagtctgactctagaacctatacttttaaccattaatatcagctgatattagttctgacaaataaatgtcaaatgaacactgaatgcaattaaatggtgccttctcattgtcttctttgagacagcatagcatagtggttcaatattgattcaatagctatttattaactgtttatttattagataagagcaagtsttcttttttttgagacaagctctcactctgtttctcaggctaagtgtagtggcacaatcctaggtcactgcagcctcaatctccttggcttaagagatccttctccctcagtttcctgagtaaataggacaacaggtgtgttccatcatgcccaattaa

SEQ ID NO: 670772 - DNA, 654 bp, Homo sapiens
tatatgcctactctaagaccattctgccaatgatagtgttgaacctgcaagtcctgctgataaatatacatcagggtagcaaatgctaagggcatgagatttgaggaaagagatggtatttttaaggagtcatcctctggttttattcatacattttgtgcaatagtcacctggatcagaacttcttctgggaggctcactggactgttccttttggttagcaagatatacgccttcttctttatcttgactaagactccttaactaataagtaataaaaccgagacttgaacccagcccagtctgactctagaacctatacttttaaccattaatatcagctgatattagttctgacaaataaatgtcaaatgaacactgaatgcaattaaatggtgccttctcattgtcttctttgagacagcatagcatagtggttcaatattgattcaatagctatttattaactgtttatttattagataagagcaagtgttcttttttttgagacaagctctcactctgtttctcaggctaagtgtagtggcacaatcctaggtcaytgcagcctcaatctccttggcttaagagatccttctccctcagtttcctgagtaaataggacaacaggtgtgttccatcatgcccaattaa

SEQ ID NO: 670773 - DNA, 676 bp, Homo sapiens
tctgggggtcatagttcttcaagctgatctgtgactccactgtctctaggaacttgcggtgcttgtgctggttcccacgtaggacttcccacactgcctcgtacagggtgtcgcgagagactttgctgctcatggcttctcccactgtgctaactggaaaagagctctattattattattattattattwttttttttttagacggagtcttcctttgtcgcccaggctggagtgcagtggcgccatctctgctcactgccagctccacctcctgggttcagtccattctcctacctcagcctcccgagtagctgggactacaggtgtccaccaccatgcccagctaattttttttttttgtatttttagtagagatggggtttcaccatgttagccaggatggtctcaatctcctgacctcgtgatctgcccacctcggcctcccagagtgctgggattacaggtgtgagccaccacacccagcctattttttagtagagacagggtttcactatgttacccaggctgatcttgaactcctgggctcaagtgatcctcctgccttggtgccccaaagtgctgggacgataggtgtgagccattgcacctggccgcctattatttttttagagacagggtctttgttgcccaggctggagtggcagtggtgcaatt

SEQ ID NO: 670774 - DNA, 1260 bp, Homo sapiens
tatgagctcgtcagtgctattcccatctcgcagacaaggacaataaagctcggaagtgacaaagccaggctgagggcaaggttcttctgactctcaagcctgtgccctgcacctcttgcctctactgtatcttgggagctgggtaccacttgggactgctgactctccaattataagagggaggaaggacagctaaatgtctctccttagcagcaggtgacacaatgcattgtgtcctcgtcgctcacacaggagtaggtctcttctgcaagaccacctgctccatcctttgccttcaccttcattcrgttgttgagtttgcagacagcaccgtccacgcctgtttctccctctcttctcctctcatctggggtcctttggctccctctctgctcctcagtcccacaatgtgggcacatctctacaggagtggtttactggaaagcaaagtggggtttgtccataggagatgtgagttcaagttctagttccaccctcccctggtcatggtcttggacaagtcactcgacctctctgagcatcactgtcctcatctgcagaacagagtcggtaatagttctacctcgtagggtagtgagatcaaagggagatgtcagaaagtgacctggacttcctgggcaatgcaccgtggcctgcactgtaactaacctgccttctcggccacatcagagatgttctagttgcaaatccactgactttcctggagcatttgaggttaaccttaatttaagtcagtcgttccctcttggctcctaagactcggcatcagcttcctgacactccctcctcctcggtcctacccgtccacctgaaactcaccatgttccacatttttttcccctccaaaatgtcctaaaagaatccaaaggctcactttttttttgtcctatctggctgtcccaaggccctcatgccaacagatactcttatcaggcatggcctcccaagggcttagcagtgaccctccagaagctgagggcaaaggtcaggtctctctttggtcaaagataaattctttactacacactgtgacacttgcttgacgaaaacaagtttggcagaggtgacgcaagccggggccatagtgcgtctgcatgatctggcttggtctccagtgcttctggcacctaccatgaaaacagcatgctccaggtagacaccagagccagggaaggcctggggaccagacctggagctgccctgcagccttacccaggatgcccttgccaacccacagac

SEQ ID NO: 670775 - DNA, 1260 bp, Homo sapiens
tatgagctcgtcagtgctattcccatctcgcagacaaggacaataaagctcggaagtgacaaagccaggctgagggcaaggttcttctgactctcaagcctgtgccctgcacctcttgcctctactgtatcttgggagctgggtaccacttgggactgctgactctccaattataagagggaggaaggacagctaaatgtctctccttagcagcaggtgacacaatgcattgtgtcctcgtcgctcacacaggagtaggtctcttctgcaagaccacctgctccatcctttgccttcaccttcattcagttgttgagtttgcagacagcaccgtccacgcctgtttctccctctmttctcctctcatctggggtcctttggctccctctctgctcctcagtcccacaatgtgggcacatctctacaggagtggtttactggaaagcaaagtggggtttgtccataggagatgtgagttcaagttctagttccaccctcccctggtcatggtcttggacaagtcactcgacctctctgagcatcactgtcctcatctgcagaacagagtcggtaatagttctacctcgtagggtagtgagatcaaagggagatgtcagaaagtgacctggacttcctgggcaatgcaccgtggcctgcactgtaactaacctgccttctcggccacatcagagatgttctagttgcaaatccactgactttcctggagcatttgaggttaaccttaatttaagtcagtcgttccctcttggctcctaagactcggcatcagcttcctgacactccctcctcctcggtcctacccgtccacctgaaactcaccatgttccacatttttttcccctccaaaatgtcctaaaagaatccaaaggctcactttttttttgtcctatctggctgtcccaaggccctcatgccaacagatactcttatcaggcatggcctcccaagggcttagcagtgaccctccagaagctgagggcaaaggtcaggtctctctttggtcaaagataaattctttactacacactgtgacacttgcttgacgaaaacaagtttggcagaggtgacgcaagccggggccatagtgcgtctgcatgatctggcttggtctccagtgcttctggcacctaccatgaaaacagcatgctccaggtagacaccagagccagggaaggcctggggaccagacctggagctgccctgcagccttacccaggatgcccttgccaacccacagac

SEQ ID NO: 670776 - DNA, 1260 bp, Homo sapiens
tatgagctcgtcagtgctattcccatctcgcagacaaggacaataaagctcggaagtgacaaagccaggctgagggcaaggttcttctgactctcaagcctgtgccctgcacctcttgcctctactgtatcttgggagctgggtaccacttgggactgctgactctccaattataagagggaggaaggacagctaaatgtctctccttagcagcaggtgacacaatgcattgtgtcctcgtcgctcacacaggagtaggtctcttctgcaagaccacctgctccatcctttgccttcaccttcattcagttgttgagtttgcagacagcaccgtccacgcctgtttctccctctcttctcctctcatctggggtcctttggctccctctctgctcctcagtcccacartgtgggcacatctctacaggagtggtttactggaaagcaaagtggggtttgtccataggagatgtgagttcaagttctagttccaccctcccctggtcatggtcttggacaagtcactcgacctctctgagcatcactgtcctcatctgcagaacagagtcggtaatagttctacctcgtagggtagtgagatcaaagggagatgtcagaaagtgacctggacttcctgggcaatgcaccgtggcctgcactgtaactaacctgccttctcggccacatcagagatgttctagttgcaaatccactgactttcctggagcatttgaggttaaccttaatttaagtcagtcgttccctcttggctcctaagactcggcatcagcttcctgacactccctcctcctcggtcctacccgtccacctgaaactcaccatgttccacatttttttcccctccaaaatgtcctaaaagaatccaaaggctcactttttttttgtcctatctggctgtcccaaggccctcatgccaacagatactcttatcaggcatggcctcccaagggcttagcagtgaccctccagaagctgagggcaaaggtcaggtctctctttggtcaaagataaattctttactacacactgtgacacttgcttgacgaaaacaagtttggcagaggtgacgcaagccggggccatagtgcgtctgcatgatctggcttggtctccagtgcttctggcacctaccatgaaaacagcatgctccaggtagacaccagagccagggaaggcctggggaccagacctggagctgccctgcagccttacccaggatgcccttgccaacccacagac

SEQ ID NO: 670777 - DNA, 1260 bp, Homo sapiens
tatgagctcgtcagtgctattcccatctcgcagacaaggacaataaagctcggaagtgacaaagccaggctgagggcaaggttcttctgactctcaagcctgtgccctgcacctcttgcctctactgtatcttgggagctgggtaccacttgggactgctgactctccaattataagagggaggaaggacagctaaatgtctctccttagcagcaggtgacacaatgcattgtgtcctcgtcgctcacacaggagtaggtctcttctgcaagaccacctgctccatcctttgccttcaccttcattcagttgttgagtttgcagacagcaccgtccacgcctgtttctccctctcttctcctctcatctggggtcctttggctccctctctgctcctcagtcccacaatgtgggcacatctctacaggagtggtttactggaaagcaaagtggggtttgtccataggagatgtgagttcaagttctagttccaccctcccctggtcatggtcttggacaagtcactcracctctctgagcatcactgtcctcatctgcagaacagagtcggtaatagttctacctcgtagggtagtgagatcaaagggagatgtcagaaagtgacctggacttcctgggcaatgcaccgtggcctgcactgtaactaacctgccttctcggccacatcagagatgttctagttgcaaatccactgactttcctggagcatttgaggttaaccttaatttaagtcagtcgttccctcttggctcctaagactcggcatcagcttcctgacactccctcctcctcggtcctacccgtccacctgaaactcaccatgttccacatttttttcccctccaaaatgtcctaaaagaatccaaaggctcactttttttttgtcctatctggctgtcccaaggccctcatgccaacagatactcttatcaggcatggcctcccaagggcttagcagtgaccctccagaagctgagggcaaaggtcaggtctctctttggtcaaagataaattctttactacacactgtgacacttgcttgacgaaaacaagtttggcagaggtgacgcaagccggggccatagtgcgtctgcatgatctggcttggtctccagtgcttctggcacctaccatgaaaacagcatgctccaggtagacaccagagccagggaaggcctggggaccagacctggagctgccctgcagccttacccaggatgcccttgccaacccacagac

SEQ ID NO: 670778 - DNA, 587 bp, Homo sapiens
caatactttcaataatttgcaatgaaataaaacatgactgtggaaatagtttgcatggcacagacattcactggcagcctttcttaaggatgagagatattctttgtcctcaaggcgtaagttccacacttgctgagggttttttggccatgacaaatggcctcctgatgtatgatataatttctctcyctaaggtatatatgtttttatcttatccctatatgctgtactaaagtaagcacacaacctgtgcctttgaggtaggagaaatccacactatggagagagaattttgaaaatcgatcgagtaagtgtgggttatgggctaggtattggcttcccaaacatctcatttagtccccaggtgaggtgagtgccgatgctccgttttccagatgagaaaaatgattctaacaggtccaaagtagaggaggcagatccccaccaagccggtcctgacgtcccctgaataccagggttgctctcagcaggcacacagacgtagcccacgtctacaggagctgtgacatcatgacagtcgccaggctcatccttctctcacacaggacagccatgccaggctttgc

SEQ ID NO: 670779 - DNA, 615 bp, Homo sapiens
cccctgccctctccctgtccacagtcttctgtctttccctcagcagtgtccttcctgttggtcttcctctctgttcccgctgcccagctctggtttctgctctaatacctcctcatcctcaggtgttcccacccagactctgcctcctagaagctggactacaagtgctgccagggaagctgcctaaggttcagcccctgccctaccagcccttagcctctgaggctgccctccagcttgtcccagctgaccatgactgaygtgtgtccccctgcaccggatggacttccttgccaaactgcttggagagcccttctttctcccaagagtcagcaggagttctccttccttagaaaggtccctgaactcttcctgccagccctacctgaatttctttctctcctttgtgctcctacaacagtgaccctattctgactcgtgctctgtagccacttggctactttccagtctcttctaagataagcaaactcctggaaggaaaaaacaaggcccatttacctttgagtgtccccagggctagccagtgccctgcctagaggaagccacagtcagcaagtgtggaatctggaaagctctcggaggaatctttgccag

SEQ ID NO: 670780 - DNA, 2178 bp, Homo sapiens
tgcaactgaagattttcttggaacaagatgattgcctgccaaccatttaataaccaaaaacaaaaatgccaatgtgatgtacattttctcactgtatcacactttgagaaccacagctattcaggcatttaaaaaaacaaaaattgctgccacaggcagtaacaaaaataaataatgatgtgtgaacatcagacaaatatgattcctttttttttttttttttttgagatggagtctcactctgttgcccaggctagagtgcagtggtgtgatcttggctcactgcaacctcagcctcccgggttcaagcgattcacccacctcagcctccagagtagctgggactacaagcatgcaccaccatacctggcttttttttttttttgtatttttagtagagacggggtttcactatgttagtcaggttgttctcaaactcctgacctcaagtgatccacctggcttagcctcccaaaatgctgggattacaggcatgagccaccgcacctggcccatgtttccatgtatatgaagctgaagaacaggcaaaataaacccatagttataaatggcatattggtcgttatccaggaaaatgggagttgtcctgtctgtgtgaaagttgatcatacaaattgagtcattcttatagccaactaaacaatcaagaagtcaagagggaaaggcactcaggacacacaactttgctccaagaatggaattctctataagtcagtatgctgaaactgccggttgtaacccgagaccartttgatctatagatgctgaggtaacttgctgcaattgtaggactaattttgccctccaccatggcccactcggtaggacctgctgcctccccagaaccttaggagaaccaatgaactttctcgaagagcgacagatataacaattctcttttttataaaacctccagctttctctttgttctttggacatactgaagaccacctggtctgtacgcctggaaccgccattctttcttcccaaataaaacgttaaacttaagagattcatctccaaatttttgacttcaacaactgggaaggttaatacagggggtggatacacttaggctgtacacttaagattagcgcactttactggatatctgttattcctgaataatttgtaaaaactttttctaagcaaattgtttttcagtaggaaaccaatctaaaaaagtaatgactttttttttttcaaaatcaaccacgtaactttgcttaatttcaatgaccttagcagaaaatctttcgaaatccaaattcagaagggagacaaactacaaggtcatttcataatatggaaaactagaaaaattccctactagactgacaagtgcaagcagtcttgggatgcagcagccagacttttgcatctcctcctccaactccccaccaaacacaccttctataccttcaatttcatgaccgcgattctaaaaatatatttaatgtcagcatgaagtataaaaaaagcgtcaccagaacctgctacttattattgatactgaggtcttggtaaagggagcattgataatatatatgccgagataggattagtatgtggactcagactttacagatatcaaaatctgaaggacacgggtgcacgtgtatgtcaaactcatcaaatggaatgcatttaaacatgtgccatttttattgtatagcaattatacctcaataaaacttttaaaaaatgtaacaaactgacagccttgaaatctccagaaagtgctatgtaaacattctttaaagcagtattgaaaaaaagataaattctctgcacggtgagggaggagagtggatacaaacagcaaattcaaagccactcttagaccgtgagaagtaactagttggtctgggaagtgatttagcagtcccctaaaatacaacacgttcttgaaagccatgaatccacacgaagcttcaagagagaagcccttgacaaagctggggcaagaccggcccttaggacagccagcaacgctacttcaccaccctgctccagcggactgcggctgccgcgctgcccacaggaactcaagttccgccacagccaggtcagagagacagacaccccagagaggccggcttccccagctctgcgaagaacaaagcagcgcgaatgaacgaagccactgaactgccg

SEQ ID NO: 670781 - DNA, 2178 bp, Homo sapiens
tgcaactgaagattttcttggaacaagatgattgcctgccaaccatttaataaccaaaaacaaaaatgccaatgtgatgtacattttctcactgtatcacactttgagaaccacagctattcaggcatttaaaaaaacaaaaattgctgccacaggcagtaacaaaaataaataatgatgtgtgaacatcagacaaatatgattcctttttttttttttttttttgagatggagtctcactctgttgcccaggctagagtgcagtggtgtgatcttggctcactgcaacctcagcctcccgggttcaagcgattcacccacctcagcctccagagtagctgggactacaagcatgcaccaccatacctggcttttttttttttttgtatttttagtagagacggggtttcactatgttagtcaggttgttctcaaactcctgacctcaagtgatccacctggcttagcctcccaaaatgctgggattacaggcatgagccaccgcacctggcccatgtttccatgtatatgaagctgaagaacaggcaaaataaacccatagttataaatggcatattggtcgttatccaggaaaatgggagttgtcctgtctgtgtgaaagttgatcatacaaattgagtcattcttatagccaactaaacaatcaagaagtcaagagggaaaggcactcaggacacacaactttgctccaagaatggaattctctataagtcagtatgctgaaactgccggttgtaacccgagaccaatttgatctatagatgctgaggtaacttgctgcaattgtaggactaattttgccctccaccatggcccactcggtaggacctgctgmctccccagaaccttaggagaaccaatgaactttctcgaagagcgacagatataacaattctcttttttataaaacctccagctttctctttgttctttggacatactgaagaccacctggtctgtacgcctggaaccgccattctttcttcccaaataaaacgttaaacttaagagattcatctccaaatttttgacttcaacaactgggaaggttaatacagggggtggatacacttaggctgtacacttaagattagcgcactttactggatatctgttattcctgaataatttgtaaaaactttttctaagcaaattgtttttcagtaggaaaccaatctaaaaaagtaatgactttttttttttcaaaatcaaccacgtaactttgcttaatttcaatgaccttagcagaaaatctttcgaaatccaaattcagaagggagacaaactacaaggtcatttcataatatggaaaactagaaaaattccctactagactgacaagtgcaagcagtcttgggatgcagcagccagacttttgcatctcctcctccaactccccaccaaacacaccttctataccttcaatttcatgaccgcgattctaaaaatatatttaatgtcagcatgaagtataaaaaaagcgtcaccagaacctgctacttattattgatactgaggtcttggtaaagggagcattgataatatatatgccgagataggattagtatgtggactcagactttacagatatcaaaatctgaaggacacgggtgcacgtgtatgtcaaactcatcaaatggaatgcatttaaacatgtgccatttttattgtatagcaattatacctcaataaaacttttaaaaaatgtaacaaactgacagccttgaaatctccagaaagtgctatgtaaacattctttaaagcagtattgaaaaaaagataaattctctgcacggtgagggaggagagtggatacaaacagcaaattcaaagccactcttagaccgtgagaagtaactagttggtctgggaagtgatttagcagtcccctaaaatacaacacgttcttgaaagccatgaatccacacgaagcttcaagagagaagcccttgacaaagctggggcaagaccggcccttaggacagccagcaacgctacttcaccaccctgctccagcggactgcggctgccgcgctgcccacaggaactcaagttccgccacagccaggtcagagagacagacaccccagagaggccggcttccccagctctgcgaagaacaaagcagcgcgaatgaacgaagccactgaactgccg

SEQ ID NO: 670782 - DNA, 2178 bp, Homo sapiens
tgcaactgaagattttcttggaacaagatgattgcctgccaaccatttaataaccaaaaacaaaaatgccaatgtgatgtacattttctcactgtatcacactttgagaaccacagctattcaggcatttaaaaaaacaaaaattgctgccacaggcagtaacaaaaataaataatgatgtgtgaacatcagacaaatatgattcctttttttttttttttttttgagatggagtctcactctgttgcccaggctagagtgcagtggtgtgatcttggctcactgcaacctcagcctcccgggttcaagcgattcacccacctcagcctccagagtagctgggactacaagcatgcaccaccatacctggcttttttttttttttgtatttttagtagagacggggtttcactatgttagtcaggttgttctcaaactcctgacctcaagtgatccacctggcttagcctcccaaaatgctgggattacaggcatgagccaccgcacctggcccatgtttccatgtatatgaagctgaagaacaggcaaaataaacccatagttataaatggcatattggtcgttatccaggaaaatgggagttgtcctgtctgtgtgaaagttgatcatacaaattgagtcattcttatagccaactaaacaatcaagaagtcaagagggaaaggcactcaggacacacaactttgctccaagaatggaattctctataagtcagtatgctgaaactgccggttgtaacccgagaccaatttgatctatagatgctgaggtaacttgctgcaattgtaggactaattttgccctccaccatggcccactcggtaggacctgctgcctccccagaaccttaggagaaccaatgaactttctcgaagagcgacagatataacaattctcttttttataaaacctccagctttctctttgttctttggacatactgaasaccacctggtctgtacgcctggaaccgccattctttcttcccaaataaaacgttaaacttaagagattcatctccaaatttttgacttcaacaactgggaaggttaatacagggggtggatacacttaggctgtacacttaagattagcgcactttactggatatctgttattcctgaataatttgtaaaaactttttctaagcaaattgtttttcagtaggaaaccaatctaaaaaagtaatgactttttttttttcaaaatcaaccacgtaactttgcttaatttcaatgaccttagcagaaaatctttcgaaatccaaattcagaagggagacaaactacaaggtcatttcataatatggaaaactagaaaaattccctactagactgacaagtgcaagcagtcttgggatgcagcagccagacttttgcatctcctcctccaactccccaccaaacacaccttctataccttcaatttcatgaccgcgattctaaaaatatatttaatgtcagcatgaagtataaaaaaagcgtcaccagaacctgctacttattattgatactgaggtcttggtaaagggagcattgataatatatatgccgagataggattagtatgtggactcagactttacagatatcaaaatctgaaggacacgggtgcacgtgtatgtcaaactcatcaaatggaatgcatttaaacatgtgccatttttattgtatagcaattatacctcaataaaacttttaaaaaatgtaacaaactgacagccttgaaatctccagaaagtgctatgtaaacattctttaaagcagtattgaaaaaaagataaattctctgcacggtgagggaggagagtggatacaaacagcaaattcaaagccactcttagaccgtgagaagtaactagttggtctgggaagtgatttagcagtcccctaaaatacaacacgttcttgaaagccatgaatccacacgaagcttcaagagagaagcccttgacaaagctggggcaagaccggcccttaggacagccagcaacgctacttcaccaccctgctccagcggactgcggctgccgcgctgcccacaggaactcaagttccgccacagccaggtcagagagacagacaccccagagaggccggcttccccagctctgcgaagaacaaagcagcgcgaatgaacgaagccactgaactgccg

SEQ ID NO: 670783 - DNA, 2178 bp, Homo sapiens
tgcaactgaagattttcttggaacaagatgattgcctgccaaccatttaataaccaaaaacaaaaatgccaatgtgatgtacattttctcactgtatcacactttgagaaccacagctattcaggcatttaaaaaaacaaaaattgctgccacaggcagtaacaaaaataaataatgatgtgtgaacatcagacaaatatgattcctttttttttttttttttttgagatggagtctcactctgttgcccaggctagagtgcagtggtgtgatcttggctcactgcaacctcagcctcccgggttcaagcgattcacccacctcagcctccagagtagctgggactacaagcatgcaccaccatacctggcttttttttttttttgtatttttagtagagacggggtttcactatgttagtcaggttgttctcaaactcctgacctcaagtgatccacctggcttagcctcccaaaatgctgggattacaggcatgagccaccgcacctggcccatgtttccatgtatatgaagctgaagaacaggcaaaataaacccatagttataaatggcatattggtcgttatccaggaaaatgggagttgtcctgtctgtgtgaaagttgatcatacaaattgagtcattcttatagccaactaaacaatcaagaagtcaagagggaaaggcactcaggacacacaactttgctccaagaatggaattctctataagtcagtatgctgaaactgccggttgtaacccgagaccaatttgatctatagatgctgaggtaacttgctgcaattgtaggactaattttgccctccaccatggcccactcggtaggacctgctgcctccccagaaccttaggagaaccaatgaactttctcgaagagcgacagatataacaattctcttttttataaaacctccagctttctctttgttctttggacatactgaagaccacctggtctgtacgcctggaaccgccattctttcttcccaaataaaacgttaaacttaagagattcatctccaaatttttgacttcaacaactgggaaggttaatacagggggtggatacacttaggctgtacacttaagattagcgcactttactggatatctgttattccygaataatttgtaaaaactttttctaagcaaattgtttttcagtaggaaaccaatctaaaaaagtaatgactttttttttttcaaaatcaaccacgtaactttgcttaatttcaatgaccttagcagaaaatctttcgaaatccaaattcagaagggagacaaactacaaggtcatttcataatatggaaaactagaaaaattccctactagactgacaagtgcaagcagtcttgggatgcagcagccagacttttgcatctcctcctccaactccccaccaaacacaccttctataccttcaatttcatgaccgcgattctaaaaatatatttaatgtcagcatgaagtataaaaaaagcgtcaccagaacctgctacttattattgatactgaggtcttggtaaagggagcattgataatatatatgccgagataggattagtatgtggactcagactttacagatatcaaaatctgaaggacacgggtgcacgtgtatgtcaaactcatcaaatggaatgcatttaaacatgtgccatttttattgtatagcaattatacctcaataaaacttttaaaaaatgtaacaaactgacagccttgaaatctccagaaagtgctatgtaaacattctttaaagcagtattgaaaaaaagataaattctctgcacggtgagggaggagagtggatacaaacagcaaattcaaagccactcttagaccgtgagaagtaactagttggtctgggaagtgatttagcagtcccctaaaatacaacacgttcttgaaagccatgaatccacacgaagcttcaagagagaagcccttgacaaagctggggcaagaccggcccttaggacagccagcaacgctacttcaccaccctgctccagcggactgcggctgccgcgctgcccacaggaactcaagttccgccacagccaggtcagagagacagacaccccagagaggccggcttccccagctctgcgaagaacaaagcagcgcgaatgaacgaagccactgaactgccg

SEQ ID NO: 670784 - DNA, 633 bp, Homo sapiens
gtcaccatgtacgactaatttttgtatttttagtagagacagtgtttcaccaccttggccagactggtcccgaactcctgacctcaagtcatctgcctgcctcagcctctcaaagtgctggcattayaggcatgagccactgcacctggccttggttactgtctctctgcctgtaagtccccacccagtggccaggggccctgtcaaagtgcccacttctggggataaaaaagtaagtgcagtagggggactcagaaacatcaaccacatgtatttgtggggactttttctttttttttttttttgagacagagtcttgccctgttgcccaggctgcagtgcagtggcatgatctcctcggctcactgcaagctccgcctcccgggttcacgccattctcctgcctcagcctcctgagtagctgggacctacaggcgcctgccaccatgcccggctaattttttgtatttttttagtagagacggggtttcaccgtgttagccaggatggtctcgatctcctgatctcgtgatccgcccaccttggcctcccaaagtgctgggattacaggcgtgagccaccgcacctggccttgtggggactttttcttaaaaaaaatcctgatttgaggcc

SEQ ID NO: 670785 - DNA, 633 bp, Homo sapiens
gtcaccatgtacgactaatttttgtatttttagtagagacagtgtttcaccaccttggccagactggtcccgaactcctgacctcaagtcatctgcctgcctcagcctctcaaagtgctggcattacaggcatgagccactgcacctggccttggttactgtctctctgcctgtaagtccccacccagtggccaggggccctgtcaaagtgcccacttctggggataaaaaagtaagtgcagtagggggactcagaaacatcaaccacatgtatttgtggggactttttctttttttttttttttgagacagagtcttgcccygttgcccaggctgcagtgcagtggcatgatctcctcggctcactgcaagctccgcctcccgggttcacgccattctcctgcctcagcctcctgagtagctgggacctacaggcgcctgccaccatgcccggctaattttttgtatttttttagtagagacggggtttcaccgtgttagccaggatggtctcgatctcctgatctcgtgatccgcccaccttggcctcccaaagtgctgggattacaggcgtgagccaccgcacctggccttgtggggactttttcttaaaaaaaatcctgatttgaggcc

SEQ ID NO: 670786 - DNA, 633 bp, Homo sapiens
gtcaccatgtacgactaatttttgtatttttagtagagacagtgtttcaccaccttggccagactggtcccgaactcctgacctcaagtcatctgcctgcctcagcctctcaaagtgctggcattacaggcatgagccactgcacctggccttggttactgtctctctgcctgtaagtccccacccagtggccaggggccctgtcaaagtgcccacttctggggataaaaaagtaagtgcagtagggggactcagaaacatcaaccacatgtatttgtggggactttttctttttttttttttttgagacagagtcttgccctgttgcccaggctgcagtgcagtggcatgatctcctcggctcactgcaagctccgcctcccgggttcacgccattctcctgcctcagcctcctgagtagcwgggacctacaggcgcctgccaccatgcccggctaattttttgtatttttttagtagagacggggtttcaccgtgttagccaggatggtctcgatctcctgatctcgtgatccgcccaccttggcctcccaaagtgctgggattacaggcgtgagccaccgcacctggccttgtggggactttttcttaaaaaaaatcctgatttgaggcc

SEQ ID NO: 670787 - DNA, 633 bp, Homo sapiens
gtcaccatgtacgactaatttttgtatttttagtagagacagtgtttcaccaccttggccagactggtcccgaactcctgacctcaagtcatctgcctgcctcagcctctcaaagtgctggcattacaggcatgagccactgcacctggccttggttactgtctctctgcctgtaagtccccacccagtggccaggggccctgtcaaagtgcccacttctggggataaaaaagtaagtgcagtagggggactcagaaacatcaaccacatgtatttgtggggactttttctttttttttttttttgagacagagtcttgccctgttgcccaggctgcagtgcagtggcatgatctcctcggctcactgcaagctccgcctcccgggttcacgccattctcctgcctcagcctcctgagtagctgggacctacaggcgccygccaccatgcccggctaattttttgtatttttttagtagagacggggtttcaccgtgttagccaggatggtctcgatctcctgatctcgtgatccgcccaccttggcctcccaaagtgctgggattacaggcgtgagccaccgcacctggccttgtggggactttttcttaaaaaaaatcctgatttgaggcc

SEQ ID NO: 670788 - DNA, 603 bp, Homo sapiens
attccaaatatttggaatttagcgataaaaacctccagtaattttttttaaaataccagctgaatgtggaggcacagcctacagtcccagctactcggaaggctaaggtcagaggattgcttgagcccaggagttcaaggctgcagtgagctatgctggggccactgcactccagcctgggtgacacagcgagaccacatgtctttctgaggtcttggaggctaaaacgcacacacacacaaaaactcatatctctttaaaaataaataaacaaacaaataaataagccatgttaaaatggatattacctaagaataatgagatgattggatattagaaaatctattaaaataaattgtgtatagattaaaagagactatgatatcattttgttagatgtcgaaagggcatgtcataaaatatagtaacttttcccccaaaattcccttatataagattatttgcttaatctaarattacatatttataatcttagatttacatatattatatttaatcttagatttatatatatattatatttacctacctgtctacctaatctacaaagccaaaagcagttaaatgcttctatgtaaaaca

SEQ ID NO: 670789 - DNA, 603 bp, Homo sapiens
attccaaatatttggaatttagcgataaaaacctccagtaattttttttaaaataccagctgaatgtggaggcacagcctacagtcccagctactcggaaggctaaggtcagaggattgcttgagcccaggagttcaaggctgcagtgagctatgctggggccactgcactccagcctgggtgacacagcgagaccacatgtctttctgaggtcttggaggctaaaacgcacacacacacaaaaactcatatctctttaaaaataaataaacaaacaaataaataagccatgttaaaatggatattacctaagaataatgagatgattggatattagaaaatctattaaaataaattgtgtatagattaaaagagactatgatatcattttgttagatgtcgaaagggcatgtcataaaatatagtaacttttcccccaaaattcccttatataagattatttgcttaatctaaaattacatatttataatcttagatttacatatattatatttaatcttagatttatatatatattatatttacctacctgtctacctaatctacaaagccaaaagcagttaaatgcttctrtgtaaaaca

SEQ ID NO: 670790 - DNA, 599 bp, Homo sapiens
tgtttcatcaagtgcaatcttaaatgaagctggaattttccttaacagtgagtgtgaagtgataaagaatacaactttctagcacaatttagtgctattaccttgcttccggctaaggttacagcccttttatgtaccattgcttttgcaccagcaatgtaatgtcaacacagagaaaaacgcaaataacatctgtgtattattactaaaatagttttgaccttgaagatgccccctgaaagaatcttggtatctcctagtagaaccctgtctctagaggatgcatcttagaggaacttctgtatatatgtcagtatgcctgtgtacagatgctccttaacttatggtggagtttcatcctgataaatctgtcataaattgaaaatatagtaagtcagaagtaattttctacttaatattttccatgtatgatgggattatactgaatgtgtactcagtatactgagtactgaatgtgtatggcttttgcactatcgtaaagatgaaaaattataacttgaatcatcataagtcagggatggtctgtatgtaagtgygtgtatatatctcctacttcagtagataatgctaaaaaattt

SEQ ID NO: 670791 - DNA, 2983 bp, Homo sapiens
tcattggatttagggcccactctaatccagtatgccttcattttaacttgattacatctgtaaaggctctcaaagaaggtcacattcacaggtacaggggattcaaactttaacatatatatttggtggggtggggacacaatttaactcacaacaggtatgacagataactttgggaggagaagcacctggtgaatgggtaggaagggaggggtcaatcaaggtaaccaaagaaaaaaataaatgaggatgggaaagaatacagtaaaaataccttcataagaataaattgccctgttaatataaaattctgtgcatgtgtatgaataaattagaataaagagctagctctgtattaatttgtaggcataacattcgataattcttttatatggtttattgtgtgccaggcactgttttaagcactttccatacattaactcctttaatccttatgtctcaacccatgatataggtactattattattacacccattttactgatgatgaaactgagacatagagagacatagctagtaaaatggctgagccaggattcaaacctgagccatcgggcttcagaatctgtgctcttaatcaccttggyatatgtagtatgactctgttcttcagaaactaaaacaatatatatgtgtacaaatgcatatgtatacatttatattttagaagacataaaattaaagtatcaagatcaaaaataaaatcttggattctaaccagctctgtcagggctcacagacaatgaatgataaatattctggttggcctattttgtgtcatatacccagatgcccagactaggtttttttggggggagaaggaggggcatcagtgcttggacattcttgtcagagtcatgtggagtgggttacttaaaggaaagagatgatctattatcagaggtaggaggagatggcagctgacggacttgcaaaaactataactagtctgtctccttgaacctcagtgtaaccttccctacctttttcttagatgtaaacagcagagcagctgaaggtccttcactcatcaaacaaaaagaaggtatggcccaaggtgaagagaaaggctatagggaaaccctccccaaaacatcacacccattttcccatgccctttgttcagaaaataattaattgtggaaatgagatctgttgcctccccacttcccccagcccagacccgacaacaatggggaccctgtctctacttcctacaagtccaccaggggcaaattaccatttggggttatttaatggtgtaataggagaatctgctgcttttagttcaggggtgtccaatctttcagcttccctgggccaaactggaagaattgtcttgggctgcacataaaatacattaacactaatgatagctgatgagcttaaaaaaatttgcaaaaaaaacccaaaacctcaatgttttaagaaagtttatgaatgtgtgttgggccacattcaaagccatcctgggccacatgaggcccatgggctgtgggttggacaagcttgatttagatcatctcgtgattttaggctctgccagtgtggggattatcccacctgcagggattatgtggtgctctaggattatcttgggtttggggttgatccccccacatggaaggattgtctggtggtgctatcggattatcttggttttagggttgatccctcacatggaaggattctctgctactttgatgttcctcatgacccggtgccgcctgttctatagtatcaacgtgtaagtccttgactcagacctaattcaaggtaggttaaggtgtcctcctgtctaccagttcctgtttcaggaacttgggatgaccttgtgaagggtaggaagtttctattttcctttgaagtgctgttccaagaggtaataatagtggaacttgagtttcagcagttgatgagaatggtggcccctgtgtctaagaagtatgagaattacaatattgggtagcagagactgataaagatggtgatataggttgagcatcccttatccaaaatacttgagacagaaagtgtttcaggtttgatttttttattttgtattttggactattttcatatatataaaatcagatatttggggatgagacccaagtccaaacacaaaattcatttgttttcatttcatttatatatgccttctacacatagcctgaagataattttatacaatatttttgtgcatgaaacaaggttttttgtttgttttaagacagggtctcactctatcaaccaggctggagtgcagcctcaacttcctgggcttaagcaatcctcccacctcagcctccctagtagctgggagaagaagcatgcatcaccatgccctgctaagttttaaatttttttattgtagagatgggaatcccactatgttgcccaggctggtctcaaattcctgggctcaagtgatcctcctgccttagcctcccaaacagctggattacaggcataagccactgtgcccagccccatgaaacaaagttttgactgcaatctatcacatgagatcaagtgatggaatgaaatttttcacttctgacgttacgtcggtgctcaaaaagtttttgattttggagcatttcagattcgagatttttgcattaaggatgctcaacctgtacttgtgtgccaatgtctgatgggaatggtggccccctgtttcagggagtgaaggcaatgatggatcctgagttctggatatttgtaggaattgcagtagatgagtcttatgtgctgagagatttggagccctgtatttcagagaatgaaggaaccagtggtccctgtgacttgctaactgatgagaacagaacagaggccttatgtttcagaaactaatgggaattatggtcactgttcctggggggcttaagcaagtcccagcctaatccacaagtcatttattattcactcatctcctcattcattcacttagcaa

SEQ ID NO: 670792 - DNA, 1657 bp, Homo sapiens
atggcccctgcctccaactttaaagccagaaggatagaatcttcagatctctgtttccttctccttgctttccttcatacctctgcttccttcatcacatctccttctgactctgactttcctgcctccttctttcacttataagccctgtgattacattaatgatatgtgattccatcaggctcgccaagataacctccccaccacaagatccttaaccttaatcacatctgcgaagtctcttttgccacataaggtaacatattcacaggttccggagattcagacactgccataactggggagtcgtacctctcaccacagtttggccttcagtgaaccacatttctctatgccttactctccccatctgagaagcaggactgttggaagctcagccatcttcatgggcatggtgcatacccagggctcctgagaggaacccctaacactatgagccccagggcaggctcagaggtagaaagagttgggttctttgaggaaatgaaaggtggccaggacaatggaccagcctgagccaagagtggagagcaagaatggattccatgtctccagcagcaggtcaaacatttgtggtcttctcttggcctcttgaacacagttgatcactactattagatcccttcctggtccaaagatatgatttagccatgatcacattatgcagtctgccccaccttctgtgtacctcagaatcaatcctcagttgacctaaatccttgtagaataataccaacaccaggagtaactaacatttggcctgtgttggcaaagcaatttctactgaccattattgtgcatgatccttataataatgtaggatcctcaggtctaggtagaattaccctcatttgactgatggaggccttgaggttcagagaggaaacaagacttgtcctagttgacatgactgcagaagctgaggttagaataggctgctccagaaaatggaattttcagggtaaccaagggggtaattagaacctcctttattgtttgaacctttgcaatgagcagactcattgaaaggtacttaaggacaggtcttggcccatcgttatcctcattgcacagtaaggaaaggctaagaccaggtcatacagctggctagtagcaaaggcccagctagtgtcttctggggcttcagtctcctcatctggatattgaagtgattggcctcaccagagagcactggctcttgaccctagccacacattgacatcacctggggagcttgtaaaaacacaaaggcttccctcaagagcagttacactggagtctgggggtgggatgcaggtatcatcattttttaaagctcccaggtgatgcttatgtgtggccayggttggcagtcactggtgtagatgctttctgaagggccctccatcctctcccatgattccttccagaagtctctcttctgctttttacttggacagaaccctaggaagtggccactagagaaattctggtcattttctgtacagcttcccaccttcccacttgatggtagagtgcccagcaagtgggcaatctacaggcacagcatggtgcaaggatgtttaaaagacatggtttcagtggcagaccccactttcagtaatagcttatccactcactatgagcagattattta

SEQ ID NO: 670793 - DNA, 593 bp, Homo sapiens
agcagtatgaaatctccttcaaggtgagccagctctccagacgccccgttcttggcacagcctcctgagtgcctgtcccagtaggtgtctcagcttctgcctgagcttggaaagactggaggcctcagggttctgtagcccttctgcccatcaggtgaagaagacaggggctcatgggccactctttgttgtggggtgggggggtgtgggagggaaggggagtactctccagctgccaaaggctggtcctcaccacagctctgactggcatttgccttgtgtcttcttaagatgttggaataaggtcttgcttctactcagatggcaggtctgagattgagatgtccagcaaataagcagtgggccagagaagctaggaaggccaaacrggatacgtaggcctagaggagtcctctcagtcaccccaagttttccctttgtacctgttgctctaggagtttgacaaagaccagtgagcataagctccagttgtaaagttacaaaggcctggattcagatcccagctccatcatcaggagctatctgactttgggcaagttagatcacccccccgagctttctttcctcatctg

SEQ ID NO: 670794 - DNA, 814 bp, Homo sapiens
gttccagtgagctgtgctcgtgccactgcactccagcctggtgacagagcaagaccctgcctcgaaaaagaaaaggaactaagggttgccctatctttccctttccttcataagttcttggctaacacggggcagtaacgcaagtaagaaagaacatgacaggacttgttggtcgttcctgcttcttaggatgctgttgcccttcttagcacacccagagcgagttccggtttgaagggaaagcagggcctctgggacccccagcgcccctatttattcagtgtcttcgcacatgctgcatgcagacagggcagagaggaacagcgtgcttctctgctcatgcacacgctccagtgtcccatcagatttcacttacaaaacagttcaaagataaaattattcagaatttcaagacagtggcagcagagctttaaatcaagccaggccctcctgagcatggggacctgtgaactgcgcatggtgtggcccgtgaggcccatgctggccgaggcagaccagtctttgcaagcagacgagcatgccaccatgggatcctgggtctctgagctgagaggacctacccattcattgatggataggttggagcttggaaaagrggagcataagagttggggctctttcagaagaccaatttaaagtaaaaaaaaatggggggaatatattgtgtttgactcacatatgagcctggggtagctatggcttaagacaacctggatccagggcttcaaatgatgtcagtctcttcttctcctgctgaactcatgttccttttgtgttggcctcatgctgaagg

SEQ ID NO: 670795 - DNA, 924 bp, Homo sapiens
tgggaccaccaggattggtgcagactcatcaagrtatatccctcaattatgtgagggaaatctggtacgtatgtgaaagtcagggccctgctggcatggcaaaaggaggaaatggctcttggataagcaattgcagtgccgggtataatgagaaagagtgtcgtgattgataaactacatctgccacaagcataggacagagatgtgatatcatgaggtcatgtattggttgcacctgatagaactttttataggttaaaaaaatgttttcacagacattatctctactgttggtcaacactccttgacctaagcagctcaatggttatactccttattttatagtagggtcactgagacccagaggggcatattgatttgtacaaggtcacagagcaagaaaatgataaagcagggtttcctccctccaggtctagtatgtcttccactttcccacactttcccacgctggtggctggctggaaaccaagtttttctctcaaggagtaggcaaagggcattaaaatgagagctgggaggttactaaggggtaggccttgtcagtatcacaaaacctaaccttaccctgcaggaagcctcccttccctcccctcccctcccctcccctctcctcctctcccctgccttcccttcttcctctctctcttcttctaaataacagtcttattgagatatgattcacatttcagtgttttttagtttatcatagacttgtgcatccattaccagtgaagtataactctcttaagtaaccatataactgcctctagagtggggaggttgacagaggagaagcctggttatggctccctgagctcccagatcttccttctcaaggtagacaaaaacagatccttacagggctttgggtatgccacttgaatgagtgacactgcctattta

SEQ ID NO: 670796 - DNA, 924 bp, Homo sapiens
tgggaccaccaggattggtgcagactcatcaaggtatatccctcaattatgtgagggaaatctggtacgtatgtgaaagtcagggccctgctggcatggcaaaaggaggaaatggctcttggataagcaattgcagtgccrggtataatgagaaagagtgtcgtgattgataaactacatctgccacaagcataggacagagatgtgatatcatgaggtcatgtattggttgcacctgatagaactttttataggttaaaaaaatgttttcacagacattatctctactgttggtcaacactccttgacctaagcagctcaatggttatactccttattttatagtagggtcactgagacccagaggggcatattgatttgtacaaggtcacagagcaagaaaatgataaagcagggtttcctccctccaggtctagtatgtcttccactttcccacactttcccacgctggtggctggctggaaaccaagtttttctctcaaggagtaggcaaagggcattaaaatgagagctgggaggttactaaggggtaggccttgtcagtatcacaaaacctaaccttaccctgcaggaagcctcccttccctcccctcccctcccctcccctctcctcctctcccctgccttcccttcttcctctctctcttcttctaaataacagtcttattgagatatgattcacatttcagtgttttttagtttatcatagacttgtgcatccattaccagtgaagtataactctcttaagtaaccatataactgcctctagagtggggaggttgacagaggagaagcctggttatggctccctgagctcccagatcttccttctcaaggtagacaaaaacagatccttacagggctttgggtatgccacttgaatgagtgacactgcctattta

SEQ ID NO: 670797 - DNA, 924 bp, Homo sapiens
tgggaccaccaggattggtgcagactcatcaaggtatatccctcaattatgtgagggaaatctggtacgtatgtgaaagtcagggccctgctggcatggcaaaaggaggaaatggctcttggataagcaattgcagtgccgggtataatgagaaagagtgtcgtgattgataaactacatctgccacaagcataggacagagatgtgatatcatgaggtcatgtattggttgcacctgatagaactttttataggttaaaaaaatgttttcacagacattatctctactgttggtcaacactccttgacctaagcagctcaatggttatactccttattttatagtagggtcactgagacccagaggggcatattgatttgtacaaggtcacagagcaagaaaatgataaagcagggtttcctccctccaggtctagtatgtcttccactttcccacactttcccacgctrgtggctggctggaaaccaagtttttctctcaaggagtaggcaaagggcattaaaatgagagctgggaggttactaaggggtaggccttgtcagtatcacaaaacctaaccttaccctgcaggaagcctcccttccctcccctcccctcccctcccctctcctcctctcccctgccttcccttcttcctctctctcttcttctaaataacagtcttattgagatatgattcacatttcagtgttttttagtttatcatagacttgtgcatccattaccagtgaagtataactctcttaagtaaccatataactgcctctagagtggggaggttgacagaggagaagcctggttatggctccctgagctcccagatcttccttctcaaggtagacaaaaacagatccttacagggctttgggtatgccacttgaatgagtgacactgcctattta

SEQ ID NO: 670798 - DNA, 924 bp, Homo sapiens
tgggaccaccaggattggtgcagactcatcaaggtatatccctcaattatgtgagggaaatctggtacgtatgtgaaagtcagggccctgctggcatggcaaaaggaggaaatggctcttggataagcaattgcagtgccgggtataatgagaaagagtgtcgtgattgataaactacatctgccacaagcataggacagagatgtgatatcatgaggtcatgtattggttgcacctgatagaactttttataggttaaaaaaatgttttcacagacattatctctactgttggtcaacactccttgacctaagcagctcaatggttatactccttattttatagtagggtcactgagacccagaggggcatattgatttgtacaaggtcacagagcaagaaaatgataaagcagggtttcctccctccaggtctagtatgtcttccactttcccacactttcccacgctggtggctggctggaaaccaagtttttctctcaaggagtaggcaaagggcaytaaaatgagagctgggaggttactaaggggtaggccttgtcagtatcacaaaacctaaccttaccctgcaggaagcctcccttccctcccctcccctcccctcccctctcctcctctcccctgccttcccttcttcctctctctcttcttctaaataacagtcttattgagatatgattcacatttcagtgttttttagtttatcatagacttgtgcatccattaccagtgaagtataactctcttaagtaaccatataactgcctctagagtggggaggttgacagaggagaagcctggttatggctccctgagctcccagatcttccttctcaaggtagacaaaaacagatccttacagggctttgggtatgccacttgaatgagtgacactgcctattta

SEQ ID NO: 670799 - DNA, 2775 bp, Homo sapiens
actatttctcctctgagaagcatatattctttagcagaaaataaaagagagagacagttctaaccacctccccccaaccctcccaaaaaaacccacccttaggtgcctttgattctctttcccatatttgaaaggatccaaatccttgtccttcatggatgaggtgttttagctgtccataattacattattattccagacactgtcggaatgcttcttgctgaggagggaggattaggccaagaaggctggagcaagcgtgcagccagtcatctgccccgtgcctggcaaaggagattatgactctggaactgaggtttctggctgagcctttgttacttaattagtctcctgtctcttttccctttatgacagtggcagaatccaggatgcacccctttttaaatgaatgcaaatgtttctaacaaagttttataatcattcattttaaacaaatcagaaaatattcaaaaccactctagtygcagggaattcagagacaggaaataacttttaaaagcatatgtttctcaagggagtaaagtagcaaataccatccctttaaattctgtttaacatgaagcctttgttgactgctcgtgatggttctgcataatgtaatgctcttttaagtgaatactatttagcttcttcacgtgagtcaatgcagcctcatggatgtgtacatttagatgctgatcacaaccagaagtccatgtataaaatggttacaatttaattaactggtaatagatctaatgcagtgtcacgttaaagggaatgtataaatactgctttatgaaccagcctctgcagaaagtgtagacaccggccattctgtctccacttgcttgggatgagttatgggatagccctattaactgcaaaggagtgtgaaattgggctggggcgggggtggggacacccattgttaaacagctgtgtccagccaatcaaccttgaagagtctgacttcacaggtcaataaagatttctgacactgttaatttcattttaggagacaccattgaaattcatcaatcatgccttgtctttgcttttgatggagaaaggaagagagaaagttctgatggctcataagtaggtttaagctaaaagaaaaaaaaacagcattagttcaacctattcaccttacaggtggagaaacggagctccagagcagggagggacccaggctgtccacactgtccagcaacaccacatactactggtgaggtcaaagacctcgggggtgttactcaaaccctaagatcccttgagtcttatctggacttgttgctttaggagatgagccccttggacactaaagtgcattcattccacagttctgtgtttagcaccaaacaagggaaaatgtgttccattgcttttcttccaccagctaagcaggccctaggtgagagttttattcctactaccggaggtatatatctcctgctgccttggtagaatggaaggaaggaaccagaggtctcataccttctgtgaatgacacctgaggcaaatccctagccaaggttagggccccacacatggactccctgtatttcccttaggaaagtggtgcttacctgttattgttacttattgtcttccctgcccagttgaaagctcacagcaaaaatgcaaaatccgtacctatttagcttacgattgtgccatcagggtctagcatagcacctggcacttggtggatgctttatgattattgccccagaatgaatgaattaacctcagatctgtgagccttcctctgcaaaatgggaatgataacatctatctgccctatttggggatgaaggagatagcatgtatggaagagtcgtgggatactccataaaagagaagagatagttcatgtgggttactggtagtattaccttgtaggctttagctgtattgcatttagctcttcctaaattttcctttgacaaggaatacatttgagttattttcggtaacattaactgacagtatcctgcctagaatgggagacccctaacatttaaagaaatctcatgtgcattcctttctcccgcattgtagattagggaggggcccagacaggttgatttacctgcctggcatcaatgcagggaatttggctaagccagagctaggtcacgggacccctccttctgtccctctcagctcagtgcttcaaatcttcatttctgttggagaagctgtagagtatttaattagctacagtctgaaatgtgatatatgtcagcgctcattactgcagtggggctggtaggtattattctccagtgctacaccccattgtagttcagtgaccccaattaactccatcactcaagacagcccagccaggcaggcatcaccaagggccacttgaagcaggtactcagattccctagagtccatcagaaacgctcttctccacctcagtctgacctgctgtccttcccctgagcctccctgttgatgctgaacagaagctttaagaggttgagaagcatttaccaggtaagagccactaggtcattgtgctcagcactaagctgggctccattttatctccctggaggctgcaccctcaagaccctcaagttgtcagtgcaatgggcaagagaagggtgctttaggatcctatcagaatcaggaataaatccctcttctgaactagaccccatttttattcttttaatgttaacatcaggaaaggcaaaagaagactggtgaattggtccagattaaagaaaatgaaagacacatggtaactagata

SEQ ID NO: 670800 - DNA, 1283 bp, Homo sapiens
catctgtaaatgtaaatgtgaggtggggtgggggagtaggaatgagaaggtcgaggcactagtagctagggtggtggctgtggttgtggtcacagtgggtgacagtagtggttcttgtggtaggtaatagacatctacgagttagttaggatagaaacctgagaaacgacctgattttaatcctctctcttgcttatcacatttaattcatcaaaacatctatacatttcatgtcattaatttatttccggtctcattgtcattatccatcatttcttttggcctaagaggtaaagtaactttcccaggaccacacagggacgatctagtgctgtctcagtcctctgatctcaggtgctttctcctctaccagggcagaagaacagaagygccaagagtaggtacaactgggttcagctgtggcccctgcacatactaactgtaccatctggataacttacttgtccttttacccaaccagcaaagtgggccataatcatggcacctaccacatggggttattgtgaggattacaggaagtaatgggtttaagaagtaagtgttagctttttggagcttctataacaaagtaccacaaactgcatggcttaaaacaagatagatgaaatgtttcacacttctggaggccaaaagttcaaaatcgaggtgttggcagaggcttgttctttcaggtggctccaggggagacattttccttgcctcttgaagcttctgaagctgatgatcttggcattcttggctcacagatgcatggctccagtcatatggctgtcttttccccatgtgttgtcacatcagattccttctgtgtgtgtctgtctctgtatccagattcccccgtttataaggacaccagtcatgttggattagagcccagtctaattacatcattttaacttgactatttctgtaaaggcactattttcaaataaggtcacattctgaggtaccggggttaggacttcaatatattaatacctttctgtggggacacagttcaacccatagcaaagtactttgcccaggcttgggtacagagtgaacgctcagtaaatatttttcttaccaaagagcctcgtctatcaaagcagagctcagtcctgaggaacaagactgacagctttggctcagcaaggctcacattactcaattatacattcagctctggaggaaggtggcctctgtgttctcagagaacatcatcaatattgtgacactccaacatgtgtcagccactgggtttcccagggctccttctctgg

SEQ ID NO: 670801 - DNA, 596 bp, Homo sapiens
gcaacatcacatcttgaatgctttgctgctcagaaatttattctgccagatgcctgagggtattactcttaggttcaaccttctgcaaatctctagggcatgaacacagtgcagccaagtttttgctaaggtgtaaaaaggctgatctttactccagttctcagttactttttcatttccatctgagacttcatcacactggagttcattgcccatatttctttcagcattttggccacaatcatttaaccagtctctaagaacttccaaacttttcctcatcttccttcttcagagccctctaaactcttccaacctctacccattacccagttccatagctgcttccacattttcaggtatctttatagcaatgccccacttttcaacatcaattttctagctactattatctgaaacatgtttaatatgtattatacctaaaatattcgttttcttcctcatacatagttgcttcmtggtatctggtttagaaataatattaacatgccaaatgtcaaggaattgaaggaagggcctatatgagtagttaaattagctgtattgtttttgttttgtggattttgttagtaatt

SEQ ID NO: 670802 - DNA, 601 bp, Homo sapiens
aggcttcacaatcatggtggaaggtgaaggaggagcaaagtcatgtcttacatggcagtaggcaagagagcatgtgcatgggaattccccattataaagccattacatctcatgagatttattcactatcaggagaacagcacaggaaagaccaatccccatgattcaactacctcccactgggtacctcccatgacacatggaaattatgggagctacagttcaagatgagatttgggttggaacacagccaaaccaaaccataatgggattgcttgaggccaagagtttgaggctgcagtgagctatggtgctatgatcacaactgtgaatagccactgcactccagccttgacaacatagtgagatcttgtytcaaaaaaaaaaaaaatgaggaagttctccgtggatatgagcctgcagacaaaactgaggcacagggttagcctcataaaaaattcttagtgcagagttagctagagaagcaatatgtaaaccatccatgatatttggtgaagcattattaaagatactacttggtttcagttatattatggacagtttttaaaaggaaggacaactgcttggagataactgatga

SEQ ID NO: 670803 - DNA, 649 bp, Homo sapiens
cctaagctctgacatgacgtatcatgacttcttgcttgtgctgttagtcacatggcctgtcttagtccatttggtgctactatcacaaaatattacagatggggcaatttctgatgaacagaaatttatgtcctcacaattctggaggctaggaaatccaagattaaggagctggtatctttggagggtacatgcaagaaggtaaaaaagagagagagagagacaaggggggscaacctgtctttttataacgaacccacttttataataacagcattaatccattcagaagtgtacagcataatggtctattcatttcttagaggtcccaactcttagtactgtaacttacaatggcgactgaatgtcagcatgagtttaggaaagaaaaaaaaaattcaaactatagcaaggttcaacaatctagttacaataaaaaaaggtgataacactgggacaagatcatcaggggccatcttgtaggctacttaccatactgggtaaaactgggctccttgtatattttgatcagcaagcccagatgttttcttgttgaagaagtgactctttcaaagcaggaagccttatgacaatcacatttctcttgtggtggaaatattttgccctaaagacatccaaagaactgcaa

SEQ ID NO: 670804 - DNA, 509 bp, Homo sapiens
atctaaaggaagaacctcattgcagacaaaaaattactgtgaccctgagacaagtttcattaatagtgaactaagctcatttcaaatgccttttcatattaagacagcaggtcatgttgaaagtaaaactacagggagaaattgtgacatctttaaagatggatatttttgaaaaacatgactattgagggttatttggtttatttccaaaatgacaatgtcctacatgttagaaacagcaaccyaaaatgtgagaaaaatatctttaaaagttttacttaaatgttcttcttaaagggtaagttattcatctgtgcaataaaacacagatctatgatgagcaatggtttaattttttctccttccttccctctcctctccattaaaaaatactgcaaaccatttctatttaaaaagaagccaattccatcaaatggactgtttgcttcctggggtgtattacaatgtagcatataatatggaatcaataaatgaaaaatgcttacaaa

SEQ ID NO: 670805 - DNA, 509 bp, Homo sapiens
atctaaaggaagaacctcattgcagacaaaaaattactgtgaccctgagacaagtttcattaatagtgaactaagctcatttcaaatgccttttcatattaagacagcaggtcatgttgaaagtaaaactacagggagaaattgtgacatctttaaagatggatatttttgaaaaacatgactattgagggttatttggtttatttccaaaatgacaatgtcctacatgttagaaacagcaacctaaaatgtgagaaaaatatctttaaaagttttacttaaatgttcttyttaaagggtaagttattcatctgtgcaataaaacacagatctatgatgagcaatggtttaattttttctccttccttccctctcctctccattaaaaaatactgcaaaccatttctatttaaaaagaagccaattccatcaaatggactgtttgcttcctggggtgtattacaatgtagcatataatatggaatcaataaatgaaaaatgcttacaaa

SEQ ID NO: 670806 - DNA, 643 bp, Homo sapiens
agagaacttgactcttaactgcggcatctggggctggatatgggggtttaagtaatattctgtttgtctcatttcagtaccctgggctttattcctaggcctctcctcataaggtggtaagaaaggccactggaaactgtaagcttacttcctcatggctcaagacccaaaaggaaaggaaaacccttctctcccagtatctatatgttaaaattttaaaaagactctgtcctgagctatgtcttttctagatctaaactctctctggatttgattkgtcagcctcgatcacatgaccgcattacagtggaggagtagggtgggtagggaaggacatcatgattaactgcttctgtaggataacatggaatactcaaaatgtggctcctgaaagaagaattgggcactgttaccaaaagcagaaattgatgttggattgaaaaaaaaaattggctaaacagaaagtccaaagataaagctcttaaagcctctacattgggcaacatggttgtataaatacctttgagcatgtaaggagacgtacctttcaattgtgcagaactgagaaagtttgtacacattcctcattctgtctttcagttctcaagcatctaagttactgcagcggagaggggctagagta

SEQ ID NO: 670807 - DNA, 643 bp, Homo sapiens
agagaacttgactcttaactgcggcatctggggctggatatgggggtttaagtaatattctgtttgtctcatttcagtaccctgggctttattcctaggcctctcctcataaggtggtaagaaaggccactggaaactgtaagcttacttcctcatggctcaagacccaaaaggaaaggaaaacccttctctcccagtatctatatgttaaaattttaaaaagactctgtcctgagctatgtcttttctagatctaaactctctctggatttgatttgtcagcctcgatcacatgaccgcattacagtggaggagtagggtgggtagggaaggacatcatgattaactgcttctgtaggataacatggaatactcaaaatgtggctcctgaaagaagaattgggcactgttaccaaaagcagaaattgatgttggattgaaaaaaaaaattggctaaacagaragtccaaagataaagctcttaaagcctctacattgggcaacatggttgtataaatacctttgagcatgtaaggagacgtacctttcaattgtgcagaactgagaaagtttgtacacattcctcattctgtctttcagttctcaagcatctaagttactgcagcggagaggggctagagta

SEQ ID NO: 670808 - DNA, 1486 bp, Homo sapiens
tggagcaggaggcagaaaattcacagtgtttctgggcttactgggagggctggaggagccataaacccagttagtgtggccaccattctgttcttttcaaaagcagaataaacttgtattccgcgtgggaggatggagcaccaagctgcttcttaaaactgaaggttaaagacatctttttcagacttagcaacgggtgaatgggttctgatagagaagatggcagcttgcatcattgctcaaatcatacgccgcagggsaaatgaggggcaggacactttgctgtctgcaatggtttctttttctttgaagggttagcaccatgaagatcattgtcttttcaactgtcttccccccaggttcctgggctctgagttggtgcaccctgtcccattgagtcaaagccatttgcaaagaaaaattcaggttaatcttggcacgtggcctttcacagcactcagggacaatttccagcctcacactcttaccatctgtctttgtgtagagaataaaatgaggtctctgggaaaaggaaatggaatgtaatcctcataaggctggcatcatcatccccttttgagaaatgaggaaactgaggcctagagaggttagttaacttgccccatgtagatttgaaatgttgggtagggtaggggatagcttctggcactttcaaattgatgtagcacttggaaggccaggagtcttccacagacctcttaccaatcactctggagagaaaactgtctctttcgcaaacaagtaggaacatctttgcccatcactttttggaaaaaccattaaaaccagagcaggccaagcatggtgactcatgcctgtaatcctagcactttaggaggctgaggcaggccaattacttgaggtcaggagtttgagaccagcttggccaacatgtgaaaccctgtctctacaaaaaagacaaaaattagttgggtgtggtgacagacacctgtaatcccagctacttgggaggctgaggcatgagaatcacttgaacctgggtggcagaggtttcagtgagctgagattgggccactgcaccccagcctgggtgacagagtgagagcaagactctgtcttgaggaaaaaaaaaatcccagagcaaagcaactctgaaaggagttttgggcttaaaaaaaatgagtattatatttacttaaaaaaacttgatgactccggtttgagggcaggaatcacctaggagttggattaactgcccttcccataagaaaagaatttctgtttatgccaagatgagaggggggtggatagggtaggttggtgggggggacacaatgaggtaatggagggtctgcttattatcacaaacagaaatggtgattaacagaccttccttgtgtgtctcccaagccttccataacttataccagtaactagcatgggctgctggtagtgcattggcctcttgtgttagccacaagagaggctgacttttgtgcaggat

SEQ ID NO: 670809 - DNA, 1486 bp, Homo sapiens
tggagcaggaggcagaaaattcacagtgtttctgggcttactgggagggctggaggagccataaacccagttagtgtggccaccattctgttcttttcaaaagcagaataaacttgtattccgcgtgggaggatggagcaccaagctgcttcttaaaactgaaggttaaagacatctttttcagacttagcaacgggtgaatgggttctgatagagaagatggcagcttgcatcattgctcaaatcatacgccgcaggggaaatgaggggcaggacactttgctgtctgcaatggtttctttttctttgaagggttagcaccatgaagatcattgtcttttcaactgtcttccccccaggttcctgggctctgagttggtgcaccctgtcccattgagtcaaagccatttgcaaagaaaaattcaggttaatcttggcacgtggcctttcacagcactcagggacaatttccagcctcacactcttaccatctgtctttgtgtagagaataaaatgaggtctctgggaaaaggaaatggaatgtaatcctcataaggctggcatcatcatccccttttgagaaatgaggaaactgaggcctagagaggttagttaacttgccccatgtagatttgaaatgttgggtagggtaggggatagcttctggcactttcaaattgatgtagcacttggaaggccaggagtcttccacagacctcttaccaatcactctggagagaaaactgtctctttcgcaaacaagtaggaacatctttgcccatcactttttggaaaaaccattaaaaccagagcaggccaagcatggtgactcatgcctgtaatcctagcactttaggaggctgaggcaggccaattacttgaggtcaggagtttgagaccagcttggccaacatgtgaaaccctgtctctacaaaaaagacaaaaattagttgggtgtgrtgacagacacctgtaatcccagctacttgggaggctgaggcatgagaatcacttgaacctgggtggcagaggtttcagtgagctgagattgggccactgcaccccagcctgggtgacagagtgagagcaagactctgtcttgaggaaaaaaaaaatcccagagcaaagcaactctgaaaggagttttgggcttaaaaaaaatgagtattatatttacttaaaaaaacttgatgactccggtttgagggcaggaatcacctaggagttggattaactgcccttcccataagaaaagaatttctgtttatgccaagatgagaggggggtggatagggtaggttggtgggggggacacaatgaggtaatggagggtctgcttattatcacaaacagaaatggtgattaacagaccttccttgtgtgtctcccaagccttccataacttataccagtaactagcatgggctgctggtagtgcattggcctcttgtgttagccacaagagaggctgacttttgtgcaggat

SEQ ID NO: 670810 - DNA, 672 bp, Homo sapiens
gcatccatttcccgtcttttccatgtgtcaggaaataagatgaaattaacttgcacagtaattaacaagtgtcaggctagtgaaatgccatgcaggactatgcattctagactgctactgagagtggcagcagcggtacaactgtccttcctgaaatccagtttattttattttattttattttattttattttattttattttattttattttatttagactgattctcrctctatcacccaggctggagtgcagtggcacgatctcggctcattgtaacctctgcctcccaggttcaagtgattctctagcctcagcctcccgagtagcctccctgggactacaggcatgggccaccatgcccggctaatttttgtatttttagtagagatggggtttcaccatgttggcaaggctggtcttgaactcctgacttcaaatgatctgcccacctccgcttcccaaagtgctgggattacaggtgtgagccacagcactcagcctcaaaatccagttttaaattccaaatatttcctgctctcgtcaaataacccatcttgcaattaggaattattctggctttcttacctcttacagaatacatatttgtctctgcatggcagtttctcagtctataaagtggacttaggcagataactcaggaacgaata

SEQ ID NO: 670811 - DNA, 672 bp, Homo sapiens
gcatccatttcccgtcttttccatgtgtcaggaaataagatgaaattaacttgcacagtaattaacaagtgtcaggctagtgaaatgccatgcaggactatgcattctagactgctactgagagtggcagcagcggtacaactgtccttcctgaaatccagtttattttattttattttattttattttattttattttattttattttattttatttagactgattctcactctatcacccaggctggagtgcagtggcacgatctcggctcattgtaacctctgcctcccaggttcaagtgattctctagcctcagcctcccgagtagcctccctgggactacaggcatgggcyaccatgcccggctaatttttgtatttttagtagagatggggtttcaccatgttggcaaggctggtcttgaactcctgacttcaaatgatctgcccacctccgcttcccaaagtgctgggattacaggtgtgagccacagcactcagcctcaaaatccagttttaaattccaaatatttcctgctctcgtcaaataacccatcttgcaattaggaattattctggctttcttacctcttacagaatacatatttgtctctgcatggcagtttctcagtctataaagtggacttaggcagataactcaggaacgaata

SEQ ID NO: 670812 - DNA, 672 bp, Homo sapiens
gcatccatttcccgtcttttccatgtgtcaggaaataagatgaaattaacttgcacagtaattaacaagtgtcaggctagtgaaatgccatgcaggactatgcattctagactgctactgagagtggcagcagcggtacaactgtccttcctgaaatccagtttattttattttattttattttattttattttattttattttattttattttatttagactgattctcactctatcacccaggctggagtgcagtggcacgatctcggctcattgtaacctctgcctcccaggttcaagtgattctctagcctcagcctcccgagtagcctccctgggactacaggcatgggccaccatgcccggctaatttttgtatttttagtagagatggggtttcaccatgttggcaaggctggtcttgaactcctgacttcaaatgatctgcccacctccgcttcccaaagtgctgggattacaggtgtgagccacagcacycagcctcaaaatccagttttaaattccaaatatttcctgctctcgtcaaataacccatcttgcaattaggaattattctggctttcttacctcttacagaatacatatttgtctctgcatggcagtttctcagtctataaagtggacttaggcagataactcaggaacgaata

SEQ ID NO: 670813 - DNA, 700 bp, Homo sapiens
agcgaaaagaaactgcatgctggaaactggagttttagctccctgatttgctgtgtgatttttgtacattttctttatcttctctggaactctatttatctgtaaaattagataattaaaagacatagcaaaatgttttcacttttctgtggcaattctgaatggttggatgtggagctctggaactttgtattgaaaaagacttcaatgacgtggggaagtcagttcacacaggctcatgagagctgactgagcatgtcacttaccaactgcatttggcaatgctacattggtagcttgacgtcagccatgttgggaaaatttacaccatgggtgtctgccagctatgaaccagggttcaccccagcctcaccaaaagtgggttgttaaacactcttcaytgcaccactcatttcaaaactccacgggaaaaagaacaactgttttctgtaatacttgccagagcctcaggaagacgataaaaagcaatgagtgatgaatgtacatttgccatctctggttagttgatttctgtcatgttcccttcactgataatcttggcatttctgcatttttagaagaaaaattgcttcatcagggaaagggttgttagcacaggcttccactctgaaataaaagacatcctgaggtccagtttatcatctggtgaccatagtctcttgtctctgttttttgtaat

SEQ ID NO: 670814 - DNA, 700 bp, Homo sapiens
agcgaaaagaaactgcatgctggaaactggagttttagctccctgatttgctgtgtgatttttgtacattttctttatcttctctggaactctatttatctgtaaaattagataattaaaagacatagcaaaatgttttcacttttctgtggcaattctgaatggttggatgtggagctctggaactttgtattgaaaaagacttcaatgacgtggggaagtcagttcacacaggctcatgagagctgactgagcatgtcacttaccaactgcatttggcaatgctacattggtagcttgacgtcagccatgttgggaaaatttacaccatgggtgtctgccagctatgaaccagggttcaccccagcctcaccaaaagtgggttgttaaacactcttcattgcaccactcatttcaaaactccaygggaaaaagaacaactgttttctgtaatacttgccagagcctcaggaagacgataaaaagcaatgagtgatgaatgtacatttgccatctctggttagttgatttctgtcatgttcccttcactgataatcttggcatttctgcatttttagaagaaaaattgcttcatcagggaaagggttgttagcacaggcttccactctgaaataaaagacatcctgaggtccagtttatcatctggtgaccatagtctcttgtctctgttttttgtaat

SEQ ID NO: 670815 - DNA, 1316 bp, Homo sapiens
cattcagtgatgctagtttgtagtaaagcattcttattttcaagcaggctaaatggataagatctgcttggaattggccatagatgtggaagagaagggaacagagaggaaagaaacagcatgggtttttcttgctgcgcatccatttccctgctctagcagcagcttggtggcctgggactagggttgtgaactattgaggctacaagatgtcttcctctgttgatagaagagcaaatataatagaagtctttttttttttttttttgaaatggagttttgctcttgtcgcccaggctggaatgcaatggcgcgatctcaactcattgcagcctccacctcctgggttcaagcgattctcctgcctcagcttcccgagtagctgggactacaggcatgggccaccacacccggataatttttattgttgtttttttttttttttttttttttgagacagagtcttgctgtgtcaccccagactgaagtgcagtggcgcaatctcggctcactgcaagctccgcctcccgggttcatgccattctcctgcctcagcctcctgagtagctgggactacaggtgcccaccaccacacctggctaatttttttgtgtttttcagtaaagatggggtttcactgtgttagctaggatggtctcgatctcctgacctcgtgatctacctgcctcggcctcccaaagtgctgggattacaggcatgagccactgcaccaggccaatttttgtatttttagtagagatggggtttcactatgttggccaggctagtctcgaactcctgacctcaggtgatgcacccacccagcctcccaaagtgctggatttacaggggtgagccaccgcgcccggccaatagaagtcttaatactcctaccagaaktctgtaagcacttggagagacagggacagtggttatttggtgtttggtaaatatttattgaataaataaatgaatggctcttggtcctgaattttgttccgttttgattaactgtcccaaagtttactagaatgatggtgaaatctcttttttggagaaatttttgccagtgttttcattttggtgcagcaggttgaaatatatatgaaatatgctgggaaaatgttttaatttagcaaagtcagaaacttgtcctaagaggaatagctttacttgtttaaggttgctgttatgtgatgctatttctgagatattatatctgcatgttgcaggaaagctgagtcagagtaaaaataacccatattgttttagagagccatttatgttgtatcagcttgataacttaaaattagctg

SEQ ID NO: 670816 - DNA, 646 bp, Homo sapiens
tgtctttcagaagttcatacatctaaaacatgtctttgtttgtgttaccaggttcagaagaggaatttcatagaaaatattattccaattatcatctccctgaagactgtgctggagaaaaataagatcccagctttgcgggaactcatgcactatctcagggtaagggtggagcctgtgcttttgtggttgttgtcctaccagttcattacttaggatcttctgccagttatgacagtgcaggcaatccgtgaatgattagaaccccaaattctgcaaacccaacattaccttggtaactgctgtggagctaggggttggctgtgggttccaccaaagccgctctttcccttggatgtgcagccagggccgtgaagagccggcccactgtgccaagcacgtcttcccttaatggagttcaagtccatctggaaaactttcccagctggggtcaagaacacagtcatcttcgttcatgctgcttgggggtaaggtgaaagtgagtcttcgggtttgatttcagggtgcttaccttttgcactgactcagattcacaaggtcaggaaataactgccctgcaggagctgccttsggagctgccatcaccaggctgaattctttgtcaagcaaggggaccatgaggagc

SEQ ID NO: 670817 - DNA, 1302 bp, Homo sapiens
gcaggagagctcagtcagcatactgactagccaaattaagtggatctggttcagtgtttcttaaccttttttgcattatccgtctccccaaaagtctctttagacattttcttcctaatcactcccaattcygatactgcagacagactctacatttgcttatgtaccgtgactcttcagtggcccaaaagccattgtaatacctaaagcattctttttgcccttggagaaactatttttacactcttgggggctacatcgtccccactgagaacctatggtctagatgcagttggccagagctcagggagcctaatggagagctgagacatcagcggggtgaggccaggaccttggagagcaccgaagtggccctcctgaggccattccaaggctccatgtcgcctgaaaatatgtctgaaaggaagaggcaggtagaggcaggggctaggaaactagtattagtattatcttactagatgtcgtaggaatcatcagaatgtgaaggcctcctaattctctttcataaaaagttcttgtggggccggcactttgtgggtgcggactttaattctcaaggcccaaggcagttaaatggcacattttcaggtagtctaaggatttcagggtctttattaagagtgcaattccacaggacttggaggttttccgaggtttaaaggtatcagattaattcttccttcctcaccctccactgctggctgggttatgatgccacatttatagttttacagtgcctgctgtgacttgaagacaataggcactatttaccatgtgccagacagacactgtgctaagcatattagtgagctattttatttaacctgcttaagaatcttctcaggtgggtatgatcattgtccaaggataagagaggttagcaaacttgctcaggatcacacagctgataattggggaagcgccagaccttgaacccacatagtcgacttcagagcctcactgcttaaccagcatgctatactgccaccagattgactcagtggccctggtaaggtttttgtttttaaaaatcccattaatatccttagcacaggactatcatctcccctactcaactttcccagagatacctctgtgacccaaggtttatacttctgccctctcctcaggagaacttaaaatttgtcatgtcactcctatgcttaaaacttttcaatagctctccctgtccccctcagaataaagtccaaattctttctcatgccttataaggcccctcatgatcggccccttcttataaggccagacttgtcgtctttt

SEQ ID NO: 670818 - DNA, 1364 bp, Homo sapiens
tgatccacctgcctcggcctcccaaagtgctgggattacaggtgtgagccactgcgcccagccaaaagcagttctttaccttgcaacccaggctgggcagtccagctttttcctgtttctgaaaagtagtcacctctagggaataaaatggcttcttgagaatgctgatatgcacagcagaaggaagaaaggaaaaccaatccaaggaacggcttgtatgttcctggagcagagggcttcatgctcacaggtgcacaaagtggaaacggttttggtttttggtttttccttttagcttttaatacttttaaaattatttttcttgaraccgggtcttcctctgttgcccaggctggagtgcagtggtgtgattgcagctcactgtagcctcaaactcctgggcataagtgatccttctgcctcagcctccgagtagctgagactacaggcatgcatcatcacgcctggctaattttttttagttttatttttgaagaggccggtctcactatgttggtcagggtggtctcaaactcctgggctcaagcgatcctcccaaagtgctcggattacaggcatgagccaccacacccagcctagcttttactatattttatctgataatccttttatggaaaaaagaagggcagactcttttacagtttgaagaagctccatattccatcaggagccatcttgagcaatacttgggtttctaagagctccccagagccagttctccagctcaccttgctttctaatctaaggttgccctcaccttggacaagaagcacgagtccctcagagtaattcagagtatccaaactcaaaagtctatgtacatggaggccttgctagaccttaatggtgacattttcatcaatatccggttttctgccatgagtccctatccctctttttcttaacatattcaagccagaatattttttcagccattctgtaactgcacagtttcttccaagtctctactttgtctcccattaactaggatccaatatatttatgtatttatttattttaatttttgagacggagtccccctctgtcacccagcctggagtgcagtggtgcgatctcaccccactgcaacctctgcctcctgtgttcaagcgagtcttgtgcctcagcctcccgagtagctgagattacaggtgcccgccaccacacccagctaatttttgtatttttagtagagacggggttttgccaagttggccaggctggtctcgaactcctgacctcaggtgattcacccacctcggcctcccaaactgctgggattatagatgtgagccactgcacccagcctcaatttatacaatttatcctcactgttctctttg

SEQ ID NO: 670819 - DNA, 649 bp, Homo sapiens
tgtctacaaccttgaagacataatgctaagtgaaatcagccaatcacaaaagaacaaatcttgtgtgattccacttacatgaggtatctcagatagtcaaattcatgaagatagaaagtagaatggtggttgccagagttgggggagggaagaatggggagtttgtgtttaatgggtataaagctgggatagatgaaaaaattctggaggtggatatgatgacagctgtacatcaatgacaatgtgcttagtgccacagaagtgtacacttacaaatggcaaaattttatattacttatattttataacaatacaaaattggtggtgaagtaagtcagagtgtgctttgacttggagaagtaaggaaaaactcacctgctgcagaatagmtccctggcccagggtcaacagtgttaaagccaactaaatatggcctgagaaggactccgtacttctacatttgagtccttgtggatgaactgtaacccaacttagtgggtaacaagactgaaacccgaacttaggagtatgtgcctgtaaaaataggtgagtcttggccaataccagaagccatacttcaaccagtcatatgcttctgagtgttcaaactgtgttcaaataaggtaaatgacaatctgtaaccaattca

SEQ ID NO: 670820 - DNA, 589 bp, Homo sapiens
ataggtgcacaccaccaggcccagctagtagagacagggtttcaccatgttggacaggctggtctggaactcttgacctcaggtgatccgcccaccttggcctcccaaaatgctgggattacaggcatgagtcaccgcacctggctggttttctggggctagttttaggggtctagaatctctaaaaaggttaagagyagtatgtctagggcagcacttccagtagagctttctgtgaggatgatgttcctttgtgctgtccagtacgacagccattagccacatgtggcagttgaatacttgaattgtggctagagtgactgaggaactgaatttatacctttacttaactttaattaactaaaaattaaatttgagtagctctattggcaagtggctagcatagagactagattaggaatctgcaccctgggttcagatcctgttcgttttctggtcttagtgcaattaacttttcaatgcctgtgcctctcactgacttgacgtggtcaaatacgatgatagagctgaacagattctgagtttttagaagaaagatgctttaaaatacaaaagctacttttctcca

SEQ ID NO: 670821 - DNA, 589 bp, Homo sapiens
ataggtgcacaccaccaggcccagctagtagagacagggtttcaccatgttggacaggctggtctggaactcttgacctcaggtgatccgcccaccttggcctcccaaaatgctgggattacaggcatgagtcaccgcacctggctggttttctggggctagttttaggggtctagaatctctaaaaaggttaagagcagtatgtctagggcagcacttccagtagagctttctgtgaggatgatgttcctttgtgctgtccartacgacagccattagccacatgtggcagttgaatacttgaattgtggctagagtgactgaggaactgaatttatacctttacttaactttaattaactaaaaattaaatttgagtagctctattggcaagtggctagcatagagactagattaggaatctgcaccctgggttcagatcctgttcgttttctggtcttagtgcaattaacttttcaatgcctgtgcctctcactgacttgacgtggtcaaatacgatgatagagctgaacagattctgagtttttagaagaaagatgctttaaaatacaaaagctacttttctcca

SEQ ID NO: 670822 - DNA, 931 bp, Homo sapiens
gaaatggaatagttgatagacctcttctcaaaatcatttccccaatggtctctcttcctttggaacggtggctcagggaatgataaaatgcaaggaggccgtcaaagggaaatggctggtcttcctcatccatggaaagcacattttgggaggatctcctcctctgacacagatgagtccttgggacaaagctcaggtcaaaactggaaatctatttcacagtaggtttctcatgcacatttggggtcttttcaatggcaaaactgggacaagtcatgtcgaggaccactaaytttaaaagtaaattagaaaccctccacagaacacagattacctaaaaaagcggcatgatttctcttttgcgaaagccagcaggggcgggcagaagaggaagaatatgacttctcaaacaatatacaggcagggcacaggggctccagtctgtaatctcagaactttgggaggcggaggagggagaattgcttgagcctaggagtttgagatcagcctgggcaacacagtgagacccccatctttacaaaaaaaaaaatgagtggggcatgctggaatgcacctgtggtcccagctatttaggaggctgaggagaaaggatcgcttgagcctaggaggttaaggctgcagggagctacacttgagccactgcactctagcctgggtgacagagtgagactgtgctgcaagaaaagaaaaggaaaagattacagaattcacagaccgtcccatgcccttaattacacaatacataaataccttttgttagaaaaattgtagacaagattaaagttgcatgtgatcactatccttaacccccattgcccctctaacctggaaatcctagtatattgagtatccttccagatctttactctaagcatgattatatactatgattttattattattaattttt

SEQ ID NO: 670823 - DNA, 931 bp, Homo sapiens
gaaatggaatagttgatagacctcttctcaaaatcatttccccaatggtctctcttcctttggaacggtggctcagggaatgataaaatgcaaggaggccgtcaaagggaaatggctggtcttcctcatccatggaaagcacattttgggaggatctcctcctctgacacagatgagtccttgggacaaagctcaggtcaaaactggaaatctatttcacagtaggtttctcatgcacatttggggtcttttcaatggcaaaactgggacaagtcatgtcgaggaccactaactttaaaagtaaattagaaaccctccacagaacacagattacctaaaaaagcggcatgatttctcttttgcgaaagccagcaggggcgggcagaagaggaagaatatgacttctcaaacaatatacaggcagggcacaggggctccagtctgtaatctcagaactttgggaggcggaggagggagaattrcttgagcctaggagtttgagatcagcctgggcaacacagtgagacccccatctttacaaaaaaaaaaatgagtggggcatgctggaatgcacctgtggtcccagctatttaggaggctgaggagaaaggatcgcttgagcctaggaggttaaggctgcagggagctacacttgagccactgcactctagcctgggtgacagagtgagactgtgctgcaagaaaagaaaaggaaaagattacagaattcacagaccgtcccatgcccttaattacacaatacataaataccttttgttagaaaaattgtagacaagattaaagttgcatgtgatcactatccttaacccccattgcccctctaacctggaaatcctagtatattgagtatccttccagatctttactctaagcatgattatatactatgattttattattattaattttt

SEQ ID NO: 670824 - DNA, 947 bp, Homo sapiens
gatttaatgtgagattatgaggtgtttttgaattctgttttaaaagttgataacgaatttgctgtatcagctgttacttatatcttgtatttgacaaaatgtggcaaaatttgattgaagccgattcttttctttccagagtatctttagaagatctgtataatggcaagacaaccaaactacaacttagcaagaatgtgctctgtagtgcatgcagtgggtaagtgtgtcttctggtttattgggtacattttgtctgttcttttaagtatcacactgaatgtctgtaccacgtaaaaattgttataagttaaaacttacggctgggtgcggtggctcacacctgaaatcccagcactttgggaggccgagtcgggtggatcacctgaggtaggagaatcgcttgaacccgagaggtgaaggttgcagtgaaccaagattgcgccactgcactccagcctgggtgacagagtgagactccatctcaataaataagtaaaaaaatcttagcagaatgttttctgatacttctggaagtcaatttaaatacaagttattggggttgaagatgaaggtaaaagcacaatttytgtgtgtcatagcttattggagtggtttgtggacaaaaacctaatgcataacttgtgcttgctttagccaaggcggaaagtctggagctgtccaaaagtgtagtgcttgtcgaggtcgaggtgtgcgcatcatgatcagacagctggctccagggatggtacaacagatgcagtctgtgtgctctgattgtaatggagaaggtatgtgtgccagtacttctctgcttttatgttggaatggattgggaatgcagatattggagaggtttacaattttttatttcaaagggtatttgtatacatcttattaaagaaaaaggaggccgggtgcgttagctcattcctataattccagca

SEQ ID NO: 670825 - DNA, 653 bp, Homo sapiens
ccaactagctgggattacaggcggctgccaccacacccagctaatttttgtttttcatcaggcatttttattaacatgttgtaacattcaaggggaaacaggacccagaactatgcacccccgtcaaccacataaaaatattctcaggaaaagaacagtaaagaaatattcccagaatgttagacttgattaactctggttagaggatcacagtgggtttcacattttctttattttctggtttttccatataagcatgtttactttgataaaatattttttgagaatttcacacttttatgtaatatacacttttatggtctgtctttgttctaaacattactgggattctgggttgctttttgtttttgcttttaagagatagggtctctcttaaaagcagtagcatgatctcgactcactgcagcctcaacctcccgggctcaagtgatactcccacctgagtctcagagtagctgggactacagacatgtgccaccacacctaatttttgtgtttttgtagagacagggttttkccatattgcccagactggtcttgaactctgggctcaagcaatccacctgcctcagcatcctgaagttctgggattacaggcataaatggattgggttttatttttgttgttgttg

SEQ ID NO: 670826 - DNA, 548 bp, Homo sapiens
cttgaggtcaggagtttgagacaggcctggctaacatggagaaaccctgtccctaccgaaaacacaaaaaagccaggcatggtggtgtgtgcctgtagtagtagctacttgggaggctgaggctggagaatcacctgaacctgggaggcagaggttgcagtgagccgagattgcaccactgcagtccaaactgggtgacagagtgagactctgtctcaataaataaataaataartaaataaataaataaataaataaataaataaaataaaaatatatatgtatgtggcgggacctgggcaatgggtgttttgagagaagtacatataattgaagaaaacaggaaaacaagataatgatgatataataaatattaattttggcttaagaccagtacatttaaaggtaaaattgaataaggcaaaaataaattctatcaaaaataagcttatcctggaaagtcctgtttagaaagagccagctgatctggattaatctaataaatgctgaatccaaagaaatgtacctgaatacagaattgtgtagat

SEQ ID NO: 670827 - DNA, 2242 bp, Homo sapiens
tatgatttactctgcataatttgttatgatctgccctccaattttcgaaaccttctatctgttgttgctatttatatatatattttttaatttggaatattatgttttttactatttcttaagttttattcacgtgaaaactctacaarttgtattgtataaaagctaatgtccaggatttgcaagttttattctagttatgcaagatgttaacattaggggaagctgaataagagatatatgggaactctctgtactgttcttacaacttttctgtaagtctaaaattggttcaaattaccttttgttttttttaaagcaatgtatcatactagatagtaatccagcatgtgtgattaatgtaactttaaaaatgataaaaatatactgacccaaagaagacagcaggtgctcattagaagtatgaaattctcattaataattcaactccatatacagaaaccattcccacagtagaaagaagggacccaaatcagttatagatttcaaaaacttctctaaatctaaagcaaatgtctcagaccagaaacttcttttatgttttcctagaaaatgtagaacccagaagctatagcccctgcacttccttctttttattgttttcctctacttctctttctattcttccttttattaacattaagtatagttagatagaaattaccatagcagatttttttcctcaagtaagtaatactcaaagcttccagtataaaaatattatcttgcaaatgtgctaaatgaagcataattaaatttgccatggaatcattccaaagcagtgagggtgggctctcccgtctgtaatgtacccccttccatcctctctcttacttcatttcctgtgcttttatttctttgaattgttggctctgcctaaatgcagaacagagtagactgtagaaatagttcttggcccacttcagaaaccagcatcaatttagttgaagcattcttaatctgttttctggataatgtagtccatgaatctggtaatctgtttccatctccctactctgattagaagcttttagttaaccctatctttcaccttcccttgcctggttcaggtcgcttcagtctgcacattttcaagtgcactagagggatgtgggaagttaagcaaaagcctggtgtatgacatcattatctgattttggagcttgagcaagcatcacctactcatatacagaacatgcccaggtaggcacacatacaaacacacacatatacacacagggaccagagaatggcttctaaggggctaacttccttcccagaagcctccatttcacacttcaagtagcagctgtgtctccattgcaaaccagggattccgggtctctgttcatctcataaggagcacccacctgctcccgcagacacccaggagccagggagaagtcggcttctcccgccttattgccagttcaatgagccttctgagagagaaacagctcatttctcttaatcagtagcaatgactttcaagagtctgatggcaccaattgatgaagtaagtcaagagggagaagctaatcatgaaggatgtgccttgtgccgggtgtgtgttatttatagaaacctcagcagacaagaatacattaacattattaagctaaatctaccctgtgattctgagttcttgttactgacaaattctcccttcactgcttactatattattctataacaatcaatgctatatttattttaattaaaattgtgtgctgaaatagagtgtttctcttctttttttctcctctaaaaaactgttgatctggatgtccctagcaagtcatagaaagatgaaaaatgttttaaaaaaaataacgtggatagaaacgtcaccttttcctaagtaaaatgattatttctacatttaaaatgatattactttgcaaagggctatcataacaatacaatctatttaacagcaaagatacgtatgaaaagaaggatacagacaattaagtagaaacttaaagacattaagacccagagaggaaatttaataactctaacaatgggacgcagagccaatcctatttccagtctagggtgctgttcttgtcatgaaaatttgcaaattagttttgtcattttggttctcatttctcaaaatacaaaacctgcaacacaaaaagttctcagtacaatcaaatatccagtcagtgtttaaatttccataattgcctaattaattaattagaacagtttg

SEQ ID NO: 670828 - DNA, 2242 bp, Homo sapiens
tatgatttactctgcataatttgttatgatctgccctccaattttcgaaaccttctatctgttgttgctatttatatatatattttttaatttggaatattatgttttttactatttcttaagttttattcacgtgaaaactctacaagttgtattgtataaaagctaatgtccaggatttgcaagttttattctagttatgcaagatgttaacattaggggaagctgaataagagatatatgggaactctctgtactgttcttacaacttttctgtaagtctaaaattggttcaaattaccttttgttttttttaaagcaatgtatcatactagatagtaatccagcatgtgtgattaatgtaactttaaaaatgataaaaatatactgacccaaagaagacagcaggtgctcattagaagtatgaaattctcattaataattcaactccatatacagaaaccattcccacagtagaaagaagggacccaaatcagttatagatttcaaaaacttctctaaatctaaagcaaatgtctcagaccagaaacttcttttrtgttttcctagaaaatgtagaacccagaagctatagcccctgcacttccttctttttattgttttcctctacttctctttctattcttccttttattaacattaagtatagttagatagaaattaccatagcagatttttttcctcaagtaagtaatactcaaagcttccagtataaaaatattatcttgcaaatgtgctaaatgaagcataattaaatttgccatggaatcattccaaagcagtgagggtgggctctcccgtctgtaatgtacccccttccatcctctctcttacttcatttcctgtgcttttatttctttgaattgttggctctgcctaaatgcagaacagagtagactgtagaaatagttcttggcccacttcagaaaccagcatcaatttagttgaagcattcttaatctgttttctggataatgtagtccatgaatctggtaatctgtttccatctccctactctgattagaagcttttagttaaccctatctttcaccttcccttgcctggttcaggtcgcttcagtctgcacattttcaagtgcactagagggatgtgggaagttaagcaaaagcctggtgtatgacatcattatctgattttggagcttgagcaagcatcacctactcatatacagaacatgcccaggtaggcacacatacaaacacacacatatacacacagggaccagagaatggcttctaaggggctaacttccttcccagaagcctccatttcacacttcaagtagcagctgtgtctccattgcaaaccagggattccgggtctctgttcatctcataaggagcacccacctgctcccgcagacacccaggagccagggagaagtcggcttctcccgccttattgccagttcaatgagccttctgagagagaaacagctcatttctcttaatcagtagcaatgactttcaagagtctgatggcaccaattgatgaagtaagtcaagagggagaagctaatcatgaaggatgtgccttgtgccgggtgtgtgttatttatagaaacctcagcagacaagaatacattaacattattaagctaaatctaccctgtgattctgagttcttgttactgacaaattctcccttcactgcttactatattattctataacaatcaatgctatatttattttaattaaaattgtgtgctgaaatagagtgtttctcttctttttttctcctctaaaaaactgttgatctggatgtccctagcaagtcatagaaagatgaaaaatgttttaaaaaaaataacgtggatagaaacgtcaccttttcctaagtaaaatgattatttctacatttaaaatgatattactttgcaaagggctatcataacaatacaatctatttaacagcaaagatacgtatgaaaagaaggatacagacaattaagtagaaacttaaagacattaagacccagagaggaaatttaataactctaacaatgggacgcagagccaatcctatttccagtctagggtgctgttcttgtcatgaaaatttgcaaattagttttgtcattttggttctcatttctcaaaatacaaaacctgcaacacaaaaagttctcagtacaatcaaatatccagtcagtgtttaaatttccataattgcctaattaattaattagaacagtttg

SEQ ID NO: 670829 - DNA, 608 bp, Homo sapiens
atcctagcactttgggaggctgrggcaggcagactgccgagctcaggagtttgagaggagcctgggcaacacagtgaaaccccgtctctactaaaaatacaaacaattagctgggcgtggcggcctgcagctgtagtcccagctacttgggaggctgaggcaggtgaattgcttgaacccaggagtcagaggttgcaatgagccgagatcacaccactgcactccagcctgggctacagtgcgagacaacatctccaaaaaaaaaaaaaaaaggagttttgtgttaaatagccaatcaaatgcaaacatatagtaaaataatttttaaaaaccatgactgatctatccagctgctgaaaacacacacacacacacacacacacacacacacacaccatgattgaataaggtttatcccaagaatgtcagtttggtttaactttcaaaaatcaatcagcatagttcactacattaacagactattataaaaaagtaaatataatgagaacagggtttacagaggctgatgttgttagatattttggagaaagatgccaaagaggaggactctgtacagacaattccggaaatctgcagatagtctctaa

SEQ ID NO: 670830 - DNA, 608 bp, Homo sapiens
atcctagcactttgggaggctggggcaggcagactgccgagctcaggagtttgagaggagcctgggcaacacagtgaaaccccgtctctactaaaaatacaaacaattagctgggcgtggcggcctgcagctgtagtcccagctacttgggaggctgaggcaggtgaattgcttgaacccaggagtcagaggttgcaatgagccgagatcacaccactgcactccagcctgggctacagtgcgagacaacatctccaaaaaaaaaaaaaaaaggagttttgtgttaaatagccaatcaaatgcaaacatatagtaaaataatttttaaaaaccatgactgatctatccagctgctgaaaacacacacacacacacacacacacacacacacacaccatgattgaataaggtttatcccaagaatgtcagtttggtttaactttcaaaaatcaatcagcatagttcactacattaacagactattataaaaaagtaaatataatgagaacagggtttacagaggctgatgttgytagatattttggagaaagatgccaaagaggaggactctgtacagacaattccggaaatctgcagatagtctctaa

SEQ ID NO: 670831 - DNA, 634 bp, Homo sapiens
tggcatagatattcaaacaggattttcttcgtaggaaacccctgtatccattttacattgttaactaagtgatcaaatgtaacatcactgataaagtaacaaactgacatcatgtgtctcctgttatgatgggattaaaggtacagaaaattaactaaattgtactcttgggggaaatgattaagttgaatctaagcaaaaggaaatgaaatcagataatattgaagtgatgagacattataatcgacaattggactgaactcttcaaaaataccaatattggctgggcgtggtggttaacgcctgtaatcccaacactctgggaggccgaggctggcagatcatctgaggttaggagttagagaccaacctgacaaacatggtgaaaccccatctctactaaaaacaaaacaaaacaaaaaaaacaacagaattagcctggcgtggtggcgcatgcctgtcatcccagctacttgggargctgaggcaggagaattgtttgaacctgggaggtggaggttgcagtgagccgaggttgcaacattgcactccaacctgggcaacagagcgaaactccatatcaaaaaaataaaataaaataaataaaataaaataaaataaaataaaatacaaa

SEQ ID NO: 670832 - DNA, 526 bp, Homo sapiens
tttaatttgttctaaaagtacataagaaagtgtgatttttgagtatttaagcacatctggttactaatagaagacaagagacttaatagaatgttgatcctgtaaaagctgagctcacatcatcaacaaaaaaaaatttcaatatgaaatattttgtcctagtaacaaatcaccttgaaacatagaggtgtgaaacaatgtttttgtcatgcttagagtatgtccaaaaatttagatgaagcacaacaggaatagcttgtttctaccccacgatatatttgagttctcttctgggacgtttgaagtttaggggaaactcaatggccaaaaggcaatcatcgggagttctttttttttaatttttatttttttttagagtggggtctcactctgttgcccaggctggagtgcagttgtgtgatyatagcttactgcagcctcaaaatcctggctcaagtgattctcccacttgagcctctggggtagctggggactgactgactataggtgtgtgccaccatgccta

SEQ ID NO: 670833 - DNA, 661 bp, Homo sapiens
cctttccaaaaaacacttccgtgacaaaaatagcacagarcactaacttgtaattgatgtaagaaattatataagcgcatgaaaaaatgtcaatctcaccagtgatcaaatatattgcaaatgtaagattctctgtatggcagagagtaataattcttcaaaaccatttttctattttttccgcaatatttaatttcctagttttcagatgggtcttgacaaactcaaaataaacactacatctcccagtttctctaacaattagatttgtctaagtgactaatttgtgactaatggatatgaacagaagtttttaaagcaaagttagaattttttttataaagaaaactgcattgttcccttaaatagaaaggaaattctacttcccttcactttttcactttcctccataatgctgtttggacatggtaatggcagtggtgtactaacttagaccaaggtgggtgagagcaaaagttaacagccacagagatctttgaaaaacattgtagaaaaacctactgccagacacgaatcacctctacttcctctaaaccactaagtgagaaaaaaataaatgtctataatgtttacaacacagtttttaaagatctctgctaaatgcaattgaactttagtgctctataagaaacatgtttat

SEQ ID NO: 670834 - DNA, 623 bp, Homo sapiens
aaataaaatttaaattattaggttggtgcaaattaattgcggtttttgctgttaaaagcaacggcaaaaacctcaattactcttgcatcaacctataataatctggacacagaacttgcttagggaaaaatcccaccgtctgataaagtgtaatagatatctaaatttctatttctaatagagctttgtaaaaccgtctcagtggacatgaggcttaagaaatcactataaaatgcaaataacttacccagatcccatatctggcataataataattgttgtaactttgcttgtatttttttctattaatttaagaaactgatacttgagattgtatttttattttactaatatctgtaactacctgtcatttgcattgttttygtttttttcctttcttaaccaaattctgtgagctgatcatttttgttccccacctaccaccacaagattgataataacttgaggtaataaacttagtaagaattgatgcttctgcccagagatggctcgcaaacctgagatttggaatttagcagtaaatatcctttaatgacactatattttcagttgcattgaactgaaattattacagttttatttgaatcaaaaagtggcaaaaa

SEQ ID NO: 670835 - DNA, 584 bp, Homo sapiens
tacacttaaaatgattataatagtaaattctatgttacgtatatatttatcacaataaaaaaataattaaaaaattggttgcagttgctagtgcagcttcagtgcacaaagactggagtatcctagatgtagtaactgtgctgatgtgaaacattaatgcttccagctccacggtggtgcactattagacaaaagtggcagaaagtagatcctcgaataatactaattctactcaaactatgccaaaacaatagggatggaggaaaacttccaaactaattctacaagaccaccattaccttaatatcaaaactagacaaataaaactataggccaatatcagtgatgaacattcatgcaaaaatcctcagcaaactgaagtcaataacctattaaaaagatcattcttcttgatcaggtgggattcatctcagggatccaaggatggttcaatatacagaaataagaactgtaataaatcacattaatagaatcaagtacaaaaaccatatgaacattcaataaattctagaaagagcatttgataaaattcaacacacttcatgataaaaactctcaasaaa

SEQ ID NO: 670836 - DNA, 663 bp, Homo sapiens
tattcactaaacaagggagaaaagcttccctcttcactttagtctgagattgttttcaacaagtttattctgtatcattatatctttcaaaaattaaaaagtaagaccatgcatttaaaagaaaaaagctgaatcagcatttttaactagaaaatataggttgtttgataatacaaaaaccaaagaacaactcaaaaaacaatgaagagttgttctgagcttaagtagtatgcaaattgctttttttttaaatggtagcatgatcaacacgaatgatatttctgggtcttggcacatcaaactacccacagatgaaagatgacttaattgctttgaccacagtccgagtcagaatagctcagttggcaaatataaaaatagcttggtgctatttgcatttgcatttgagcaagaagtgatttcattttaatgcccaaagtctaggtaacaaagcaacccataggtagtgaaacacaccttgcaagcaagaaatgcaattcctggctggagcatctaagggttgcaggggacacattgatcttgtcagctacattcgtgtgcataggaaataacattgtcagcacagctccttcarattcagatcacaatatatcgagagtttatgtcttcagaggttaagcagttaagcattcagagatttgt

SEQ ID NO: 670837 - DNA, 1619 bp, Homo sapiens
ggattacaggcgtgagccaccgcgcctagccgaactgatgtatttattgaatggattcctgtatgataaactccttaaccaagcattctaggcttttgatctctggcttcactttatgtctctcatctaagccccattgatataatacaagaatttgctttagtaaaaaaattccatatgttgctgcagccattttctatggcggtcctttgagcagggagcttgtgaacaggacatggatcttgtaaaagtgaggaagaggcagaactggcgcaggactgtggaagggtggggtaagacttaggtaaccagacagggaagaagagagaactctggaaaagcagatagcctgataaacctttcctttcctctaaaactgtattctgacttaactaagcccacaggtccttcagctcatacaaaaagaaacaagtttcatatcttcataccaattgcccacatacatttgatttacaaagcaattaaacgtatttgattttgatgaattatatctgggtcttactgctacatttttctaacctgcctaggctttttaagtggcttaataagctttattcccttgttcttaggggtgaaaaacaaaaaacagataattctgaccttaacagcctaatatctgaaatattaaaatagtctaggccatatctttcctttcactaaaatactccaccagtgtttaacctgtaagtgaaaatattctccatgtagtctcagttatttcactatgtattggtttttaatatttcatctctgtctcacagtgatcacttagtagtaactaacttcggaaattaatatatttttaattgccaaaaaattgtgtaaagagaaaaataacagaaagagaacctggggtgactttggcttttaactggagctcctggcacagcccacgcctgaggcaaccttggtggtctagcaatatcgtatgcgagtcttccggttgaacagtgaaggacatttgtggatctgtccatgacctctctcctttatgcactgccagtctccggtgtcatcattaattagccttcaggtctcccatttgtctgctagaaagcatctcggataagccaagtcaataaattggagcaggcaagctgcctggcctccggggcgcgtggctctgtggggaccgtcggagggcagccctctcctttgatcatgtggggaagtttaattcttacaggccacgtgggaatcccagcccgtggggctgcagagagggccttggagcacagcagtggagctgctctcgtttgtactggtttcagtttctaatttcaaaaccgcgaagctcagaggcctaggggaattgtttcccattttgcttcrtctttccccaagacttcgcctgcattcttcagtgaattctcacaatgggtggtggaacttcagcacgggaatgaaaatcattatccctatgttctaaacaggagatttgcaccgtggcatatttccgtaaatacagtgcccagcatctgtagcaaataatccccagccatgactctcttgctgttctgaccttgacatgtttcccaaccaattttagtcaaacataaaaataacaaataatatttatgagcctgcttgtgagtgcc

SEQ ID NO: 670838 - DNA, 807 bp, Homo sapiens
gattccttctaaaaaattctgagtatcttccaaagtacatactggccactaaaaaccaatctaaatagcatggtctgtttcttattttacaatttggattgcagaagagattttgcttgagatccatacatttgatcatctgaaatgtgtcaacctaataagaggatcctagagacttgataagtgaaataaatgactgacagtgagtcattggcaaagaaatatttgttggctttactacactggtgttcattataaggttaaattctagcacctgcctttttctcacagttgacccatgctcttaaggacacgttattcttctccacaaatactgtagtactttgttccttatttggagaaatgattttttttcctctaagatatgagatatttcagtagagaataaatattactgaaatataattatacacgcactaataatacctgaaaggcaggagcagaaaaagaagtctgyctggagctgaattttttttctttctttctttctttctttttttttgagacggagtctcattcttcttgcccaggctggagtgcagtagcgtgatctcggctcattgcaacctctgcctcaagggctcaagcgattctcctgcctcagcctcccaggtagctgggattacaggtgcctgccatcacgcccagctagtttttgtatttttagtagagatggggttttaccatgttggccaggctggtcttgaactccagacctcaggcaatccacctgcctcggcctcccaacgtgctgggattacaggcgtgagccaccgtgcccagcca

SEQ ID NO: 670839 - DNA, 1040 bp, Homo sapiens
tgtctctgttcagttttaaattttggtaagtagaataacagattatacattgacatcttgagaacagcagctgtcaaaactgtcagtcaaaaggagattgattccattcaattatttgttaaaccaagaagtttaaagataggaaagaactatgaggccatgcaactcatttaaagtccctctgcttcgcaaatttatttaagatcagcatctgagggcaaaataaaagtttattattatttcatgttaacgtaatagcaaagataaggaagaacaatattgtattaggccattctctcatctctctaaagaaatacctgaggctgggtaatttatttaaaaaaaaggggggagtgtttaattggctgatggttctgaaggctgaacaggaagcatagcaccatctacttctgggggaagacttaggaagcttccagtcatggtggaaggggaagggagagtagagtaggcatgttgcgtggccagagcaggagcaagagagagcaagcagggaggtactacacacttttatattactagatcttatgagaactcaatcgctatcacaaggacagtaccaaggggaatggtgctaaaccattcatgagaaattcacctccatggtccactcacctcccactaggccctaactccatcattggggattacawttcaatatgagatttgggcaggcacacacaggatctatgttctgatgatacatagatgtgataagtgctaaacactggtgattcagaattggtaaaactcaattcgtgtcctcaaggagtgcaccatcttttatggtagtcagctgtgagccaataatgcaaatgtcctgtgatgggtgaagtcactcaaaaggtgtgtaccagcgactgaagtggaaaccagtagctaatattatgcttacatttgacctgcaggctgcaaggcacaaataggtactctcttgccaagttcattaaataaacgggatagccctgagttccacgtctgcggatttctttgcttttgttgactgtgttttcaaaatgtga

SEQ ID NO: 670840 - DNA, 604 bp, Homo sapiens
cttctatagtgagatttgtttttgttgttttaatggtgataagaaattgacgctctcgagtgctacatgcatctcccgcactgtccgaggcttgagggtcccagtggagagatgaagggtgtccgcaggaggatgtttttggtagttggtttgtctgttgctgccctctgttggctcctgatggaaactttaccgccccacttgggtttctttataatgtatagggtttgcagaacttcttccttatatcacaatgccaggggaaacctaaggctgggtcactgagagtattttcataaaggaacacatattaattttttgtaataaacaaagtaatcaatagcacactcttctaaaatggaaggttaagagtgtaggctgrgggttccatgggcctggggtcccatcccagctctgataagctgtccgttctgtaagcctcagagtcttcatctgtatttacctgcatcttattgttgctagagaattaattgagttttacataccatgtgtgataccaatagagcgaacacttcatatacacatgcatttatacaggcagcttccttgcatttgacccactttctaatatagtatagcttaa

SEQ ID NO: 670841 - DNA, 604 bp, Homo sapiens
cttctatagtgagatttgtttttgttgttttaatggtgataagaaattgacgctctcgagtgctacatgcatctcccgcactgtccgaggcttgagggtcccagtggagagatgaagggtgtccgcaggaggatgtttttggtagttggtttgtctgttgctgccctctgttggctcctgatggaaactttaccgccccacttgggtttctttataatgtatagggtttgcagaacttcttccttatatcacaatgccaggggaaacctaaggctgggtcactgagagtattttcataaaggaacacatattaattttttgtaataaacaaagtaatcaatagcacactcttctaaaatggaaggttaagagtgtaggctgagggttccatgggcctggggtcccatcccagctctgataagctgtcygttctgtaagcctcagagtcttcatctgtatttacctgcatcttattgttgctagagaattaattgagttttacataccatgtgtgataccaatagagcgaacacttcatatacacatgcatttatacaggcagcttccttgcatttgacccactttctaatatagtatagcttaa

SEQ ID NO: 670842 - DNA, 414 bp, Homo sapiens
aaagacttgatctggtggtgaataaaacaataaggcgcctctgggttgatctgtcacccatgaggcagcagatacatatttcagctaaatgggtcttgatgagaaattcataaagggatttcctcctgccaactgtctgtccagaattctgacagtgaggtttgccaccatagaaaaacaagctccctatttttttttcctcaaagagcaaaacaaaaacatcataccttggtttccaacttcatttacccaattaccattgctcatgtttacacaattaaatctgcttggcttccagagagagagttaaatgtgactgcagaaaaacaaaaagagaattccgcwgcaggcttatctaagccaaggaagagatgcatccaggagcaagagacactccaattagcccttaaataa

SEQ ID NO: 670843 - DNA, 658 bp, Homo sapiens
ttctttattttttcagcacttttcaaattatactgaaatatattttcagcatacatacaatgagcatcccttaattctacaaaaagcaaaataaaatatgaaacagttaaaagtctattgcaacactataatttgaaggggaaaaaaaaggctaaggacmtacagtaggccactgggcagacaaaggagatcattctgagcctgagtcctcagtatttggtgacccagtagagaggcaagagagggcataagctctaagctttccaccttgggcatagagatgaatgacggtgttatgaaccacaataggaaacgtaggaagaaaggaagaagaatgggttgggaggaaggaaaatacatttagtttggccttgctgagtctgtagtgcccaaagagtacccaggcaaagatgcccagtcgagagctggtgatgtgcaaagctaaaacttgtaggaagaaactgcagtaaaggtatgagggtgggcacagcagtgagtccttgaagccacgggcttcccttaggatgcccaagtgtcctaagtgttctaggaataagcgacagactctgatctcatggaggctcagacccctgggcttcagggctctattccttccacccctaaatgtgacctgaagtggcccctgcctccctcagtc

SEQ ID NO: 670844 - DNA, 1049 bp, Homo sapiens
tctgcttcctactctgttggctgyctgcccctaaggaagagcaaactcattctaaccactgggattctcaaacaattttctcaatggtcataaaatttaggatctttctgaccacctttctgctattttggctaacactggcctttgttgaccctcatatcagtttcctctatactgactctgatccacaccaggtctgttctgtttgaaaaatccaactcaaaatagcttctctgagaaaaggaaatgtgttggttcattcagttgaaaagtccaggactaaatcttgtgctagcgtggtggaatctatatgttttgtgattcctaaggactgtcatctcttcttcttcagcatgtctttctcttgtgctggcttcattgtcaggcaatattgtccaagatggagcaggtgtgcacaccagcagctgtaagtttgtatcttcctcaataattcaggaaagttccagaattgagctgatgtgccatcagtcatataccatatctgaaccagttactggccatgggtatggaatgttccagttggctaggtttacagggtcatgtgtcccaccctaaacccgagggtgggttctgccccaccaaaactgtcacaaactgagagtggatgagagatggtgtcccagagaaaaattatttttattagagaaaaggaaaataaatgtcaggaagtcaaaaaccatacatatctactgcagcacactatacatattttctttgtccttactccatggctttagacaagaatgatttgtattttgttcataggtaggtttatctttctaggaaaataaatctgtttctttggggttttttttagtatcccctttcaaaaaactgttccttttcccaccattgtgggggtaatgaacatctgggtgtaacacttggaagtagagactctgccaaagagaggaagagtcctgactccagagtcagcagatccctgctctgcccttttcaaggcatgctgccttagacaaattattaacctcttgcttaatatctatctcaaagggctactgtagaga

SEQ ID NO: 670845 - DNA, 835 bp, Homo sapiens
gatggcctctttgtgaaaagaccagttccctatgtcttgttcagaattcaagagttgcccctatgtaaacttggctgcagaaaaattcagaaaatgagcatcttggttaaccttttaatgcttattccaagtttaaaggagattaagaaacmaaaaattggctggacgcggtggcttacgcctgtaatcccagcactttgggaggccaaggcgggcggatcatgaggtcaggagttcgagaccatcctggctaacacagtgaaaccccgtctctactaaaaataaaatacaaaaaaattagcctggcatggtggcaggtgcctgtaatcccagctacttgggagtttgaggcaggagaatggtgtgaacccaggaggcggtggttgcagtgagccgagatcggtgccactgcactccagcctgggcgacagagcgggactccatctcaaaaaaaaaaaaaaaatatgttagaatcacctttcaactaacatgaactgctttgggacatgggtagtctttataattaaagtgactaaggataaaatgcatggcacaaaacttgctttcttcatgagagtccactaaaaattcctagatccctaaagatcaaatttatgtaatatatccactttaaaaataactgccaattttccgctttaaaaaagattctatttgctaatggaaaaaacaaaactttgtctagccaccaaagtaataaaacttatttgatgcaatggtgcatttctcatagcaaagtgccacataggatactaaggaaaagtacattaatgtgaccaaggcccacacacagccaatgtacacagatctcattttc

SEQ ID NO: 670846 - DNA, 835 bp, Homo sapiens
gatggcctctttgtgaaaagaccagttccctatgtcttgttcagaattcaagagttgcccctatgtaaacttggctgcagaaaaattcagaaaatgagcatcttggttaaccttttaatgcttattccaagtttaaaggagattaagaaacaaaaaattggctggacgcggtggcttacgcctgtaatcccagcactttgggaggccaaggcgggcggatcatgaggtcaggagttcgagaccatcctggctaacacagtgaaaccccgtctctactaaaaataaaatacaaaaaaattagcctrgcatggtggcaggtgcctgtaatcccagctacttgggagtttgaggcaggagaatggtgtgaacccaggaggcggtggttgcagtgagccgagatcggtgccactgcactccagcctgggcgacagagcgggactccatctcaaaaaaaaaaaaaaaatatgttagaatcacctttcaactaacatgaactgctttgggacatgggtagtctttataattaaagtgactaaggataaaatgcatggcacaaaacttgctttcttcatgagagtccactaaaaattcctagatccctaaagatcaaatttatgtaatatatccactttaaaaataactgccaattttccgctttaaaaaagattctatttgctaatggaaaaaacaaaactttgtctagccaccaaagtaataaaacttatttgatgcaatggtgcatttctcatagcaaagtgccacataggatactaaggaaaagtacattaatgtgaccaaggcccacacacagccaatgtacacagatctcattttc

SEQ ID NO: 670847 - DNA, 618 bp, Homo sapiens
tagcatgaagagatgcaccaatgtgagaaaactgagcctgttgcatttaaaaaaaaaaaattgagtaagcatgaaacgtgttcagttggatgcatgatgagttctgaatggttcattcaggctacgtttctgtgccctcaaaaccagtctcacctgcaggcaaaataccttcaaacaatccagagtctttaatgtcagagtctttcattaaatttagtccttgattaaatttagggccattcttgatatgactgttcaaataaagtagatattatttagtgtagttttatcatgccagttgtgttttttaaccatcaagtgccccttaccgaacattagtggctcaatctaatagaaaaatctgaataaaatctcaaatttttttctgatttgcgttctggagatcctgcatacagactcagttgtggttcacaaattgygttccaataaaaatgaagaaagcgcagagttttaaaaaacaaatatttttagcataaactattgaaagggaagcactggggggacctcagcttcatttatcagtctttcatctactccttgcagcaagagctcataccctttccctatgtgtgttttgtgtattcatttattcatgta

SEQ ID NO: 670848 - DNA, 1160 bp, Homo sapiens
cagattacacttgcagctttaatcctatggttagcattttatatgaaaagatacctgggttatgagtaagtccccagtggaactctttggtctaaaatgtgtcctggtttcattttattcaatcttcttttactctttccttgatcttttgatttctgaaggcagcagatttggcagactcctacatggtctgaaatcaaggccccaataactactcactcttttttctttcttttttttgagacagtcttgctctgtcacccaggctgcagtgtagtgggcgtgatcttggcacactgcagcctctgcctcccaggttcaagcgattctcctgcctcagcctcccaagtagctgggattatagatgcccaccaccacacccagctaattttttgtatttttagtagagacggggtttcgtcatgttggccaggctggtctcaaactcctgacctcaggtgatccacctgcctggtcctcccaaagtgctagggttacatgtgtgagccactgcgcctggccactactcaatatttcttccattggcctatactgatctagaacttttcaaaggtggtttttttttcccttactaagttgcatagattcttgagagtttactagatgtttcagtaaaagtaagttttagtaaagttagtgggatcatgaatgcataaggtttctaaataagaatggcaattttagcaagcaaagatgctgattaaagttacagaaaaatgcctatttttgttttgttttgtttttttgtggtggtgggagagacagggtctctctctgtcacctgggctggagagtgcagtgacacagtctcggctcactgcaacctctgcctcctggttcaagtgatcctcccacctcagccttcctagtagctgggactgcaggcatatgccatcacgccagcctaatttttgtattttttgtagagatggggttttaccatgttgcccaggctggtttcaaactcctracttcaagcagtccacccacctcgggctcccaaagtgctgggattacaggtgtgagccaccgtgccttgctggagagtgctttctgtgatgaatgtgtcagatactcccataagatgagactccatttcataagcgagtatttgctaagtacaaaacaaataacgtaat

SEQ ID NO: 670849 - DNA, 606 bp, Homo sapiens
gtgtaggagtgtctcattgctgtttcaatttgcaattccctaataatatagggtgttttttttcacatgtttattygccatcagtaaagcttttttggtgagatatctattcatatcttttgcacatttttaattgggttgtttgtcttcttattgttacatttgaagtgttctttttatatttcatactctcatacaagtccactgtgatataggtgctctgaaaatattttctcagtctgtggcttgtcttttctttgtatttttaagtaaaagtttacaaaggagtacaaaaagaagatctgattagccaggaacaaataagaactcagagaaaacttttttaaagaggtatgtatatttgtatgagatatataatcttccatgtaaagtcctacttcagaattttctagaaataactctgaaatgctcaagatcatgttgtccccaaggatctttccctggcagttttaaaactagctcagagtaacatttattaatagctttgcaatacattgaccaataagagaacatttcaccctttaactgaacaaaatcactaaataataataataataataataataataatatcttcaaatcgaa

SEQ ID NO: 670850 - DNA, 635 bp, Homo sapiens
ttgctttcatttctttttgtatctcattctttccatctgggataatatccctttttcctgaagtacatccttaagaatttcctttagtgaggctctgctgctataaactctctcagtctttgcgtttcttaaaaggcttgtatttttccctggtcttgaaagatgtttttgatgaataccatcttctttccttatgccattatttatctttctgttagattaaatttgtttataacagatgagcatttagaatctaccttagtgtggcagcctcatatggagacaagctggacccttccatagctggtgggcttaaagaaaactgcaacaattcctccctgtccattgcaaaaaatggctctgttagcaccastagctcgcctttgaattcttttctgggcaacgccaaaaaccttcctgggctaagcctcaattttgggggcttgcctgtcctgcatcaggatggtaatgtagatctaattctaatttactttcttttcccatggaaacatctttctctgttgctgtgttctttctgtccttgcagggtcttcctttccctcaaaaacattaaaagtctacacttcctgtctacacttcctccatctcatttggtcctcgggctcttgaaaact

SEQ ID NO: 670851 - DNA, 635 bp, Homo sapiens
ttgctttcatttctttttgtatctcattctttccatctgggataatatccctttttcctgaagtacatccttaagaatttcctttagtgaggctctgctgctataaactctctcagtctttgcgtttcttaaaaggcttgtatttttccctggtcttgaaagatgtttttgatgaataccatcttctttccttatgccattatttatctttctgttagattaaatttgtttataacagatgagcatttagaatctaccttagtgtggcagcctcatatggagacaagctggacccttccatagctggtgggcttaaagaaaactgcaacaattcctccctgtccattgcaaaaaatggctctgttagcaccactagctcgcctttgaattcttttctgggcaacrccaaaaaccttcctgggctaagcctcaattttgggggcttgcctgtcctgcatcaggatggtaatgtagatctaattctaatttactttcttttcccatggaaacatctttctctgttgctgtgttctttctgtccttgcagggtcttcctttccctcaaaaacattaaaagtctacacttcctgtctacacttcctccatctcatttggtcctcgggctcttgaaaact

SEQ ID NO: 670852 - DNA, 635 bp, Homo sapiens
ttgctttcatttctttttgtatctcattctttccatctgggataatatccctttttcctgaagtacatccttaagaatttcctttagtgaggctctgctgctataaactctctcagtctttgcgtttcttaaaaggcttgtatttttccctggtcttgaaagatgtttttgatgaataccatcttctttccttatgccattatttatctttctgttagattaaatttgtttataacagatgagcatttagaatctaccttagtgtggcagcctcatatggagacaagctggacccttccatagctggtgggcttaaagaaaactgcaacaattcctccctgtccattgcaaaaaatggctctgttagcaccactagctcgcctttgaattcttttctgggcaacgccaaraaccttcctgggctaagcctcaattttgggggcttgcctgtcctgcatcaggatggtaatgtagatctaattctaatttactttcttttcccatggaaacatctttctctgttgctgtgttctttctgtccttgcagggtcttcctttccctcaaaaacattaaaagtctacacttcctgtctacacttcctccatctcatttggtcctcgggctcttgaaaact

SEQ ID NO: 670853 - DNA, 635 bp, Homo sapiens
ttgctttcatttctttttgtatctcattctttccatctgggataatatccctttttcctgaagtacatccttaagaatttcctttagtgaggctctgctgctataaactctctcagtctttgcgtttcttaaaaggcttgtatttttccctggtcttgaaagatgtttttgatgaataccatcttctttccttatgccattatttatctttctgttagattaaatttgtttataacagatgagcatttagaatctaccttagtgtggcagcctcatatggagacaagctggacccttccatagctggtgggcttaaagaaaactgcaacaattcctccctgtccattgcaaaaaatggctctgttagcaccactagctcgcctttgaattcttttctgggcaacgccaaaaaccttcctgggctaagcctcaattttgggggcttgcctgtcctgcatcaggatggtaatgtagatctaattctaatttactttcttttcccatggaaacatctttctctgttgctgtgttcyttctgtccttgcagggtcttcctttccctcaaaaacattaaaagtctacacttcctgtctacacttcctccatctcatttggtcctcgggctcttgaaaact

SEQ ID NO: 670854 - DNA, 654 bp, Homo sapiens
taatccaaaagaggtcaagaaaaggtaaaaaatatagaaatatgggtcaaatagcataaaataagagggcaaaaatgcatacgtgcactttttcagctaaaaaagtctgtcagactggactgatgcggaaaaaaagctccatatattatgttgttcccaagagacatacttaaacatgaagcaggtagaaaaagatacactagtcagagtcaatggctgggaaacctttcgctaccttacctgtcttccttcagtttctctccagcctcttccaggcttcctatcccaccacccccacgtcgctcctcagcccctctcctctctagtgggagacaaggaaactcagcattcatccagcgttccttcgcctcagcaaggggctcccgtcggcggcggccgtgatgacgtcctcattggtccgcccaaccacgattggtgaaggggttcctgcgtcgcgcgcagtctaggaaagagacgacttgggacgcaacgacacctgsgcgtgtgcgtattgcctcagtggaggcgctccgctggtcctcctagagtttggtgccctgccgccgctgccccgccacgactgcggctgcggctgctccgggcagtgctgcggccgccgcgggcccagctgtatggttaggccaccatcgttcg

SEQ ID NO: 670855 - DNA, 642 bp, Homo sapiens
cttcttgtttcttagtatcaaaacatttattttatgttttcaaatttagtcctacctgagttcttaaccatcacccacagattgttccagcaacggggtaaaatgtatttatcacataactcctttacagaacccaggagtcacaaagaatcatccctcaagcaaaacaaaactcacagtaactggctttaagacaccctacaagtacatgtagttctcccaacagagctctcttgacctctccaacaaaaactgttctgtgtgaagttaagaaatctgttcacatcacatcattcagtacagaatcataagcactgccaaaatttttctcttttttttttcctttttttttgagacagggtctcactctgtcatccaggctggagaasagtggtgcgatcttggctcactgcagcttcatcctcctaggctcaagtgatccttccacttcagcctcccaagtagtgggactataggcacgtaccaccatgcctggctaagttttttattttttgtagaggcagattctcactgtgttacgcaggttggtctggaactccttggctcaagtgatccatccacctcaacctcccgaagtgctgaaattacaggcgtgagccaccatacctggccccaaatttc

SEQ ID NO: 670856 - DNA, 615 bp, Homo sapiens
tgagcaaatgaaagcattctgacaaatgaaaccattcagtccgtcagctgagtgcactaatgcaagttacgactttctgtgcctccattttattttttcttttcttttctttccttttttttaaattatactttaagttctgggatacatgtgcagaacgtgtaggtttgttacatagatgtatatgtgccatggtggtttgctgcacccatcaacccatcatctacattaggtatttcgcctaacggtgtccctcgcctagccccccacccctgccgacaagccccgatgtktgatgttcccattcctgtgtccatatgttctcattgttcaactcccacttgaacaatgcggtgagaacatgtggtgctttgttttctgttcttttgttagtttgctgagaataaagtgaagataataacagcacctacctcatagtagtaaagtgcttagagctgtgctgtccagcatggcagccacagccacatgtggctactgaggcttgaaatgtggctagtgcaacattagaaactaaaattttaactcttttaattgattgaaagtgaaatctaaaatgttaaatccaaggaatttttaacaatttggatgagaata

SEQ ID NO: 670857 - DNA, 643 bp, Homo sapiens
ttggttttgtaaataccaattcaaatctgcttgaaggttttagagtcaaaagtaaatgaatatatattccaatttatttgaataaaatacttcttttttggctaggcatggtggcttatacctgtaatcccagcattttgggaggccgaagtgggcaaatcacgaggtcaggaattcaagaccagcctggccaacatagtgaaacttcrtctctactaaaaatactaaaattagctgggcatagtggcgcatgccagtagtcccagctactcaggaggctgagggaggagaattgtttgaacccaggaggtggaggatgtagtgagccaagattgcaccactgcactccaacttggacaacagtgagacttgtctaaaaaaaaaaaaaaaaaaaaaaagacttctttttattagtagagaattctgttctgttaggcaaaattttgcctctgagttaatttgtactattaaaccagtaaataaattatttgaggaaatagaagacaacttatattttactattatttttcagtctttatttacctgatacctacctaagaattagtccctggccttgaaaccaaatggagtttccatggctggatttaacaattattttaaactgttgattcatattttcttt

SEQ ID NO: 670858 - DNA, 636 bp, Homo sapiens
ttttggtaattaaatttatgttgagttttatagaatgattctctcatcagatagtcatattttttctttgtattaatgtgtatatttatttcgttgtttttattgaaataagattgcattactcagttaagtcgtacttgtttatgaagttttgaatatcttgtaattttatgtatttgattctttattattattttttaaatttcagattctatatttgtgagagaaatggtcctgttatcatctttttattgtgtacctttattagagttttggyatcaagattctatgggtctcataaaatagttgaaaaattgtaatacatggaagagttattaaaaactactacaatttttttttctcttaaatgaatggatgaattcaaccaacaaaaccatgtgggcctagagatttttttgtgggaaggttttcaactgaaagtttattttgcttattgggtatggactatagtggatttgtgtttattcttgtgttcatttggtaagttctgttttattatgaatttttatctttttcatctaagtgtatttaataagctttttcatagtatcttcattatctgtttaacatttgacacatagttgatacttcagtgtctactaaggaagttattga

SEQ ID NO: 670859 - DNA, 649 bp, Homo sapiens
agcagtcatgtcacacagtagagataattgttgatgatgaaataatcacagtagaggtcatatgtcttaccattatttaaaattatagtggaaggctaaggtgggtagatcacttgaggtcaggagtttgagaccaacctggccaacatggaaaaaccccatctctactaaaaatacaaaaatttgctgggcatggtggtgggcccctgtaataccagctacctgggaggctgaggcaggaaaatcgtttgaacccaggaggttacagtgagccgagattgcaccactgcactccagattgggtgacaagagcaagactttgtctccaaaaaacaaaaaaagaatcatagcgacatatgattatttatcataatagacattagaattttattatgattatagtttgtgaagatttycatacatattcttttttctactgaaaaaagaagaggtcttgtagattttgatcatctccatatcctttaggactaaaatgtaagcttagagaggcatatgtgctgctgagtttagttaactgtggactaaattaaatgtctttagtttgtttttctgtaagtcatttgcatttatagcaataaattgaatcttcactatgtcacttcctattaccaatcctaattaatagata

SEQ ID NO: 670860 - DNA, 649 bp, Homo sapiens
agcagtcatgtcacacagtagagataattgttgatgatgaaataatcacagtagaggtcatatgtcttaccattatttaaaattatagtggaaggctaaggtgggtagatcacttgaggtcaggagtttgagaccaacctggccaacatggaaaaaccccatctctactaaaaatacaaaaatttgctgggcatggtggtgggcccctgtaataccagctacctgggaggctgaggcaggaaaatcgtttgaacccaggaggttacagtgagccgagattgcaccactgcactccagattgggtgacaagagcaagactttgtctccaaaaaacaaaaaaagaatcatagcgacatatgattatttatcataatagacattagaattttattatgattatagtttgtgaagatttccatacatatycttttttctactgaaaaaagaagaggtcttgtagattttgatcatctccatatcctttaggactaaaatgtaagcttagagaggcatatgtgctgctgagtttagttaactgtggactaaattaaatgtctttagtttgtttttctgtaagtcatttgcatttatagcaataaattgaatcttcactatgtcacttcctattaccaatcctaattaatagata

SEQ ID NO: 670861 - DNA, 649 bp, Homo sapiens
agcagtcatgtcacacagtagagataattgttgatgatgaaataatcacagtagaggtcatatgtcttaccattatttaaaattatagtggaaggctaaggtgggtagatcacttgaggtcaggagtttgagaccaacctggccaacatggaaaaaccccatctctactaaaaatacaaaaatttgctgggcatggtggtgggcccctgtaataccagctacctgggaggctgaggcaggaaaatcgtttgaacccaggaggttacagtgagccgagattgcaccactgcactccagattgggtgacaagagcaagactttgtctccaaaaaacaaaaaaagaatcatagcgacatatgattatttatcataatagacattagaattttattatgattatagtttgtgaagatttccatacatattcttttttctactgaaaaaagaagaggtcttgtagattttgatcatctccatatcctttaggactaaaatgtaagcttagagaggcatatgtgctgctgartttagttaactgtggactaaattaaatgtctttagtttgtttttctgtaagtcatttgcatttatagcaataaattgaatcttcactatgtcacttcctattaccaatcctaattaatagata

SEQ ID NO: 670862 - DNA, 910 bp, Homo sapiens
taataataatataaataaaaagtaaaaataaartgaggtcaaattgtagacactctcattcataggaaatttacaaatggtggatcgttatctatacagccatagtgtatttaatcaatactcttatacacatttctatgggcatgtatgtttaatataaattacttgatgcttccaagttgtttatcatagtggttatgccaatgcctaagagttttggtttcttaacatccttgccaatatttgctttttaatagtttgctaattttatgtacataaaatgacaattagtttcaatatgaattatcctgatgatttgtaagcttgagcagctttccccacatttattcaccacacatgtattatattctcaggattgttattctattggttaatagtagaaactctatagtcatacacacaaggtatagacccccagttgcacattagctttataaacttgaggatatcacttaaattctctgttcttaagtttcttcatctgtaaaatgaggatagtaataatgcctgtatcacagggatattctgagggcataaagcatttagaatagagtctagcacaaaatcaccacttaaaatgttagttatgattatattcctacacgttggaagagctttttattttcaattaataacacttcttatacaagttaatgtataagtcaataaagcattcttagttatagaaagtgaaaacattttgtcatattctgtggactttatatttacatgttacatagtttctattctgtagaaaaaatttctaatttagtcatatatcggcttttgtgcttaatttcagaatttttttttcaaaatttcagggtgtaatgagaatttcatgtttttctgctaaaagtgaaaaaaatgatttattttttgtccagat

SEQ ID NO: 670863 - DNA, 3355 bp, Homo sapiens
atatttaacatcactgaacactagtgatggcacagatcacaaagataatctttgtttctttttgcaggaggataaactaaggcccaaagaggttgaccactggttgtctgaagtcacaacagaaatgacagcactgctagttgtgaagtccaggcaccaaactctcagcacaaaactctttcctgctctttcccttctagctccatgtaccagtcttatttggtcactgcactgcagagggcatgttaccacataattagtttcagggtatgtgcaacagctgccacgagccagagttccacactggagtcaaatgtctttggtctagacgcatcccttccaccacatgccactgatgggacagccgccataaccacattccttactccagcggctccaagcctttaggagttggagcacatgacacattccaaccaagatgaagtaactcctctctctgaatgacttactaaagaacacctttaaggattttttcagatttgacattcttctacccgggagcttaaggactttaaaaagggtttagagaaattttttttcctaaaaatctatgtgagataaatgttaagaattaaggggccacttaggaacctggaaatgataagtcacaggagatccatgttatcattgagtaagtcaaagcaaaaaccagaaaaaaggaaatggttgttttgcagataccatcaccgaaagaatatgtcatatcactgagaaataagatctcttgataccaatcttgagtaatatctgtttgagattattttattgtatctggataattttgggcctattagcaacaacaaaaattttccttaaaacgaagactcagaaacccatgtatgcattcctaagcacatagatatatttcatatgctttaagattatttttcaaatcttcaaaccagtgaaatagaaatttctccaaaagtacagtaaaaactatatttaaacaaggaattgcaaagtgcttatttcatcccttgatgtttattttgttttacaattcatttgagacttttaaagtcagaaagagaaaaaaaaaatagctttcaaatttgagtctggaacagagctcacctatcaagtccaacagggatataaagaaagtatccctgttgggatagtttcccaacaggaaagtatagaaaaaaagaaagtatctaacagtacagatactgctggtgcccagaacaaaagcattattgaacgaaagaagaatttaaatcgaagtaagccaaaactaactccaggtcttgctggcatttttcctaataagatgaactattagtcctgggttacataaacttcaacacactagatccctcaccaagtcagagggaggccacaggcctcttgaacccatgcatctgtactctatttaagatgcatgactgtccctctcttctttgtttgggtccttagctgtggactaggagaagagtgaggcacaaaaccagcagaaacaaaggcctgcaaaatgagtggaattttttgctgttatctttgaacattttattctttattcagaaatccaaagggaaataaaagtggaaagaatgccaggctttatggtttaaaaaagaaaaaagaaacataggatgagtttacagtttatagtatctgcgaagcaactcttcactcattcctttaaataaacttttaaatcaccttttaagtggacagaaaatgctgttattatgagttactgagatctaatgtgggagactagttaagaacctgagtcctgaattcaagcaagaaattattctaccactgttaatctctgtcctgtttaatctctggaaagttgtttgccctcagtttcttccactgtaaaatggagatgatacagttgtagtgatgaataaatttacacacacaaacagatacacacacacacacatatatacagtaaataacctctcttaatattataactagtattaagagtaaaaataactattatgctggggaaatctctttaaagattatttcacaacttattcagtgaattccaggtagtacagttacttatctccttagatagaaggcttttccttttttcaaaaagaaacatttttaaggctataacacaatctcttattatactccctatctatcagccattatgctacaaagaattcttccttcgttagagtctatacagagaggtatagtatataagctggtcattcatttctgccacaaccattcacaggtgacattcactcaactcactttcactgactgtttattcagtgtgctaagcactatgctaaggcatggggattcaacaacaaagaggcatgagacatcgtccttggccttgagaagctcttagtcaaaagaagcaacaaatgaggagacgcaatcacaacagaaaaggatgggagcaaaagggaatgtgtacaaagtgctgaggcagcacagaggagggaggcatcaatctggtttgagcacaagggaagattctgcagaggatgtgaaccttaagtgaggcctagaacaaggaagaaagatattccaggcagagtgaagggcacgggcaaaggcacatatatatatacatactttttaaatgcatggcatcttgggtggaaaaagaagacagcttgatggctaaacatgaaccccaagagtagaaggaggcagctacgaaggtagcgatactcatcaataaaggatccagaagaacatagaaagggcacttcattcagcaggggggcgacgtaaatggagtgtttagcaccacatgttgcaaactgggcttgtgaatgcattctcagaagtctgtgagttttatgaaaatttgaaagttctttaattttaatgataatctaaaaactaaaattgcctgcaaattaagacatcacttttttgtactgatcatttatatttcaatcgtccactcaaaaaatrtttattgaacacccctatgtgccaggcactggggatataacaatgagcgagacacagtacctgacctcatagaagttagactaataagaggaggtaaccaagaaataaaagtatagcatagcaagagacagtaagtgctgcacagacaaataaaatattaacgtggcaagaggtagaaagtcaaatggggggtgttcatttcatacagggtagtcaagcagtcagtgcacttcttcattaacatggtatctgagcaaagacctgaaggaaataagatatttgagagatattttcagagaagaagattttacttccccacatttgtcacaaacattcctaagggtctataagaatgctctttgtctctctttctctgtttctcattgttatagctccagtgcctagtattgtgcct

SEQ ID NO: 670864 - DNA, 1083 bp, Homo sapiens
atggaaaaccgacagggtcttattgttcctagggcattaacaaacaaacaaaacacccgaaccctagagtcctggtgtcaatgatgaaagggaagaaaacgaacaacaacaacaacaacagcacaactcctgcagattcagaaatcaactatattaaactaggaaccatatagaagtcatattggtattatgctcatacaagggtgtacttttacacaattagaaataaaataaaatgatgcacagaactcaaagtctcaaaaatgccatggtatgccaaagcagccagtcccaagtgtgtacagtatgcttccatttacgtgaagctgaataacgacacccatctatggcaatgaaaatcagaactgtgcttgcctcagggcagaatgggtgataagacaccagacaatttaaagaaatgttctttaggccggggtgcggtggctcacgtctgtaatcccagcactttgggaggccgaggcgggtggatcacgaggtcaggagatcgagaccatcctggctaacacggtgaaaccccgtctctactaaaaatacaacaaattagccgggcgtggtggcargtgcctgtagtcccagctactcgggaggctgaggcaggagaatggtgtgaacccggggggtggagcttgcagtgagctgagatcgcgccactgcactccagcctgggcgacagagcaagactccgtctcaaaataaataaataaataaataaataaataaataaataaataaataaataaatgttctttatcttgatctggatgatggttacataaatatatacatttgtcaaaatttaaatgcagcatacacttaagatttgtagtattttactgtaaataaattataccttaataaagtcctattaacaaaaaataagacatttctttcatttttttataaaaggaagtgtgtcttgacttagtaaccattcattacctatgtaaaacaatatttatttcctacacctatacacagggcaaagaatatcatattaaattttattttggattacaccagtatatggaaaatgtgatgaagttgactggtgaacctaggcga

SEQ ID NO: 670865 - DNA, 819 bp, Homo sapiens
tgaaacttgagaaaactgcaaatctaataccttggtcttacagaactgaacaatacttaaatgtgtttaaacctgctatataaaatgtcagatgtaaaagcgaatatctaatgaagcaccttttcccttttctaaaattcaatagtaagggccaggcacagtggctcacacctgaaatcccagcgctttgggaggccgaggcgggtggatcccttgaggttaagagttcaagaccagcctggccaacatggtgaaacgccgtctctactaaaaatacaaaaaaaaatggccaggcrtggtggtgcacgcctgtaatcccagctacttgggagtctgagacaggaaaatcgcttgaacccgggaggcagaggttacagtgagctgaggtcacgtcactgtactccagcctgggcaacaagagtgaaactctatctcaaaaaaaaaaaaaaaaattacaatagtaataattatgccttctaacactaaaatcaaataaccttacttatcagttacattgcctactaagctgacttattttctgacttttcctttgctttattctcttatttcttccaagtaaccatattctcttttaccctcctgttcaactgtctatgctccttctctctttgttcactattttgatatttaaatgttatgacttattttcaagtaaatatttttttaatttcttcatttgggataaaatattcactacataaatttagtggataaatacccccacagagatcgaccctgcatgaaatgtgttccctcagaagtagggcaattcattcattatgagatcaagccataaaa

SEQ ID NO: 670866 - DNA, 644 bp, Homo sapiens
atttaggtccccttgttatgaggaaagctctgcatgctctttcagctctgttgagatgaggcctctcaaacagcaactgtgattctgatatactcggcctaactcttttttttttgtatttctagtccctcactaccctttttatttaaagctcaaggactttaatacccagacaattttaaatgaatacttaagaattgtcagagctagtttgaaaaattaagcaaagaataacttaaagtttactttggrggtctactgaaactcctaccagggcatttgaataaacctgcctagtctcctatgtctcagaagcagaactttacaaacttgtctctgcagacacactgagatccaacatttccatgatcagtcagaaaacaaagatttataaccctcatctggtacctataatttgatgtgattacaagtgcagtattggaaaaaaatagcttagaccatactgtggcaaccgaaaaatcataaaatctcagtggtccattactaaacttttatatataaaagtgcatttctggctcttgaagaatctgaggcaggttgatgggagctctcctccaccttgtaactcagggatccacgctccttgcatgtcccatttccaccatctcaacatggaattccca

SEQ ID NO: 670867 - DNA, 650 bp, Homo sapiens
agcatatgtcacacgtcccctcattgaggtcagagtgatgtgctctgattatctgtgccctgggtcacatgtctgtctccaggaggagggagccccacccaaccatattgaatatgagtgaaggaggggaagtttcccaaatgaaaattgaggttctgtcacccaaagaagttgaaatgaatgtcaggcaagcaaaagtagccttcatttttgctacccttgtatctccactcaaagctatgccccacatctccatccagacagctcctactcatccttcagacctsagttcaaatggcgcttccttgaggaaaccttcccaaaccatcccacactagactggaatcccctgctggactagaatcccctgcatgtgtgctcctggcagagcttgtcattctgggtttgtgcggttatttgatgaaagcctgtctcccatactggactgggatcaccttgaaagctgtggcctgtcttgtccatcgctctgtccctggagcctaggacagtgcctggcacacaggtggaactcgggaaatatttatttgaaataccaacggaagtccacagcacatatgacctggtgatcagtggtgggaggtgaatgggtcaagaaagacaccaagattccctgctcatgagtgagagtg

SEQ ID NO: 670868 - DNA, 650 bp, Homo sapiens
agcatatgtcacacgtcccctcattgaggtcagagtgatgtgctctgattatctgtgccctgggtcacatgtctgtctccaggaggagggagccccacccaaccatattgaatatgagtgaaggaggggaagtttcccaaatgaaaattgaggttctgtcacccaaagaagttgaaatgaatgtcaggcaagcaaaagtagccttcatttttgctacccttgtatctccactcaaagctatgccccacatctccatccagacagctcctactcatccttcagacctgagttcaaatggcgcttccttgaggaaaccttcccaaaccatcccacactagactggaatcccctgctggactagaatcccctgcatgtgtgctcctggcagagcttgtcattctgggtttgtgcggttatttgatgaaagcctgtctcccatactggactggsatcaccttgaaagctgtggcctgtcttgtccatcgctctgtccctggagcctaggacagtgcctggcacacaggtggaactcgggaaatatttatttgaaataccaacggaagtccacagcacatatgacctggtgatcagtggtgggaggtgaatgggtcaagaaagacaccaagattccctgctcatgagtgagagtg

SEQ ID NO: 670869 - DNA, 630 bp, Homo sapiens
ggaaagagacttgaggtcaggttagtacaatgtaaactacaggaatctttgtaacttcctcatgtgcttgtttaattcttttacctctgtaatagcttcaatttccttaaaatgatatgatcatcattttaagagtcacaagaaaatgtaggacgccctccttttactccaaatcctgcttttagggaaaacagagccacaggctggagaagattagtgtcagcaacaacaagagtgaaacrcaggagagtccctgagtggtgtactggtaaatgcttaaaaaatggtcctggggtgggggaaagctctgatttgtagtgttgctgatttccttagtgtaaatattcataccactgccagtttcagtataccaacataatgtcactgaacacggaattgggaagagatgacgcaagtggcttttgtgagctggttgaaggccagctccaggacaccccttcgaagaaaattgacaggatttcccttgggcctagagactgaagccagctggggtttatttaatgtccctgactcagctttgagctgtgtaaagctagaattgttactatccatcttgacatccacaacttctagcacaggttgcgatacagagcatgcttataaatggtt

SEQ ID NO: 670870 - DNA, 630 bp, Homo sapiens
ggaaagagacttgaggtcaggttagtacaatgtaaactacaggaatctttgtaacttcctcatgtgcttgtttaattcttttacctctgtaatagcttcaatttccttaaaatgatatgatcatcattttaagagtcacaagaaaatgtaggacgccctccttttactccaaatcctgcttttagggaaaacagagccacaggctggagaagattagtgtcagcaacaacaagagtgaaacacaggagagtccctgagtggtgtactggtaaatgcttaaaaaatggtcctggggtgggggaaagctctgatttgtagtgttgctgatttccttagtgtaaatattcayaccactgccagtttcagtataccaacataatgtcactgaacacggaattgggaagagatgacgcaagtggcttttgtgagctggttgaaggccagctccaggacaccccttcgaagaaaattgacaggatttcccttgggcctagagactgaagccagctggggtttatttaatgtccctgactcagctttgagctgtgtaaagctagaattgttactatccatcttgacatccacaacttctagcacaggttgcgatacagagcatgcttataaatggtt

SEQ ID NO: 670871 - DNA, 592 bp, Homo sapiens
ccagcctgggtgatacagtgagactccatctcaaaaaaaaaaaaaaaatcaktatttttcttcagtcaagatgcaggtttatagtttttctttgatttctcaaattaaaaaaaaaacatgtgtggttagttaatgagtacaaaataacatacagttggatagaataagtaagttctaatcttagaagagtaagatggctgtagttaacaatgatttatacttttaaaatagctagaagagaggacttgaaatgtacccaacacatagaaatgataaatactcagatgataccctaaatacccttacttgatcattattctatgcacataagaaaatttcacatgtaccccataaatatgtacaaatataagtacccgaaaaagcagtggttagtttagtgagccttattgtttgcaagcccatgtgggccgttagtgataaatgcctcctttacttaatgcttaaaagacagtgttatattgatcaggtatgaattttataggctacaagcttagttgtgcaaaaatagggcttttttaaaaactaagcttgactttattcttgaaccttcattctgctccctagtggacag

SEQ ID NO: 670872 - DNA, 592 bp, Homo sapiens
ccagcctgggtgatacagtgagactccatctcaaaaaaaaaaaaaaaatcagtatttttcttcagtcaagatgcaggtttatagtttttctttgatttctcaaattaaaaaaaaarcatgtgtggttagttaatgagtacaaaataacatacagttggatagaataagtaagttctaatcttagaagagtaagatggctgtagttaacaatgatttatacttttaaaatagctagaagagaggacttgaaatgtacccaacacatagaaatgataaatactcagatgataccctaaatacccttacttgatcattattctatgcacataagaaaatttcacatgtaccccataaatatgtacaaatataagtacccgaaaaagcagtggttagtttagtgagccttattgtttgcaagcccatgtgggccgttagtgataaatgcctcctttacttaatgcttaaaagacagtgttatattgatcaggtatgaattttataggctacaagcttagttgtgcaaaaatagggcttttttaaaaactaagcttgactttattcttgaaccttcattctgctccctagtggacag

SEQ ID NO: 670873 - DNA, 592 bp, Homo sapiens
ccagcctgggtgatacagtgagactccatctcaaaaaaaaaaaaaaaatcagtatttttcttcagtcaagatgcaggtttatagtttttctttgatttctcaaattaaaaaaaaaacatgtgtggttagttaatgagtacaaaataacatacagttggatagaataagtaagttctaatcttagaagagtaagatggctgtagttaacaatgatttatacttttaaaatagctagaagagaggacttgaaatgtacccaacacatagaaatgataaatactcagatgataccctaaatacccttacttgatcattattctatgcacataagaaaatttcacatgtaccccataaatatgtacaaatataagtacccgaaaaagcagtggttagtttagtgagccttattgtttgcaagcccatgtgggccgttagtgataaatgcctcctttacttaatgcttaaaagacagtgttatattgatcaggtatgaattttataggctacaagcttagttgtgcaaaaataggrcttttttaaaaactaagcttgactttattcttgaaccttcattctgctccctagtggacag

SEQ ID NO: 670874 - DNA, 1092 bp, Homo sapiens
aactagaggtcatgctttaccaacttttagctgagtttatgtcataatgttagcttttcctagaataggctagtcaactgagctataatatatattctcttgggttttatgccatttcctaaatttaaaattaaaacatcagttgaggaaaaatagctacaacctaacagcccatgcaacttagattaagctgcatacaacattagtttcaaaacaaagagagtcagaaaacactctagaaaatcaagtatgagatttttagtgctaaaaaggactacaaaataccctcatcaatgaggtaacttagggccccaaagcagccgcctatataagaacaagacaagtaaacaaagcaagtccaaagtccaaaatattctacttcacaaacagacagcttcagcaatcctgaaaatacctaaataaaaaattagttaaactttcaaatgacagacaaatttaagaaaccacccacctcactaaaaatattcttggtaataaatgactgcttagaaaggagcttacataccaataaaattrgttaacatttatttagtctttaccgtgtgccatgccatgtatgccttcacatatattaactcatttaattttcacagccccatatgaggtattattattatctgcactttacaaatgaaaaacaacctgaggcacaatgaagctaaatttcttgccaaaagtcaccaaggtaataagaggtgaaaccaggatatgaacccattgcagtgacctccacagctgtcatccctaattcctcactcctgacttccagatctttaccgctctaccatactgtctattttagcccaactcatcactttgcagataagcaaactgtgctcctcaaggaagagataaaattaatccaaggtttctaactatttaataacataactggtactaaactcaggtttcctattcacattatgaggcttttcatttaatctttttcaaaaataatttattttgtttttccaagtataaaatacttattgaaatcagaagaatataataaagtacagaagaaaattgaaataacacctcccagcttccaagaataaccacatcaacagt

SEQ ID NO: 670875 - DNA, 3041 bp, Homo sapiens
gcctaggacttgtccacaaaaatcactatgaaaatttacttctgtgaactagactcacatcaaaatgctgcctgcttccatgaggcttgyagtgacatccatgtacaagttcaaagaccctctgagccaatttccacttctctgcatgtctctggggacctaggggaccaggattactataaaagcaggtaaggccagtattaaaaagcaggttcactccagttcccttcatgtcaatgcaacaagacacaactttgtgaaatgccatgcaactgtatccctgttaacaagtatcaaccccttcaaaggatacctacccatgactgtctcagtctgcggcactctagatcttgatagaaatcacacgcattctgattttatttcattgcaaaatgccaaggatcttccatgccaaagctgcacttttctctttacccctctttgtggaggaccagggtaagtttagatttttggcttcaggctttctgccctcaactccatggagcatggcatttctgacaatgctggagatggctgcacgtcatgtgtcactagcgtgaggatagcagggacggggagtggtggagacagctcccttctgagcaccaaggtagttggattccccagagcaataaccagcccagtcaccctagaaatcccctaacctagttggagggctaaggagttactgcactttgggccatctctaaggtcttggggagcccacctcctaggtagctctcttgcattccagaaataacccataggagcaactctggacaaaagagggacactcagccatgggcagctgaggcagagctcctgactactctttccacccagtcctgctccgtgaggggtcttcctcatggttctacctgtcacctgtcccccagcccaggctcctgggtcaccaccaaagcaggtagctcggactcaccaagcccaggctatgcctttcctgctacccatgtctcctgttcatttagtccccaagtctccctcttgcctgtggacctccccaccacagctgccttttactgggcacttgctatatacctccggtgaagtgctttacctaagtgagtgccagccttgaacactatgaagtcaacagaagctcagaaaggttaagtaacttacctgggatcatccagccagaacatggggagccaacaaccttcctagctctgcctagctttgccactagccaggccgtcacagtgtcacgtggagctgcctcccccttcctgttggcagtggtgggcatcgtggagctcctagctggctcaggggactgtaatcctacagcccagtggggaggggggggagtttgctataactccctctccaggttttaaaatagttattcagtctaaaaacagactatgtggtgctggttggaggtgggggtggggaagtattgcaacctagattataaagatgatggaaagagtgaaatggagaggaaaaaggacaagaaactccagcaaatgccagggactgctaatggagagaaataacatggctaattacatctctgaaggctatccattccaaaataaatgtttaatgaaaaaataatgcattttccctgcaacttaaatctgggagtgaagagaatgagcagagtctcccagtgggcactagagtagctgtgcatgtgcagggttgcctctgaccgtctcaccttgatgagttgcttccccagcgtcctcatcctgagggtgaccacacagcagtcttcccagggaagccacaggagtgagccatgggaacctcacacaccaagcaactaggctccaggacaccaggggcagaccaaggtctgtaaatccaactccctcccccaccaaagcttgcgatgtttctctccaacagctccaggaggccttctctggttattttcctccgcccacctctcctttccattctctccatcagggagttccagatcttaaatctatgggtataaagttgaggtccttctgtgaaatgaaggctcacctctaacaagccaaacagatctgtttggtaagtgtgggttttggagaagaggagctcctccactctcccctctttctagcataatctgtagaccagaatagggagagagaatcatgagttttagagtcaaacagacttgggttcagatcctagtcttataacttacttgttatttgacccaggttaagtcatttagtttcccagactcattttccttatctgtaaaagggggtgctttgtaaaattattgtgtggtttaaataatgtctgcaaagtgcttttcacagtatctagtatctagtatactcaagcattcagtaaacagcagttttttgtgttatcatttgtttcagagcacaagaaggctgaccttgaactcctcaagatgcttgctcctgggattctccagctgcaatcagcatcccccacccccacttgcctgcggttgctacatgggtcagacagcaaggaccacaggggcactaagtttgctgctgactcttgacctcagatgggctatttggccaagggcccagctctccctccaatgtagaggaggcagggaggcaggagccagcaagaagttcctccaggcaaagggaaagtggcaaagatactcaagagctcacaggtacctagcacacattgcccatgggcacacatatcactctgcaaactatacacgaaacccctgaaattcaggagtacacaagcccccacaaaatgtaggaccacatgcttcaatattcactttccaacatattcagatccacagaaacacaaatagccccgcgtaatgtgcatacaaacacatctatatcatgctgcaacatgcccacacttacacgtttcccccaaaacagcatgaaatcaatctgggcacctcacttctatggaaaacttgctctctgaagtgtgaacatttgtgcacacacacaaatacacctaccctgtaggtccaaatgcctgggcagcatgccaggaatggcacccctgggccttgccagtcatggcagcaattcacagatgattcc

SEQ ID NO: 670876 - DNA, 3041 bp, Homo sapiens
gcctaggacttgtccacaaaaatcactatgaaaatttacttctgtgaactagactcacatcaaaatgctgcctgcttccatgaggcttgtagtgacatccatgtacaagttcaaagaccctctgagccaatttccacttctctgcatgtctctggggacctaggggaccaggattactataaaagcaggtaaggccagtattaaaaagcaggttcactccagttcccttcatgtcaatgcaacaagacacaactttgtgaaatgccatgcaactgtatccctgttaacaagtatcaaccccttcaaaggatacctacccatgactgtctcagtctgcggcactctagatcttgatagaaatcacacgcattctgattttatttcattgcaaaatgccaaggatcttccatgccaaagctgcacttttctctttacccctctttgtggaggaccagggtaagtttagatttttggcttcaggctttctgccctcaactccatggagcatggcatttctgacaatgctggagatggctgcacgtcatgtgtcactagcgtgaggatagcagggacggggagtggtggagacagctcccttctgagcaccaaggtagttggattccccagagcaataaccagcccagtcaccctagaaatcccctaacctagttggagggctaaggagttactgcactttgggccatctctaaggtcttggggagcccacctcctaggtagctctcttgcattccagaaataacccataggagcaactctggacaaaagagggacactcagccatgggcagctgaggcagagctcctgactactctttccacccagtcctgctccgtgaggggtcttcctcatggttctacctgtcacctgtcccccagcccaggctcctgggtcaccaccaaagcaggtagctcggactcaccaagcccaggctatgcctttcctgctacccatgtctcctgttcatttagtccccaagtctccctcttgcctgtggacctccccaccacagctgccttttactgggcacttgctatatacctccggtgaagtgctttacctaagtgagtgccagccttgaacactatgaagtcaacagaagctcagaaaggttaagtaacttacctgggatcatccagccagaacatggggagccaacaaccttcctagctctgcctagctttgccactagccaggccgtcacagtgtcacgtggagctgcctcccccttcctgttggcagtggtgggcatcgtggagctcctagctggctcaggggactgtaatcctacagcccagtggggaggggggggagtttgctataactccctctccaggttttaaaatagttattcagtctaaaaacagactatgtggtgctggttggaggtgggggtggggaagtattgcaacctagattataaagatgatggaaagagtgaaatggagaggaaaaaggacaagaaactccagcaaatgccagggactgctaatggagagaaataacatggctaattacatctctgaaggctatccattccaaaataaatgtttaatgaaaaaataatgcattttccctgcaacttaaatctgggagtgaagagaatgagcagagtctcccagtgggcactagagtagctgtgcatgtgcagggttgcctctgaccgtctcaccttgatgagttgcttccccagcgtcctcatcctgagggtgaccacacagcagtcttcccagggaagccacaggagtgagccatgggaacctcacacaccaagcaactaggctccaggacaccaggggcagaccaaggtctgtaaatccaactccctcccccaccaaagcttgcgatgtttctctccaacagctccaggaggccttctctggttattttcctccgcccacctctcctttccattctctccatcagggagttccagatcttaaatctatgggtataaagttgaggtccttctgtgaaatgaaggctcacctctaacaagccaaacagatctgtttggtaagtgtgggttttggagaagaggagctcctccactctcccctctttctagcataatctgtagaccagaatagggagagagaatcatgagttttagagtcaaacagacttgggttcagatcctagtcttataacttacttgttatttgacccaggttaagtcatttagtttcccagactcattttccttatctgtaaaagggggtgctttgtaaaattattgtgtggtttaaataatgtctgcaaagtgcttttcacagtatctagtatctagtatactcaagcattcagtaaacagcagttttttgtgttatcatttgtttcagagcacaagaaggctgaccttgaactcctcaagatgcttgctcctgggattctccagctgcaatcagcatcccccacccccacttgcctgcggttgctacatgggtcagacagcaaggaccacaggggcactaagtttgctgctgactcttgacctcagatgggctatttggccaagggcccagctctccctccaatgtagaggaggcagggaggcaggagccagcaagaagttcctccaggcaaagggaaagtggcaaagatactcaagagctcacaggtacctagcacacattgcccatgggcacacatatcactctgcaaactatacacgaaacccctgaaattcaggagtacacaagcccccacaaaatgtaggaccacatgcttcaatattcactttccaacatattcagatccacagaaacacaaatagccccgcgtaatgtgcatacaaacacatctatatcatgctgcaacatgcccacacttacacgtttcccccaaaacagcatgaaatcaatctgggcacctcacttctatgsaaaacttgctctctgaagtgtgaacatttgtgcacacacacaaatacacctaccctgtaggtccaaatgcctgggcagcatgccaggaatggcacccctgggccttgccagtcatggcagcaattcacagatgattcc

SEQ ID NO: 670877 - DNA, 631 bp, Homo sapiens
ttgagactttgctcatgtgttgcttcctctgggactgttggcaaagtgaagcacttcctcctctgtgtgtccataaggcctcctagtgaacaatttcccctccagagcttagagctgcttgaggtgtggcctgaatcttgctccattttgttctcaccagtaccacgaactgtgtctagtcaataccagaaatgcagtcatccttgttgagcttatggatgttttagagacaaaagctgaaatttaagagtaaggacaaacctaaggcaaagaaagcacaccagagatggaaaaaaaattttcctctgcactggccacacacaagcttcagtacagagagaactctgaactcaagaattctgagaaatggggttaattaatcaaagaaacactggagactgagacaactttaggtcatttagtcctgccaggactataatattccccacagtayatttcctagtgtattatcctgtcatactttaaatattctcagtaatggggcctttcagaggtgctgattaatagggtttagagaaaaatggcaagaagaaaactgcatgccaaggagcagaggaagagagagtgatgggcaatttcatgtctttggacctagaaggtgaaagggtca

SEQ ID NO: 670878 - DNA, 1533 bp, Homo sapiens
ggttctgggaaatgtctgcaaaacattgaaaacttcaaaaggaggggctatataagaattgtaatggaagaactaaatgtgcttatctttacaatgacccatagaatctagcctctggtcttggtggagtccttccttgttggataatggggcaccctattgcttagcctagcaatctgtttatagagcattctcccctgggtttagtaggtcaattagaagagatcgtcatgttccacactgaccatattagcccattgcttttgcccctgatatatgaattttatttgcagaaatcgagtttataaaatggaaactaatacttttcattatgaagtgctaccccactccttctccttgttctcagctcttatcacatttcatctcaaattctccttgtcctgcccttcgcttcccttgtggcttctttcatctttgcctcttaaccattttgtcacctaggacatatttccatcttgctttaactaatagttaatatttgagcacttaccatataccaggcaattgcctgaagcacttcatgtggattaattcacaaaatattttttgagtcagtttatattatcatctctgccttaaaggtaaaaacaaaacaaaaacttctgaagcatagaatgataaaacaacttctcccaaatcacatacgtaataaatggccggacaagggttccagtaggcccttagagtcaaccctagaacctgagcttttaacctccccacctcatttggattcccaatctacctatgaggtcctttatttaaaatttaacaatttgttgagtaaaataaatttggtttatgcatctattccaaatcttagcaatgacggctttgggatagttgacatctatgttatgagctcctgaatcaaatgtcttaattgtctcaggtgtaggtgtcctttctattctgacatctgaaagctgagtattggctggagatagccgtgagcttttttcttactgctttttctattttcttgctcccttccaagtcttggtcagttggttatctttaatatcttgctgggatcttccaagctgtagaaattwtaagcagtgactaccaatgacacatttagctcagctacagatcaaactgggaagaaagtcacatgaaatggaagtgacatgtaccctacctgatcctgggagagatgttaaaatacacatcatcaactaaagccctccatgggaccccactacacttccgagcctttcagatttcccccatgcagcaatgctaacttaaaaaaaaaaaggactgggttgagtatttagcagtcaccttcactgtaacactctgcagtgtatagcatcttcactgaaatccttttgagaaagacctagactgggaatggtagagagattccaggaatggaggagaaatccctagcacactttaaaatatagatattactaccaatagactagcaaactaaaatgcaatagcgaaaataactgatttctttttttttttttttttgagacggagtcttgctctgttgcccag

SEQ ID NO: 670879 - DNA, 1533 bp, Homo sapiens
ggttctgggaaatgtctgcaaaacattgaaaacttcaaaaggaggggctatataagaattgtaatggaagaactaaatgtgcttatctttacaatgacccatagaatctagcctctggtcttggtggagtccttccttgttggataatggggcaccctattgcttagcctagcaatctgtttatagagcattctcccctgggtttagtaggtcaattagaagagatcgtcatgttccacactgaccatattagcccattgcttttgcccctgatatatgaattttatttgcagaaatcgagtttataaaatggaaactaatacttttcattatgaagtgctaccccactccttctccttgttctcagctcttatcacatttcatctcaaattctccttgtcctgcccttcgcttcccttgtggcttctttcatctttgcctcttaaccattttgtcacctaggacatatttccatcttgctttaactaatagttaatatttgagcacttaccatataccaggcaattgcctgaagcacttcatgtggattaattcacaaaatattttttgagtcagtttatattatcatctctgccttaaaggtaaaaacaaaacaaaaacttctgaagcatagaatgataaaacaacttctcccaaatcacatacgtaataaatggccggacaagggttccagtaggcccttagagtcaaccctagaacctgagcttttaacctccccacctcatttggattcccaatctacctatgaggtcctttatttaaaatttaacaatttgttgagtaaaataaatttggtttatgcatctattccaaatcttagcaatgacggctttgggatagttgacatctatgttatgagctcctgaatcaaatgtcttaattgtctcaggtgtaggtgtcctttctattctgacatctgaaagctgagtattggctggagatagccgtgagcttttttcttactgctttttctattttcttgctcccttccaagtcttggtcagttggttatctttaatatcttgctgggatcttccaagctgtagaaattttaagcagtgactaccaatgacacatttagctcagctacagatcaaactgggaagaaagtcacatgaaatggaagtgacatgtaccctacctgatcctgggagagatgttaaaatacacatcatcaaytaaagccctccatgggaccccactacacttccgagcctttcagatttcccccatgcagcaatgctaacttaaaaaaaaaaaggactgggttgagtatttagcagtcaccttcactgtaacactctgcagtgtatagcatcttcactgaaatccttttgagaaagacctagactgggaatggtagagagattccaggaatggaggagaaatccctagcacactttaaaatatagatattactaccaatagactagcaaactaaaatgcaatagcgaaaataactgatttctttttttttttttttttgagacggagtcttgctctgttgcccag

SEQ ID NO: 670880 - DNA, 1355 bp, Homo sapiens
ttatttttttgagatggagtctcactctctggccaggctggagtgcagtagtgcgatctcggctcactgcaacctccgcctctcaggttcaagagattctcctgcctcagcctcccaagtagctgggattacaggctcccaccaccacacccggctaatttttgtattttttagtagagatggggtttcaccatgttggccagtctggtattgaactcctgacctcaagttatccactggcctccgcctcccaaagtgctgrgatgacaggcgtgagccaccacgcctagcctccaaccaagagattataattgcttgctgttactctgataacagcaagctctggcctgatactcttgggtatcaggtactcttaggatgaaaaaaagcagtcactgccgttgtagtctctgatctcaagcagtggtcttcaactagggacagttttacctactcctcagaggacaatgtctaaatacatattttttattgatatgtaataattgtacatatttatgagggacaagtgatatttgatatatgcgtaaaatatgtaatgagcaaataagagtaactgggaatctattacctcaaatatttttcattctcacaattgaagtggaggtgctactcttttttcatttttcaagacagggtcttactctgtcacccagaccagtgtaagtgcaagatcctagctcactgcagcctcaaactcctgggctcaggtgatcctcctgcttcagaatcccaagttgctgggactacggggtcataccaccatgcctgtggtcttcctatgttacccgggatgatctcaaacttttggcctcaaacgatacttcctccttggcctcctaaagcactgggattacaggcatgagccactgcacctaccctgatgctactgttacccagtggagggagaccatggatgctaccaaacattctacaacacacaaggcagcattacaaaaataaattagcccaaaaagtcaacagtgctgaggttgaaaaatctagcctatagagtgagaaatatgtaatgcactgttataagtactatcttaggaacatgaatgaataaagtgctgggaaaactcaaaggagagagaactgagggtgaagaggtgttgaaaaaagctttatagaagaaatgacattggaacttgacccacaagaatgagcctgctttagccagggaaggatgaaaaggcagagaggcatcctaggtaggggagcaaagataagaaagtgtagaaaagtaatcatgtcacaaggcttttactgtgtgcagttactatagtggtatacctcgattcacgattacatacaaatgaggttaacatcactct

SEQ ID NO: 670881 - DNA, 587 bp, Homo sapiens
tgcagagtgaaccaaaaacaaaataacgttgagtatttgatgtctagaaggagtatggaccaattctacttattgtcttttttcttttcctataacacttgataaaaagttaggactttagggctgggcatggtggctyatgcctgtaatcgcagcacttttggaggctgaggcaggtgtatcacctgatttcaggagttcaagaccagcctggccaacatggtgaaaccctgtctctactaaaaatataaaaattagccaggtgtggtggcggacacctgtagtcccagctacttgggaggctgaggcaggaaaatcacttgaacccaggaggcagaggttgcagtgagctgagattacaccactgcactccagcctgggcaacaagagcaaaaactccatctcaaaaaaaaaaaaaaaaagttaggactttaacaatatgtatcatgtatctaagaattttaacataaattaacagttctcaaatacctaaagttgaatttataatactaatataatggtggaaataattaaaataataatatctataaaaatagtatgcctttattgaacactaagccccaagc

SEQ ID NO: 670882 - DNA, 587 bp, Homo sapiens
tgcagagtgaaccaaaaacaaaataacgttgagtatttgatgtctagaaggagtatggaccaattctacttattgtcttttttcttttcctataacacttgataaaaagttaggactttagggctgggcatggtggcttatgcctgtaatcgcagcacttttggaggcygaggcaggtgtatcacctgatttcaggagttcaagaccagcctggccaacatggtgaaaccctgtctctactaaaaatataaaaattagccaggtgtggtggcggacacctgtagtcccagctacttgggaggctgaggcaggaaaatcacttgaacccaggaggcagaggttgcagtgagctgagattacaccactgcactccagcctgggcaacaagagcaaaaactccatctcaaaaaaaaaaaaaaaaagttaggactttaacaatatgtatcatgtatctaagaattttaacataaattaacagttctcaaatacctaaagttgaatttataatactaatataatggtggaaataattaaaataataatatctataaaaatagtatgcctttattgaacactaagccccaagc

SEQ ID NO: 670883 - DNA, 587 bp, Homo sapiens
tgcagagtgaaccaaaaacaaaataacgttgagtatttgatgtctagaaggagtatggaccaattctacttattgtcttttttcttttcctataacacttgataaaaagttaggactttagggctgggcatggtggcttatgcctgtaatcgcagcacttttggaggctgaggcaggtgkatcacctgatttcaggagttcaagaccagcctggccaacatggtgaaaccctgtctctactaaaaatataaaaattagccaggtgtggtggcggacacctgtagtcccagctacttgggaggctgaggcaggaaaatcacttgaacccaggaggcagaggttgcagtgagctgagattacaccactgcactccagcctgggcaacaagagcaaaaactccatctcaaaaaaaaaaaaaaaaagttaggactttaacaatatgtatcatgtatctaagaattttaacataaattaacagttctcaaatacctaaagttgaatttataatactaatataatggtggaaataattaaaataataatatctataaaaatagtatgcctttattgaacactaagccccaagc

SEQ ID NO: 670884 - DNA, 587 bp, Homo sapiens
tgcagagtgaaccaaaaacaaaataacgttgagtatttgatgtctagaaggagtatggaccaattctacttattgtcttttttcttttcctataacacttgataaaaagttaggactttagggctgggcatggtggcttatgcctgtaatcgcagcacttttggaggctgaggcaggtgtatcacctgatttcaggagttcaagaccagcctggccaacatggtgaaaccctgtctctactaaaaatataaaaattagccaggtgtggtggcggacacctgtagtcccagctacttgggaggctgaggcaggaaaatcacttgaacccaggaggcagaggttgcagtgagctgagattacaccactgcactccagcctgggcaacaagagcaaaaactccatctcaaaaaaaaaaaaaaaargttaggactttaacaatatgtatcatgtatctaagaattttaacataaattaacagttctcaaatacctaaagttgaatttataatactaatataatggtggaaataattaaaataataatatctataaaaatagtatgcctttattgaacactaagccccaagc

SEQ ID NO: 670885 - DNA, 902 bp, Homo sapiens
gatttgaggatcgtatcaataaatcatcaaaagccacaagttgtaggctgtcagcacctactcattgactagtacagattctgtaacatgtgtgggcttttccattaaaagcaaattacaacagtgactgtttactaagtgcctctttggcaaaacactgtatttaagtataagccatggtttttattgtcatrggcttctaacatagctgagaaaaatggcatttatttataaataatatagtaacatatgcaaataatagagtaaaatctaagagagtttttaaataaaatgtacagagttacattctttagaggaaggaaaggtaactttgacttgggtgagaattaagtcaggaaattgtataagagatgaatttgaacacaattcctagttggtctcaggaaatggccaagactgatgaagatccggtcaattttgaaatgcttgctgggttcattcatggatgaaaaatatcaggatttttacaacagaggtcacaaacaaagtagctgaaaaatgaactgctcaactgctgaataattctttaggagcctattgatgttaataatgcaattttgtcctagttttttatgagctattaattggaaaaagtctatttatacagttatagcaatccagatgccatggaatatgccactgtctttagtacaatataagtggtaataataaatactttaaagtcaaattttatctgttccttgaagcttattcaaatacttaaagtcagtctcaatgagctctctctttttaagaatctctctttacataacgtgtacttcagggccaaaaaaaaaaccttccccttagcccactgctgaaaatcaactcaaaaaacacaggttaataagtgagaaggcatacgagtttattaacatgca

SEQ ID NO: 670886 - DNA, 1527 bp, Homo sapiens
ggtagagatggggtctcactatgtcacccaggctgctctagaactcctaggctccagtgatcttcttacctttgcctcccaaaatgctgggattgcagacatgagcctggtctgagttttatccattccaaatagtcagtagcactgaggtagagcttgtgtaaaacatccttctcttactagataggtgaactcttgtaattaagagctcagtcagtggatctggggctcggggttttgactctgctacttgactttgggaacttaacctcttaagtcttaatgtaactacttataaattggaaatagtgataatacgtaccttacaagactgttctgaagactaaatgagagaattctacaaaatgattagcattgtgccttgcattgttagatgaactttaattctagctgacaaaaaaaactttggttaaacaaagtatgttctttggggacccttaaatactgctgcttagcaggtgttaaaaagagctgcttccagatcagacagctttattttgaatcgtgtctcctgtacttgttaactgtatgaccttggggaagtaccttagaaccctctgtgcctcactttgttcatatataagatgagtgtagtgagtaatgtgtatcttctagagttttcgtgaggcttaaataagagtataaatgtgaagtacttagaaggatgtctaccacttacaggcagacagtgttagctcttattattcatatacctaatattgttagataaggcataacatataaattaatcttcagaccaagtgaacattaccccttcaaataccagtcctatgttttaacaattaaagtaatgaaaatcactttacaattatttttaaaactcttgcttatttaaaaatgaatactaaatgcttttaaacatgtcattgttcactcaaggtccttgtcattgtaatattgtttcttgtactagactatgatataggaagctcttagaacaattgaagtatgaggatttttcttaatccagattactaagacttttatttttgtcttttttwaaaaaatactgtttttgtatcatttgcatcaaaatatcagctctctgcgtctaggatctctatcttgccttttctaaataactgtatttgatcagctgattaacagtatttattgaatgtgctatatactatgctctaagagagcatatattgttttggtagattagcgaccaaaacaaaatgatttttcttgaggattttgatttagcagaagtaagcattgatgacataatgccagttaaataactataaatttaaatgtgatctatgctgtgactgagccatcgcagttgctatacttatggacaaaccccactcatgtaggacacaagataggccttcataaggaattgattgttaagtggaaatctataaaatgagtgggcatcagcaaggcaaagagaatgagcattacaagtcgatgcaacagtatatttaaaggtcctgattccagagtgggaggcattaaaataaagggattttt

SEQ ID NO: 670887 - DNA, 1436 bp, Homo sapiens
ttgccctgaaaagatttataaataagattgccagaaacatcgtctaagataagtacccctaatagctcacctttccaaaggacttggcaaggcattttcacacccctcctcatctgtttctggcaggcagtcacgtttcactacactcattttcacagaggaagaaaataggctcagtcatccagtgaattgaccaaggtcacatagcaccaactgaggagctgggcccacagctgaggtctctggactcctattctggtgctctgtgcacctgatactgcatctggcattgggggtggagagctgccctggatgcctctggaaggtcctgcccagcagagagaggatgagaaacctgtctcagggctgccccatcctcttcgtgtccttgttcttagtccagggtcctttcaccaaaacaaattaaatccaggcccgagctgtgtrtctggagccaccactggccttctgaaattcttcttggtgtggggctgagtggataaaggaggaccctgcagggctgctggcatcatcaggcaggagtggcacttcgtctgcttcttcccagttattgcaagttcttcccaggttcccttccatttcccagcagatgctaaatggagaagaggaaaaaagtgccctctaaagcttggttcatggggatattcccgtctttgggtttggagagattagaatttgaaaggagtgggggttatgcctatgtatctgtgcgtacatgtgtggtttgggaacaggcaacttctgcttcctaataaaaaaaaattaaagcttgaaagggatttgttaaatcaactaaagggggcccttggggtctccatctctcttgtgcgcaaacccttgcccagtgtgtaaatgaatgaggaccgcatggatttgacttcactgagaaatggcactggcttataaaatccagggagaaacatcatcaagagccaggtttgttttcatctctctgtccacacactcccagcagcttgttctagccgctccagcctccaggcagtggggtatttgcatgtttgggtgagagaaggaggaagaaaagtcacagtcatgaatcaaccaagcccaggccatgtgagcacttggaagaaaggagactcgtcactttatttaccaaaaaggggctgggtcctgctccccagatgtgaggattcagcctgcaaaatggagcgggaggtagatacttagatccccagtgcatggcttcaaagcaatagcgagagtaactttgtcttcctttccatttctccagtcttcctcttagggcctgattaccaatgtgatgtacaggatgatgctggtctagaaaacattcccctcaaaggaagcccatggcctttgtggggaggaatcagtagggggtcggggggcacactgttggtgtgcattggggggatctggtaaagacctcc

SEQ ID NO: 670888 - DNA, 1436 bp, Homo sapiens
ttgccctgaaaagatttataaataagattgccagaaacatcgtctaagataagtacccctaatagctcacctttccaaaggacttggcaaggcattttcacacccctcctcatctgtttctggcaggcagtcacgtttcactacactcattttcacagaggaagaaaataggctcagtcatccagtgaattgaccaaggtcacatagcaccaactgaggagctgggcccacagctgaggtctctggactcctattctggtgctctgtgcacctgatactgcatctggcattgggggtggagagctgccctggatgcctctggaaggtcctgcccagcagagagaggatgagaaacctgtctcagggctgccccatcctcttcgtgtccttgttcttagtccagggtcctttcaccaaaacaaattaaatccaggcccgagctgtgtgtctggagccaccactggccttctgaaattcttcttggtgtggggctgagtggataaaggaggaccctgcagggctgctggcatcatcaggcaggagtggcacttcgtctgcttcttcccagttattgcaagttcttcccaggttcccttccatttcccagcagatgctaaatggagaagaggaaaaaagtgccctctaaagcttggttcatggggatattcccgtctttgggtttggagagattagaatttgaaaggagtgggggttatgcctatgtatctgtgcgtacatgtgtggtttgggaacaggcaacttctgcttcctaataaaaaaaaattaaagcttgaaagggatttgttaaatcaactaaagggggcccttggggtctccatctctcttgtgcgcaaacccttgcccagtgtgtaaatgaatgaggaccgcatggatttgacttcactgagaaatggcactggcttataaaatccagggagaaacatcatcaagagccaggtttgttttcatctctctgtccacacactcccagcagcttgttctagccgctccagcctccaggcagtggggtatttgcatgtttgggtgagagaaggaggaagaaaagtcacagtcatgaatcaaccaagcccaggccatgtgagcacttggaagaaaggagactcgtcactttatttaccaaaaaggggctgggtcctgctccccagatgtgaggattcagcctgcaaaatggagcgggaggtagatacttagatccccagtgcatggcttcaaagcaatagcgagagtaactttgtcttcctttccatttctccagtcttcctcttagggcctgattaccaatgtgatgtacaggatgatgctggtctagaaaacattcccctcaaaggaagmccatggcctttgtggggaggaatcagtagggggtcggggggcacactgttggtgtgcattggggggatctggtaaagacctcc

SEQ ID NO: 670889 - DNA, 561 bp, Homo sapiens
actcacccctataatcccagcactttgggaggccaaggagggtggatcacctgaggtcaggagttcgaggccagcctgaccaacatggtgaaacctcaacactactaaaaatacaaaattagccgggtgtgrtggtgcatgcctgtagtccgagctacttgggagactgacacaggagaaacgtctgcacctgggaggcagaggttgcagtgaactgagatcgcgccactgcactccagcctgggcgacagagtgagactccgtcaggagttggagaatgagagccagggtggctggggacaatgctggagcccgctgtgcatgtgcatctgggtttggcacctggcagcgatgcacatgagctggtgaactgcagtggtctccattttcttctgggctgaggtttgttgggaggctttagctcctgtgcgtgttgctgcacagagcagctatgcactgatgagaaaggactgtggaggggtggatggcggcgtagacgtggggccatgctgagggctcctggaagtctgtgaccttggcttgctgtccctcagaccttca

SEQ ID NO: 670890 - DNA, 634 bp, Homo sapiens
tcgtttccaggtaactcaggcacacagaacttccctgacacaagctctttcatgcctctgtatgttgacacacgcggctcccttttctggggcactcttcctgtcctgttcttctcaccagagctgcatccgcgctttgtaactcagttatcaattgggcctctttsctccgtacaatgcggcctatctccctattataagacattgcattacactgagtttgttctttacaagtgcatctccctgcggatggagctccatgaacagttgttcagatgttcttataggcagtgctgcagtcaacattcttccacagtctccctggactggctcccaggactccagtgttggagtctgagtacacaaaggagtggaggaactggagacctgcccactcccttcatgttccaacgtgatgccgggggaccgggctctgggatctgctgtgcatctcaccgctgtgtgagggtgcccatttctccatgaggggtcagcttttagtactgcccacttttaatgtttgccaagctcgtggatgtaaagggtatcacactgtgatttccatgcacattttcctgaattaaagggtggctgagcatcttctcatattttcttggcaattcagacttcccat

SEQ ID NO: 670891 - DNA, 595 bp, Homo sapiens
gggagaaagactaggttctagttcagatcctcccggcctggctcagctgtgaacctcgggtaccacggggcctctcccttgagctgcccaagttagaacggaaggtatgttgctgtccagggaaaaatacgtcttccccaccctccaaagggaatgcatctgctcctcttccagaattccaaagcatcaccaaaccttcatagagttcaggacccacacgaaacaggcaccagccctgcgtggggcttctggctgggttcaggggacaagatacagccccacagcttcccctttctaggcctttaccatccctggctgacactgagcaccaggcattgtggtcactcatgtacttacacygtcgaagccacccccaacacagggcctgtggctgcatcctcgctctagaggtgagaagactggggtgcagagacagcgtcttggtcaagggcatacggctcaccagtaaagagaaaaatgcaaacccaggcagcctgagctctcagccccctcccctgcgataccactaggcctcccagtgaggccagagaccatggtattgcacacaaatttcagaaagcacaaatcctacaga

SEQ ID NO: 670892 - DNA, 1747 bp, Homo sapiens
tcctttctgatgctgaaggagcttagaatgtcgggagtaatccttagttttgtaaatatcatactttatatttgaagagaaaacccattagaacctttggtgatagaaagtctcagaaacatatggttggtaagaaatcatttagccaaagacttagattccgtggtagacaaagcttaaataactaaaaatgggggtcagcaaactatggtgtgggggccaaatctgctgyttttgtaaataaagttttattggcacaatgccatgcccattcgtttacatatcatccatggctgcttttgaaatatgacaagagttcattggttgccacagaaaccatatggcctacaacatctgaaatacttattatctgggcttttagggaaaaagtttgctgacctctggtctagaatctagagaaagttacatacttctaaaatgatttcagatttttttccacctaatttagcctagagaactcagacaatgccagggatatttgagagaaggaaaaaaatattcatctttttcctcgtcatgttcataaaagatgcagtgtgccattgaagtaaagaatggatcctctgtttcccagactacccgtaaaagtcacagaagagaaatgaaggaagtacaaacaccaagataatttcatctgggcaactgcttttaaagaaagcagtatttaaagtttagtaatcaagctcataaatgagcaaaaaagaaaacaataacaaggcatgcattcattgatatataaaaaattccttctttcctgagataagccactaaagaaaagtgtttgggggtttgttaataggtgaagaccacggaaaacttgtagccacctactagctatctcagccaaaagcacagcatatcatcccaagttaacaccaggtcaccttttcaggtctcaaaagtcatccttcaaataatacctgactcccagagaaaatgttatggaaaataacagaaaatgagaggcaggagaatcagttgtaagtaagcagcagtagaaaacccaaactgtagtccaagcagccttgttgacaaagcttcgacaaaaacaaaatgtcttgaaccttggttccgtcatctgaacacactggttgttgtgagaattgaataagatgtccgtgaaagtgctttgcagacagaagcacatcacacagattagtattaaatgtctacacataatcatatcttttactctttctcctcccaacctgcacaccatatgcaacagcctcagtttgttcccatgttgaaatgggctcaattgtgatctgagctccaccccaacaccaaccacataagagtttggaaagtccaaataataggcaaaatcagagaaactgattggaactattgtgcaaatgaggtgggcattttcttatccaattgaactttaaaaaaacagaataatgtattataagaatacatactcatcaccaaaagtaagaacgcataaataaaaacaaaagatatataaaaggaggtaccatgtacaccaaagctccaagtggattagaggacaaatttttttaaaaaaattttaaattattatggatacataataattgtatatatgtatggggtgcatgtaaaattttgatataagcacacaaagttaatgatcgaatcagggttatagcatacccatcacctcaagcatttatcatttctttgtgttaggaacatgccagttccattctttaattatttaaaaatatacaaaaaaata

SEQ ID NO: 670893 - DNA, 1195 bp, Homo sapiens
taatataaagtttaccatttaactattttaaattacgtttattagcattaattacattcacagttttgcaatcatcaccactatctagtttaagaattcttttattacccccaaaagaattccctttgcctaataagaaatcacttcccattttctcctattgcattctctggcaacrctaatctgctttctgtattgaatgatttgctgtttttgattccatgtatattgaatcatacaatatgtggcctcttgtgtctctcacttagcataatgtttccaaggtacatctgtgatgtatgatgtattagtacttcatttctttttagtcctgaaaaatattccattgtatgaatatatcagattttatttatccacttatcagctgatgaacatttgggttatttccaccttttggctattgtgaagagggctgctttgaaacattgaccaagattaacaaatctattagttttcagtgctaaccagtgagggggagaactattaagttataagagtatagaaataatgttatagtactatagaaaaggagagagattcaacatccaaattttgaatgtcaaggaagattcccagaaaataatgagataaatgcttagatgtgagggataattgacattggtaaattttatatagaaatatggggtcatattttgggcatacatcacagtgcgctcagactcttgggccacaagagaatgacattgggaataaatttatgtaatcttaatatgaacaaagaatgtatgtgtggaaatcatgaaaagtaaagggactgaaaatacgcagcatgttaagcacatatggactttaacctaagaaaaagaagcatatgctgccttcatctaaaatggaaagttggaaattacaccactcacaatgcaagaagaagaaatacgccaggttatagtttgaataaattcactagataaatgaagttacagggcaaccaagtagcataaaatatatgaaaaaatttgtccctccaaaaagagggcacacataagcactggtctctgtgctctgtggtagagcacaggagaaataaaagtcaaaataggaattgatagaaaacttcttcacactgataaagtcactggacctacagctaacattatacttaatgattaaatttaatgattaaactcacttatttctcacaaagtttaggaaa

SEQ ID NO: 670894 - DNA, 570 bp, Homo sapiens
ttgcattcacccttctcagggagtattcattccaggcactcagtccaaagttgtacctgtctgtcagcagccaggatggtctgatactttctatttgacagaaaacgatttggggtacaaacaagggctgagtagcagcaagacctagggtgggggcaggataggtgggaggtagcgaactgaagtgagccttgtttactcataggctacggctttctcctcatccccagtcctgacacctgtgaattcctcttctggccaagccctagaaatctcccctctccgtgcaccctcactttattcaactctggccccattctcttcctcatgctgcaagaagctcccagctactcaacacaacaagcmcacgcagcggcctatgccgtggccgtaggttgtatccacttcatgtttccttgttgggcttctgtttgagcacagacatgtttccacgcagcatttctgtggcgttaagtgctcccaccaactacattcctgtgcctcccatcttttacttctggtaacaatacttttggtaaggaagtgtgttgtggaagttgacttttatta

SEQ ID NO: 670895 - DNA, 1571 bp, Homo sapiens
taaacaaatcaagataaatactttttaaagtgcataatttcttcggtttgtaagaaacttacccctgtctacactatagagcataactcataaagaggtcgcgtatcaaaaccatgcaattttaaacaaatatgttctttgcacctttcctgtcctccccactaccaaagaatccctcatacggagagccagatgagtaacacaccagcttcattctctccagtgagccaaaggtggcaccacaaattcatttttcagtgttaatgaactgaagtccacgaacgcttctcacgttcttactgctctgcagtagaaaccggtttctgtggcgtaaccacagattaccacttgaactttcattttatctgatcagcagcaaaacaaatcagaggaacctaaaaagtaccagtgatgggagacctctcctctcccttcatctcttcagacacctgagaggcaaacacggacagcaaacctcaacctcccacttcctattgtgggtgaaaatgagcaaccctggaagccacttgctttagacaagtacggagatgaaatgctctattctgcctccatgccatacgccttctcagaagacactccattttatcaccccttaggaacattaaatatgcatgtgtactcaaaaacagtttataatagctgtaaatgaaaaatgagaaactaaatggcctcaaaataaatgcgttttttacactggataacaattaacattaatgaggagttacatcatacattatgctgaacttggttgactaaatgtgttgagatatattttagaaaataaaatagattttgttaccataaaaataacttttgtgtgatggtgcgggggggggatcgacagagcagatgcttatccaagctataagaataacaaaattaaaggatcaaaaattcataattagtgttaacggcacagcttatgcctattagaaatgtattaattaaagtaatatattcataaggttagaagcttaatacatttctaagaggggggagagaaatccccaggcctaaaaacaaacataaaaaattaaggagtgtgaattatccacgtctgctcaagaccaactttaaacacagacattcctatgccggatgaatcggaattcccgaattcctacaggttatcagggccttcccaaccgtggctgtcattatgatcacttccagttgcctaactgttggcaaacgtgtcgggagccaggcatcttccaaagttcctaccttgtggagtctaccgatggtttcgtccgcccctggctgctctcttcccagacgctgttggctagctcgttcccgatggatgacatcaccttgatgagctcgaytggccagtcatccaggtccagagatcggactcgggaaaggtgggtgccaagattccggtggatccctgagcattcgatgcacatgagggctcccaagttcaaactggcccagttgggatctacgggaagaggaacagaacgctaaacgcaatcagaccatcatgcatcattccaaccgttcttagaaacacaaggcgacgaatcagtcaaacttcacaa

SEQ ID NO: 670896 - DNA, 649 bp, Homo sapiens
ctgttttgttgactgtagccttgtagtatagtttgaagtcaggtatcgtgatgcctccggctttgttcttttggcttaggattgacttggtgatgtgggctcttttttggttccatatgaactttaaagtagttttttccaattctgtgaagaaagtcattggtagcttgatggggatggcattgaatctataaattagtccttaagtggcataaaaaccaaatggcaatgtgagatccttgatcaaattctggttagaaaaaaacaactatgggccaggygcggtggctcacgcctgtaatcccagcactttgggaggccgaggtgggtggatcacctgaggtcaagagtttgagaccagcctgaccaacatgaagaaatcccgtctctactaaaaatacaaaattagccgggcatggtggcacacacctgtaatctcagctactctggaggctgaggcaggagaatcacttgaacccaggaggaggttgtggtgagcggagatggcaccactgcactccagcctgggcaacgagagcaaaactccgtctcaaaaaaaaaaaaaaaagaaaaagaaaaagaaaaaaacaactatggatgacctttgtgagacaatggaaaaaattttttttttttttttttttttttt

SEQ ID NO: 670897 - DNA, 1039 bp, Homo sapiens
aatctgtcctgattattgatcgtcattttttaactactctctgttctaccatgattaatccaacaaagcaaaacatctctaacaaggaaactgggtttgtatacagtacttactttataaatagtaacttgagagaaatacttggaaatggtgttcagttttattcctgggacaagaggattccagatatagaagaggagggagagcaaaataacttcaaagaaagtcaaatttgtggaaactatgagaataaaaatagaaccaagaagtggcccagggacttagcctccttgatacccagtagttcccaacaagttttcagatcatgaaagacaaagtgggaagatctggaatttcctcccgtgatgatttttataaatagcatagtgtctcccaaacttcaagcattaatctaacactgtgaaagttttagccttttaatgtatcactatctttctacaaatcagcttttttgcttaaattaagaaaaaataaattttacatcattacargagcagaaagagtgtagctttctaaataaaggttaagtataaaaataaatccaatgaaagcaaaaagttactaaattctagttagatactaatgattgctgacggctctgaccatgagattctttctctgttgaatagggtgtaaaccaaaaattaaattctaaggccccccaaccatctgaatggacttcctcctcagccagggctcttttaaaaatttaacctgagaggctgtttcaggccatgatggaaagtgagagtcagacatacccccttatacctcttcagcattcacagcaacacagactttaaggctgataagaaacgttttacaaactattctctctgaagcctaccatctgaaggcttcctctgcaaacaagaactttggtctccataatcctttatcttaacccagacattcccttctgttgatcccaggtctttagataaactcaaccagttgtcaaccaggaaaaattttaaatctacctataagctggaagccccctgctcccaccccacca

SEQ ID NO: 670898 - DNA, 651 bp, Homo sapiens
aatggtgatttaaaattatagattaagactggatttttaaaaaattaatgaagttcggctgggctcggtggctcacgcctgtaattccagcactttgggaggccgagcgggtgggtcacctaagttcaggagttcgagaccagcctggccaacacgtgaaaccccatttctactaaaaatacaaaaaaaaatagccaggcatggtattgggcacctgtaatcccagctacttgggaggctgaggcaggagaatcgcttgaacccaggaggtggacgttgcactgagctgagaccgtgccattgcactccagcccgggcaacaagcaaactccatctcaaaaataaataagtaaataaaaattaatgaagttcttcaaaaagcatttttctgtcttccatttccacagctcaaaagtcatctgtcagctgtaacttgctcctaagatggtcctccttatccayggccagccagcctgctcatagtgagcttgtttgcactgggccctcaatggtagaagtttttcctggcaatatgcttgccaaacctcctggacacctgtacgtccagcagcatgctaggcactgtaaaggatggcacatctgctgcagagagaatctctgccctccactcagccaccagaaccagaaaaa

SEQ ID NO: 670899 - DNA, 609 bp, Homo sapiens
cttctgcctctctctcttgctcctgctctgtccatgtgactgcctgctcccccttcaccttctgccatgattgtaagtttgctgaggcctccccagaagctgagcagatgccatcatgcttactgtgtagcctgcagagccatgatccaattaaatctcttttctttctaaattacctggtctcaggtatttctttayagcaatgtgagaacagattaacacactccataagtccatcttgtatggcaccataaaactgatgtagagcttctttaagaacttttcctttactcaataatctagaattatttctccaaaactgtcctgttacttccatttcctctatctgtgccttttcatggtttgcacagctgtggttccaatcccactctcactacttatgtgactccagacaagttatttgaactcacagtctcgggtttcctcatctataaatggagatcatattctgtaaggtcattttcaggatgaaatgaaatgatgtgactcagtctcctgggaaacagcagactgtctctaaatgccatctcttgttgcttcacccctgccctccgatgcccaccctctgaggagtcttgtcactctgca

SEQ ID NO: 670900 - DNA, 947 bp, Homo sapiens
gcatgatttgcataagcctattatactgacttgcaacatccttcttccccccaggtaatcagttgacacccattccaaggcctgttctttttttttttttttttttgagatggagtctcgctctgtcacccaggttggagtgcagtggtgcgatcttggctcactgcaacctccatctctcagcttcaagtgattctcctgcctcagcctcccaagtagctgggattacaagtgcaaactaccacgtatggctaatttttgtttttttattagagatagggtttcatcatgttggccaggcgggtctcaaactcctgacctcaaatgatctgtctgcctcagcctcctaaactgctgggattcataggatgctgacgatcttcctgggaaaccttgagctgtatccatgatggaggttcagacatagctagacatgtctgtcaggtggggtttagtttgaggcgggtaagcagagactagattattagacaggacagcccctgagagagagaaacacggagttgtgtttggggtgtattgttcacayagaaaataactgcacagagccccctgtggcaaggtatcaggcctgttgagggcatgcttgttgttggtcttctaatgaagattaaggcaaagtgataggaatcattaccttcccttctgtctgcaaatcccacttgtccaggcaccacaagggtgcagatcagtagatgctagcaccattacattgagaacactggtggccacagccatcagcagattctgcatgctagcttgaaaccctacctcagctgaggatgaggccagcacttaggcatattgctgactcagctggaatcttcagaggctgctgagctgaaggcagcggtgccagtagctctctagtggtgtgcgatggaaccttaacatggctgagctaagggtgggctggaagaggaaggtca

SEQ ID NO: 670901 - DNA, 1320 bp, Homo sapiens
aggctgcagttagtcatgactgcgcgctgcactccagcctgggtgacaaagtgaggccctgtctcaaaaacaataaaaaatttaaaagagctgagcatggaggccactttgggaggctgaggcaggcagatctcttaagcccaggagtctgagaccagcctgggcgacatgatgaagccccatctctacaaaaaatacaaaaaaattagctgagctttatggcaaatccctgtaatcccagttacctaggaggcccaggcaggaagatggcttgagcccaaaaggttgaggctgtagtgagctgtgatcatgaacagagtgagaccctgtttcaaaacaaaatgaaaaacaaacaaacaaaaaaaccaagaaaacaagaaaacaaaaactatacaatgatgagccaaaaagcaagatatggaagaatatatatatatatatatatatatatatagtatgagtccagctatagaaagtttgaaatcaggcaacctaaacaatattgttcagggatctatacagaggcaggaagccattgagaaaggtaaggggaggattatcaccaaattcaggatggtggctcccctggggagaatatgtcaaggaggggcacatgggcttggaatactgtcttcattgacctgcgtgttgggtacacaggagtttgttatttttcacactgcatatgtgcatgtatatactctcccatatataccatgcatttcacacaagaacacaaaggctgtgtggctctgctctgcccctttccccttccagctcccattctcgtcytcagctagcagaggagggtcagggtcttttagcacagcttccttctgtctctgagtgggtcagaggagtacggggatgagggcctcccttctgcggctgggctctggccactccagggtgggaaggcctggagaaaacagggccaggcaaagccggctggccctgctgtttctgccaatgctgggattaggccagggctctggcccacctgtcatttcactcattcagcatgaacatagccactgagcacttactgtgagccccgggtgctattgggagagttcagataagtgagagagggtctttgacctcaaagatcttacagagaggaccgtatacacaaataacagtataccagcaaaatgtgagctaagtgtcatgtgactactcatctactctttcaataaatatttgttgtgcacctattacatgccaggaactgtgctggatggtgatcatgtaaagacagtcaaatcacagtcctagctctcagattcacagcctgcctaatgctggggaaactggaat

SEQ ID NO: 670902 - DNA, 1436 bp, Homo sapiens
  misc_feature 209, 210, 211, 212, 213, 214, 215, 216, 217, 218, 219, 220,221, 222, 223, 224, 225, 226, 227, 228, 229, 230, 231, 232,233, 234, 235, 236, 237, 238, 239, 240, 241, 242, 243, 244,245, 246, 247, 248, 249, 250, 251, 252, 253, 254, 255: n = A,T,C or G
  misc_feature 256, 257, 258, 259, 260, 261, 262, 263, 264, 265, 266, 267,268, 269, 270, 271, 272, 273, 274, 275, 276, 277, 278, 279,280, 281, 282, 283, 284, 285, 286, 287, 288, 289, 290, 291,292, 293, 294, 295, 296, 297, 298, 299, 300, 301, 302: n = A,T,C or G
  misc_feature 303, 304, 305, 306, 307, 308: n = A,T,C or G
gggccagctttacctcacccactgtgacccgccgcttccccttcagcctgggaccaggtttcctagatcccagcacagctctgagcttgttcctttgaggcatagagagccagagtctggcttccagagcattgacttcctcttcctagacttgaggccttttctctggctttcctcctttgccctgcagtagcaactggtgctgggannnnnnnnnnnnnnnnnnnnnnnnnnnnnnnnnnnnnnnnnnnnnnnnnnnnnnnnnnnnnnnnnnnnnnnnnnnnnnnnnnnnnnnnnnnnnnnnnnnntcttggctcactgcaacctctgcctcccaggttcaagggattctcctgcctcagcctcctgagtagctgggactacaggcacacgccaccatgcccagctaatttttgtatttttagtagagatggggtttcatcatgttggccaggatggtctcgatctcttgacctcgtgatctgcctgcctcggcctcccaaagtactgagattacaggcatgagccaccgcgcccagttcctgatgtgattattatgcattatatgcctgtatcaaaatatcttatgtacccctaaatagatacacctatgcagccataaaaattaataatttaaaaatatctttgaaaaaaataagtttctacttcatagggtgattgtaattattaaatgagttactatggaaagtgtttagagcagtacctggcatttagatgttaccatataaatatatagcatttatagtgtgtgtgtgtgtatatgtcatatttacacagcatttatatgtagtatttataattagtttgaaatctgtgacactgtggaaaagatttacgttttgaagtactgtatgttcagaattttccgtgaaggaaattcacaatgtggaagaaggaatcactttaccactgtttcagtctcataaggggttgtgaggatcgaatgaggccatatacctcagctacatttgtatttgattaataaaagaaaatacgggtgtagrtagttgtcatccaacttaacttgccaacataatttctgtatctgagaaatgctgcttcaagtccaaagcagcataaaatgatgcaagaacatcacacattctcatgacctgcacatcacatatgcaacaattccatgaatgctcatagaagcaccagaagatatcacccagacatggttctttaaactgctgctctgtgagactccttggggaggggaaagagcttgactgcctgggtttgagtgctggttctgtcacttattacatgtgatactggaggagttacttaacctccccaggcttctgtttcctcgtctgtaaaatgggaatgatatctacctcctggatttctgggcaagttggatgagaaaagctatgtgtttcagaaataaaaactgttgctgacctctg

SEQ ID NO: 670903 - DNA, 1436 bp, Homo sapiens
  misc_feature 209, 210, 211, 212, 213, 214, 215, 216, 217, 218, 219, 220,221, 222, 223, 224, 225, 226, 227, 228, 229, 230, 231, 232,233, 234, 235, 236, 237, 238, 239, 240, 241, 242, 243, 244,245, 246, 247, 248, 249, 250, 251, 252, 253, 254, 255: n = A,T,C or G
  misc_feature 256, 257, 258, 259, 260, 261, 262, 263, 264, 265, 266, 267,268, 269, 270, 271, 272, 273, 274, 275, 276, 277, 278, 279,280, 281, 282, 283, 284, 285, 286, 287, 288, 289, 290, 291,292, 293, 294, 295, 296, 297, 298, 299, 300, 301, 302: n = A,T,C or G
  misc_feature 303, 304, 305, 306, 307, 308: n = A,T,C or G
gggccagctttacctcacccactgtgacccgccgcttccccttcagcctgggaccaggtttcctagatcccagcacagctctgagcttgttcctttgaggcatagagagccagagtctggcttccagagcattgacttcctcttcctagacttgaggccttttctctggctttcctcctttgccctgcagtagcaactggtgctgggannnnnnnnnnnnnnnnnnnnnnnnnnnnnnnnnnnnnnnnnnnnnnnnnnnnnnnnnnnnnnnnnnnnnnnnnnnnnnnnnnnnnnnnnnnnnnnnnnnntcttggctcactgcaacctctgcctcccaggttcaagggattctcctgcctcagcctcctgagtagctgggactacaggcacacgccaccatgcccagctaatttttgtatttttagtagagatggggtttcatcatgttggccaggatggtctcgatctcttgacctcgtgatctgcctgcctcggcctcccaaagtactgagattacaggcatgagccaccgcgcccagttcctgatgtgattattatgcattatatgcctgtatcaaaatatcttatgtacccctaaatagatacacctatgcagccataaaaattaataatttaaaaatatctttgaaaaaaataagtttctacttcatagggtgattgtaattattaaatgagttactatggaaagtgtttagagcagtacctggcatttagatgttaccatataaatatatagcatttatagtgtgtgtgtgtgtatatgtcatatttacacagcatttatatgtagtatttataattagtttgaaatctgtgacactgtggaaaagatttacgttttgaagtactgtatgttcagaattttccgtgaaggaaattcacaatgtggaagaaggaatcactttaccactgtttcagtctcataaggggttgtgaggatcgaatgaggccatatacctcagctacatttgtatttgattaataaaagaaaatacgggtgtaggtagttgtcatccaacttaacttgccaacataatttctgtatctgagaaatgctgcttcaagtccaaagcagcataaaatgatgcaagaacatcacacattctcatgacctgcacatcacatatgcaacaattccatgaatgctcatagaagcaccagaagatatcacccagacatggttctttaaactgctgctctgtgagactccttggggaggggaaagagcttgactgcctgggtttgagtgctggttctgtcacttattacatgtgatactggaggagttacttaacctccccaggcttctgtttcctcgtctgtaaratgggaatgatatctacctcctggatttctgggcaagttggatgagaaaagctatgtgtttcagaaataaaaactgttgctgacctctg

SEQ ID NO: 670904 - DNA, 640 bp, Homo sapiens
tggacattagcacagatgtcagaagaaaccggaacctccagaagacagatgatattgaggttcttggggaattaaagagaaatattaccctctgcctcatttgccattggagacagtgcaatctggtgtatgcactaataataataataacatgtcttttcatatttwaaaaaaaaacacaaaatctttaggaagccgaggtgggtggatcgcttgagtcaggagtttgagagcagcctgagcaacatagaccccatctctaaaaaaaattagccaagtgtggtgatgtgtgtctgtggtgccagctacttggaaggctgaggtaggaggattgcttgagctcaggaggttgaggctgcagagagtggtgatcatgcctctgcattccagccttggtgacagagcaagaccctgtctcaaacaacaacaacaacaaaaatcaaaatctatgcaaaatttaaacccaatcttgcgctagtcttgtgggaatgaagattaatttacctaaaaatgctcctctggtttttgtaattctttttgttactttttaaaaatataaatttggccaggcacggtggctcacacctgtaatatcagctactcgggaagctgaggcaggagaatcgcttgaacctgggag

SEQ ID NO: 670905 - DNA, 589 bp, Homo sapiens
ggtctctgcttagagtcaggcaggggcaagattccacaccaccctctcaccaaaaaaaaacaaaacaaaacaaaacaaaaacctgttgctctcagttacctgagtctaccatttcacaggagccatgagctaggaacaccacagaagaaaggcagaaactcatgatgaggaacagaaccaaggtgcccactggcctggtgactgggtctggaatgttcctgaggccactgtggagcataaaccctgaacttccattaaacctggctctaggctgggggaaactgctggatacaaatgggtgagcacagaagaagagagaaaataatacacaaaaaaattgaacataacataaagtgagactgcaaagcccaattctaaaacataggaagaaatctgaagctcagaagatagccaattcagagcatgaattcacacaccagatgaaattaatgttatagaacactcttttaggagactttaattgggtttacgggaggcagaggctgcagtgagccgagatcatcccattgcactccagcctgggcaacaagagcgaaactctgtmccaaaaaaaaaaaaaaaaaaaaaa

SEQ ID NO: 670906 - DNA, 1404 bp, Homo sapiens
tgttttcatttttttaggagtatgaatttaaagagcttctaggatcttgctcacattcagaaatgaaactattggtatctcctgattttttttwatttgcttttcttcccacgttgtacctaaggatatatattttcttatttgttttttcttcttttatgagatgaagtctcagtgtcatccaggttggagagcagtggtacgatcatagctcactacagccttgaattcctgggcgcaagtcagccttctgcctccagggtagctgggattacaggtgtgcataaccgtaccgagtcaagatatttctttacatgtaaaaatactacaggatttatgctggtcaatgaaattttgaccatgttaacagttatgactgaaagaatattacttatgagaatggaaaaataggtaaaaaccagacacaactggggggagaatcttctattgctgtttctaccaaagttttgaaactacttttactatagttaaaaactgtgaattcaactgaagattataaatgttacagtgaccattcatgatacattccctatatattatgtgtacatctacatagaagcaagctattagtaaacagctttaaaattcactaactgaaattttgtgatcatctgaacaaactgagataaaaagtctttgtgttagtacaatatgaaaaaaaaatctatgtgggtttataactgaaacatgatttcaggacacaaaagatattaggttcagcaatttagcttagaaaactgctttttggtagggaaaaatatgtactaagagaaattaataagttggttttaaagtaaggttatttgttagtttattttatgttaccatatatgtttgaaaataataaagtgaaattcctccaaaatattacatgaaaaagtttagttaatttagattggtatcttttgagggagaaagcccataatgtgtccttaattatgaccaacaaatcttagcattctgtttgatcattaatttgataagcctctttcataaatctgaaccttctgtcttacagaaaaagactaatatgctttgtagaaaaaactaatatgcgttggatttaaatgaactcttttaactaatgtaacataaactcttaatgaatgaattattatatttataaaccctcttagtatgagaaacactatggattaggcatatagaggcagctcaacccagtatacaaatcagtaagacttttaacagtatttgcctccctgctgcatttcaatgttctctatttgctaggatttgtactcaaagattcttggaggttattgtgttgcttaaattttcatacatgttgatagaaagggcattgatatcctctcttagttttctgagctagagggggcaaaaattatctttgataacatattg

SEQ ID NO: 670907 - DNA, 1404 bp, Homo sapiens
tgttttcatttttttaggagtatgaatttaaagagcttctaggatcttgctcacattcagaaatgaaactattggtatctcctgatttttttttatttgcttttcttcccacgttgtacctaaggatatatattttcttatttgttttttcttcttttatgagatgaagtctcagtgtcatccaggttggagagcagtggtacgatcatagctcactacagccttgaattcctgggcgcaagtcagccttctgcctccagggtagctgggattacaggtgtgcataaccgtaccgagtcaagatatttctttacatgtaaaaatactacaggatttatgctggtcaatgaaattttgaccatgttaacagttatgactgaaagaatattacttatgagaatggaaaaataggtaaaaaccagacacaactggggggagaatcttctattgctgtttctaccaaagttttgaaactacttttactatagttaaaaactgtgaattcaactgaagattataaatgttacagtgaccattcatgatacattccctatatattatgtgtacatctacatagaagcaagctattagtaaacagctttaaaattcactaactgaaattttgtgatcatctgaacaaactgagataaaaagtctttgtgttagtacaatatgaaaaaaaaatctatgtgggtttataactgaaacatgatttcaggacacaaaagatattaggttcagcaatttagcttagaaaactgctttttggtagggaaaaatatgtactaagagaaattaataagttggttttaaagtaaggttatttgttagtttattttatgttaccatatatgtttgaaaataataaagtgaaattcctccaaaatattacatgaaaaagtttagttaatttagattggtatcttttgagggagaaagcccataatgtgtccttaattatgaccaacaaatcttagcattctgtttgatcattaatttgataagcctctttcataaatctgaaccttctgtcttacagaaaaagactaatatgctttgtagaaaaaactaatatgcgttggatttaaatgaactcttttaactaatgtaayataaactcttaatgaatgaattattatatttataaaccctcttagtatgagaaacactatggattaggcatatagaggcagctcaacccagtatacaaatcagtaagacttttaacagtatttgcctccctgctgcatttcaatgttctctatttgctaggatttgtactcaaagattcttggaggttattgtgttgcttaaattttcatacatgttgatagaaagggcattgatatcctctcttagttttctgagctagagggggcaaaaattatctttgataacatattg

SEQ ID NO: 670908 - DNA, 1093 bp, Homo sapiens
ataaaagcaatagtaacagaagtcctccctggacaactctggaactctaaaccactccataagcaaataaaaggaaggaaatatatcaaacyatatttaatcaagttttatcaaataatagctgtgtgcaagcagcaagggtacagacaaaagtactatagtgttagttcttatctttcaacatgcatactaaaaattgtcagaagtattcaaataagtatacacaaaatgctcagagggtggcaaggcggaagagaccccgtccatctggggaagtaagaaaggcttgaagatggcaattacattggaatgaatgcaacaacacagagtcaaaaaagcatctgccccagttcacaaaatctcatagtctggagtaaaagtgtgagggattgagtagtgggaagaggaaactggaagagtatgttggggacagactaaaaataccatatattgattccacgaataagataattaatatcatcaattctgagacggactttagttattattattttttaacattttaacacctctgaaatgaagatgctgttgggttggtagcagttttgatgttgtcactacctatacatggacatcaaaacttgcaaagtaggtgtcagcaacttgaaataaaattactttttaaattttatatatatacatatataatttttcttttttttttttttgagacagagtctcactctgtctcccaggctggagtgcagtggcgccatcttggctcactgcaacttccccttcccagcttcaagcaattctcctgcctcagcctcccgagtagctgggactacaggtgcatgtcaccacgcctggctaattttttgtattttagtagagacaggatttcaccatgttgcccaggctggtctcaaactcctgaggtcaggcaacccacttgcctaaaatcactcttttaagaaatgcttcaactctaatactcctgatgaaatggagaatactgtgtggaaaaacacaaatctcaatgatttgcaggtagaaagagattcataaaggtcaaacttaaaatgtaaagttgtaataattactttaaccaatgtatttttcttatgtt

SEQ ID NO: 670909 - DNA, 1677 bp, Homo sapiens
ttggccaagctggtctcgaactcctggcctcaggtgagccgcccgcctcggcctcccaaagttctgggattacaggcgttagtcaccgtccccggccgtcatttcttagcaatatttctttttcatgtctgcatttaaagttcattttaactttattgttctaaataaatctgttcagaaatgggaaattgattttctgaagccccacacttctctagaaataagggaattattttaactggctcttctgtatcaggtaccatagaaatcaggtaagtccaggacgtcacttaggttaggagctttacgtgtcacaaaagaacaaagtataactattacatcaacatttttactcaacaccctacccctggtgaaagtcctgggttcctcttctgtagattgctgttctgggggtatgaatacgacttagccctgcagaagaggtggttccagactttctggagtctctgatgttataacgcaacagctatctacacactcactctaattatgcttaaggatatttggagttacatacatctctttggatttctttttcacaatacatatgcttaaaaatgttctctattttatcttaatccttttcttttcagtgagtctaagaacacacaatgtctccactattcacatttgccaaaatatgtgcacattaaggatggtgacctaccaactatcagcactgtttagaacaaagaaatgctttggggaaattattctctaggtttagctacacaaaaacactttgaataattttattatcagtttgaaataacttcgtgatgtacaaagttgtttcccaaaggatggtgctataattgtcaagaattagtagttaattaaagcaggttaccagaaataataaataatacttggaattaaaaaaatgctgtggtcttatatgagcccttgtacttaagtatctcaattctagattaacaagaagcaggcaaatgaaacattttcattcacaggcaaagacaaactactgaatataatttactgggtctggtctagtcaagcaagactagataatayatggttgtaataatacatatattttggcatccctacgaaaccccatttccaccatttcccacaaatataacatgatttcaaatgttaagaaagaattgagagtttttaattttagctgagaatacttttattctttacctgtggagatatgtgaactgatgactatgagtgtatttcccttagaaagaaagacataaaataggagcagaagttactcatctggcaatgatagtaaatatcctcctaccagaaactcaagtttctccttgaagatgccaacttcaaatgaattttaaagatttattttcctatagttttattgattccttgatttggttttagcattaaaaagcaaacaaggtcagaggctatatcttctttaatacatggcttagtaaaatgagatggtacatcacacagatgaaatatctgacagcagtcttacaataacaaaatactaccttatgggcccaggacagcaggtggttatcccatcctggaagagcagaggagggtgggcagccccatttctatctcccccgcagagggttcagtgttggatctgttgttcttgaagtaaagatgcaaatttaaggggcagcaagaacagcagcagtagca

SEQ ID NO: 670910 - DNA, 634 bp, Homo sapiens
cggttcttgctatttatctgtctcactgtgtcctgacaaatatctccctggactggttccttaaagttgaagtcctactgaatattttttttttaaagtataaaaatttttttgagctcaaaggcttcaggaaagttttcaacaaactagcatcagaaaacatcttactcaacatcagaaaaaaatttatattctaactctgactttcttgagcttactagacagttcattgtttttgacattatttgacatctgtttcaatatttagatgaaagtagaaaagtacttttaraataccatccctgagaaggcaactggacatattttatgcaagtatttctaaaatacacagagataatattttgaattaagccttcaaatgtaagatgatttaattcaatttgtttattttcaaattctcagaggaaaaaaatgcctttaaaaataattttttgtaacgtatttttttttgtccttagtatatgctttaaaatatacagattcccttggatttctaaaatttaattctgttaatatttcagttttaaaacacaaagaggtaaacaaatgaatgcttgcctaaccagaatttaaatatttttggaatctgttgacttattaaatatctcattga

SEQ ID NO: 670911 - DNA, 1301 bp, Homo sapiens
tacaactatggaaaatgctatgctatgcctttgagaggtagagtactgtagaaatctacacttattaagagcacagtattttactcttttccctttcctatgacatctcttcaccagtccccttctttctatgtgtgtgtgtgtgtgtgtgtgtgtgtctgtgtgtgtgtgtgcgtgtgtttattttattgtgtctatttcagtcagctaggcttcaaatgtaatcgtctatcacatgttcaatttatttgaggcgtgaagttttcccaggacactaaagcaagaggcaccttaggaacggaagcagagtaactaatgcagagttctcctcagacatcagaaataattatgacatcgtagttttatgtcaaactatataataagaaaaaaattaaaatctttttctggactgtcctgggtagtgttaacaacatgacagctattccctctgtacacacttagctgagcagaactagttgaagcattaattgttgttatcacagcagcatggttaacatgctcataaatattatcttggcaacagattaaaaataaaaaggccagaaattatgttgtaaaagtattaacaattttaataagcctaaaggtggtcaatctgccaaccgggatattacatcttcaaatatattcaaatactagtaatggcatggatatttggtacattaaacaatctaaatttcacttggtttaccatgtcaaatagaaaataaaagaaatgagttatgtctcttctatttccagaagaggattgttggagctacactagccagcagataatttgcatgcagcaccactaccatcagattacaaaaaaaaaaaamaaaaaaaaaaaaccagaagcatgataattaaaagagatccaaggatatcaatgacaattataaaatattgttttaaaatatgctgttaaggctccccaggtaatggactgcttcccttagtttctggcaatttaccagaatgcattccaaagcatttgataaaccggtaatgcaaagtatgttattcctagacagttgagaactcagttaattagagcctccagaataaacgggtccctgagtagttgctttgtaaacctattgttattaatctgatcttccttatagccacttatacattaaattgcttatatttcattgacgctatctatcttgaatattttggagagataactgttgtatatgtattattattaattaaatattattccatatattttcctttacaaatatcactccatgttagatgtcactaatttaatagcttggcagtataat

SEQ ID NO: 670912 - DNA, 1301 bp, Homo sapiens
tacaactatggaaaatgctatgctatgcctttgagaggtagagtactgtagaaatctacacttattaagagcacagtattttactcttttccctttcctatgacatctcttcaccagtccccttctttctatgtgtgtgtgtgtgtgtgtgtgtgtgtctgtgtgtgtgtgtgcgtgtgtttattttattgtgtctatttcagtcagctaggcttcaaatgtaatcgtctatcacatgttcaatttatttgaggcgtgaagttttcccaggacactaaagcaagaggcaccttaggaacggaagcagagtaactaatgcagagttctcctcagacatcagaaataattatgacatcgtagttttatgtcaaactatataataagaaaaaaattaaaatctttttctggactgtcctgggtagtgttaacaacatgacagctattccctctgtacacacttagctgagcagaactagttgaagcattaattgttgttatcacagcagcatggttaacatgctcataaatattatcttggcaacagattaaaaataaaaaggccagaaattatgttgtaaaagtattaacaattttaataagcctaaaggtggtcaatctgccaaccgggatattacatcttcaaatatattcaaatactagtaatggcatggatatttggtacattaaacaatctaaatttcacttggtttaccatgtcaaatagaaaataaaagaaatgagttatgtctcttctatttccagaagaggattgttggagctacactagccagcagataatttgcatgcagcaccactaccatcagattacaaaaaaaaaaaacaaaaaaaaaaaaccagaagcatgataattaaaagagatccaaggatatcaatgacaattataaaatattgttttaaaatatgctgttaaggctccccaggtaatggactgcttcccttagtttctggcaatttaccagaatgcattccaaagcatttgataaaccggtartgcaaagtatgttattcctagacagttgagaactcagttaattagagcctccagaataaacgggtccctgagtagttgctttgtaaacctattgttattaatctgatcttccttatagccacttatacattaaattgcttatatttcattgacgctatctatcttgaatattttggagagataactgttgtatatgtattattattaattaaatattattccatatattttcctttacaaatatcactccatgttagatgtcactaatttaatagcttggcagtataat

SEQ ID NO: 670913 - DNA, 1301 bp, Homo sapiens
tacaactatggaaaatgctatgctatgcctttgagaggtagagtactgtagaaatctacacttattaagagcacagtattttactcttttccctttcctatgacatctcttcaccagtccccttctttctatgtgtgtgtgtgtgtgtgtgtgtgtgtctgtgtgtgtgtgtgcgtgtgtttattttattgtgtctatttcagtcagctaggcttcaaatgtaatcgtctatcacatgttcaatttatttgaggcgtgaagttttcccaggacactaaagcaagaggcaccttaggaacggaagcagagtaactaatgcagagttctcctcagacatcagaaataattatgacatcgtagttttatgtcaaactatataataagaaaaaaattaaaatctttttctggactgtcctgggtagtgttaacaacatgacagctattccctctgtacacacttagctgagcagaactagttgaagcattaattgttgttatcacagcagcatggttaacatgctcataaatattatcttggcaacagattaaaaataaaaaggccagaaattatgttgtaaaagtattaacaattttaataagcctaaaggtggtcaatctgccaaccgggatattacatcttcaaatatattcaaatactagtaatggcatggatatttggtacattaaacaatctaaatttcacttggtttaccatgtcaaatagaaaataaaagaaatgagttatgtctcttctatttccagaagaggattgttggagctacactagccagcagataatttgcatgcagcaccactaccatcagattacaaaaaaaaaaaacaaaaaaaaaaaaccagaagcatgataattaaaagagatccaaggatatcaatgacaattataaaatattgttttaaaatatgctgttaaggctccccaggtaatggactgcttcccttagtttctggcaatttaccagaatgcattccaaagcatttgataaaccggtaatgcaaagtatgttattcctagacagttgagaactcagttaattagagcctccagaataaaygggtccctgagtagttgctttgtaaacctattgttattaatctgatcttccttatagccacttatacattaaattgcttatatttcattgacgctatctatcttgaatattttggagagataactgttgtatatgtattattattaattaaatattattccatatattttcctttacaaatatcactccatgttagatgtcactaatttaatagcttggcagtataat

SEQ ID NO: 670914 - DNA, 1301 bp, Homo sapiens
tacaactatggaaaatgctatgctatgcctttgagaggtagagtactgtagaaatctacacttattaagagcacagtattttactcttttccctttcctatgacatctcttcaccagtccccttctttctatgtgtgtgtgtgtgtgtgtgtgtgtgtctgtgtgtgtgtgtgcgtgtgtttattttattgtgtctatttcagtcagctaggcttcaaatgtaatcgtctatcacatgttcaatttatttgaggcgtgaagttttcccaggacactaaagcaagaggcaccttaggaacggaagcagagtaactaatgcagagttctcctcagacatcagaaataattatgacatcgtagttttatgtcaaactatataataagaaaaaaattaaaatctttttctggactgtcctgggtagtgttaacaacatgacagctattccctctgtacacacttagctgagcagaactagttgaagcattaattgttgttatcacagcagcatggttaacatgctcataaatattatcttggcaacagattaaaaataaaaaggccagaaattatgttgtaaaagtattaacaattttaataagcctaaaggtggtcaatctgccaaccgggatattacatcttcaaatatattcaaatactagtaatggcatggatatttggtacattaaacaatctaaatttcacttggtttaccatgtcaaatagaaaataaaagaaatgagttatgtctcttctatttccagaagaggattgttggagctacactagccagcagataatttgcatgcagcaccactaccatcagattacaaaaaaaaaaaacaaaaaaaaaaaaccagaagcatgataattaaaagagatccaaggatatcaatgacaattataaaatattgttttaaaatatgctgttaaggctccccaggtaatggactgcttcccttagtttctggcaatttaccagaatgcattccaaagcatttgataaaccggtaatgcaaagtatgttattcctagacagttgagaactcagttaattagagcctccagaataaacgggtccctgagtagttgctttgtaaacctattgttattaatctgatcttccttatagccacttatacattaaattgcttatatttcattgacgctatctatcttgaatattttggagagataactgttstatatgtattattattaattaaatattattccatatattttcctttacaaatatcactccatgttagatgtcactaatttaatagcttggcagtataat

SEQ ID NO: 670915 - DNA, 1301 bp, Homo sapiens
tacaactatggaaaatgctatgctatgcctttgagaggtagagtactgtagaaatctacacttattaagagcacagtattttactcttttccctttcctatgacatctcttcaccagtccccttctttctatgtgtgtgtgtgtgtgtgtgtgtgtgtctgtgtgtgtgtgtgcgtgtgtttattttattgtgtctatttcagtcagctaggcttcaaatgtaatcgtctatcacatgttcaatttatttgaggcgtgaagttttcccaggacactaaagcaagaggcaccttaggaacggaagcagagtaactaatgcagagttctcctcagacatcagaaataattatgacatcgtagttttatgtcaaactatataataagaaaaaaattaaaatctttttctggactgtcctgggtagtgttaacaacatgacagctattccctctgtacacacttagctgagcagaactagttgaagcattaattgttgttatcacagcagcatggttaacatgctcataaatattatcttggcaacagattaaaaataaaaaggccagaaattatgttgtaaaagtattaacaattttaataagcctaaaggtggtcaatctgccaaccgggatattacatcttcaaatatattcaaatactagtaatggcatggatatttggtacattaaacaatctaaatttcacttggtttaccatgtcaaatagaaaataaaagaaatgagttatgtctcttctatttccagaagaggattgttggagctacactagccagcagataatttgcatgcagcaccactaccatcagattacaaaaaaaaaaaacaaaaaaaaaaaaccagaagcatgataattaaaagagatccaaggatatcaatgacaattataaaatattgttttaaaatatgctgttaaggctccccaggtaatggactgcttcccttagtttctggcaatttaccagaatgcattccaaagcatttgataaaccggtaatgcaaagtatgttattcctagacagttgagaactcagttaattagagcctccagaataaacgggtccctgagtagttgctttgtaaacctattgttattaatctgatcttccttatagccacttatacattaaattgcttatatttcattgacgctatctatcttgaatattttggagagataactgttgtatatgtattattattaattaaatattattccatayattttcctttacaaatatcactccatgttagatgtcactaatttaatagcttggcagtataat

SEQ ID NO: 670916 - DNA, 1281 bp, Homo sapiens
cctgggaacagggtgaaatttgtattcctccagataagatggatatagaatagggcagcctctcagaaaagaaaatgaccagtgctataatctaggctctaccactccyaatcccctcttccagccctgtagttattcaggggaagccactctttctatgactcttggtcctttgatggctcaacctgtctcttttgtaacatcttgaagtttggatttggtacatgaagtcagcaggcagtgctaaatttccagcttttccaaaattcaaagtttcccatgccaaaggaaaagtgaaaaaaatatttagaatatacagaccctaagatataatagtaggggtccctttggagagagttgaatcacatctctaaggctcctcctaactctaaaattctctgatcctgtgattctatgatggaaggacctgaggtagagagtagcatgaatgagtgatactttaaggaattaattggccattttggaggagatataccccaaactagacttggggcccaacgaaactccaagtttgaatagctaccaagtgaaccaacacaccctttctcacactttcaaatgctcaaactctcagaggctgactgggaattcaaagttagtatcacatctgagggaagggcaccccaagcccacttcagggtagaccaacagccaaactgcacatctggagagaaggcacacatgctgagggctgggcatcaatcagctggccttgctatttcctgtggggatgctcagcacatgtagatcagccacatagagatgggggctaaagctccctagccactgccaggagacaaaataagagaataataatagactaatgaataatcatgtcccttcttttgattgcattcctttggtcaaaaatatctgtgaagacaaatctcactcattctgaatgagaaactgtattttttatggggcaatctattttataacctatggcatgaggtgttaaagtgacttggtgaagtagggagaaaaagcttaatttagcaaaatataaaggcacatgataaagcttgcaaccctctaagaggttcagacactaaagggaaaaagaaattatttaacaagttataactgcatagcaaaggcctcggtgtaattcttgaatccatgagattggaagtatgtaaacagtttattggaggtttagactgctaaatcctaaatcaaacatgccacaaatattgcaaaagtaattgcagtttttgccattaaaagtaatggcaaagtatagcattctgaaagaga

SEQ ID NO: 670917 - DNA, 1281 bp, Homo sapiens
cctgggaacagggtgaaatttgtattcctccagataagatggatatagaatagggcagcctctcagaaaagaaaatgaccagtgctataatctaggctctaccactcccaatcccctcttccagccctgtagttattcaggggaagccactctttctatgactcttggtcctttgatggctcaacctgtctcttttgtaacatcttgaagtttggatttggtacatgaagtcagcaggcagtgctaaatttccagcttttccaaaattcaaagtttcccatgccaaaggaaaagtgaaaaaaawatttagaatatacagaccctaagatataatagtaggggtccctttggagagagttgaatcacatctctaaggctcctcctaactctaaaattctctgatcctgtgattctatgatggaaggacctgaggtagagagtagcatgaatgagtgatactttaaggaattaattggccattttggaggagatataccccaaactagacttggggcccaacgaaactccaagtttgaatagctaccaagtgaaccaacacaccctttctcacactttcaaatgctcaaactctcagaggctgactgggaattcaaagttagtatcacatctgagggaagggcaccccaagcccacttcagggtagaccaacagccaaactgcacatctggagagaaggcacacatgctgagggctgggcatcaatcagctggccttgctatttcctgtggggatgctcagcacatgtagatcagccacatagagatgggggctaaagctccctagccactgccaggagacaaaataagagaataataatagactaatgaataatcatgtcccttcttttgattgcattcctttggtcaaaaatatctgtgaagacaaatctcactcattctgaatgagaaactgtattttttatggggcaatctattttataacctatggcatgaggtgttaaagtgacttggtgaagtagggagaaaaagcttaatttagcaaaatataaaggcacatgataaagcttgcaaccctctaagaggttcagacactaaagggaaaaagaaattatttaacaagttataactgcatagcaaaggcctcggtgtaattcttgaatccatgagattggaagtatgtaaacagtttattggaggtttagactgctaaatcctaaatcaaacatgccacaaatattgcaaaagtaattgcagtttttgccattaaaagtaatggcaaagtatagcattctgaaagaga

SEQ ID NO: 670918 - DNA, 1378 bp, Homo sapiens
ttaaaaagggaaataatactgaaaaaaaaggtataaaatgggccgggcacagtggctcacgcctgtcatcccagcactttgggaggccgaggcgggtggatcacgaggtcaggagatcaagaccatcctggctaacacggtgaaaccccgtytctactaaaaatacaaaaaaaaaaaaaaaaaaaaattagctgggcgtggtggcaggcacctatagtcccagctactcgggaggccaaggcaggagaatggcgtgaacctaggaggtggcagggcttgcagtgagtggagatcacgccactgcgctccagcctgggcgacagagcgacactctgtctcaaaaaaaaaaaaaagggtataaaatggtttctagaaagctgctttctaagactttctggtgaggtaactcaagatttagaaaaattttaatttagtatttcctgaaaatagataaatgtgtgagaaacagagtatctcacatacacaggtctctaaaatggtgatggattaatggctcaataaacagtatgcttcaaattcaggtggttttcggtagttttacaaagcctccaacacactgtaggcattcaagtatacgccatcactgttcggttgcaggaaaataatcaaataatttaaatatctacaaagtgacatttgttttcagacaatgtagtcttatttcaaagcaggtttcaaaagttgccatttcagaaataaaaaggtgatgcggaaacaaaaagtgtcaccttacataaaatgaagtaacacggttatctgcaaatgtacatcaaaccccaagctcctccaaaatgttagatttattgctctctatgccattctaacttggggaaaagagacattcaacatcattggcaactttccccatgctttctgcaagtctacaaagcatggagtaggcagagcctgccgaatcctgcacagtgcagtgccccagcataactccactggtgatgccacttccaccgctgaaagagcctgccactgggggtgtaatggcaatctgcagtttaccaatactgcactcttttgtacatgtcatttgttaaaattttgacttaacaatcaatagtaaataaaaagagcgtaacagaaaatattataacaccagagactattattacaaaaaacaaagtgttcagcgcacccctagaggcaggctcttcatgggtgggtgtgacatcaccagtggagggcaagttggggctttgctctgttccagaattggcaatccatgcctgctctgcactttgcaaatctgtagaaacaaagacaaagacatgatcattagctgaatgtcatcagagatctccagtattttaggacacctcaaaacaaaacaggaatcttatcaagg

SEQ ID NO: 670919 - DNA, 654 bp, Homo sapiens
gaaccaacatacgttttcttcttagccagaccactgatggtacaagcgggcttttctatggctaactgatcccagataagygcactggagggagacgcaccatcttgtgggaaccaccctctaccccaggggcttgtgtgctctcccaaagcacagttcctgccgagtgagaggggattctgactggggtgacttcagatgctccaggtggtctccccgaattccgttttgctccatcctctttgcacagcagccctacagctccggggtggccctgttcatctccccaagtcatgaccagctcttcccttctgccagggaggggctcaggagcgagtgcatggcattggtctggtggtcagtcatgcacacatgactcaagtcagtgaaacagaaaaaacacacacaactcttctcactctctttttttttttttgagatggagtctagctctgtcacccaggctggagtgcagtggcgtgatcccagcttattgcactctctgcctcctgggctcaagcgattctcctgccttagcctcctgagtaactggcattacaggcgcttgccaccatgcttgggtaatttctgtattttcagtaaagacaagctttcaccatgttggccagtctggtcttgaactcctgacctcaa

SEQ ID NO: 670920 - DNA, 654 bp, Homo sapiens
gaaccaacatacgttttcttcttagccagaccactgatggtacaagcgggcttttctatggctaactgatcccagataagcgcactggagrgagacgcaccatcttgtgggaaccaccctctaccccaggggcttgtgtgctctcccaaagcacagttcctgccgagtgagaggggattctgactggggtgacttcagatgctccaggtggtctccccgaattccgttttgctccatcctctttgcacagcagccctacagctccggggtggccctgttcatctccccaagtcatgaccagctcttcccttctgccagggaggggctcaggagcgagtgcatggcattggtctggtggtcagtcatgcacacatgactcaagtcagtgaaacagaaaaaacacacacaactcttctcactctctttttttttttttgagatggagtctagctctgtcacccaggctggagtgcagtggcgtgatcccagcttattgcactctctgcctcctgggctcaagcgattctcctgccttagcctcctgagtaactggcattacaggcgcttgccaccatgcttgggtaatttctgtattttcagtaaagacaagctttcaccatgttggccagtctggtcttgaactcctgacctcaa

SEQ ID NO: 670921 - DNA, 654 bp, Homo sapiens
gaaccaacatacgttttcttcttagccagaccactgatggtacaagcgggcttttctatggctaactgatcccagataagcgcactggagggagacgcaccatyttgtgggaaccaccctctaccccaggggcttgtgtgctctcccaaagcacagttcctgccgagtgagaggggattctgactggggtgacttcagatgctccaggtggtctccccgaattccgttttgctccatcctctttgcacagcagccctacagctccggggtggccctgttcatctccccaagtcatgaccagctcttcccttctgccagggaggggctcaggagcgagtgcatggcattggtctggtggtcagtcatgcacacatgactcaagtcagtgaaacagaaaaaacacacacaactcttctcactctctttttttttttttgagatggagtctagctctgtcacccaggctggagtgcagtggcgtgatcccagcttattgcactctctgcctcctgggctcaagcgattctcctgccttagcctcctgagtaactggcattacaggcgcttgccaccatgcttgggtaatttctgtattttcagtaaagacaagctttcaccatgttggccagtctggtcttgaactcctgacctcaa

SEQ ID NO: 670922 - DNA, 654 bp, Homo sapiens
gaaccaacatacgttttcttcttagccagaccactgatggtacaagcgggcttttctatggctaactgatcccagataagcgcactggagggagacgcaccatcttgtgggaaccaccctctaccccaggggcttgtgtgctctcccaaagcacagttcctgccgagtgagaggggattctgactggggtgacttcagatgctccaggtggtctccccgaattccgttttgctccatcctctttgcacagcagccctacagctccggggtggccctgttcatctccccmagtcatgaccagctcttcccttctgccagggaggggctcaggagcgagtgcatggcattggtctggtggtcagtcatgcacacatgactcaagtcagtgaaacagaaaaaacacacacaactcttctcactctctttttttttttttgagatggagtctagctctgtcacccaggctggagtgcagtggcgtgatcccagcttattgcactctctgcctcctgggctcaagcgattctcctgccttagcctcctgagtaactggcattacaggcgcttgccaccatgcttgggtaatttctgtattttcagtaaagacaagctttcaccatgttggccagtctggtcttgaactcctgacctcaa

SEQ ID NO: 670923 - DNA, 1026 bp, Homo sapiens
atttcctcttgacttggcatttccgttttattttcacagtccccactggcaaagattcctattgccttattcacaaatttataattcaagtccattagcttcaccataaagatgggaacactatttgcttttaaaaaataaacttttttttgttatggagaagtttgaaccttcatacaaaaaagtagtgccaatagtatgataaactcccatgtatccccgccccccccatcaacccatggttgatcctgcccatccacttctcctaagattaaagcaaattccatgtatcctataattttatctgtatttcagtgcatcttttatatgaccctttgaagaaacaaagataatattatagcacctgagaaattaacaagtttcataatatcacgtcatatacaatcagtgtttaaattcacagatttctcttaaatgccattatattaacaaaataatttgtttgtttgaataatcattccagttagggccgatataatgagactggttgctgtgatgtatttttagatgtcttttttgtttcatgtgacttacttgtggtgggaactgggttatttgtcctgtagcatttctcactgtggggcttttgctgattacatccctgtgggatttgtggacatgctgctcttcctctgttttctgtaaattagtagttggatttagaagctggaccaaattcagttgccrggcgcagtggctcagcactttgggaggctgaggcaggcggatcacctgaggttgggagttcaagagcagcctgaccaacatggagaaacaccgtctctacttaaaatacaaaaattagctgggcgtggtggcacatgcctgtaatcccagctacacgggaggctgacacaggagattcgcttgaacctgggaggcggaggttgcggtgagccgagattgtgccattgcactcaagcctgggcaacaagagtgaaactcagtctcaaaaaaaaaaagaagctggaccaaattcagattcgattttggagaggggcaggg

SEQ ID NO: 670924 - DNA, 1968 bp, Homo sapiens
aaatgtcaacaacatgacagacacataaggctgggaatttttttttttagattaaaggagattaagcaaatataaccactaaatacaatgtatgaaccttgactggacctcagatcaggaggaaaaagatagctataattaatggacaactgggaaattttaaatattgatttaaagaatctctatcaaaaacacatttaaaactatctcaggtaatttattcctttagaaaaattattcactcatacatttataataatattaaatatctattcagtgtaataaccctgcaggtaaaaattcttgtaagtaacagaacctgaaaaattcttgtaagtaaaatgtagacttggcttggccaagagggtcaggtgaagggtagtgaggacccctctatctcagtctggcaagttagcaaaataactaaactatcatctgctacatttcaggactcagaccatctgcctactgaagtatttcccttctaattgaagggaaaaattcagactgttggagcaggttggctgctttatgcagccttcagtaaagtcctacaagaaagagtggaaggtcaggaagcagtgaaggaaaaaaagatacctttgccaataaagctactttttatctgtgtctgagaataggagatctggacattagcaagagtgaagaagccaaattacaaatgctttataattatctggtatctattttttttaataggttattcacatgacatagaattttaaagatataaaaagggagtaaaaaatctctctcagtcttgtccctcagccatctgtctcttcattccccagaggcaacccccattaccactttcatacatccttccagagatgttcaatgcattgccatgctacacataaatttccacaaatgaagcaggttatgcatactgttctataccttgctttcttcgtgtaagatgttttgtcaactgatcatatcaggacatataaagctgccttattattttaagagcatcattgtataaagcttacatgataaaaaccataaagtagacaagaatgcaagaggatataaccattttcttttatataaagaatatggccatattctttatgtaaaaacataccactaaaaacctagagtaccactaaaaacatagagtacacaagaatgcaagagaatataatagatgttttctcatgcaaataaataaggtacgggctactaggcaggaaagagtttggaggggctgtgattaaggtaactgagcactgggtaccaaagacaaaggctaagaaaggtagttgggaagatttgtctgaagacatttttgaatcctaaacattccattgtattgtggcagagcatgtgaaaagttattgaagcttccatcatgcgaggggtgcaaaagtggctaagactaagctggaagacataaaggagactggggtttgaagggtaaggaatacatggttctcacaattggaaattacagcaaggaccatggcagtggatccagtatatgaagtccagaggccaagcaagcggaactgacataartagatgctggcacatggtaccaaaaggccaagggccaagcagttactcaacagaggccagcaagaacagaaaagaatatgcaaacccataagtgttgacgatgcctcaggatatgtcagtctccctcaggaacttgaggaagagtgaaagggaagaagaggccaggtatggtggctcatgtctgtaatcccagcactttggaaggctgaggtgggagaactgcttgagtccaggagttccacacaagcctaggtgacatggcaaaaccccatctctaccaaaaatacaaaaatttgccgcgtgtggtggtgcatgctggtagtcccagctacaagggaggctgacatggaaggatggtttgagcccaggaggtggaggttgcagcgagccagaattgagcctttgtactcctgtgtgggc

SEQ ID NO: 670925 - DNA, 629 bp, Homo sapiens
tcatttattattgtaagaagtatttattggatatcaactatgaaccaagtaytatgctagattctgggtttaatttttttaagaaatatgatgattttatttaagaaatgtaaagtatcactacactttaacttaaatcttgagtcactgaatgggtctatttcaagggttataatgttatattactggtgggaacaactcctaaatgcccactgatttggtagcaagctgaggatatgagattgcatataataaataagaaactataaatacatgtttactttcatcttatatacccaatgtaatctacatgcttctcagcatgacaaactcttccttaaaacatttacaagacctactcatacaaatatcaagaatatagactattatataataagtatcaagtaagttttataggaattcagagtcctgattggggtagtcaggaaaagcaggtgttgtgatttggatttgtgtccccatccaaatcttatgtcaaattgcaatcaccagtgttataggagtgccctggtaggaggtgattggatcatgggggtagattttcccctggctgttctcatgataagaagtgagttctcatgagatctggttgtttaaaagtatgtagc

SEQ ID NO: 670926 - DNA, 657 bp, Homo sapiens
ccaattttgaacacatccagttattctgtattcttttacattcatatttaaggaagttttgagatttttatgcagtctcatttaaaatcatagaattttagactctaacagaaagggcttgttaaatttaagactgaagattcaaaaagagctatatcaatcaggtaattcaatccactttacagtacagaaaaccaaaatcaaaagaggttaaataaacaacgttatagtcagtggcagatcggagatgagaaaacagttctttttactccaagtttgggggctctttcctctagctggggctctttccctctttgagaaaagagaaggagactggcaagagcactataatgaccaagctgatttcttagctctaacacttagggaaaaatctagaacaaaaaccaaaatatttagattatcaattcatagcataccattcacgcaacagatacctaaaagatattattttgttaaaatataatataggacattattttattaaaaagtatctatacagtgttggcaacatagtgagactatgtctctaccaaaaaaaaaaaaaagaaaaaaagtcagatatggtattgcatgctatactatagycctagctactcgggagcctccaccaggaggatcacttgagcccaggtggtc

SEQ ID NO: 670927 - DNA, 636 bp, Homo sapiens
acttactggtgacttgctggcttattttaattttattttattattttttttgagacagagtctcactctgttgcccaggccggagtgcgatggcctgatcttggctcactgcaacctccgcctcctggttcaagcgattctcctgcctcagcctcctgagtagctggaattacaggtgcatgccaccacgcccagctaatttttgtatttttagtagagacgyggtttcaccatgttggccagaatcgtctcaaactcatgacctcatgatccgcctgcctcggcctcccaaagtgctgagatttcagacgtgagccaccgtgctcggcaacttgctggctcttaacttctattttagtctgcctaaaactgtagcagagctgatcctgggcagctgttctctggtccagatctgttaagcgggggtggggtggtagagcaccagactaacatgccagtatcttggtaaaatctcagccctttaacaaagggccatgcagcataagatcatttcatttgcatgtggctgaataagtgatggaaggaaatgatagtccagttccacatagagtgtgttggcacataaacagtttgatagccttgttatatgttggaggtgctgatatatttttgtat

SEQ ID NO: 670928 - DNA, 1073 bp, Homo sapiens
  misc_feature 262: n = A,T,C or G
aagagaaaattgaggccgagcaaggggatcgcgacagtgcgaacgagatagcagcggaaccagcattcgaacccaggtccctgaactcccagccccgggatcttctcacccctaaccacagtgggacgaagtgaggccgggatctccggaacccgcctctcgctaccaggcgccggagctgccgctcccgaggttcctaggagatgcagaagacactgcccctgaatgcctacagccggctgcaatgccgccccagagcagngcacsggttgccgcctcgccttcttataggctcggagcacttccagtcgcgcgcgaggcctcctgggaagtgaagtccggagaccaggggtggccggctcccagcgcgccaagctgctaaccccctaactcccgttcctcctcggcgtttcttctccaagtccgaagtcagggtccaggactgctgcgatgcatcagccccgcctctcatcccccatccagaggaggcggaaatgttcaggtgaacgcgaagcctcccactacgagccggccctcagcaaggccgtgcgcagtgtgggcgggagccctaagtcagctagcggcgacgctgggagggcccggagcaggccgggccccgaacagcgaaagctccaacatggcggccagactggccatagagcgggaagagaaagccggggactagcaggccgcacggcgcagacggggcccgcctcctccatttacttccggaatttaaagccggcttccggaagccgggacgatgtccgcatgacaaccgacgttggagtttggaggtgagagtgattgacgaggagtgggttaagtgaccagaagtcagaatttttggtgctgttgttttgggcttgggttttatgctttgttgttgtttgccaaggaagcctcgtttttaagtggattgggaagcgtgaggaatactgccctaggtacaaagggaaggcggcaggtagcggtggacgaattaaagagcttcatgagcttgtgagtctccactgccctaaactggaggggatcgtcgtacgtagagacaggcatgggcgtttctgcataac

SEQ ID NO: 670929 - DNA, 1073 bp, Homo sapiens
  misc_feature 262: n = A,T,C or G
aagagaaaattgaggccgagcaaggggatcgcgacagtgcgaacgagatagcagcggaaccagcattcgaacccaggtccctgaactcccagccccgggatcttctcacccctaaccacagtgggacgaagtgaggccgggatctccggaacccgcctctcgctaccaggcgccggagctgccgctcccgaggttcctaggagatgcagaagacactgcccctgaatgcctacagccggctgcaatgccgccccagagcagngcacgggktgccgcctcgccttcttataggctcggagcacttccagtcgcgcgcgaggcctcctgggaagtgaagtccggagaccaggggtggccggctcccagcgcgccaagctgctaaccccctaactcccgttcctcctcggcgtttcttctccaagtccgaagtcagggtccaggactgctgcgatgcatcagccccgcctctcatcccccatccagaggaggcggaaatgttcaggtgaacgcgaagcctcccactacgagccggccctcagcaaggccgtgcgcagtgtgggcgggagccctaagtcagctagcggcgacgctgggagggcccggagcaggccgggccccgaacagcgaaagctccaacatggcggccagactggccatagagcgggaagagaaagccggggactagcaggccgcacggcgcagacggggcccgcctcctccatttacttccggaatttaaagccggcttccggaagccgggacgatgtccgcatgacaaccgacgttggagtttggaggtgagagtgattgacgaggagtgggttaagtgaccagaagtcagaatttttggtgctgttgttttgggcttgggttttatgctttgttgttgtttgccaaggaagcctcgtttttaagtggattgggaagcgtgaggaatactgccctaggtacaaagggaaggcggcaggtagcggtggacgaattaaagagcttcatgagcttgtgagtctccactgccctaaactggaggggatcgtcgtacgtagagacaggcatgggcgtttctgcataac

SEQ ID NO: 670930 - DNA, 583 bp, Homo sapiens
taattatctcctgaagaccccacctcttaatactattgcattggyggttaggtttcaacgtatgaattttgggggaacctaactactctggccatagcagttgcacatctggaggcctcatctttggatttcttccccacattcccatttcacttttttgacctcagaagagttttccctgatgttcttgcaagctcatggtgtgtttaagatgtttttatttgtgttggttttactttatctagcatttttagtaattttgtagcaggatggttgtatctggcctgccatatttttccatcacttattgattatttatttttggcttgcattgtttaggactatctgtatttctggttttaagtccatttaaaatacttctgcaagatggcatgtatggaaataaaaggcaatgaaaataacttaccggggaattttgacatgttccccaataccttcataaaatggggtgaaaacttggatggtcaggaaatagaaaggagtatttaatctgagcctggcctgcaaagatgagtagaatttccttaggtcaacacaagtgaatgagaccatacgggatgaa

SEQ ID NO: 670931 - DNA, 559 bp, Homo sapiens
tgccaagggctgggaggagggagaatgaggaattattgtttcatagaccccaagcttcagtctaggaagatgaaaagagttctagagataaatggtgatatcggttgcacagcaatgcgaatgtcctcaatactgcactgtgcacttaaaatggttaacatgataaattttatgctatgtgtatttcaccacaattaatgataagataaagaatttttgtaataattggtcaggcatggtggctcacacctgtaatcccaacactttgggaggccaaggtgtttggatagcttgagtccaggagttcaagactagcctggggaatgtggtgaaaccccatctctacaaaaaaatacaaaaattagccgggtgtgatgatgtgtgcctgtaattccagctactagggaakctgaggtgggaggattgattgagcccatgaggtctagactgcagtgagccatgattgccccactgtactccagcctgggtgacagagcaagaccctgtctcaaaaacatacatacatacataaatataacaaaaaattattcaatgtaag

SEQ ID NO: 670932 - DNA, 594 bp, Homo sapiens
acctagacgatgaaatagtcaatgctggtttgtgggtgaggtaaaataaatactcatattctggaacaacttgcctgaagaaatatttaactattttaagaggtttaaaatgtccacaccatttgatcctggaattcccctccaggaaactatttctggttgtacaacttgtattaagaatgtgtttttataaaaacactaaaattaaatacatgttagacatggttgaaagataactttctcatataacaagcagaccacaagaaggatactcatatcataataggtagagcaaatcttaatagttcatgatatttacaaaaggacttgtaaaatattttcctacagcgaaaaaagaacaagatggtttgattgtagacaattttgggtgtatctttatttaataaataattattgactatgacatgggcacaattactattctaggtattaaggatatagcaatgaataaaccaagtacttatattctagtagtgggagacagatactaacaaataaatcagtaagtacagatatgtcaggtgatactaggatgaagaaagtagaataagggggcagagcracgggagcaat

SEQ ID NO: 670933 - DNA, 849 bp, Homo sapiens
agttccattcttacccacaaactgaataaaggagcccagtaggggattaacacccaagttaataagttgcaaactttttcaggaagaaagcacaaargtgattataacaaagctaacaacttatattctttggttcttccatttgattaatagatatgtagtaaatggaccgcagcaataaaacagaaagtgctacctcctttctggagttgctgtaaatattcctcagatgtcaaaaaaagtagaaaaattcttgttacaattaattttggtaatggaatgtatataaagatacatacctcaacttggctttttggtcagcaccaagatgcactatttcttgcggtaaatatcgatctaagataagatcaatatttacctcacagttcaatatgttgtgtgactgtcttcaacacaagtcaatatctgcgtaatgtctgcaacctgcttcttatcagtgcttttgaaacttccctatagccctcaggatgtttggaaatttgaagtgttctggattcttgtcggctctttacagtcaatctatacacagtagagctatataatatgactctttctagcatagttgtgattgctagacaaacagttcctgaaactcctagaagccagaccttctaggatgtagaataagcctagatgtgcccaatcctggactctattctattgagatcccttcatatagtacacaatatgaattactaaatggcaaattgccatgcgtaaaacccacaactttgactgaggtcatgattatgtcattcaaattacattaatcttacctttttatcctttggaacagacctgctagaatcaagcagatcaggaaagttc

SEQ ID NO: 670934 - DNA, 622 bp, Homo sapiens
taagtctggcagtcctacatctcttcaatcttttttttttgttccactgttctcatttccacctacccaaacccatatttcggcacaaatacaattcttgaaaaaaaatgactcatgtagactctctgattttcctctgacatttaagtaaattgttgagtctttgtgtacagaatctccacgggacaccaggaagcgycacatattttgaagccactgacaagatgtgtagtgctggcatcttcctgcctgcattactttgcctatagaatgaggcttacaattcctagccctgctgtcacatagtgagtgtgcaataaaggctcactaatattttaaaagtacgtatctgtcaggaactcagggtgtgcatgtagagggcatggaaagaagtctcattactccctattaataataaacatataacacacagatatcttccaaaggactatgtatgtgttaggaattaaacggatcttgtggggttttgttgttttttgttttgttttgttttgagacagggtctcactctgtcgcccaggctggagggcagtggtgcgatcttggttcatggcagcttcgacctcccaggctcaggtgattctcccacctcagcctccca

SEQ ID NO: 670935 - DNA, 1163 bp, Homo sapiens
atttctcaccttgtttaaagatctgtgagaaaacatagatttttaaaaatatttttaactcactctgcatgacagatattacattttagaaaatattttaaaattttaaatgtattttaatttacaaattaaaaaaattattttaatgttacattttacatggaaggacatgtgctgttttcatgtctaaggataatttttaatttcaccatagtgcctcacatttctctgacatttcatttttaatgtctttgtgacttagtatagtacaatttttatttttataatgtctgtcatgcagagtgagtctagaatgattttataattttgcatggcattttgcctaaacaatactctttactgatgaatggttttatcacttttactcttagactttgtgaatttgagacttctttagattataggtatgcttctaattatatttttaattcctggagttgtagttttctctgtagataggtatcaaacttatagtcattttattttgcctgtatttccaagtccaggaatggttttcatagctaaataataaatactaattttgcctgatctttgcaagtctaggcagggtgataaaatatttttgaaagctggtaattactaaaatttatgatttcaaaaaagcatagatgctagcttggtaaatttaaaaatttttcttatgttggcattatatctgttttgtatatgtcttttttcatatgggagaarggttgaattcactatccttggtagtcatattctgaagtctgtactactactatttgaaaaattataatagccttaactctttttaagaaccaaaatgattttgctttcatagtggaatcttggaatttctaggtgactttggggaaatagtgtggatgctctccagaaattcctgattgaacctgagattgaacatagcaattctggagttattggtggcactaacaacagccatcagaattacctaaattttaatatccagtcatgaacatcaggaggaatgaaggaggaagattcagtcctttgggaacctgatgtaattttagatagccaaatgtttggataactgataaggaaaaagtttaatttaaaatacatgttgatgttgagttcagtttgccagtattttgttgaggatttttctatttatg

SEQ ID NO: 670936 - DNA, 1531 bp, Homo sapiens
caaattcttggcctaatgaagtggacaaaatgctaccaaagttcctcagactctgaaattctgtaatttattgtcaccaaaagtcaaatgcctagaccagtgttgatcattctcatgctgagagtaattagtgaatttgttcagggtctggggggaccccaatttcaaagcaaatggaaaccagagatggttgttctgtcaatccaattgtcactttatagtccctaaataccaaaggctaagctttggcaaagttgggcagtaaaaatctacccttactgcaaatctttctccttttgatccttctctccccaatcagttctatttcaatccagaaagtcagcaactttgaactttctcttccgtctgtgaaaacctattggtaagtggtagatatttacagcttagtaaatacataagtgtttctaaatatctaagtgtttctcccaaggatatttatgttaaagttttatatctaattttctaataaaagttttttctccctattgagggaattgttttccatttatataaaattattttaaaattatttgtataaatttaaggggtacaagtgaagttttgctaacatggatacactacctcctggggaggtctggacttttagtggaaccctcactggaataatgttacaatgtacccattacgtaatttctcatccttcttcccctcccctcccacccttctgagtctccattgtctattccacactctaagttcatgtgtacacacactacttagctcccacttatatgtgagaattttatgtttcacgatgagtaggtggagaagatgtatttagggagtaagacagaggactttcttaggttccctaaattcatacgagatatggggaacctttgtccaagagtattttcaaattctggaacaatgaggattatgtctttaatatgggcctttccccaaacwccactaataaggacctcttcctccctctacttggagctacatttgaacatagtttttaacaagttacaaaaacactacccccagttactacaagccctgaatgaaatgtaatagccaagaatccttttaaggattgggtgctgggattgtttgctttctcttctctcttttcttttcttttcttttttttccttcgacagggtcttgcactgatgcccaggctggagcccagagcacagtggcctgttaccagctctctgcaacctctgcctcctgagctcaagcaatcctgcctgagtagttaggaccacagacatatgccaccatgcccagctaatttttatattttttgtagtgatggtgtttcaccatgttgcccaggctggtctcaaactcctgagctcaagtgatccgcctgccttggcctcccaaagtgctgcgattacaggtattaaccatgtccggccttgctttgtttctggtttatagtgagactgaaaaaatttaaggaaggtatctcaatttaaatgaattactaattgaatgagtgatacatttacagataaatgattcttctaca

SEQ ID NO: 670937 - DNA, 1531 bp, Homo sapiens
aaatcataagaaaactttttaacaatttgccagagcacacacgtggatgtcatattttagggagtggagcttagttttcaatagacctcatttaatgaaattgaaagcttctcaagagatcacccaaacccagcagcaccagaagccatgaaggtgttgactcagagatgaccctaactcaacatattggaagaggtgatatttaaatgtatattcacagttcacaaggcataccctttaagtcatgatttaaacatcagttaagattttaagtagaacgtctatatcacaattttcacaaattcaaatccaattaaaatagatacttaaatcaccttagagagagttgcctaaagccaacaggaaaataatctaatttatcatactagtactttataaaatttaccttcaaagttgactttaattgttctaactactaattattggataacaaaagtagggtctcttccactagacaattaattactacataaatatgggaggtaatttgccaataaacttatgagacaaagtatcatctctttcartatgttttcattaactctgtgacctgaagggaaaacagtttacctttaaagctctctgaactgcagtcttcttcaagacatcggggttaaattctaatgggttactctttcaagtcagaagaaaacgaatatgccaagggttaataaaacatgcaatgaagtttatgtaaggttaaagacatgaaaatttatgggaataaacaaacaaaaatctttaaacaaaaccaccagaattacacaaacaaccaaaatgccacgtataaaattctttatgcccaagacttcatcttagaatgaacctttaatctatgcatatcaaaagacagctccttatcccctatgattaatattcttttactacccccaccctcttgatcccttgtgatttcacaaatacaagagtggggctttaggaaagggttctatttactattctatgctgaataaacccctaaaataccaatcataattaaaggttttatttgaagcacaatgaatgggccacagccgcccaagtccctctcaggccaggtcaggtcctggaaccgccgctgagacgcaccttcccacccagcacccagcagaggagctgctcctctctgctcctcgtccttttccggggtaggagtcaggctggctggatccccacagaagcttcttgggctctaaatatagtcctatgattatgggttttatgtttacttttattgatttttttccaattcattagtttcttgccctcaaaaaggcaagactgagttgttttgcaagctccttctaggactagtattcaagattaaagaatttatcattttagttgtaattaacttcaaacttgtgacaagctgaactaaatgtttaattttttttttttttttttttgctaagcaaaagattttataatgaagaaagatgagtaactagcctctcaatcttccatgactggcaggctgggccaggagagaagatggaacatgcggcca

SEQ ID NO: 670938 - DNA, 1200 bp, Homo sapiens
cgactactcatcacccgtattttgtttccaccataatcttcacccttcttaaaccttcaacactcagcttagagacgcttatcaaaacataacggatatttaatcataattttcacccttcttacgacttcaacactcagcttagagccgcttattaaaacacaatggatatttaatagggatagcccaaagttatggtgtagtgaaggaattcaggcattattcttactctataatgtctggggtttctttttgtaatcaattaatataacatgtggatgctcattttataaagcttgggacaagatttcattatgttaagttcatggttatttatttatttatttttttaattaatttattttttttgagacagagtctcattctgttgcccaggctggagtgctatggcatgatcctggctcactgcaacctccacctcccgagtagctgggattacaggtgtgtgcccacgcccaactaatttttgtatttttagtagagatgggatttcactatgttggctaggttggtctcaaactcccgacctcaggcgatccacccgcctcagcctcccaaagtgctgggattacaggtatgagccaccgcgttcagcctcatagttatttaatattcacttttataacctaagggttgccatagctgtaatttatctgatagaaagactgacaactagtagccccaattttacgtacatatctattaaattttagtacataacatttatgtaaacataatttattatataaaatctacataattgtgcataaattatatatacctatatatataaacttagaagagatatttttacatttcccttttatacaacagcctgttttttgaatggtgtttgtgtatttatctgttaggtaagtatatatttttaatgacataattatacatataygattatatatatatatattttttttcctgagacggagtctcactctgtcgcccaggctggagtgcagtggcgcgatctttgctcagtgcaagctccgcctcctgggttcacgccattctcctgcctcagcctcccgagtagctgggactacaggcgcctgccaccatgcccggctaatttttttgtattttcagtagagacagggtttcactgtgttagccaggatggtctcgatctcctgacctcatgatccacctgcctcggcctcc

SEQ ID NO: 670939 - DNA, 607 bp, Homo sapiens
gctgaaaaggtccatttaacaggtaaggaaataaataatcagaaatgttatgaattgccttcaaaggcaatcaattagcaaagtcatagatttaacctaagttacctgacacaaatcgttttgcttttctgcctagctagatgccaggttctccagtgagcaatgggaattcagagacaagagatgtggctcttacattggaagaactcatagttggaggggcggagacatataactgcaattacacagaagcayagtggcagtcataagctcagggctctgtgaaatcaccagggagttggagtgctgtgaaaggatgtagagattaatgcttgagttgagttttggaaggagatttatgagtttatcatctcacaaagagaagaaaagactaaggtcgaagaaaagaatcagcatgacccttcaaaggctcagaatgaatgaataaatgaatgagggaatgaatgaattcatccaaaatatatttattaaatatctattgactcctaggcatgaaatgataaccaagtcagagaaggtacgcagcttcattgtcatatcctggggagggaagacaggctgaagatgtaaacagataagataatct

SEQ ID NO: 670940 - DNA, 638 bp, Homo sapiens
atcttggtatttgttttctatttttcacatctcttctattttcttctgtgtcctttctatttgttggattaatgaagtattttaaaataattcccccttaagcacactcccaagcctgttagttgtacatgctttcatcattattttgatggttacccaatggttacataatcccttcttcacacactgaagttaaacatgttgagtgtatcataatccaaggggctaaggatagtttgatatgttttgtcccttctcatcttttgtatttttaattgtcatctttttctgcagtcacaattacctatatttatctatttattaatctttttccagtattcatcacaccaccttacatctctgaattttcactggggattacttttcttcttcctacgtaatcccgtctagtatttccttaagtgggtttstgctggtgacaaattaactcagctttgtttatctataatgatttcagtgaccatttgtcctagtatatatcctcattttcattttttggagacatttttattgttatagaattctaggttggcagttactttttaataacatccttctggtcttctgtcttccctactgctcttattgttgctgtattaaaggcaatgtgcattttt

SEQ ID NO: 670941 - DNA, 2025 bp, Homo sapiens
acgtatatttcagttcccaccacctcaacccaataacgacaatcccaagggcccatgaatgaagaagccagaagaggtcagctcatacatccccttcctttagacaggactgtaatgaaatcatcgttgaccaaggctgtcaatggttctgggtgaccagagcacagcaatcatttccattattttccatagaatgacttgtgaattgccacctcctgcaaatcctgtggcctatgatctggaccaaatcacatccaagtgtctgatcagttctgagagtggttgtggatgaccttagtattccagaagactggctctgaacgcacactagtgcatccacaatgggacatccatgtgtaaaaaggagtgaggagctgggattcttcagtggcctccagctttcattccatacaggaatgggctcgttcatatgcctctgagagagtcagcttggagacaggcaagtctgggttcaaatcctgggtccatccctagatggttgagtgtggttcctttatcctttataacagggccaatacatacttcacttggcctttgtgaggactgggggactgtccacctaaggcaaaataaagacatcatttattcacagtcttccttagtgatgcacacatgtggcctgagaactaacattgatcttagccttaggatcccttcgttctaccactgacattaacccccatgtgatcttgtgcatgtcagtttccctctctgagtttgattgaccctttagtgagattaatcaaaattgatctccaagtcactttcagctttaaaaaatgcaaagctctacaaatcattctgatattggccccaaaaccacctcttggcacctcctttgcttctctgcagttttaggatccccttgtctgatttcttattcaactctgtaagatcatatcaccagtctagcaacatcctgtcccatgccattttataatttcctgtttaattgcctgttttgtacccctagactgtgaattacctgatggcagcaactgtgtttcatttgccatagtgttccaagtgttttgtcaagggcttaaaacatagtcattgttcattaaatgcttttgtggattaggattattaatttatttaccacaacattattgaacatacctgttggcaactatattctctcttctatgggcattgaaaatagaggatttcttaagtatttctaatgatatgatttcaggtaaaggcatctttcccaggaaacttcaaccttcaatttcagtgcagctggcaaagacatgttcattccacctatgtataaagacaagaaagattttagcacccttgtaagggtagattttctaatttgaaatttattcatttgttaaactgtttgctaagtgccaactatttgtcatacacaagactaggcaatggggagacagatactagagcagaataaaaaatatctcaggattggatttagcagccatttgaacctggaaaagtcccttgaatttagtgagcatcccttttttatctttgaagataaaattgcctcttgtatctgaagaggttataatggatatcctaggagatttttgatgtgaactttattggtaaagtgcaagtgtcagattaactaaaggcaatgacaatccttctagatgttttccttctctcaataagcattgtttagattcaatagcagcttagaacctaatatatgtataatgtttccctctatttcagagcaatggaatattctcagaaaatagacttgagagcaggttctataacttcatttctctttagttgcttcttcctctacccttctaccccccagtttagtctactcagataaagaataagcactatgttgttcatgtttgtggtaartgaaaacagtcaactaatcactaatttaatcactaattttttctttgtgtgtatttgacactcaagttctttgcctttaataatgtttaatcagcattttatgtttcttttgtacctttttttttctttttttttgagataggg

SEQ ID NO: 670942 - DNA, 576 bp, Homo sapiens
catctagtttattttaacagctgtctagcataccactgtgtgagtctacaataatgccattatccattctcctccygatagacattcaggttgtttccagtttttcacatttacaaatgctactgcaataacagcctttgaccatattcctcatgaacatgtttaagagcttctgaactcacacttggacatgtacttgcaagtggcattggcaggtcaaagggtcagttccttcttcaatttgaccccatagtgccaaattgctctctgcagtggtcacaccaattgctactcccatcagcaagcagtatgtattaaagggttaaacttgcatcctttcagcctggaataactgtgttccaagactcttccaaggacacatggatctgtcttagtctctgtcttcatcacacctttgcaagatagatccaggggggctccagttacaggagacaaccaaggcagaggggagcttagaggattccctacagttgccaggggtctttggatgggaatcagggcatcctgtgctctaccaaatatgctgacctttagaccagtggtttctcagctgtg

SEQ ID NO: 670943 - DNA, 652 bp, Homo sapiens
gaactgatagctccattcaaaaatggaatgctttagatgaactggactctcactcatatgcaaagtgcattcctcaggactgtaaactcttgggttttacaccgtctttccctttgctaattcagaggccagaaaagtgcattcccttgtgtgttagtccattttcatatgctacgaagaaatacttaagacaggrtaatttataaagaaaaagaggtttaatggattcacaattccacatgactggggaggcctcacaatcatggcagaaggtgaaggaggagcaaaggcacatcttacatggcagcaggcaagagcctgtgtgaaggagaactgctctttataaaaccatcagatctcatgagacttattcactatcacaagaacagcatgggacaaacccgctttcatgattgaattacctcccactgggtccctcccatgacatgtggggattatggaaactacaattcaagatgagatttgggcgaggacacagcaaaaccatatcatcctgacatctttcagaaaaccttaaagcttctgaaccacagcagaacaaatggcacgtgctaaagccagaggcagaaagaagatgggtgtgctcaatggcctgtgagaaggcaggtggctggaccatcttggggcttaa

SEQ ID NO: 670944 - DNA, 1542 bp, Homo sapiens
tgccacacaacctgcaacgtgcaaccccaaaagttctttttgaacttcttacactgttgacaagctgttgtgggaaagcaaacctctggaggagaactgctagacaaaaaggtgttcatttgaaatccagaaatgggaggattaaagagttttgacctggatcctgtgtagctgaactttctcttgttccaggcccaccccattttgttttgtcccattccaaatgggttcattgtgtttgagtggaaatatactctgctgggcaaggagggagagctggaaaatttctaatacattagtgacttgtaccccagaacttcatttttcttgacctgtaagataaggtcagtaagtgttyagctggggactaaacagctgaaagaaagagatctcaaactacaatgctcttaaaaagacagtggcttaaattagaggtttgtttcttctcatgtcattgttttgaggtgggcgtttcaagctggttggggggctctgaatctctaagctattcaagagcacagtttctttccatcttgccatggggtcatacttgaggccatttttcacacatgcaagggcaaagccgggtcttggcaaattcagccagcctgcaagaaggatgaaaagaagtccaggatgagcagttgtttttcaataagtttcacacacaggagcttttgttctttccctcagatcccattagtgagaacttagtcacgtgactgtcaccacatgggaagctgagaaacatagtcttgaatagggaagacatgcccaggaaaaaagggagaatggaattttgaggacaaatagctattaaccagaaatatcaatatcaatagttgtaaaagtcaaataagataataagtgctaagcacctgctgatgtagagtattactgaggacgtaatactcaataaaaagcttttacctgccctcatttatattcttctttagagattgaaaattattagaagaagaggaggggcaattagaaacatgatgcacagctctaaatacagacaggagaggaatgggaagaactgagctgggtctgatatcatttgaaatttaaataactttcattcctgaatgatttaattaactggttacacagtggaggctgagtacaaaacaattctcctaaagagcctctctaaaaacataacaggagtcatccatttttagttataggaccatgaattgtcttataaataaactttccaacatagttctttggaaattataggtgttacataattgctagctcaatatttattgttcaaccatattcaacattgaaagtcctaagataaaaagcttaagtgtggattagactctggctggagctttgtccattgaaaaaattcatatgtgaatttctgagtaaggcactatcccaagtactttgatttctttttctgtaactttggaacaatccaaggatttggatggtacaagctcaataatacatgtgaaatgtctaagtcatacaaagtccatttaaaacttttaaagtattactatgctttaaggtcagaaa

SEQ ID NO: 670945 - DNA, 1151 bp, Homo sapiens
ttttatctgattaccattaagtaaatcagggatttctgtagaaacttacatttcaggtgtatcttaaatatgataattgggccgggcatggtggctcactcctgtaatcccagcactttgggaggccgaggtgggcggatcacgaggtcaggagatagagaccatcctggctaacacggtgaaaacccatctctactaaaaaataaataaataaatatatatgtgtatatatatatatatatacacatatatatatacgtatatatatatacacacatatatatatacatatatatatacacatatatatatacacttatatatatatatacgtgtatatatatatgtatacagaaaattatctgggcatggtggtgggtgcctgtagtcccagctattcggcagtctgaggcaggagaatggcgtgaacctgggaggcggagattacagtgagccgagattgtgccactgcactccagcctgggcgacagagcgagactccatctcaaaaaaaaaggagtacaaattgtccagtttaaataaggtaatttaaaagaaagtaactttcccaagattaccaaataatgaagcacagagaaacctgcttgggtccttcccttctctttatctttattttatctttattctttaggtccctttatgggtccacctctgcctatcttaatgattaactatacaagctgaaaaaaattatagaaatatattaataactgatttaaccatattaagttcaattacaaagttcagctggtctctcagctctgggtgtgaccacagatcacaaagttctgagaacggctgggaagcatgtctaatagattgtgcttttctattaatcacacagctcttagttctggggttttatgataaatcctaaggtttatcccaaactactttcttccaatgcagcttttggtatatgaatattctatgggtagtatattttcattaataatgtctattaagtataagttagaatayatgtccctaaatactttaaacatgtggagaaatgttaaatctttaggcaaattacatacagaatagtcaatcatctttattgttcttccccagagaccaagggattaataagatattaaatggccaattttaagtattgtgttaaggca

SEQ ID NO: 670946 - DNA, 2164 bp, Homo sapiens
ccaaacagtaaggcaagagaaaaaaaggaaagtagtgaatatcaaaaatatttaggtatgagtacgttttttttaaacaaaccttctcacacctaaatattttttgataatcaaaggcgaaaaaatcaaagataaaaggatgaaaaaaccaaatcaaaatgtaagaatacattttgataagaggaaaaaaatcaaatcaaaatataagaataattttattcctattaaaattaagactaacttgttatttaactgctcagcctaggttagtaatagagtttagaaagaagtaggaatcaacaagacctataaacataacgtacacacacatgcacacacacatatacacagtgcaaagttttttttttagtaacaatgtccattaaagtggacttctcaatttaattagaagcttttggattactggtcctatatcagaatcagattttaactgtgtgacttgtctgtaaactaagtccaaccatcaagctctagtacctctacaaagtaaggaaagtaaaaggcagaatcacttactttcacaagctcctgctgaggccatatctgaatgggttctacttgttgaggagtttgagtttgaataccatatgtgttcagaaaaacttgaagtctaaagatcatagggataaaaagagacgttttaagacaatgcatttacagtttaggaagcagtgaaggaggaggataaaagggaacatgttaacttggagggcattattaatttgttagtattagcaatttgccatctgcactagatttcagaggcccatatggatcctccatgaagcatcacatggaaacattaggggctgacagggagggaaagcactgattttggtaatccccatgtgtttgcatgaatttctcgaaactacaacccaggcaacactggcactggtcagtctttaatattcacctcaactaaaacaaaattatttttaaacacgaaaagaatatgctggtcatttaaagtgatattaatgatatccttgaaagcctgtaaaggagtttctgaagttaatctcttctaccataatcaatattgtaaacataaagcaatcatttcccctcccctcccctccccacaaaaaaacacaccacccacttggatttcatacctttggctttctgctataagtgccacatgaactaccaagtcattttccagtgggccctgtaatgcagaataagggagggggaaaacattttaaaagatctggtcatcatcagctacaatgagaaacaaggacaatattaaccatctctaagcagttcattaaaatgatggacaccagctggctctcagcggccacctttctttccttgctcgccactgcctactaatcaatttgatgatatagacagagtaatggaacacaaaggaatggaaagccataaacctcatcactaccacaggggctagcctgtcagggctattttgaatgatgcataagagcagtttggggaccgagagtcattttccatcatttaactctaaagggaagaggaggaactaaaaataaaaacccaatttatgtgttctctgtaaaaaaaaaatgatagttaaaattgttcatttgacatcttaaccacatataaggttattccctttcttgttaaccagttttcctttggcaccttatacatcaaaataactttattctaatatataattcttataatagagcatgaactacccagytgactatgtaattacattatattcattaaatgcaagctgttggacttaatagttctaatcaaagacagtgttggatatttgctactcattttttgtgtgataaagattcgctataacatgtattatacattgttaaattgaacccaattttgaaacctgtatataattaacagagaacattaagaagcaccaataaattacagtattagggagctctgaaaatactgatcaaacataactcttttatagtaatggatccaacagtcccaataatatgctgtaaaatatttgatttatcatcaatcagttcctctctatggtattcaatataacactgaaatttatgtatgatggaaggcaagaaacaccagcatacatatatcagcagtaaataccatacaatcaaagggatggttcccagaatcatcgtcaaagtgccat

SEQ ID NO: 670947 - DNA, 586 bp, Homo sapiens
tttgttattaaatactccaaatttagagaatgtactgaatatctggttaatataatagattcaataaatcctacccttttgggatatttgcttcagatattctaaaaataagaaataaaagcatacagatactgttgaaggccttattgtgtctcttccttgatacttccccttccttctcactccataccccctgggacaggagacaggagatacagcctgtgagaggaggctctggaaataattgaggagtgagaaaataagggatggtttaaagcaatggcaattagaaagaaggtgagagaacagattcaaggggctttytggggtataactataaaatttgaggggaatagattaaatgaaggaaaagaggaggagagaaatggattacaattcagccagtgatactgttaaggaaacttaagaatgggagtggtcttcggaatactacacagccacaaaaaaaaaagaataaaatcacgtcctttgcagcaacatggatggagctggaggccattatcttaagtgaattaatgcaggaagagaaatccaaataccacatgctctcacttataagtggagc

SEQ ID NO: 670948 - DNA, 2049 bp, Homo sapiens
ggcaaacaggtcgggtgcacaggtcacgtgtgagagtccagccgcaataccgcaggatccagcaaatgggcttgggcctttgctgcagagtcttgggtcaggtggtcacacgctcctgtgtgctaggtccctgacatgccaggtgcaggtggggggtgccgtctgcagtcacgaaggctggaattcaatcctggctgggaccctcaccgggcaagtgcttagctgggcactcaccaggcrcccaaaagtgaccactgctataatcatggcagcaataagtgtgacatactccaaggtgttataatttaaggaactttcttatgtgagccacacatatacttgcccacatgcacacacaggcacaacacatctatacaaacatgcacacacacatacatgcttctgcacaccaacacacatgtacatgcttctgcacacaacacacacagatacatgtttctgcacacccacacacacgtacctgcctgggcatgcatgcacacacgtacatgtttctgcacacccacacacacgtacctgcctgggcatgcatgcacacaggcacacagcacgtacccataagactcaagcatgcacacgcccctgtgtgcctttggtctcagccttgagcttcacttaccaaatgtgcagggggcaaagccacgcacaggctgagggcgccgagctgcagaaggccctcccagggaaggaagtggcagcagctgttgggtgcgtgttatatccatgccaggctcctgctcagggctctctgtagattttcttccataaagagaagattttctcatccccatcatacagatgtgggcatctaggaaggggtatgacctgagaggcaggaggtgtcctgcctgggagtggctcccccagggctggggtggctgtcatcaagcccagctgactacctcccctgggatttttgggtagctggtgaaaggttggctggaccactctgtatcattgaggctcggaattggtggttttggtcgggggggagggccgtgggagccaggcagaggtgctggagagagggagacagtgctaccctgcacgggggtcctgggagcagtggaacgttattcaatgcaagtcatccagagcctaggcctttgggaccgcctgcccccaccatgaccctggggtgcccagtgaggggcagggggcaaggtgggcctgagaacaggagtggaggcagctggcggagggcagctcggagggagtcaagcccctgcccatctgtctcagcccgatccccagggactctggggaggcccctggtggagtgtactgctccgagggcagtgggaggcattgcttggagaattaaagaagagcgtgatcccaagtggccgagaacttggagtgaagagcagtgtgctcaggacccatgtggaaagtggatcccggctcagccatccttccccaccccaaggagcctttggatcagccctgccctccctgcagctgcacccgcacgtgtcttcccaggctctgaggggctcacaggcgggttggggcggagggtcccatgccctctgggagcctgctggaggcactgcactgcagagggcatgaacctgcagattctggccttgccacatcctcagagtgtggccgacggcaagctggcctctccacatgccagtttctgcctccctaacgtggagagggtacagcacagacaacagataccacgtgaaaagcccctacccagtgcctggcacacagcgggtgcttcggttcttatctcattggaactgtacatgtgcctggggtggtaggaattcctgtcccttttccaggtggggcatctgggactcagacccataagtggcttgccccaggtcgcacggccagtttgaggtagggccccatgtctgcgtatatgatcccatcgtgagacagcacctctgagcagccagccttccggggcggctagaatactcttcaaatctacaaggtttcatttatatccagggacagccatgcccaggcagcgcttggccaagagagagcactgtgctgggagtc

SEQ ID NO: 670949 - DNA, 1694 bp, Homo sapiens
ctgaagctctgccagcccttcacgtcagsgggctctgcgtccgcagactgaaccaactgcagatcaaaacatactcagggaaaaagcatctgtacggagcatgtacaggttttcttacccttattccccaaactcccactgcattcctaggtgctaggtattccaagtagtctagaaatgacttaaagtatacggaaggatgtgtgtaggttacatgcaaacactacatcatcttaagagacttaaacatccatggattttgtatccacatggagtcctagaaccaatccctgcagataccgaggggcaacggcctcccctctacagtcagcattattgaggaaagaaggagtcagaaaaccagattaaggctattgtggctcccaaaacctgtggaacctaaactcccatctcaaagcccagtgctcggtgccctgggaagagcatcgccgggacctccagggagaccaccaggctgggaatcaggccaggcctgcgtgttgggccttccccactcctgtgcgcacacaagcccgctctactgggtcacggccaaagcaatccatccgcccttcctccacatcatcacgggaggaggaacccctttccaggtctcaccaaatcctgacactggaaaagggtgggagagtcagctctggacaaccaggactcaaccacgccctagggaacggcaacaactgcccagggagagcccagatggcccagaacacaccaggagcaaagcctgaggaacaaaaaccacctttccagaacctttaggatgactggcttctcccagcctgtgtctgcctgcccctttagtcatatcagttatctctcagttacacagctaacatacgaacaccttctccttgtaacaatttagacataatagataatgctgaaatctctcttggccaaggtgtccgtctgggttaaacatgggccggatcacagcaaacctagcctacgacagccgctaagagctgcttcctgagccccaaacagctccgcccctaggacaagcgcctttatctagaatggtgcttcttaactttctgttatctgaggaccatctccacagtttctgtgaaatctgcacctggtaaaatttatttcgtatcttcaagtcaaccttaagttgataacgcattgcccagccttgtcccaaacagaggtttgatggcgtgaatattcaaactgccacctactgatcctcaccacactcatcgcccatatgccccaaggggctgggggtgccacaatgaggaatgcagccctaaagaggatgcccgaagtgaggatggggacgagtgcgtggcactcaagctcaggctggggcagggcctgactacagaggtctggaaggaccttaggaaaacaatgttttttagagaaccacctctgacagggtcctgcagccacaggggccgacaaggaatcctgaagcagctgacagttgctatgggttgaattttgtctccctcgaaattcgtatctttaacctctaacccccagtagctcagaatgtgactatatttggagacagggccttttaaaaggtaatttagttaaaacaaggccattagaatgggccctaatccaatctgaatagggtccttataagaggaggagatgacacacagagggatgaccacgtgaggatacagggagaaggcgatgtctacagccat

SEQ ID NO: 670950 - DNA, 1694 bp, Homo sapiens
ctgaagctctgccagcccttcacgtcagcgggctctgcgtccgcagactgaaccaactgcagatcaaaacatactcagggaaaaagcatctgtacggagcatgtacaggttttcttacccttattccccaaactcccacygcattcctaggtgctaggtattccaagtagtctagaaatgacttaaagtatacggaaggatgtgtgtaggttacatgcaaacactacatcatcttaagagacttaaacatccatggattttgtatccacatggagtcctagaaccaatccctgcagataccgaggggcaacggcctcccctctacagtcagcattattgaggaaagaaggagtcagaaaaccagattaaggctattgtggctcccaaaacctgtggaacctaaactcccatctcaaagcccagtgctcggtgccctgggaagagcatcgccgggacctccagggagaccaccaggctgggaatcaggccaggcctgcgtgttgggccttccccactcctgtgcgcacacaagcccgctctactgggtcacggccaaagcaatccatccgcccttcctccacatcatcacgggaggaggaacccctttccaggtctcaccaaatcctgacactggaaaagggtgggagagtcagctctggacaaccaggactcaaccacgccctagggaacggcaacaactgcccagggagagcccagatggcccagaacacaccaggagcaaagcctgaggaacaaaaaccacctttccagaacctttaggatgactggcttctcccagcctgtgtctgcctgcccctttagtcatatcagttatctctcagttacacagctaacatacgaacaccttctccttgtaacaatttagacataatagataatgctgaaatctctcttggccaaggtgtccgtctgggttaaacatgggccggatcacagcaaacctagcctacgacagccgctaagagctgcttcctgagccccaaacagctccgcccctaggacaagcgcctttatctagaatggtgcttcttaactttctgttatctgaggaccatctccacagtttctgtgaaatctgcacctggtaaaatttatttcgtatcttcaagtcaaccttaagttgataacgcattgcccagccttgtcccaaacagaggtttgatggcgtgaatattcaaactgccacctactgatcctcaccacactcatcgcccatatgccccaaggggctgggggtgccacaatgaggaatgcagccctaaagaggatgcccgaagtgaggatggggacgagtgcgtggcactcaagctcaggctggggcagggcctgactacagaggtctggaaggaccttaggaaaacaatgttttttagagaaccacctctgacagggtcctgcagccacaggggccgacaaggaatcctgaagcagctgacagttgctatgggttgaattttgtctccctcgaaattcgtatctttaacctctaacccccagtagctcagaatgtgactatatttggagacagggccttttaaaaggtaatttagttaaaacaaggccattagaatgggccctaatccaatctgaatagggtccttataagaggaggagatgacacacagagggatgaccacgtgaggatacagggagaaggcgatgtctacagccat

SEQ ID NO: 670951 - DNA, 1694 bp, Homo sapiens
ctgaagctctgccagcccttcacgtcagcgggctctgcgtccgcagactgaaccaactgcagatcaaaacatactcagggaaaaagcatctgtacggagcatgtacaggttttcttacccttattccccaaactcccactgcattcctaggtgcyaggtattccaagtagtctagaaatgacttaaagtatacggaaggatgtgtgtaggttacatgcaaacactacatcatcttaagagacttaaacatccatggattttgtatccacatggagtcctagaaccaatccctgcagataccgaggggcaacggcctcccctctacagtcagcattattgaggaaagaaggagtcagaaaaccagattaaggctattgtggctcccaaaacctgtggaacctaaactcccatctcaaagcccagtgctcggtgccctgggaagagcatcgccgggacctccagggagaccaccaggctgggaatcaggccaggcctgcgtgttgggccttccccactcctgtgcgcacacaagcccgctctactgggtcacggccaaagcaatccatccgcccttcctccacatcatcacgggaggaggaacccctttccaggtctcaccaaatcctgacactggaaaagggtgggagagtcagctctggacaaccaggactcaaccacgccctagggaacggcaacaactgcccagggagagcccagatggcccagaacacaccaggagcaaagcctgaggaacaaaaaccacctttccagaacctttaggatgactggcttctcccagcctgtgtctgcctgcccctttagtcatatcagttatctctcagttacacagctaacatacgaacaccttctccttgtaacaatttagacataatagataatgctgaaatctctcttggccaaggtgtccgtctgggttaaacatgggccggatcacagcaaacctagcctacgacagccgctaagagctgcttcctgagccccaaacagctccgcccctaggacaagcgcctttatctagaatggtgcttcttaactttctgttatctgaggaccatctccacagtttctgtgaaatctgcacctggtaaaatttatttcgtatcttcaagtcaaccttaagttgataacgcattgcccagccttgtcccaaacagaggtttgatggcgtgaatattcaaactgccacctactgatcctcaccacactcatcgcccatatgccccaaggggctgggggtgccacaatgaggaatgcagccctaaagaggatgcccgaagtgaggatggggacgagtgcgtggcactcaagctcaggctggggcagggcctgactacagaggtctggaaggaccttaggaaaacaatgttttttagagaaccacctctgacagggtcctgcagccacaggggccgacaaggaatcctgaagcagctgacagttgctatgggttgaattttgtctccctcgaaattcgtatctttaacctctaacccccagtagctcagaatgtgactatatttggagacagggccttttaaaaggtaatttagttaaaacaaggccattagaatgggccctaatccaatctgaatagggtccttataagaggaggagatgacacacagagggatgaccacgtgaggatacagggagaaggcgatgtctacagccat

SEQ ID NO: 670952 - DNA, 1712 bp, Homo sapiens
taattgagctgaccgtgattccaaagccatagtatgcgtgctcagtgttaggaataatgaagggttacctctgtctgggtgcaggagtctacagggtgcagcaagtgcctccacccccaatggtaagttgtgccctgctgagggggctgcatatcaaaatcatctgggttcccgctgcctgcctcccatagctccctcccgtccctagctgcttcttgccttacccccagcctcagtgcaggcagcacacccatcagggaaggaatgactttgtgacctgtttgctgtagccctgtgtccagtggcctgaggggactggagatccaggaaccctggttctttttttttgttttttgggatggagtctcgctccgtcgcacaggctggagtgctgtggcacgatcttggctcactgcaacctccgcctcccaggttcaagtgattctcctgtttcagcctccccagtagctgggactacaggtgcacgcaaccacaccaggctaattttttatatttttagcagagatggggttttgctatgttggccaggctggtctcgaactcttgacctcaggtgatccgcctgtcttggcatcccaaagtgctgggattacaggcgtgagccaccacacctggccagcatccctggttctaggatggcttctgccatcacctgaacaggaattgtggaagggttatttctcttcgctgggctgaggaagaggaacagtggtgggtagggtggaagagaaaggagagagaaagataagggtaggggataggtgggacagggtcaaaggacatcactgccctgcctcgagtccactgcagaactgcctcccagtctgtggcaccagaaagacccatggatggggcaggcaggaggactggtggcttcacccaacctcggctgcagataaggggagatcttggccaagcccttcttgcctctgggctcagtttctccctctctaaaaggattgcggaggcctttctggactgtatagccttgaaggggaggtggccagagccactgagtctctccccttcttctctgggtctgggaaatgctgtcatagcctcctctttctgggttctgtctcctccactggaccagacagacaaggagctctgaggatggggccgggcactcagactgtgcctactggaagggtgcccccttcaccaagtgcttcccattggccccgcttctgacacatgtcatcttgttcgaatcctccctacagccatrtgaggtgcaattctctccccactttacagatggggaaactgaggctcagagagggggtgatgcgcccggcatctcacagctgggccagtgtaggtgtggaatcagcagagccagcagtagatccccattttgccctctcctctattgtatccacagcacctagaagagcacacagcacctacgaggcgctcagtaaatgcttgctgggcagggcttgctggggggtggttcctggtcaacctcgcagagcaactggccccgaagagcagctcgagccagggcctggacctccgctattggaggcacgtgtgtctgggaagacccccttcacccagcacagggggcttgggcttgttacacccccacttcacggaagaggcaactgagcagccgaaaagtgctgtgacttgcccgaggtcctgcagaggctgggctggtgtctcactagttttttcttttt

SEQ ID NO: 670953 - DNA, 609 bp, Homo sapiens
tgctgaggcaggagaagcatgaacccgggaggcggagcttgcagtgagctgagatcatgcccctgcactccagcctgggcaatagagcgagactccrtctcaaaacaaacaaacaaacaaaaagacataaccttagctctgccataaactcaccatgtaacgttgtgcaagatacatagggcctatctgcctgtctataaaggacatactgtggccaggtgctgtggctcacgcctgtaatctcagcactttgggaggccaaggcaggcagatcacttgaggtcaggagttcgagaccagcctggccaacatggtgacaccccatctctattaaaaatacaaaaattagccaggcgtggtagcaggcacctgtattcccagctactcgggaggctgaggcaggagaattgcttgaacctgggaggtggaggtagcagtgagccaagatcacgccattgcactccagcctgggtgacaagagtgaaactccgtctcaaaaaaaaaaaaaaaagggccaggtgcagtggctcacgcctgtaatcccagcactttgggaggctgaggcaggtggatcacgaggtcaggagatcaagaccatcctggctaaca

SEQ ID NO: 670954 - DNA, 643 bp, Homo sapiens
aggttatgtagattctgtttcactccaggtcactgtctttctctaaattcaaggcggtattcaacggagtgcagtagtttggcttgtcagaaggcacgtagcctggcagacacaaacacttgtaggaaccatcggtgttaatgcacttggcattcttgcagagagacatccggttgttcaactcatcgcattcatttacatctgcaataagtcaagccatgcaggtaaacaatcttggatattgctctgtgaggacacataacctgaggcttacctgaggcccttcccccgaccaccccaaggaagctttctcgtcattgcttcartcacagacaagacgaaggtgacttttttgagatcttaaagaggcagattatcagggaggttctagaacttctttcactgttatctagcaaaacatgagcattttgtgagcttgacattttctagtagaacctcaaggaagttggaggaactatattacttccaaattccttcccataggtatggaggaactgctagatttgtcaagaggaaccagatacctacgcagaggcctctccatacagcctgtctaaagccttccataacattcacagacctccttctacatgagacccatttaggctctcactcacttgaa

SEQ ID NO: 670955 - DNA, 643 bp, Homo sapiens
aggttatgtagattctgtttcactccaggtcactgtctttctctaaattcaaggcggtattcaacggagtgcagtagtttggcttgtcagaaggcacgtagcctggcagacacaaacacttgtaggaaccatcggtgttaatgcacttggcattcttgcagagagacatccggttgttcaactcatcgcattcatttacatctgcaataagtcaagccatgcaggtaaacaatcttggatattgctctgtgaggacacataacctgaggcttacctgaggcccttcccccgaccaccccaaggaagctttctcgtcattgcttcagtcacagacaagacgaaggtgacttttttgagatcttaaagaggcagattatcagggaggttctagaacttctttcactgttatctagcaaaacatgagcattttgtgagcttgacattttctagtagaacctcaaggaagttgsaggaactatattacttccaaattccttcccataggtatggaggaactgctagatttgtcaagaggaaccagatacctacgcagaggcctctccatacagcctgtctaaagccttccataacattcacagacctccttctacatgagacccatttaggctctcactcacttgaa

SEQ ID NO: 670956 - DNA, 1276 bp, Homo sapiens
tatttttgtatctccagttctacatacagtacctggcaaacagtaggcgctcaataactgcgaaatgaacaagtccatgtcaagagactaggctgggagttttaatatcaatgccgactgagaaacaaaatacggaaatgtcaagggctggtataaaaataatctctaatagcacaaaatcctcctgaagggaacacctgtcccactttctcacgttgctttccaggttcttccgacaccccaatttcccgcccactcttctccctccggggtacaggtcaggcaggtatcccagctcggcggctctgataggtcggcgatgatttcattgttagggaacatccgggcctttcccctccccgcaacacctccccagagcccggccttcccagtttcccactctcgcstgcgccccacccgcggctgaagcaaaacaaccgcctctcccctgcccacttcttgtcctcgtctgagtcgtcccttcccgtctccacgccgaagagaggcgtttagatcctccaatgagggcctaggaggactttcttagccaatcagtagccaagcccctgcaattccgggtgggaccaggcgtccacacctatagctggactgctcgttggtcccttatggcgcttcttttacgcgaggcttagaggtcaaatacaagggggcacggtcctcacagaacggaaaggatccgtacagactctccgggtttgaccgttttctaggacgaaccaatcgctttccagatacttccccgccttttgcgcgttcatttgaaaaaagccggtgtgacggacttggaaattggctcagtgactgacccgcaagaaagccagtgactgggggttcggatcacgagttggaccaataagaaaagacaatcgctggggccggggctttgctaggaggagcgcaggtgggcgttatttgattgacggagggctctacttatggctggtagcgggggctggtcctgacgttcgggaggtaggacctagcggaggcggggccgaataaagtaaatggtaataaagggttgggtctcacttagtgggcggtgtttgatggacagctgaccttgcctattgaaagtagccactgatgcccaatgggaaattagaaacccagaggcggggccgggtgggcggggtaaacgaagtacggaggtgccgagggagcagcacggggagggggagcggtgattgacaagactcccagcaaaccgggggccgtgagagggcgcgcggcatcccagtgggtggcagctgga

SEQ ID NO: 670957 - DNA, 635 bp, Homo sapiens
cttatgagtctgaaaatatttcttcgcagccaggtaatacacatgtgactcagatgccaccaaagaagtatgtgtccaagacctcaagttgaaagctgtggactgcggagggactctctggtgaagttgttgcaagcatgattaattcattggggcagcaatggcagccaagccagtggtggtatcctgtgtccaggagtggtattggtgattcagtttgcagcctctgaggtacaaggataaggaaaatggtgaccagatcagttttgctgcctcagattagacataatttcaagctgtatatctctaatcctcctaataattctatgacctacatgatatcctttaaataaatgacttatcatttaaaataattccgaattgatttctgtgacttgcaatgaaatcaataaaaaaaaaaaaatacctggastattactagaaaacagaccaccagggaaatgggtcaatctgggattaattttctgacctggtttaggctgaaggcagtgataattcagatgactctaagggtggagcagctctagacatgcaggagtggaacagttaataataaaaaaaaaacctctgacttcctgaaaggaaataagaattaaaggcaaggccttagagac

SEQ ID NO: 670958 - DNA, 1967 bp, Homo sapiens
ttaatgttaattattgaataaaaatgtcacataattatatttgaaatgaattatgtcatgtgacaaccattatgtttgcataaaatgggttataattaatttaaaatttaaatttatggttaccatatgacaacctgggacatataattgatcttcaaatctaacagttttggaaagtaaatgtaatcatttataacaataaataagtagtgatttagattttgcttttgttaccaagacataatacttcataaattcacttttagttattaaagttatccctacatcaggaattcttccttttttagaatatcccttatcccactccacctctctctgctagattacagaattgaagattcctcaataattgtttgtgtttaaatcttgtctaatacattgagaagacaagataaaataattccagaaactctcttactctgatttgtttggcagcctaaaaataactcataagaatctaaaataaaatttaaaaaaggattcatatcaaaacaccatgggatctgttaggatttttttttttgacagggtctcgctttgttgcccaggctggcgtgcagctcgctgcagccccaaccccccaggcacaagcaatcctccactcagcctctcaagtagctgggactacaggtgtgtgccaccacacctgcttaatttttaatttttttgtagagatagagtcttaccatgttgcccaacctttctaggttcagaacgtcatttagttacttatcctgaggcaaggttaacctttactctccttccagggcttcttctgcttccctcattttcaattatatatttgtatctgtttatatataatgttttacatatagtgtcagatattcttgcaagagatattaaatccaagaaagctaatccgtaaatgtaggaataaatacataaatccaatatgtcataacaattcaagaggctatataattttgaggttagaaatataaaaatagagaataatattgaactaaactctgaagtctataacaagttggaaaccttttccagttcccatttatatttcaatccctgtcactagatagattaatgttgtgctaatttctgtcctttattaaattttatcataagaaatgaagcattagaatttttgtaccctaaagtatttaatagttaattagcctgattctcccagtgcaaattctactttctagagcaaatgtaagatatacacagctgaaacaactgaaatacaacagagtttaccagattaatttgattgttttttagtgtacctgatcaccgttgatttgactgatgcattgcttctgttaccttgtccatgggtaatgtaactcatttactttgactgttccaagctactgataagagtccacaatgatccatttaattggcaaattctggttctttcagtcatctagatttagcacatagctatactatcaatattagttttcaaagaaattcctaaatcttttaatgtaccaattactaaattatttctctaggcaacagagtcaaaacaatcatactactttgtgaattattttatcatgtaattaaggagacatttctaatatgctctgtttacttatgaggaaaataagacaattacytgtggtaagaataaatttaagtcaaaaacctatgagaatgtaactgtaggtaatgaattcagcctgaaatttggtgttactctactccattattaaaaaaaaaaatcttggcctcccaagcacccttcaaacaaacagctcttaccaaaatggtattagcctaaaatgataaaatgacacacacatatgcacacaaacacaactttaaaaaataaaaactctttgtcatagaattaatactcattttaattcaagtgtctaccttaatgtttcttataatattactctttcctgaaatgcaataactgaagaatataggatgattagtctaaatta

SEQ ID NO: 670959 - DNA, 1967 bp, Homo sapiens
ttaatgttaattattgaataaaaatgtcacataattatatttgaaatgaattatgtcatgtgacaaccattatgtttgcataaaatgggttataattaatttaaaatttaaatttatggttaccatatgacaacctgggacatataattgatcttcaaatctaacagttttggaaagtaaatgtaatcatttataacaataaataagtagtgatttagattttgcttttgttaccaagacataatacttcataaattcacttttagttattaaagttatccctacatcaggaattcttccttttttagaatatcccttatcccactccacctctctctgctagattacagaattgaagattcctcaataattgtttgtgtttaaatcttgtctaatacattgagaagacaagataaaataattccagaaactctcttactctgatttgtttggcagcctaaaaataactcataagaatctaaaataaaatttaaaaaaggattcatatcaaaacaccatgggatctgttaggatttttttttttgacagggtctcgctttgttgcccaggctggcgtgcagctcgctgcagccccaaccccccaggcacaagcaatcctccactcagcctctcaagtagctgggactacaggtgtgtgccaccacacctgcttaatttttaatttttttgtagagatagagtcttaccatgttgcccaacctttctaggttcagaacgtcatttagttacttatcctgaggcaaggttaacctttactctccttccagggcttcttctgcttccctcattttcaattatatatttgtatctgtttatatataatgttttacatatagtgtcagatattcttgcaagagatattaaatccaagaaagctaatccgtaaatgtaggaataaatacataaatccaatatgtcataacaattcaagaggctatataattttgaggttagaaatataaaaatagagaataatattgaactaaactctgaagtctataacaagttggaaaccttttccagttcccatttatatttcaatccctgtcactagatagattaatgttgtgctaatttctgtcctttattaaattttatcataagaaatgaagcattagaatttttgtaccctaaagtatttaatagttaattagcctgattctcccagtgcaaattctactttctagagcaaatgtaagatatacacagctgaaacaactgaaatacaacagagtttaccagattaatttgattgttttttagtgtacctgatcaccgttgatttgactgatgcattgcttctgttaccttgtccatgggtaatgtaactcatttactttgactgttccaagctactgataagagtccacaatgatccatttaattggcaaattctggttctttcagtcatctagatttagcacatagctatactatcaatattagttttcaaagaaattcctaaatcttttaatgtaccaattactaaattatttctctaggcaacagagtcaaaacaatcatactactttgtgaattattttatcatgtaattaaggagacatttctaatatgctctgtttacttatgaggaaaataagacaattacctgtggtaagaataaatttaagtcaaaaacctatgagaatgtaactgtaggtaatgaattcagcctgaaatttggtgttactctactccattaytaaaaaaaaaaatcttggcctcccaagcacccttcaaacaaacagctcttaccaaaatggtattagcctaaaatgataaaatgacacacacatatgcacacaaacacaactttaaaaaataaaaactctttgtcatagaattaatactcattttaattcaagtgtctaccttaatgtttcttataatattactctttcctgaaatgcaataactgaagaatataggatgattagtctaaatta

SEQ ID NO: 670960 - DNA, 641 bp, Homo sapiens
ccccattgtgttttgatatatatatatttcattgtgaaataattgccaaaatcaaacttatattccttagttcaaataattaccccctttcrtgtgtgtgatgagaaaaataattaagatttactttcttaacacattttaagttacaatacagtattattaactataggcaccatagcatacatcagatcttcagcatgtattcatgctgtgtaactaaaaatttgctgtaatttacattatcagggtatgaccagggcagagaaacactgtcttgtgtcagcagtccttaaacacagcaatttattggccttttggcttatgtgtactgaaaattggcttacttcattatgtttattattttatgatattaatatccttttcctggatatttagtgtggtttcagtaccaagcagagctaaaggtttacattagcagagttaaatctaaagcttttaggtaaatagccagtatttttgatgaatctttaaaatggtttgttcatgttaataattattttttatttgtttattcatttcattagactaattttgtcgtgattttcccaaagtttgccagttgataaaacataatactgagttacttcgtgtgaatattttatatttaagcattataaacc

SEQ ID NO: 670961 - DNA, 641 bp, Homo sapiens
ccccattgtgttttgatatatatatatttcattgtgaaataattgccaaaatcaaacttatattccttagttcaaataattaccccctttcgtgtgtgtgatgagaaaaataattaagatttactytcttaacacattttaagttacaatacagtattattaactataggcaccatagcatacatcagatcttcagcatgtattcatgctgtgtaactaaaaatttgctgtaatttacattatcagggtatgaccagggcagagaaacactgtcttgtgtcagcagtccttaaacacagcaatttattggccttttggcttatgtgtactgaaaattggcttacttcattatgtttattattttatgatattaatatccttttcctggatatttagtgtggtttcagtaccaagcagagctaaaggtttacattagcagagttaaatctaaagcttttaggtaaatagccagtatttttgatgaatctttaaaatggtttgttcatgttaataattattttttatttgtttattcatttcattagactaattttgtcgtgattttcccaaagtttgccagttgataaaacataatactgagttacttcgtgtgaatattttatatttaagcattataaacc

SEQ ID NO: 670962 - DNA, 641 bp, Homo sapiens
ccccattgtgttttgatatatatatatttcattgtgaaataattgccaaaatcaaacttatattccttagttcaaataattaccccctttcgtgtgtgtgatgagaaaaataattaagatttactttcttaacacattttaagttacaatacagtattattaactataggcaccatarcatacatcagatcttcagcatgtattcatgctgtgtaactaaaaatttgctgtaatttacattatcagggtatgaccagggcagagaaacactgtcttgtgtcagcagtccttaaacacagcaatttattggccttttggcttatgtgtactgaaaattggcttacttcattatgtttattattttatgatattaatatccttttcctggatatttagtgtggtttcagtaccaagcagagctaaaggtttacattagcagagttaaatctaaagcttttaggtaaatagccagtatttttgatgaatctttaaaatggtttgttcatgttaataattattttttatttgtttattcatttcattagactaattttgtcgtgattttcccaaagtttgccagttgataaaacataatactgagttacttcgtgtgaatattttatatttaagcattataaacc

SEQ ID NO: 670963 - DNA, 641 bp, Homo sapiens
ccccattgtgttttgatatatatatatttcattgtgaaataattgccaaaatcaaacttatattccttagttcaaataattaccccctttcgtgtgtgtgatgagaaaaataattaagatttactttcttaacacattttaagttacaatacagtattattaactataggcaccatagcatacaycagatcttcagcatgtattcatgctgtgtaactaaaaatttgctgtaatttacattatcagggtatgaccagggcagagaaacactgtcttgtgtcagcagtccttaaacacagcaatttattggccttttggcttatgtgtactgaaaattggcttacttcattatgtttattattttatgatattaatatccttttcctggatatttagtgtggtttcagtaccaagcagagctaaaggtttacattagcagagttaaatctaaagcttttaggtaaatagccagtatttttgatgaatctttaaaatggtttgttcatgttaataattattttttatttgtttattcatttcattagactaattttgtcgtgattttcccaaagtttgccagttgataaaacataatactgagttacttcgtgtgaatattttatatttaagcattataaacc

SEQ ID NO: 670964 - DNA, 340 bp, Homo sapiens
attaaggaacatctatctgtatattaaaaaaatgatattttccctaattgtcctgtacacacatacacaaatattcacacagaaagataagtataaacatatatagattatgccacataattaataagctggcattcacatcatagtttctaaatatcattgtccaataaaataatctgaaactttatggagaatggctgagttagtttgtataatttattgagttactrattgtgtatgatacattttcttatgtttgcattttacttaaatacaaactaaaaagaaaatcactaaaattaataagtgtttttactacataacagatgagccagttttg

SEQ ID NO: 670965 - DNA, 1191 bp, Homo sapiens
tatttgtttttgttactttattttctgcacttctgtttatgattatctttctcaacagactttagatttgttttaaagttagatgctcaagtcattaattttttcatgtaccaagtttctaatatgaagcatttggctgcatcccataatggaactaaattaatgtaaccactttctcctgtaaattttagtttgcttatgaactatgacccagtagtttcactcttaaatataagccctagagaaatacttgtacaggtgcaataagaagtttttaaaattggattaatagcaaaaattttattgttacacatatatatgtatgcacactcatacacatatatatgtatatgtattctgtaaatgttaggtgtagcaaactataaataatatttaagctagttgataatgtcatgtagattttctgtaccctcacagatattgtatctaactagtgaggttgttgtgttaaattccatgaagataatatggatttgcttttcatgttcatagtcagcttttttgtttattataccttgatgctctactattaaatccatatttagttgcaattggtatattttctttaagaatgaactgataaatcatgacaatcatcatacacatttttttgatcaaacatcatctaattattgactaaatttgttgaatttgattgtatacaaattatccctcaagagtaataaaaaataaaggcaaaaattttatcaatttaaccctaggaatattttccttgcaaccctggcctatcatattgttagaaactaaattcctatatgcattactcagytgcaaaagaaaagagtattaagcatgtgtatttcttagaatattacatatatgtaacgacagcatgctttgttttatcatgctgttattgttaaacaatgttctaaacatttttactgatggcagtattcttgtgtctattaatcattttacttctttattttataataagaaaaatattgctgagtcaaattttcatatcaagagcatcactctatttttatattttgtttctgaggtaacagagagggattatctgattttgtacaggtatatagaagcagagcgaagaaaacaccaagtatattctgcagtatttactgaacttgcaacaagctaactctaagagtcagtatttattatttttggtcagttcatctc

SEQ ID NO: 670966 - DNA, 603 bp, Homo sapiens
tgcatgtatacctacatattttttcacactcatttaaaagttacactgtattgtttatgtgtttcagtatgtgtttcctaagaacaaagtcattctgtaatataccacaatataattattcaattartaatacaacattgacatgatgctattatttactaccagtttcttatcttttgtacagttatttctttgtatgtaatgtagcatttctttctggccactttcaacaattttcttattttatttgtttttcagcggtttagatacagcgtgtctagacattgtcttctctgggtttaagacgctaaattgttgctgaggttgcctaatcaaaagttgatacagggtaactttgtaaggtttcagcaattttattttaaaatattttttaatgtcctctcatctcctcctgggactctaaatgtgtcccatattttttcagaggtcactgaactcttgttcatttcagttttctgtatatataacaacactttagttcttcagatccgataatttctattgatataatttcacatacactgacttccctgttttgctgtctgcaactaatcattaaacccatataataaatgttatatt

SEQ ID NO: 670967 - DNA, 637 bp, Homo sapiens
tttttttttttttttttgagatggagtcttgccctgtcgcccaggctgtagggcagtggcgcgatctcggctcactgcaagctccgcctcctgggttcacgccattctcccgcctcagcctcccgagtagctgggactacaggcacccgccaccacgcctggctaattttttgtaattttagtagagacggggtttcaccatgttagccaggatggtctcgatctcctgacctcgtgatccacctgcctcggcctcccaaagtgctgggattacaggcatgagccaccgcgcctggcctctcttcctcatttttttaattgaaatttttatataaattacatgaccaacaatagggacttaatcaatgaatttttattcttaaataaacatgataggtacttctttaagatcagcaggtttatatcaaattacttcataacaagtcaattaattcaggtataaagaggaatagtttgttcataattaatcctggcaggaacactaagaaaccaagttatttaaaatcagatattccatgaaagatgtattgattttgtttttccaatgttgtaaaagcaactaaaaatttctaagcccaacattttattgtccatattttggaagtaatgccyctaa

SEQ ID NO: 670968 - DNA, 643 bp, Homo sapiens
ttttttttttttttaggtgtttaggtttttatttttattttattttatttttttattatttttttttattatactttaagttttagggtacatgtgcacattgtgcaggttagttacatatgtatacatgtgccatgctggtgcgctgcacccactaacttgtcatctagccttaggtatatcttccaatgctatccctcccccctccccctaccccaccgcagtccccagagtgtgatattccccttcmtgtgtccatgtgatctcattgttcaattcccacctatgagtgagaatatgcggtgtttggttttttgttcttgagatagtttactgagaatgatgatttccaatttcatccatgtccctacaaaggacatgaactcatcattttttatggctgcatagtattccatggtgtatatgtgccacattttctttttttttttttttttaacaaatgtgtagaacctttaatgagaaaatttttttaatttaatgatatacatttaaagaaaatgaaagtaaatggagcaatataccatgtttatagactggaagactcaatataataaagatataagttatctcaaaattgctttatagattcaaagaaattccaatcaaatttctgaaaagtttt

SEQ ID NO: 670969 - DNA, 631 bp, Homo sapiens
tgggaacaacacctcatctccttgtcacttggatgtggcagagcttcctgctgttgctaattgctgaattgcttcagctcttccaccattgagttaccatttctttatgtgaaattgtctctacatccaagatctcaagtggacttgactagctcccaagtggacttgactagctcccaatacgctgttgaaaacaacgtagagtacattagatataacacaggttcccattgtccaacttgtagaaaaagtcaccatgtctgtgtccaccctctargaagacaatgccagtttattgctctaatatgtttttgtgaatgttaaatgaagtcttatgaatattcctaaagtattaagaatgcccataaatggtttgctaagaattactcacagccccttgatcatgtacttgacatgggacgtgcctctcatttctggaagaagctgtagagctttgctgctgctgctagtatttgaggacacagccctggtgactctgcccaggaccatgatgtttaaagggtcatttcactggtttaagtagtcgattaacagcagaagtgattggaatgtgctgagaattccaaaatatctgttgcctttctcctcaaccaattcataagaaacaaca

SEQ ID NO: 670970 - DNA, 607 bp, Homo sapiens
gaggtattaggtagtaagccctacttaagactcaccgtatttctaatgcagactgtattatagcatcatacataaaaagaagaaacaatattatctttctctaaacccatgcaaagcacccactctggactttcattagacctgcttttcaaactacagtttggagaaatgtggttcttttttktgtgtgtgtatatatttcttaatattaaaacaatatttaaaaatttgactttttacaccaggttcagtcgtcacgcctgtagtcccagcactttggtaggtcaaggtgggaggatcacctgaggtcaggagttcaagaccagcctgaccaacatggagaaaccccatctctaataaaaatacaaaattagctgggcgtggtagtgcatgcctgtattcgcagctacttgggaggctgaggcaggagaatcacttgaacccgggaggcggaggttgcagtgagccgagattgtgccattgcactccagcctgggcaacaagagtaaaactccatctgaaaaaaaaaattgactttttaaaaaatagggcacataaccatactgagacgatttggcgcacacacacacacacacacacacacaca

SEQ ID NO: 670971 - DNA, 607 bp, Homo sapiens
gaggtattaggtagtaagccctacttaagactcaccgtatttctaatgcagactgtattatagcatcatacataaaaagaagaaacaatattatctttctctaaacccatgcaaagcacccactctggactttcattagacctgcttttcaaactacagtttggagaaatgtggttcttttttttgtgtgtgtatatatttcttaatattaaaacaatatttaaaaatttgactttttacaccaggttcagtcgtcacgcctgtagtcccagcactttggtaggtcaaggtgggaggatcacctgaggtcaggagttcaagaccagcctgaccaacatggagaaaccccatctctaataaaaatacaaaattagctgggcgtggtagtgcatgcctgtattcscagctacttgggaggctgaggcaggagaatcacttgaacccgggaggcggaggttgcagtgagccgagattgtgccattgcactccagcctgggcaacaagagtaaaactccatctgaaaaaaaaaattgactttttaaaaaatagggcacataaccatactgagacgatttggcgcacacacacacacacacacacacacaca

SEQ ID NO: 670972 - DNA, 608 bp, Homo sapiens
gttagttgttcccacccatctcctcttgaccagacattctctgactccattgcccaaaacttgagtgcccaggttcttagaaccatctcckgcacctctgcaacctccagccagacctcgtttacatgtaaccccacctgccttgatgacacattgctaaagaccactgcatacctccttattctttcctacctaattcaaatttcactcataaatctgatcaggaaaatcagaatctgcctcctcttcataatctctggttttgtctgaattctttcactctgagccctaaaagtaatttcccatcaaaattttctgcttgctttaaaactctagacttcgagcagaaataactacttagacttcacccgaggttagatcataaactgcctaaaatttaaaattaaagtatgacccaaataatttatttattacgatatcaacgtacctgtcccctgaatcccttaaggaacctaagttcaagttcactgtgttaacgtagtccaaacaagaaagccacaaagttttatttattttaattgagaaaacttttctttaaaaataaaaaaagtgttaagggggtacagtgcaggttttgttgcttgatg

SEQ ID NO: 670973 - DNA, 1485 bp, Homo sapiens
tgatggttgaaatcatattgtactctgctttaaaaattttttaacttaaaattattcacaagcatgtttacaaggcatcaattgggcaatttatttacccccaaaagcctcagtggtaatgacccagtgtttctacttcacagagttggcatgaggttcaaattagaaaacacgtgagaaccctttgtaagtcacttacagaacgcacaaatgaaattatttgttctcatctccatgtcttgaggagtcaaaaggtccccattgattaagcagctgcagaaccctctgcagatcactctgaggatctagaaaagaccaagacaactattggtctgagagtttacagaaygatcccagagataaagccaaaacatgaaaacattaaggaaaaaagtagaggcttaaactctccttttgacacaagtagaattttgtcttaattacttaaaaagattatccaatactgaattccttctatccttagctctttcaatttgaaaatgagtcatgcttcaaaaaattattttttcttacctcagacaaaattataattttacctgcaataatgtgatttgtcagttgaatagtaagtttcctatcccctgaaaaaaaaaagaggaaagaaaaagcctatttttgtaaattcagattatttataaggattggtttaaattaaaaccagtgtttttactgaggaaaaaaaatcttgaactaaaacaaaaaaaaaagaagaagaaaaggaaaagaataaaagaattacaggcggtgcatggtggctcacacctgtaatcccagcactttgagaggctgaggcgggcggatcacgaggtcaggagatcgagaccatcctggctaacgcggtgaaaccccgtctctattaaaaatacaaaaacttagccgggcatagtggtgggtgcctgtagtcccagctactcaggaggctgaggcagaagaatggcgtgaacctgggaggcagagcttacagtgagccgagattacgccactgcactccagcctggcgacagagcgagactctgtctcaaaaaaaaaaaaagaattataaaagagaacccattaagattctattaatttatgttatagaaaaaattaaaactatttgttttcaccacaagcatataaagaatattttttcataattaacatgttactatggaaaatccatatgtagcatgttaatgcctggaagttaaaatggtttttatattttttcttatccttttctacaaattttttatatgtattctgtaaacttttttgtaaaaacttttctgtaaatttttaacatgtatactgttgataatctgaaaaaaaaatggataaaaatggtttaaaacagcatatacttcaaagtaaaacataacagtaaaccagccagctgaaataaatgaggaatgggagaattcagctcaaacagacaaaacatagcaatatggtatctgcaggaaaccaatcaaatatttgcca

SEQ ID NO: 670974 - DNA, 1721 bp, Homo sapiens
taatttatgaaacactttcacattcttgagttcatttaatagccaaaaagtgttgtgtgattaggagccaattatcatgcccttttataaaagtagaaattaacattcataaatgtacttatactttacccaagagctaagatacaatctgtttgcttccttccttccttccttccttgtctccctccctcccttctctmcttccctccctcccttttctctctgaatacacaaggcataaatatgccatcatgtgcacccaaagtcagtctttccccagtgtgatttccctactactggctccacatttcataatgggattagacataaagaatcaatagaaaacagatttgacattaaactttattagaagtatgactggaacatgcctgttctctttactaagcagttaaaatgcattgaagatttagatttaatttcaacaaacatggtatcttatgttacaggctctgagctaggacctttcaaacctgtcaaagtgatatattccaaacagtaaatacaacttggcgatacagtgataaattatgtctacccagcattgtagtattagtttgagaactaactttagcaaagacatatgtcgcaatctaccctgactcaatgcttttgtaaacaatggaggagtgttcaggccaagctgaacacaagagttttagaagaagtctttgcttaagcaggaggtaggacatcatgacgctcaaaagatcctttctagcctgtaataatatgcttataagaaacaggatccaaaataggcatcataagttagagtcaaggccaagcaggaaaggaagcagcatagataaaggtgcctctgaaaatctactattaaattaagaggttcccagactcttcacacccacttatgcctggaaaacaaccaattagctttggcttggggtacacaatctgggaccagctgcagatcatatgtagaaacatgcagatcataaataggtcatgttcagacatggaccagttgaatcattaggtgtttattgttggagataaaggagttaagtaaattatgagtggaggaagatatttatgagctagtagtcctctggaaaatagtcacttggatatgcaataaggcctgttgtctgatacaatagaattgttatcagatcatctgtctgcaagattgtggactccagtaattataaatcagaaatagttaaccactgctacttcttctggtcttactgagaccatccttcaaacagaaatatctttttttcctcccaatttctgactaagttctatacctgctacaaggttcatatcaaatatttctttctccataaaaacttcaccaagtctctctcatttgacacatcctcttcgccatctcctcagaatctcctgatgtttctttatttttttattttttttaattttttttgagacagagtctcgctgtcgcccaggctggagtgcagtggcgcaatctcggctcactgcaggctctgccccacggggttcacgccattctcctgcctcagcctcatgagtagctgggactacaggcacctgccatcgtgcccggctaattttttgtagttttagtagagacggggcttcaccgtgttagccaggatggtcttgatctcctgacctcatgatccgcccgcctcggcctcccaaagtgctgggattacaggcgtgagccaccgcgcccggcctgaatctcctga

SEQ ID NO: 670975 - DNA, 626 bp, Homo sapiens
taattaataaaacagcacatagactccattttaaatgagataagctctacaaatattagacagtctgggttcaaacaccctgtatttgcttactaactcttttatgcgtaaaactttttgtactggcatcatgcatctttctcttctgatgccatggctaatagtcagaactttggcctcttggttttttctgaaactgaaccacctcagtcttcatttgtatttatttatttgagtggtattttcatttcctttgagtaaaaggagaaaggaagaagagttgctgacgctgtcatgactgaaggggtaagattaggcattgtggcacctctcagccagggctgcttccttacaggaagtgcttcagagctgcggagatgggagtgatttagcagctgcctcccccttgattgaccgcatcaggctttaaaaatatcaatggattcatcagcatcaaccctttgcagaactctcttgaagactatcktaatggaaacatgtgagagcttttatgagtgcactccaagatatgatttatgggaaatagtcgcaacaagtgtttgcttgaagtctgttagagtcattcctctgaactctaggcactatcagaacatcaataaagcatg

SEQ ID NO: 670976 - DNA, 1160 bp, Homo sapiens
gagcatgattaatttatgtagaccaggtacgaagctgtagtttccatccaggtgaaatatggtaataatggccagtactaaagtagtagcagctttatttctcactcatactttctaatataggaattaccatcccttttggcagataaaaatgtgaggctcaaaatgttttattaatttacaaatatcacagctaataggtaccagagctgaaacttgataccagaacattctgatagcaaagcccaactttgataaatacaagagaattgataataaaagtggttgcaaataagcatcatatttttctaacattgtaattcatttttattcactcaaaatatttcataaacatttattggacattcaccattcacaattctgtatgccagtaatttggggaaataaaaatgaattaaagccttgttcttaagtgctcggtaaataattctacagcctttttgccatagggactgccttgtaggttgcctaattgtgagttacttccataagataacagatgcttcctgtttagcaggtaacaaaggttttacttagaagctctgcgtagtctagttattaaagcagtgttttacacatatttttgtgccaggtgttctacattactaaatagacatgctccatatgctccgaggttattccagattgtacaaatcctaaaatgctacagttaaataatttatagataggatgactactgaatttgggataaaatttaaagaaattatattttgtaatatagagactaacatccaataataacagcatatcaaagtataaagttattaaatcctttattgatacataaatacaatgtagtgagaagatcaatcaactacctaaagttttcaatacatgtgttttcccttggaaaatacactttttcctcrtggtttttataatttccctctacattcatttccagtatacagcctcatttttcatctttgagtaagcagaccttctgctttcaacattacccaaccttctatttactctgtcaatttgtcattttcctgactgtaagcctacatgtggaagactaacttaaaggaatttatataatagtcatttattctcttagaagtaattgttataagttgaattttgtccccgaaaaaattcacgtattgaggtcc

SEQ ID NO: 670977 - DNA, 1409 bp, Homo sapiens
taacaaacctgcatgttctgcacatgtatcccagaacttaagtataataaaaaataatataggagcaaaccacaaacattttttcttcctatcctgaaatataagctaacaattgtgattatggcagagaagttatttttcttatttatacgtgcaattttgtaacatggtgtttaaactacacatttgtgggttaaaaatatatagtatgatctgtgcctctaaggaaaagattgttctcttgtggaaacctcattagctcatgattatgttatcctattgagagtctagtttttatagtactccaggtataaatattaaatggaaatatttatactaaattgtatcaaagaaatgtaatttaactagacctttttcatcaacatgagttgtgctttagaactcatgtttctaattttagattctccatctaggattatgaaataatatagatgagaaatttctgagatgggttatcctaaacatcagttcatttttttctgaaacttattgacatgatcttttattctacgtgctagaaaatctctaagcatttgaatggcatatgaaaatatataatgtttaaatattcaaaggcaaatatagctcacttaaaagaaatactgtatgaataattaaaataaatgcaggacctggccacgacattgcaaattactgccttaaagtctttatggacaggcagttctttaaaaatagaaagctgttttaatcaaagccaaatgtttctatttttaaattcttggcacacttcttcagtacaagatgatcttcaaaaagaaaaaggcagatgtagctgccagcctgcagtgcttgagccccagggaggcagcacggtttcatataggcaggcatgcttattgcttatgttttctttggacaatcggtatgaaagaaccagactgtggaaaaagcttggcctttgggttgtgagttgtttgagttgtggatatctagttggtgttctgtagcacagagtaaagataaatcgcacaaggcatttgtgggtattacaaataaaaaggttcactaccttacagaactcagattgattcacctttaagtcttacaacgtctgataaaaacagagtaggaaataaagcttagcaaccttagaagggtggtgttgatcagtgtgacagtgctttaagaattgttgaggcattctaggtaaaccactgcttataaatgttacagatcacagtaagccaatttaattttctttsttgttcagattcctggtgaggatatttaatgatgtggatagatttctgactgagctaatactatcacaataattcccttgacttgtaatatttgtaagcaccttataaagagaaaataataggctttctctaggattttctgttataaacagctatttttcagtc

SEQ ID NO: 670978 - DNA, 1171 bp, Homo sapiens
gataatcctctagccaggctaagaaaaaaagagacaagacacaaattactaatatcagaaacagaagacatcaatcactagagcctatggacattaaatatgagcattattatttaatcataataaatgaatactctgaacaactgtatgctcacagatttgataacctagatgaaattaaccagttccttgaaatataatttgcctatttttttgtgtgtgagttttggcaatctgaataggcctatattttctaaaaaatccaattctttaggctgaggtgggagaatgccttgagcccaggagttcgaggctgcagacagctatgatcacaccactgcactccagcctgggcaacagagtaagactcaatctctaaaaaatatatataaatataaacaaatacataaataaatgcctgaccagtacaccttaaaactggcaaggacaccaaaaaccaggaaagtccaagcamctgttacggtccaaagaagcccaaggagacatatgaagactcatgtaatatggtatcctgaatgggatcctggaacagaaaaaggacgctagggtaaaactaaggaaatatgaataaattttccaaagtagttaataataaagtatcaatagtggttcattaattgtaacaaacgtaccatactaacctaagatgttcataataggagaaaccgggaatagggtctatagcagctttctgtactatctttgcaacttttctgtaaatctaaaactgttataatataaacagttaatttgtaaaaagaaaggaaaagagggccggccgggtgtggtggctcgcacctgtaatcccagcactttgggaagccaaggcgagtggatcacctgaggcaggagttcgagaccagcctgaccaacatgaagaaaccccgtctctactaaaaattcaaaattagctgggcgtggtggtgcatgcctgtaatcccagctactcaggaggttgaggcaggagaatcgcttgaaccgggaggcggaggttgcggtaagctgagatctcacgattgcactccagcctggacaacaagagcgaaactccgtctcaaaaaaaagaaaaaaaaaagacatgcaacaacataatctccaattttattattagactcaacataggtatttttaatacatatagtcagaacaa

SEQ ID NO: 670979 - DNA, 1950 bp, Homo sapiens
tgacagttttcatccaacagggctttttctccctgaccaatccattaataaggtaactatccaatcattaaaaaaaaattctttttctaaattatccaatactttattaagcaaaataaaataatatttaactttttagatcccaggcttcaacattatttgctattcaatgaaaataaataaaatgtagtggttttcacatttgttaccacagatttcaaaataataatctacattcctaaaaactatttacatatacaaacaaaaaagaacataattaagctggagtttttccatgtcattgtctttggggtccaagcagcagaaccatgatgtaggtaagagagtactacggccgattgccagtgatgtgattcaagctcaagaacaaaaagttgagctgtgggtatattagcttgactcataaaaaggatgctaaccaaagggtctccatctttagagaccaaacaagggcaaatgtgctattggtgcaaaagtaattgtggttttgccttttttaaaaaaaatggtaattacttttgcaccaacctaataaaatggcaatagtaacgatatggttatttgtaaaacagtactctcctacacatttcaaaagagcctaaggacactcattgttcatgtctttgagaacaaaataggctgctcatttatttggaatggttcttgatggaggatattctggaaggcgggaagatctttccttcctgggccatctatctctctagggggttaaactttgaattgtatctcatttattcttctcagtgtgactcaaacctagtttcagaggttagagactctacatctttcaaacacaattcctgttgtagaattactcagtagataggaactcttacctgttcccaactccgtttcaaaattcagccaagattccttgatatgggatttctttctatattttctgaaatgcagtgccacttagaacacttatttactattataatatacaataaaatgtaatttaaaaaacaactttgtaaaataagatatttgtaagagcagtggttttttttatatttggtcatgttgtgtggggcaaatacagctcagctttggctttactatattccttttttaataataaaaaagcaaaatcatatgaaaattttcttacatatagatctatttgtaaaagcaaaagaaaatttatttcaagtrtgtaaggaaagcggaaattactcaattggttatacatatacttttggatatttcaatttctgtaacgactgacatccagtgaagccttctttcaattttctaacattaatacaaaagtcatcaaaatgtataaatgtaagatgcttctaaaaacaactgtcacatttaacgttttgatttagtaatcaggccatgattttttcgattctaatttgtttctgtactttctctttaatgggggagggggtgggcttctaagtcttcctcttgagtctttgtacaataaagtgagctatttgcttctatttagcaaagctggatggggcatatctctgcatttgattggttggtttttaagggattactcctctggaaagacactgtctcatattgcattgctagcagcgtggtcttaactgtggttaaacttttaaattgaaaatgaacatttaccatcaaagagaacacaaacttcaggactcctatgttacacagatcatacacaccatattgacctgttttgataagagttctgtttgaatacaatcctaaacaccatatccagaaataacaactgtctcaatggcataaataggaaatttggggttcctcatgtattacaaagaagccaataaaacttagaataaattccaactatacaaataggcttcaataagattaacaaaatctgaggatgacaggcaagtcaacaagttaaataaattatactatttatacccagataaaata

SEQ ID NO: 670980 - DNA, 1950 bp, Homo sapiens
tgacagttttcatccaacagggctttttctccctgaccaatccattaataaggtaactatccaatcattaaaaaaaaattctttttctaaattatccaatactttattaagcaaaataaaataatatttaactttttagatcccaggcttcaacattatttgctattcaatgaaaataaataaaatgtagtggttttcacatttgttaccacagatttcaaaataataatctacattcctaaaaactatttacatatacaaacaaaaaagaacataattaagctggagtttttccatgtcattgtctttggggtccaagcagcagaaccatgatgtaggtaagagagtactacggccgattgccagtgatgtgattcaagctcaagaacaaaaagttgagctgtgggtatattagcttgactcataaaaaggatgctaaccaaagggtctccatctttagagaccaaacaagggcaaatgtgctattggtgcaaaagtaattgtggttttgccttttttaaaaaaaatggtaattacttttgcaccaacctaataaaatggcaatagtaacgatatggttatttgtaaaacagtactctcctacacatttcaaaagagcctaaggacactcattgttcatgtctttgagaacaaaataggctgctcatttatttggaatggttcttgatggaggatattctggaaggcgggaagatctttccttcctgggccatctatctctctagggggttaaactttgaattgtatctcatttattcttctcagtgtgactcaaacctagtttcagaggttagagactctacatctttcaaacacaattcctgttgtagaattactcagtagataggaactcttacctgttcccaactccgtttcaaaattcagccaagattccttgatatgggatttctttctatattttctgaaatgcagtgccacttagaacacttatttactattataatatacaataaaatgtaatttaaaaaacaactttgtaaaataagatatttgtaagagcagtggttttttttatatttggtcatgttgtgtggggcaaatacagctcagctttggctttactatattccttttttaataataaaaaagcaaaatcatatgaaaattttcttacatatagatctatttgtaaaagcaaaagaaaatttatttcaagtgtgtaaggaaagcggaaattactcaattggttatacatatacttttggatatttcaatttctgtaacgactgacatccagtgaagccttctttcaattttctaacaytaatacaaaagtcatcaaaatgtataaatgtaagatgcttctaaaaacaactgtcacatttaacgttttgatttagtaatcaggccatgattttttcgattctaatttgtttctgtactttctctttaatgggggagggggtgggcttctaagtcttcctcttgagtctttgtacaataaagtgagctatttgcttctatttagcaaagctggatggggcatatctctgcatttgattggttggtttttaagggattactcctctggaaagacactgtctcatattgcattgctagcagcgtggtcttaactgtggttaaacttttaaattgaaaatgaacatttaccatcaaagagaacacaaacttcaggactcctatgttacacagatcatacacaccatattgacctgttttgataagagttctgtttgaatacaatcctaaacaccatatccagaaataacaactgtctcaatggcataaataggaaatttggggttcctcatgtattacaaagaagccaataaaacttagaataaattccaactatacaaataggcttcaataagattaacaaaatctgaggatgacaggcaagtcaacaagttaaataaattatactatttatacccagataaaata

SEQ ID NO: 670981 - DNA, 1950 bp, Homo sapiens
tgacagttttcatccaacagggctttttctccctgaccaatccattaataaggtaactatccaatcattaaaaaaaaattctttttctaaattatccaatactttattaagcaaaataaaataatatttaactttttagatcccaggcttcaacattatttgctattcaatgaaaataaataaaatgtagtggttttcacatttgttaccacagatttcaaaataataatctacattcctaaaaactatttacatatacaaacaaaaaagaacataattaagctggagtttttccatgtcattgtctttggggtccaagcagcagaaccatgatgtaggtaagagagtactacggccgattgccagtgatgtgattcaagctcaagaacaaaaagttgagctgtgggtatattagcttgactcataaaaaggatgctaaccaaagggtctccatctttagagaccaaacaagggcaaatgtgctattggtgcaaaagtaattgtggttttgccttttttaaaaaaaatggtaattacttttgcaccaacctaataaaatggcaatagtaacgatatggttatttgtaaaacagtactctcctacacatttcaaaagagcctaaggacactcattgttcatgtctttgagaacaaaataggctgctcatttatttggaatggttcttgatggaggatattctggaaggcgggaagatctttccttcctgggccatctatctctctagggggttaaactttgaattgtatctcatttattcttctcagtgtgactcaaacctagtttcagaggttagagactctacatctttcaaacacaattcctgttgtagaattactcagtagataggaactcttacctgttcccaactccgtttcaaaattcagccaagattccttgatatgggatttctttctatattttctgaaatgcagtgccacttagaacacttatttactattataatatacaataaaatgtaatttaaaaaacaactttgtaaaataagatatttgtaagagcagtggttttttttatatttggtcatgttgtgtggggcaaatacagctcagctttggctttactatattccttttttaataataaaaaagcaaaatcatatgaaaattttcttacatatagatctatttgtaaaagcaaaagaaaatttatttcaagtgtgtaaggaaagcggaaattactcaattggttatacatatacttttggatatttcaatttctgtaacgactgacatccagtgaagccttctttcaattttctaacattaatacaaaagtcatcaaaatgtataaatgtaagatgcttctaaaaacaactgtcacatttaacgttttgatttagtaatcaggccatgattttttcgattctaatttgtttctgtactttctctttaatgggggagggggtgggcttctaagtcttcctcttgagtctttgtacaataaagtgagctatttgcttcyatttagcaaagctggatggggcatatctctgcatttgattggttggtttttaagggattactcctctggaaagacactgtctcatattgcattgctagcagcgtggtcttaactgtggttaaacttttaaattgaaaatgaacatttaccatcaaagagaacacaaacttcaggactcctatgttacacagatcatacacaccatattgacctgttttgataagagttctgtttgaatacaatcctaaacaccatatccagaaataacaactgtctcaatggcataaataggaaatttggggttcctcatgtattacaaagaagccaataaaacttagaataaattccaactatacaaataggcttcaataagattaacaaaatctgaggatgacaggcaagtcaacaagttaaataaattatactatttatacccagataaaata

SEQ ID NO: 670982 - DNA, 1447 bp, Homo sapiens
ggatcaaaacggagtgaaacagaatgggatgggccctctctaattgagccctagtgtagtacgaagtcgattatgtatacagtaaagcattttcccagccagacgagcaagagctcaaactctaccctgtctcttcatggctacccacccctactctaattcaacttttttccttttaccttggggaaatgctctgggtaagccttttgtcattactaccaaatgcctttatatattgtggtgtgggcatttgaaacttcacagaatatccctggagttccagtaacagwgctaccacagttatattattcacaaagtcactggtaaattgtctatactgttgaaatcctccatatatatagtgcccccatctattttaaattgcacgcatctttggggacagaagcctatctctgttataaaaaactctatgcctaagttagggacttagcaataatttggatagtccttccatttgtggctatcccacaccactagtcaaatggggattgtaacaatgtaagaacgtcctccaactgtttctttccattctaatttttatatttacatcatagggctgttgtaaggattgtgtgaagttgcatagtaagcattcataggcttccatcagacttgagatgtttattaacccaacctttatgctggacactcttccaggtactggggttaaagtgatggacaaggtattcaaggagacttctcccaaggagcttacattctagtgaaggatcctcaacacctcttacctgttggtcctcaacacctcttacctgattatggaaatgttctgctctctagattctcagctatgcttacttggccattttccaagttcttctttcttgagcctcctgaggtcttttgtcgtgtcccattactatagataggatcaaacaaatatcttctacctttgtgtaaaagcccacagggggcagcctagattgagtctcacatcctatagaaagtggaccagaggcacatggttaaagtaggtccaggaagctctgccactagtgcattgtgcaactgacctattcaaggtgtcttgcttccattttgccatctataaaataagggattggattaagtgaattctgatgtcctttaacagctgagattttttatcttcctcctcactgacctgttcccagggaactaacccaccaattgtgatctgtttcaagttgtaagtttctaaacagcatgggctgcattatctaactttgtttaaaatgccatacacatagaagtacccaataaatggtcctaaaaagaagttaatgcactaccttctaagccagcttagagagtgcattttaaactcagggtgtgtgctaaccgcagtcagattccggaaacagactagggggagaagggggaaggtgtaacaacaggtggtgcccatctgggacgttcagttatgaaa

SEQ ID NO: 670983 - DNA, 1447 bp, Homo sapiens
ggatcaaaacggagtgaaacagaatgggatgggccctctctaattgagccctagtgtagtacgaagtcgattatgtatacagtaaagcattttcccagccagacgagcaagagctcaaactctaccctgtctcttcatggctacccacccctactctaattcaacttttttccttttaccttggggaaatgctctgggtaagccttttgtcattactaccaaatgcctttatatattgtggtgtgggcatttgaaacttcacagaatatccctggagttccagtaacagagctwccacagttatattattcacaaagtcactggtaaattgtctatactgttgaaatcctccatatatatagtgcccccatctattttaaattgcacgcatctttggggacagaagcctatctctgttataaaaaactctatgcctaagttagggacttagcaataatttggatagtccttccatttgtggctatcccacaccactagtcaaatggggattgtaacaatgtaagaacgtcctccaactgtttctttccattctaatttttatatttacatcatagggctgttgtaaggattgtgtgaagttgcatagtaagcattcataggcttccatcagacttgagatgtttattaacccaacctttatgctggacactcttccaggtactggggttaaagtgatggacaaggtattcaaggagacttctcccaaggagcttacattctagtgaaggatcctcaacacctcttacctgttggtcctcaacacctcttacctgattatggaaatgttctgctctctagattctcagctatgcttacttggccattttccaagttcttctttcttgagcctcctgaggtcttttgtcgtgtcccattactatagataggatcaaacaaatatcttctacctttgtgtaaaagcccacagggggcagcctagattgagtctcacatcctatagaaagtggaccagaggcacatggttaaagtaggtccaggaagctctgccactagtgcattgtgcaactgacctattcaaggtgtcttgcttccattttgccatctataaaataagggattggattaagtgaattctgatgtcctttaacagctgagattttttatcttcctcctcactgacctgttcccagggaactaacccaccaattgtgatctgtttcaagttgtaagtttctaaacagcatgggctgcattatctaactttgtttaaaatgccatacacatagaagtacccaataaatggtcctaaaaagaagttaatgcactaccttctaagccagcttagagagtgcattttaaactcagggtgtgtgctaaccgcagtcagattccggaaacagactagggggagaagggggaaggtgtaacaacaggtggtgcccatctgggacgttcagttatgaaa

SEQ ID NO: 670984 - DNA, 1447 bp, Homo sapiens
ggatcaaaacggagtgaaacagaatgggatgggccctctctaattgagccctagtgtagtacgaagtcgattatgtatacagtaaagcattttcccagccagacgagcaagagctcaaactctaccctgtctcttcatggctacccacccctactctaattcaacttttttccttttaccttggggaaatgctctgggtaagccttttgtcattactaccaaatgcctttatatattgtggtgtgggcatttgaaacttcacagaatatccctggagttccagtaacagagctaccacagttatattattcacaaagtcamtggtaaattgtctatactgttgaaatcctccatatatatagtgcccccatctattttaaattgcacgcatctttggggacagaagcctatctctgttataaaaaactctatgcctaagttagggacttagcaataatttggatagtccttccatttgtggctatcccacaccactagtcaaatggggattgtaacaatgtaagaacgtcctccaactgtttctttccattctaatttttatatttacatcatagggctgttgtaaggattgtgtgaagttgcatagtaagcattcataggcttccatcagacttgagatgtttattaacccaacctttatgctggacactcttccaggtactggggttaaagtgatggacaaggtattcaaggagacttctcccaaggagcttacattctagtgaaggatcctcaacacctcttacctgttggtcctcaacacctcttacctgattatggaaatgttctgctctctagattctcagctatgcttacttggccattttccaagttcttctttcttgagcctcctgaggtcttttgtcgtgtcccattactatagataggatcaaacaaatatcttctacctttgtgtaaaagcccacagggggcagcctagattgagtctcacatcctatagaaagtggaccagaggcacatggttaaagtaggtccaggaagctctgccactagtgcattgtgcaactgacctattcaaggtgtcttgcttccattttgccatctataaaataagggattggattaagtgaattctgatgtcctttaacagctgagattttttatcttcctcctcactgacctgttcccagggaactaacccaccaattgtgatctgtttcaagttgtaagtttctaaacagcatgggctgcattatctaactttgtttaaaatgccatacacatagaagtacccaataaatggtcctaaaaagaagttaatgcactaccttctaagccagcttagagagtgcattttaaactcagggtgtgtgctaaccgcagtcagattccggaaacagactagggggagaagggggaaggtgtaacaacaggtggtgcccatctgggacgttcagttatgaaa

SEQ ID NO: 670985 - DNA, 1447 bp, Homo sapiens
ggatcaaaacggagtgaaacagaatgggatgggccctctctaattgagccctagtgtagtacgaagtcgattatgtatacagtaaagcattttcccagccagacgagcaagagctcaaactctaccctgtctcttcatggctacccacccctactctaattcaacttttttccttttaccttggggaaatgctctgggtaagccttttgtcattactaccaaatgcctttatatattgtggtgtgggcatttgaaacttcacagaatatccctggagttccagtaacagagctaccacagttatattattcacaaagtcactrgtaaattgtctatactgttgaaatcctccatatatatagtgcccccatctattttaaattgcacgcatctttggggacagaagcctatctctgttataaaaaactctatgcctaagttagggacttagcaataatttggatagtccttccatttgtggctatcccacaccactagtcaaatggggattgtaacaatgtaagaacgtcctccaactgtttctttccattctaatttttatatttacatcatagggctgttgtaaggattgtgtgaagttgcatagtaagcattcataggcttccatcagacttgagatgtttattaacccaacctttatgctggacactcttccaggtactggggttaaagtgatggacaaggtattcaaggagacttctcccaaggagcttacattctagtgaaggatcctcaacacctcttacctgttggtcctcaacacctcttacctgattatggaaatgttctgctctctagattctcagctatgcttacttggccattttccaagttcttctttcttgagcctcctgaggtcttttgtcgtgtcccattactatagataggatcaaacaaatatcttctacctttgtgtaaaagcccacagggggcagcctagattgagtctcacatcctatagaaagtggaccagaggcacatggttaaagtaggtccaggaagctctgccactagtgcattgtgcaactgacctattcaaggtgtcttgcttccattttgccatctataaaataagggattggattaagtgaattctgatgtcctttaacagctgagattttttatcttcctcctcactgacctgttcccagggaactaacccaccaattgtgatctgtttcaagttgtaagtttctaaacagcatgggctgcattatctaactttgtttaaaatgccatacacatagaagtacccaataaatggtcctaaaaagaagttaatgcactaccttctaagccagcttagagagtgcattttaaactcagggtgtgtgctaaccgcagtcagattccggaaacagactagggggagaagggggaaggtgtaacaacaggtggtgcccatctgggacgttcagttatgaaa

SEQ ID NO: 670986 - DNA, 1447 bp, Homo sapiens
ggatcaaaacggagtgaaacagaatgggatgggccctctctaattgagccctagtgtagtacgaagtcgattatgtatacagtaaagcattttcccagccagacgagcaagagctcaaactctaccctgtctcttcatggctacccacccctactctaattcaacttttttccttttaccttggggaaatgctctgggtaagccttttgtcattactaccaaatgcctttatatattgtggtgtgggcatttgaaacttcacagaatatccctggagttccagtaacagagctaccacagttatattattcacaaagtcactgktaaattgtctatactgttgaaatcctccatatatatagtgcccccatctattttaaattgcacgcatctttggggacagaagcctatctctgttataaaaaactctatgcctaagttagggacttagcaataatttggatagtccttccatttgtggctatcccacaccactagtcaaatggggattgtaacaatgtaagaacgtcctccaactgtttctttccattctaatttttatatttacatcatagggctgttgtaaggattgtgtgaagttgcatagtaagcattcataggcttccatcagacttgagatgtttattaacccaacctttatgctggacactcttccaggtactggggttaaagtgatggacaaggtattcaaggagacttctcccaaggagcttacattctagtgaaggatcctcaacacctcttacctgttggtcctcaacacctcttacctgattatggaaatgttctgctctctagattctcagctatgcttacttggccattttccaagttcttctttcttgagcctcctgaggtcttttgtcgtgtcccattactatagataggatcaaacaaatatcttctacctttgtgtaaaagcccacagggggcagcctagattgagtctcacatcctatagaaagtggaccagaggcacatggttaaagtaggtccaggaagctctgccactagtgcattgtgcaactgacctattcaaggtgtcttgcttccattttgccatctataaaataagggattggattaagtgaattctgatgtcctttaacagctgagattttttatcttcctcctcactgacctgttcccagggaactaacccaccaattgtgatctgtttcaagttgtaagtttctaaacagcatgggctgcattatctaactttgtttaaaatgccatacacatagaagtacccaataaatggtcctaaaaagaagttaatgcactaccttctaagccagcttagagagtgcattttaaactcagggtgtgtgctaaccgcagtcagattccggaaacagactagggggagaagggggaaggtgtaacaacaggtggtgcccatctgggacgttcagttatgaaa

SEQ ID NO: 670987 - DNA, 1447 bp, Homo sapiens
ggatcaaaacggagtgaaacagaatgggatgggccctctctaattgagccctagtgtagtacgaagtcgattatgtatacagtaaagcattttcccagccagacgagcaagagctcaaactctaccctgtctcttcatggctacccacccctactctaattcaacttttttccttttaccttggggaaatgctctgggtaagccttttgtcattactaccaaatgcctttatatattgtggtgtgggcatttgaaacttcacagaatatccctggagttccagtaacagagctaccacagttatattattcacaaagtcactggtaaattgtctatactgttgaaatcctccatatatatagtgcccccatctattttaaattgcacgcatctttggggacagaagcctatctctgttataaaaaactctatgcctaagttagggacttagcaataatttggatagtccttccatttgtggctatcccacaccactagtcaaatggggattgtaacaatgtaagaacgtcctccaactgtttctttccattctaatttttatatttacatcatagggctgttgtaaggattgtgtgaagttgcatagtaagcattcataggcttccatcagacttgagatgtttattaacccaacctttatgctggacactcttccaggtactggggttaaagtgatggacaaggtattcaaggagacttctcccaaggagcttacattctagtgaaggatcctcaacacctcttacctgttggtcctcaacacctcttacctgattatggaaatgttctgctctctagattctcagctatgcttacttggccattttccaagttcttctttcttgagcctcctgaggtcttttgtcgtgtcccattactatagataggatcaaacaaatatcttctacctttgtgtaaaagcccacagggggcagcctagattgagtctcacatcctatagaaagtggaccagaggcacatggttaaagtaggtccaggaagctctgccactagtgcattgtgcaactgacctattcaaggtgtcttgcttccattttgccatctataaaataagggattggattaagtgaattctgatgtcctttaacagctgagattttttatcttcctcctcactgacctgttcccagggaactaacccaccaattgtgatctgtttcaagttgtaagtttctaaacagcatgggctgcattatctaactttgtttaaaatgccatacacatagaagtacccaataaatggtcctaaaaagaagttaatgcactaccttctaagccagcttagagagtgcattttaaactcagggtgtgtgctaaccgcagtcagattcmggaaacagactagggggagaagggggaaggtgtaacaacaggtggtgcccatctgggacgttcagttatgaaa

SEQ ID NO: 670988 - DNA, 644 bp, Homo sapiens
cggttctttctcttgagtaattttacctgttgaggggctgtttgtaccacaaaaagagtgacagacctggttatatgagccttaatttttacactgagtgttaatttctgtgcctatatgttaacatctaattcataaaactattttgagagttaaaagcacccattaagtccctgacagtaagttctcaataaatgttactttaacaacagcaacaacaaaagtagctgctagaagagtaaactcaaagagcaaatttccaaaagaggaaaataaaataagaaaataaaacctgaaaaggacaaataggaaaaagacgaaacaagtaatgacataataagccataaaaatgaataaaaatatattactaatcagtaaattcattaaattttctagataaaaagcaacagttgtcaaatatttttaagaatstgtctcagccaggcgcagtggctcatgcctataatcccagcactttaggtggccgaagtgggcagatcacttgaggtcaggagttcctgaccagcctggccaacatggtgaaacctgtctctattaaaaatacaaaaattagctgggcgtggtggcgcgcacctctaatcccagttactcgggaagctaaggcagagaatcacttgaacccg

SEQ ID NO: 670989 - DNA, 607 bp, Homo sapiens
tatttgttaagataaaaacttgaataaatgttataaaaactatttgtcctgtttcatgtatttttgtcagtatttttttatttgtataaatttaaggggtataagtgcagttttgttacatggatatattgagtagtggttaagtctgacttttcggtgtaaatataacccaaataatatacattgtactgattaagtcctttctcatcctttactccccacctacactatcacccttctgagtctctggtgcctacaatactattcacaatagcaaagatatgtaatcaaccttagtgtccatcaatggatgatagaataaaaaagaagatgtggtatacattgatggtattttctgagtctcactttgtaatacagtatgttagaaatgccatcttttcctctatcattcttgactatttcaagtcctatcttctgtttatactctgtcttgcagctacaatcaagacttttggtcttgttcataggctgacttttatatttgaaagcaaacatgattattttaatattattcagattgctaccaattatktcactaagattacatttacttcttgcctattcattgccttaaacctgagccact

SEQ ID NO: 670990 - DNA, 2792 bp, Homo sapiens
ataataataataataatgataaaagaaatgtaaaacattggaaaaagaataaataaatgtaaatgtgtttaaaaaaaaaagtgcattctctcccctgtgtctttctagacttgtggcaattaagaatatctcctgcagacataaggggagatattttggtgcatttccattaacctatgctgaaattatgacagcacatatgctaacaaataattctactaaatatgtccaagttatatatctttctaaggtgaaacaataaagataggacaaaattaggtaaagaagcagagggccgaaaggagttgaggggacctgtggacattaaatttcaccaagccaggtgtagaatgaatttaaatacacacactaactgtctcatagatatattcacatgtattacacctgagacccaatattttctttctaaaaaataagcaacttaaattgacccaggaaagcctttcatgcagtgattcaatagtcaatctcatgtttaaaggaagaaaataggaatcacaaaattaacagtgactccatactacatgtatttgtttaaaaagggggggtgactatttttctttccatgctataaaattgggtcttcattgaaagtaaaaactccatagttcaaaatgtgtgatttcacaggcaatatttcaaagtgatatctttaatgtatttacaggtaagtagtgataatgtctcaaaaaggatttccaaagaaatgatttccaactaaaagataaatattaacctaaaacactattctcacatatgtgccttagtatatatttttattttatttaaatctgatgagtaacacagggcttgtttaatattgcttcttttacattttttggacttgactaaaggtatatgtacaagccttttaaacatttaaaaaattacccacattcatggacattcagcctccaggtttgttatggtattggtgatactttttttttattttttttattttattattatactttaagttgtagggtacatgtgcacattgtgcaggttagttacatatgtatacatgtgccacactggtgcactgcacccactaacttgcagttggtgatactctttagctacaaacaaggcaaggatgatatttctagatttatcaaagttcatgatattctggaaacctgaatgagacctctggcaattcacctaagtacgcttcacctttcttcgcttctggtggatttcgttgtaagaaaaaatcaaatgggttaagtcacagggaatatagctgatagcctcagcaggacaaaaatagacatatgtctctattaaggattatacatgtgcttatgtatcacataggctctatcttgctccacttggataattgcccaaattatattttcctgacagtttgtactagattagttacatggttaggcattagattggattataaaatgcaatggaaagctagcattaattcctttcaaactgtgtaaaaaacattacaatgttcacacaagccaattattctatttaaataagatgttttaaaattgtcattattcaatcagtcaagcccatatgatgcttattatgttcaagagtctgttctaaagcctttaaaaataacacatttccacttcccaactaccctcatagacaggttttattgtttttatcatcctcactttccagatggagtaacttagctatagggaatttaagttgcttatctaagtcacaaaaatggtaagaaatggaaatgagattcgaacctgggtagtctagctgtacatctcaagtatttaaccccactggtatactaacagtttatgtattttagaatccagactatctcatctgaatgctagaatattacaasctggatttatttcaatatatctctattgttcatctttcagtgtatccagctgtactgctcctggtaaaaggtagtttagtgaaaactatttatcttaatttgctagtctcatgaggaaggagacagggcaaggcaaacaggagttgtgaaaagatggtttctgtgctcccacaaatcttaagactattttgttcctctctcctccaagaacaaaagcacatattctgccggggtcaggcttgagaaagaagcacttaacgggaacctgccctaacaaaggtgtaataatcttttatttggtgtaaacggcactaaatgtgccctcaaataaactcattttcttcatgctgaggctcacagatggatgttattaaccatgtgtgccatctggtaacttccttttttagctaatcattcttgttaagtaggtgctaagtctttacaattattattttcatgttgtaccctctaaatttgggtgaactggggcagagtaccaattgtccctttctaattatagttctgtggcctgaatgtgaaactccaggaaccaaaatcagacagtgagtaaagtattgagcaagttgagctctaaatgttcaagcctaaaacaacatccaactttaagttttatataaaaaacaagaggaattatgtttacatctcatgaattactgtggttacagaaaatagaaacctaaagtttcagttgctcaggaattttcagtctacataagtataaaacattaggacattattgtatgaaagtgcatttagaggacttttttgacaaattaaacctctttattaacttcagacgaattataaggcatgacatattggaagacacatattttgtggttctgtgctacatgaattatactgaactacctcattgttcatactattgggatgatacaca

SEQ ID NO: 670991 - DNA, 591 bp, Homo sapiens
gtgaattcttgtttctggttatggtctatttagaatcataggatagtttctgagacagcaagcatctaaaggaccaagattcctaaaagaaggcagttatgaagcattgaagttcttagacttaattattttcccctgaagccattaaccaacattttaagctttgtgaggctaatagaaagcaaaaatagagtagaattttttgtttgtgagttattatgactattcatttattttagtagcctcagactgctaaggggataaatattggcgttcaagacctacctaaatgaagtattctagtaaaatttcaagacttccacttgagaaagcttaattgaaggaaaacatgatatagtttgaactttacaaattcagaaacactacctccattcagctcactcgctgtttgaattgaagggatcyttccatttagctttcaaccaggggataaggtaactcttacccaagagggagatcatgtcatctgaaacctaagaatgtttcaaaaatttttccataaaagtttttccatgacacatacacatgctagttacattaccgtagtgcatattaaaaataggggaaggg

SEQ ID NO: 670992 - DNA, 2058 bp, Homo sapiens
cctaggactacatctaagttccttctctattaccctgacacttcccacttattatctgtttctctctgaatttggtacacatgagaaagaaaaaccagatagttaaacatgttaaaaaatcacattattttggataatagaagaaatctatggatgcagtgtattgatgtatatataaagtttaaataaagtactttaaacagtcaaattttgaaatgataaktataattacctaagcttttcattggtttattttttaaaaaatacataaaccaagtaaaatcacattgtactgacatgaagagaaactttaaggctgcattttgagtcaaatttattctattgtagcacttattataagtatattcatctattaacatcttttttcctctggtgtgtgataagctgttgagcacccactgtgtatgtttgtgtatctgtgtgtttgtgtatgtgtttattctcaatatttacctctacaatatatgaaaaaacctggagaactgctgttgcataagcatgtttttgttgataaatgaataaatgtatcttatagctataaatctagataccttgtttttccaaaatacctttttccataaaagattgtaagaaatcagtatatttaaataacaaataaaattattcaacataattgtattaatcattgacttaggaacattaaggtcaaattcacatttatttatttgttataatgtctgatataatgtttgaaattattccatatgtccttcttaagcatttgctgctggggttcatggagtttctttgttagttacaatctcaccaccaattctttttaagcatgaggtctttgttaattatttttggttaagcataataatgaacaaatattatttatcatgggtttatctttgttgtaaagtgcaaatcaagccatgcttttaactagagaattttgcaaatacattatcaatagagttcttttggataaaaacttctgcctagtatctaaattaacaccgttattattgggattctataatttctcagctctatcagagtcagggaaaatatcaataaattcaagttaactgtgaaatatttttaaataaatatctgtaggtaatattatttgaactgatcacatatctgacactatgggaaagtttaatgcattaatcaaagttgcttttatactaatagaagcaaaatgttctttaatttgaatagtttgactgaaattaattgaaagcaatggaatatattctcatacacaaacaggataatgcaattaatatgaccacaagatcaaaggtagcatgtgaaatgctaaaacctaaatattttactctgtgtttgagtcccataattattgctgtcttggatactttttgttttgtgaattagaattaaattcttagtctctaatgtgtgtatcatcctactttaatttttattaaatatcaaaatactatagaaatattctgctgttttaggataaacagttcatcctgagaagcacatatttttatttctgcaatatccagatcttatagcaagcagagagatttttccatgttactaaagtattcagttaaacagtttttttaaagctcttttcacataaaataaacttctgaccttatgtatatcttatgtaattagtttgaatatatgatttttgtgacatgattttcatttttctttttaatttttttttttttttttttttttttttgagacggagtctcgctctgtcgcccaggccggactgcggactgcagtggcgcaatctcggctcactgcaagctccgcttcccgggttcacgccattctcctgcctcagcctccccagtagctgggactacaggcgcccgcaccgcgcccggctaattttttgtatttcatttttcttaaaactatgactatcttctgggttaatatgaggatgtttatctattgacttatcttctccaggtactgctaatacccaaacaagaaatgaatgagggcattcaactttatgataattcatagaagaatcaagagttttgcaagtctgagaaaatttta

SEQ ID NO: 670993 - DNA, 631 bp, Homo sapiens
tgagagataattggccactttacagttttaacctcaaatgaactcccccgtctgagtaaatttcctggtaaaagatcccattttaatagaatgtgaaagctgcaagaaagatggagcttacagatcacagtatggtctgttagataaatgaccaggagtaatatttcttaaaaccacattttgtagacagagttaacagaaaacccaggaaaaaaatacccagtggttcagcattcwcgcttaaatgaaaatagcatgtgtgttttcagctcaagttgtgccagggcttggagggaaattggcaaggattaaaaccaagagtcttttgggggttgttgggtattgtcatcctggacctgacctcacagctttctctcttggaggagaaggcaaaaagtagctgtgctaaaactttgctctaagagttgccacagagtccagaaagttcctcttcttgcagttggcttattttcactgagctggcattgagccagaagtcaagttattattttgtttaatagctgaagaaatgaccatcttgtgctttttaacctaaaggtggccttgactgcagatccctggatgtggggaagcacctaagaaggtcagttcttccggtagaatgggaggg

SEQ ID NO: 670994 - DNA, 639 bp, Homo sapiens
tattaacagaaaaaagaggtattaaaagaggtattatcagaagggggcatggaaagccaacagatggccacctcatacccagggagtagtgtcagcatacacccctacctccagacaattccacattggccagactatcrgggacagacctcaaacccacgcgggcccaaggctgcttttccgtgacatcacaaactctgcctattagatacaagaatcaaaacagaaagtaagcactaattgcttccccaccagtccagccaaacagaaagcccttcctgcctgtgctgggctgtctgcaccccaaggaagctggcaggggagggagcagttccacatcagccactctggcccaggcccagcaggagtgcctcggagctgacggagtccgggcttataggacaaaccccctagaggggaagatgcctctgtgggcgctgggcctcagcaatctagacctgatgggaatccagagcaaagaggtaaagcttcagttttccagtccagagccactgtcccaatacttcacccagggaggagactgtcaggaaaggttgtccttgcagggtcaaggatggaaggcaccatcctcaggctgtgacccaaacttcatttcctgagccgtgtggggcaaccacc

SEQ ID NO: 670995 - DNA, 632 bp, Homo sapiens
ggttggatagtaaatttatgtttaactttttaagaatcagccaagctgtttttcaaagtggttgtgccattttatatttgtatgaaatgtatgatcttgctcagtttctagagcctttcaggtgatttttactgattttctccagttttatcattgcttttgggggagaggatttttcaaacttctcattccaccataccagaacccaatgattttttgattaaattatctacagaaaagaggaggaaaagagggaggaagcggggaaaggtcaaatgtttgtgttgacttrctggcaatactggagggcaacagatttcaagggttcaatcacctgcccgtgtcttattagctgtatgaccctggctgggcaagttgccccacttcggcgagactgtttcctcactataaaatagtactggcaattataggatctgcctcctaggtttgtgatgaggattagataatacagtcaaagtacatagtcagtgcttggcccctaagagctctcaactgttgacaatgtttttaatggtaagggcaacaagaacaggttaaattttgtaatatcctgttctatttaagtaaaagatgtgtaattggaaaaaccacagagtatgcgttcctagaaa

SEQ ID NO: 670996 - DNA, 632 bp, Homo sapiens
aaattctactggtacttttcacaaattatctcatttaatttgaatcctcacaaaaattgtgattgtcagagaaattgggtgacttgtcaaagttagtttaaatarcaggtcagtctagccataaagcatgtgattttgccactttgacacactgtcaaaaaaagaccgtcttcatgctagtaaaaagctcaggacattttagtttaagaatgaataacaaatattcatgattaacctgcaatgactcatgaaccctcagagcctgtgttagcataatgaaattaatctttcaaaattgttttttttcttctttgtagacccatacagtcatcttgtggaaaaaaaattctggcaaagtttggatcttcacaatgcacattctatttcaccccaaaattattaatgatgtttctcaatgctaccctactaattatgcttcagagcatttagagattattataaagtataccatatttggtctgttaatgtctgtggtgtgattaaagcactgtaaattcatgtatctgaaactcagtggctattatcctccctaacctttggggaatttctaaactttgctgatttcactctgttaaaggcaaagtagtcatttgtatctgaatgtagaaagt

SEQ ID NO: 670997 - DNA, 648 bp, Homo sapiens
catttcattacatgaatgatgtggctcctgcagtccattatgtaaattgttcttatctctggccaattttaccataatgctttgtaggtactgatattgactttaaacttgcttttacaaatagagaaaatactagtatgataaatgcagtgtgatagaaagcaaatataactgaagccttttcttcctatgtctcagccagtaagaaaaatattggctgagaggaaagttaattttgtttaaatacctgataagtagtacaagaattgtttaatactgcattmtctcttttaaaaatgagtacagtgttctatgcaatcacaaatttctaaactattgaatgttatagataggagttgccaaactacagccaaagggtcaaatctaatccaatgcttatttttgtaaataaagttttattgtaatacagccacattcatgcatttatgtattgtctatggctgttgtcacactacaggggcagagttaagtagctgcagcacagactgtgtgacacacaaagtctaacatatttattatctggccctttacaggaaaagtttgctgattcctagtatagaatagtaatttttacattgttatttcattggcattaatattattttacttccccattctcttaatcat

SEQ ID NO: 670998 - DNA, 648 bp, Homo sapiens
catttcattacatgaatgatgtggctcctgcagtccattatgtaaattgttcttatctctggccaattttaccataatgctttgtaggtactgatattgactttaaacttgcttttacaaatagagaaaatactagtatgataaatgcagtgtgatagaaagcaaatataactgaagccttttcttcctatgtctcagccagtaagaaaaatattggctgagaggaaagttaattttgtttaaatacctgataagtagtacaagaattgtttaatactgcattatctcttttaaaaatgagtacagtgttctatgcaatcacaaatttctaaactattgaatgttatagataggagttgccaaactacagccaaagggtcaaatctaatccaatgcttatttttgtaaataaagttttattgtaatacagccacattcatgcatttatgtattgtctatggctgttgtcacactacaggggcagagttaagtagctgcagcacagactgtgtgacacacaaagtctaacatatttattatctggccctttacaggaaaagtttgctgattcctagtatagaatagtaatttttayattgttatttcattggcattaatattattttacttccccattctcttaatcat

SEQ ID NO: 670999 - DNA, 1949 bp, Homo sapiens
  misc_feature 759, 760, 761, 762, 763, 764, 765, 766, 767, 768, 769, 770,771, 772, 773, 774, 775, 776, 777, 778, 779, 780, 781, 782,783, 784, 785, 786, 787, 788, 789, 790, 791, 792, 793, 794,795, 796, 797, 798, 799, 800, 801, 802, 803, 804, 805: n = A,T,C or G
  misc_feature 806, 807, 808, 809, 810, 811, 812, 813, 814, 815, 816, 817,818, 819, 820, 821, 822, 823, 824, 825, 826, 827, 828, 829,830, 831, 832, 833, 834, 835, 836, 837, 838, 839, 840, 841,842, 843, 844, 845, 846, 847, 848, 849, 850, 851, 852: n = A,T,C or G
  misc_feature 853, 854, 855, 856, 857, 858: n = A,T,C or G
ttctgttgctgctgagaatagctgcaaggataagaggtagaatgaaaagagaatgaaagactctaaaatgttattgagaaggattatgcttttatttgtatgattatgggtcaatcctgggtttttatttaaaaagaaaatatattttaaggctaatggcttgttttgaaaaacaaagtaaatgacattttaatcataatttttaaaacataaaaattgcatctttaaagatgttttcgtaacttgataccaaagacaacctccttcaataaagcaagactgatttaaatatgacatgtggaaaaagggccccgaaagcttacctttactctcttatccactatttaattgttcttttgtcttcatcatgcttagttctttctctttagacaaaacagtgcctaaactatcccaaacaggagggatcttatcctttaaacttacattttgcctgataaaacatgtttgcaatgtgtataaaataagaacatttttagtatgtagttgtaggtctgattggaaaacagattttatcaagtttatagtttggtgactctatattaggatatatttctctgatatgagaatgaccatttgttatgtgtgtatatatatatgtgtgtgcataaatattaatgtgtgcatatttgtgggcataaatataaatatataaattaatgtgggtatatgtgtgtatgtttaaaccttgatgagaatttttgattacttgtaaactttctcaattattttttacatgannnnnnnnnnnnnnnnnnnnnnnnnnnnnnnnnnnnnnnnnnnnnnnnnnnnnnnnnnnnnnnnnnnnnnnnnnnnnnnnnnnnnnnnnnnnnnnnnnnntggggggggacgcatgtaggaatgggtgtttcgggaagttgaaggttgaggttgcggtatttccggtctaatggagggctccaaattttcagccgttcatccctccacaaatccccttataagccttggctcagggccccgcaatgaaacggatttgagcacttgagagaatgcgtcccatttcccttgtttggcaccttgcagttattaaactctttctctgctgcatccccactgtcagtgaattggccctgtctatgcagcagacatacaaacctggcagccgtttaatagaatttatgcaggaagacttagtcctcaacctctctagccgtattgcagttaaatctcctcttagacacatttttgtgaagtgagcaactggaagggaaatggaaatatgtagatagattccagtaatagcttagtggtaatattttgaggggtaatgtcagcagcctattgtaacacaggcaagagttgtgaaaagcctgtcttcatctgaggtctccatggtctcactgggctttgcctcctcctttcaggccttttgttctgccttggcttatatctctgataatgtcttcaattgctgtgctttggttaatggaggttgttatttttaagatttcaacaactgaaaattaatactctttaagaaaatcttttttgtcttttttattttgtgtgaaagtatcaaatattcttacccttcatctgcactgttcttgtaaatggcacaygttctatttagtacgatgtacattgtttgatgttctatttgccattaatatttttttcactgttttggagtgtttttttaaaaaactcaagaagcattcatcataatctgggccttgaaaaatactaacaccttcttattacggttaccaatatgtaaattatgtgaaggaaataaaaatatttcacaccaaattatggctccctggtacaatgaaagttttaaattaaaaattattagagatcaacaagtgttttaagagacttttcccctatctacataaagataggactgactcaccaagaacaactggtcctgttccccaccctgttatctcattatctgttgc

SEQ ID NO: 671000 - DNA, 599 bp, Homo sapiens
aaaagtccagaaaaggcaaattttcagagacagaaagcagatcagttcttgcctggggctaggtgttctggtgcaaatttaaggatgtatgtaatgtgtgaatagcttgcggcctttctcttctcagccaggagtatgcctgccctaaccagctgcaaccttggggtaagagcatttggcttgtctcaactcagagcctccgagaagccactttcgttaacaatgctgctgtgtttcacactgagtttctttaacagcaaagaggctggtcctcatggtttgctccatcctggcagaagttctgccctgagacgggagaagccccaggaaagaatgtcacagaattctactgtttttacctgaagttcaacagtttttcaagcataaatccktctctgattgttgtatgaaaacaacatacatacaatggatcagttttgtcctgctttatagttgctttttgaaaaggatttgctgatctccttacttggccatcactctacacccactttttaatatgtaggaagaaaaaagaaaaattaataacaactggagattggaaaggcagagggcatattatgggaagaagcattagccca

SEQ ID NO: 671001 - DNA, 1520 bp, Homo sapiens
agtttcttctaatattttatgaccaacattttattaatacaacaatccaagttataccctattatttttctgttttttagtttttcatgtaagcaaatatataatatgcaagtcataacagttttttttttttttaaatatggctctctaattcttaagtcatcaatttatttttcttatcttagtgcactggctaggtcttccagtataataataaacagaattggtggcaattattcttttatgattttaaaaagaattctacttacatttcataaataagaattttgtatactgtgatatattagtagaagtcctttaccccttttccaggataattgtgtaacaatgtattttttggtttgttaataattttattatcgatgggtaatacctttttcaaaggtttttgttggtcggtttgtttttaggaaataagatttaaattgaaattcaatttatttaaagttataggtcaacataggttaactaacctataatgaaacagcctgatatgctctataacttttagagaaaataaatggcggtttattttttctggaactgctttcatttaaattatatatatttttaatttatacataaattatatataattcatatattttgtatatattttatataatattttatatattttttaaaatttctattttctgacagaaactaattcattttaaatttctgctgtagtgttacttttcttcaatttcctgtctaatattttttgtgacttctctatttcttggtttatctatattattaagcttcaaaaatttgtcttcattgctccttttcatctttaatggttattttaaatttcaattaagtctgctttgattattggtttctttgttttctgtgtttttttttctgtttctccaactattttttaaagattgattacttggctagtcgtggtggctcacacctgtgaacccaacactttgagaagctacagagggaggatcccgtgtgctcaggagttcaagaccagcctgggcaacrtagtgatatcctgtctcaaaaaaaaaaaaaaaagttggattatttcctttccctcaaatttgtacgttcttttgtctaatgttttagtttttatatctttaaacttcatactttcaattcattacagctaggtatacacaatatttatttctattttcaaacatgttaccgtaatattttctcactctctatgcatgtcagacctttctggtatcactgtcttcctccggagacatatgctttagaagtccctttagtgaaggtccatttctgccatttcttgtttttttctttattttaatatcccaaaatgagtttattttactgtcatttataaacaataatttcttgtcaggttgtaagttaactttaaaaaaaatccctttgatgatttcactgtcttcttgcttaatgcttgccattgaaaagtcagtaattttaagttatatgcattttttttttctccctggatgcctgtaaaaaagaaattg

SEQ ID NO: 671002 - DNA, 580 bp, Homo sapiens
ttattagcagcatgagaatggactaatacacaaatgctaacctctaattgtagtatttaaaaagagactataaattgaggcttctactgttaagatagaagcctagtttaaataagagttttctaaaatgtcttaattggcaaatcctggaccaattttatttttataggtagtattgtatgctatgcatgaagctagtttgataaatattggttaaattggattttctgaatcttcctggatgtttagtttaatacattttgtctcatgcccctaacattgcttttatcaatttctaagactatgtctaggtttctaattccttctaaagttttaaattggcagaatcattagaagcagtcggataagttatctgcagatccaggaaaattttgatttcactggtcacattcccaaggttgtccaatcccatattctkccattttacaatgtggcctgtaaaaaggaagataattttctcactccttccactaactccaaacatgaggaacctctttatatatttattaaaaaaaggtatgatagcttgataaagctggagtttgaattatggtaaaac

SEQ ID NO: 671003 - DNA, 652 bp, Homo sapiens
acacagtgatgtatgactatgtgccaagcaaaaggcaggggttgagtgctctgagggcgaagcgacyctctgctaatcccacaggaagacctgcccggccgctcacgccgcgtgctaacttagcgccctcctgcacctgggcatgattctctgcatcaagtctgtctccccgactagagggcagggattgcgtttactcatctttgtttctgaagtgcccagctcagcctggcacatgaaagaaactcagaaaacgtttgataaataaaagaataaaaaataaataatgaatgaaccagcagtctgctagtcccacacataagcactcccaaaaacacataaaattagaatgtgcagaattaaaaagatttaggatatcaaaatgtatgtatatgaatattaatatattatgtaatataaaataatataaaatattaatataaaataatatttgtgctgtttaaaatgcattttcaaaaacttctgcgttcaccttgccttttaaatccaatcatctacgagacgttccttgccgtgcgtctgtgtgctctgttggttttctttcagaactcaacctgcaacccaccaggcacctgagtgtggctgaaaatgtctcccctaaggatactcatgtgtgtctaaagcctcccgt

SEQ ID NO: 671004 - DNA, 652 bp, Homo sapiens
acacagtgatgtatgactatgtgccaagcaaaaggcaggggttgagtgctctgagggcgaagcgactctctgctaatcccacaggaagacctgcccggccgctcacgccgcgtgctaacttagcgccctcctgcacctgggcatgattctctgcatcaagtctgtctccccgactagagggcagggattgcgtttactcatctttgtttctgaagtkcccagctcagcctggcacatgaaagaaactcagaaaacgtttgataaataaaagaataaaaaataaataatgaatgaaccagcagtctgctagtcccacacataagcactcccaaaaacacataaaattagaatgtgcagaattaaaaagatttaggatatcaaaatgtatgtatatgaatattaatatattatgtaatataaaataatataaaatattaatataaaataatatttgtgctgtttaaaatgcattttcaaaaacttctgcgttcaccttgccttttaaatccaatcatctacgagacgttccttgccgtgcgtctgtgtgctctgttggttttctttcagaactcaacctgcaacccaccaggcacctgagtgtggctgaaaatgtctcccctaaggatactcatgtgtgtctaaagcctcccgt

SEQ ID NO: 671005 - DNA, 1763 bp, Homo sapiens
aactagtcacttgcttaatagccctttgacatgttgacagagcactggaatgggaatcttaaatactaggttaagttacagatcttcatggaaaactgagtgagctcacaatgatgccaacctcagttccctcatgtgcaaygcaagtgacctcccaggtgatctctgcatttcctcccacagaccctgagcaggcaaagacaataaagatatgtggagcagaaagatgtctggaggaagttcccgctaagcgtttatagtctgaaaggtacacactgtatgattccaactctatgacattctggaaccggtgaaaccatggaggtagtaaagagacccattgtacagtgattacaacaggtttgtaggggacaagggagtggatggggggacacgggatttttaggagagtgaagctactctgcacaacactataatggggaatgcatgtcattatacatttgtccaaacttgtagaatgtggaacaccaagagagagccctaatgtgaactgtggactcgggtgatgatgatgtgaggggtcagtgttggttcatcagttgtaacaaatgtaccactctggtaggagatgctgacagcaggggaggcttgggccagggatggaggtagggggggcaggagggggagtaaacaggaaatctctgtactttttgctcaatttttctataaaactaaaactgctccgaaacataaagactattttaaaaacaaatagaaaataaagagagatcagactctttcaaacattctgtactcaaaatcggtgttgtcacataggagcaaaccctgaaaagatagagaagactgctacttatctccactccttaaagctaacagactacagccaagcaatgatgccttatgataggaaagagcttctgaacatctaacctcagctctcttctgcaacttactatgtttctttttattaaaaccttcaatatacatttcatttattttcattagtcctaatgataaagaagtatttaagtaagctagacctcctacatggctggataagctttatgttcatcttttggctgcagtaacatttctaaattgagctgataatcaatacatagtctcagtttgggtacacttccaaaggaccttatgctagacatgctcataaaatgaggcttaaaaggtgagccaatattttgaaagacaagctctgagccctgaaaggctgacacaatggcaatggaaatggtatatggcacacagcacacaaaacgtgtaggacaaaatgtgtcagacgcaaatgaaagacctacttgtgtccaaaacctcaatttatgtgactacaagatacagaagcttagcacatataagactcagtgggtaaggtaggcagaataacggcccccaaagatgatgacatcctaagcccagaacctgtgactatgttagggtgcatggcaaaggggaatcaggttgcagtgaaattaaggctgctaataaagagggcgagtatactggatcatccagagtgcccaacataatcacaaggatccttaaaagtggacgaggaagacagaagagaagagccagagggcaacgtgatggcaaaagaatgctcagagggatgcagggttactgcctttgaagacagaggaagggcccacaagccaaaggatgtggatggcctacagaggctggaaaaggcaaagaaacagattctccccagagcctccagaaaggaatgcagccaagccagcaacttggctttagtccaatga

SEQ ID NO: 671006 - DNA, 1763 bp, Homo sapiens
aactagtcacttgcttaatagccctttgacatgttgacagagcactggaatgggaatcttaaatactaggttaagttacagatcttcatggaaaactgagtgagctcacaatgatgccaacctcagttccctcatgtgcaatgcaagtgacctcccaggtgatctctgcatttcctcccacagaccctgagcaggcaaagacaataaagatatgtggagcagaaagatgtctggaggaagtycccgctaagcgtttatagtctgaaaggtacacactgtatgattccaactctatgacattctggaaccggtgaaaccatggaggtagtaaagagacccattgtacagtgattacaacaggtttgtaggggacaagggagtggatggggggacacgggatttttaggagagtgaagctactctgcacaacactataatggggaatgcatgtcattatacatttgtccaaacttgtagaatgtggaacaccaagagagagccctaatgtgaactgtggactcgggtgatgatgatgtgaggggtcagtgttggttcatcagttgtaacaaatgtaccactctggtaggagatgctgacagcaggggaggcttgggccagggatggaggtagggggggcaggagggggagtaaacaggaaatctctgtactttttgctcaatttttctataaaactaaaactgctccgaaacataaagactattttaaaaacaaatagaaaataaagagagatcagactctttcaaacattctgtactcaaaatcggtgttgtcacataggagcaaaccctgaaaagatagagaagactgctacttatctccactccttaaagctaacagactacagccaagcaatgatgccttatgataggaaagagcttctgaacatctaacctcagctctcttctgcaacttactatgtttctttttattaaaaccttcaatatacatttcatttattttcattagtcctaatgataaagaagtatttaagtaagctagacctcctacatggctggataagctttatgttcatcttttggctgcagtaacatttctaaattgagctgataatcaatacatagtctcagtttgggtacacttccaaaggaccttatgctagacatgctcataaaatgaggcttaaaaggtgagccaatattttgaaagacaagctctgagccctgaaaggctgacacaatggcaatggaaatggtatatggcacacagcacacaaaacgtgtaggacaaaatgtgtcagacgcaaatgaaagacctacttgtgtccaaaacctcaatttatgtgactacaagatacagaagcttagcacatataagactcagtgggtaaggtaggcagaataacggcccccaaagatgatgacatcctaagcccagaacctgtgactatgttagggtgcatggcaaaggggaatcaggttgcagtgaaattaaggctgctaataaagagggcgagtatactggatcatccagagtgcccaacataatcacaaggatccttaaaagtggacgaggaagacagaagagaagagccagagggcaacgtgatggcaaaagaatgctcagagggatgcagggttactgcctttgaagacagaggaagggcccacaagccaaaggatgtggatggcctacagaggctggaaaaggcaaagaaacagattctccccagagcctccagaaaggaatgcagccaagccagcaacttggctttagtccaatga

SEQ ID NO: 671007 - DNA, 1763 bp, Homo sapiens
aactagtcacttgcttaatagccctttgacatgttgacagagcactggaatgggaatcttaaatactaggttaagttacagatcttcatggaaaactgagtgagctcacaatgatgccaacctcagttccctcatgtgcaatgcaagtgacctcccaggtgatctctgcatttcctcccacagaccctgagcaggcaaagacaataaagatatgtggagcagaaagatgtctggaggaagttcccgctaagcgtttayagtctgaaaggtacacactgtatgattccaactctatgacattctggaaccggtgaaaccatggaggtagtaaagagacccattgtacagtgattacaacaggtttgtaggggacaagggagtggatggggggacacgggatttttaggagagtgaagctactctgcacaacactataatggggaatgcatgtcattatacatttgtccaaacttgtagaatgtggaacaccaagagagagccctaatgtgaactgtggactcgggtgatgatgatgtgaggggtcagtgttggttcatcagttgtaacaaatgtaccactctggtaggagatgctgacagcaggggaggcttgggccagggatggaggtagggggggcaggagggggagtaaacaggaaatctctgtactttttgctcaatttttctataaaactaaaactgctccgaaacataaagactattttaaaaacaaatagaaaataaagagagatcagactctttcaaacattctgtactcaaaatcggtgttgtcacataggagcaaaccctgaaaagatagagaagactgctacttatctccactccttaaagctaacagactacagccaagcaatgatgccttatgataggaaagagcttctgaacatctaacctcagctctcttctgcaacttactatgtttctttttattaaaaccttcaatatacatttcatttattttcattagtcctaatgataaagaagtatttaagtaagctagacctcctacatggctggataagctttatgttcatcttttggctgcagtaacatttctaaattgagctgataatcaatacatagtctcagtttgggtacacttccaaaggaccttatgctagacatgctcataaaatgaggcttaaaaggtgagccaatattttgaaagacaagctctgagccctgaaaggctgacacaatggcaatggaaatggtatatggcacacagcacacaaaacgtgtaggacaaaatgtgtcagacgcaaatgaaagacctacttgtgtccaaaacctcaatttatgtgactacaagatacagaagcttagcacatataagactcagtgggtaaggtaggcagaataacggcccccaaagatgatgacatcctaagcccagaacctgtgactatgttagggtgcatggcaaaggggaatcaggttgcagtgaaattaaggctgctaataaagagggcgagtatactggatcatccagagtgcccaacataatcacaaggatccttaaaagtggacgaggaagacagaagagaagagccagagggcaacgtgatggcaaaagaatgctcagagggatgcagggttactgcctttgaagacagaggaagggcccacaagccaaaggatgtggatggcctacagaggctggaaaaggcaaagaaacagattctccccagagcctccagaaaggaatgcagccaagccagcaacttggctttagtccaatga

SEQ ID NO: 671008 - DNA, 1763 bp, Homo sapiens
aactagtcacttgcttaatagccctttgacatgttgacagagcactggaatgggaatcttaaatactaggttaagttacagatcttcatggaaaactgagtgagctcacaatgatgccaacctcagttccctcatgtgcaatgcaagtgacctcccaggtgatctctgcatttcctcccacagaccctgagcaggcaaagacaataaagatatgtggagcagaaagatgtctggaggaagttcccgctaagcgtttatagtctgaaaggtacacactgtatgattccaactctatgacattctggaaccggygaaaccatggaggtagtaaagagacccattgtacagtgattacaacaggtttgtaggggacaagggagtggatggggggacacgggatttttaggagagtgaagctactctgcacaacactataatggggaatgcatgtcattatacatttgtccaaacttgtagaatgtggaacaccaagagagagccctaatgtgaactgtggactcgggtgatgatgatgtgaggggtcagtgttggttcatcagttgtaacaaatgtaccactctggtaggagatgctgacagcaggggaggcttgggccagggatggaggtagggggggcaggagggggagtaaacaggaaatctctgtactttttgctcaatttttctataaaactaaaactgctccgaaacataaagactattttaaaaacaaatagaaaataaagagagatcagactctttcaaacattctgtactcaaaatcggtgttgtcacataggagcaaaccctgaaaagatagagaagactgctacttatctccactccttaaagctaacagactacagccaagcaatgatgccttatgataggaaagagcttctgaacatctaacctcagctctcttctgcaacttactatgtttctttttattaaaaccttcaatatacatttcatttattttcattagtcctaatgataaagaagtatttaagtaagctagacctcctacatggctggataagctttatgttcatcttttggctgcagtaacatttctaaattgagctgataatcaatacatagtctcagtttgggtacacttccaaaggaccttatgctagacatgctcataaaatgaggcttaaaaggtgagccaatattttgaaagacaagctctgagccctgaaaggctgacacaatggcaatggaaatggtatatggcacacagcacacaaaacgtgtaggacaaaatgtgtcagacgcaaatgaaagacctacttgtgtccaaaacctcaatttatgtgactacaagatacagaagcttagcacatataagactcagtgggtaaggtaggcagaataacggcccccaaagatgatgacatcctaagcccagaacctgtgactatgttagggtgcatggcaaaggggaatcaggttgcagtgaaattaaggctgctaataaagagggcgagtatactggatcatccagagtgcccaacataatcacaaggatccttaaaagtggacgaggaagacagaagagaagagccagagggcaacgtgatggcaaaagaatgctcagagggatgcagggttactgcctttgaagacagaggaagggcccacaagccaaaggatgtggatggcctacagaggctggaaaaggcaaagaaacagattctccccagagcctccagaaaggaatgcagccaagccagcaacttggctttagtccaatga

SEQ ID NO: 671009 - DNA, 1763 bp, Homo sapiens
aactagtcacttgcttaatagccctttgacatgttgacagagcactggaatgggaatcttaaatactaggttaagttacagatcttcatggaaaactgagtgagctcacaatgatgccaacctcagttccctcatgtgcaatgcaagtgacctcccaggtgatctctgcatttcctcccacagaccctgagcaggcaaagacaataaagatatgtggagcagaaagatgtctggaggaagttcccgctaagcgtttatagtctgaaaggtacacactgtatgattccaactctatgacattctggaaccggtgaaaccatggaggtagtaaagagacccattgtacagtgattacaacaggtttgtaggggacaagggagtggatggggggacacgggatttttaggagagtgaagctactctgcacracactataatggggaatgcatgtcattatacatttgtccaaacttgtagaatgtggaacaccaagagagagccctaatgtgaactgtggactcgggtgatgatgatgtgaggggtcagtgttggttcatcagttgtaacaaatgtaccactctggtaggagatgctgacagcaggggaggcttgggccagggatggaggtagggggggcaggagggggagtaaacaggaaatctctgtactttttgctcaatttttctataaaactaaaactgctccgaaacataaagactattttaaaaacaaatagaaaataaagagagatcagactctttcaaacattctgtactcaaaatcggtgttgtcacataggagcaaaccctgaaaagatagagaagactgctacttatctccactccttaaagctaacagactacagccaagcaatgatgccttatgataggaaagagcttctgaacatctaacctcagctctcttctgcaacttactatgtttctttttattaaaaccttcaatatacatttcatttattttcattagtcctaatgataaagaagtatttaagtaagctagacctcctacatggctggataagctttatgttcatcttttggctgcagtaacatttctaaattgagctgataatcaatacatagtctcagtttgggtacacttccaaaggaccttatgctagacatgctcataaaatgaggcttaaaaggtgagccaatattttgaaagacaagctctgagccctgaaaggctgacacaatggcaatggaaatggtatatggcacacagcacacaaaacgtgtaggacaaaatgtgtcagacgcaaatgaaagacctacttgtgtccaaaacctcaatttatgtgactacaagatacagaagcttagcacatataagactcagtgggtaaggtaggcagaataacggcccccaaagatgatgacatcctaagcccagaacctgtgactatgttagggtgcatggcaaaggggaatcaggttgcagtgaaattaaggctgctaataaagagggcgagtatactggatcatccagagtgcccaacataatcacaaggatccttaaaagtggacgaggaagacagaagagaagagccagagggcaacgtgatggcaaaagaatgctcagagggatgcagggttactgcctttgaagacagaggaagggcccacaagccaaaggatgtggatggcctacagaggctggaaaaggcaaagaaacagattctccccagagcctccagaaaggaatgcagccaagccagcaacttggctttagtccaatga

SEQ ID NO: 671010 - DNA, 1763 bp, Homo sapiens
aactagtcacttgcttaatagccctttgacatgttgacagagcactggaatgggaatcttaaatactaggttaagttacagatcttcatggaaaactgagtgagctcacaatgatgccaacctcagttccctcatgtgcaatgcaagtgacctcccaggtgatctctgcatttcctcccacagaccctgagcaggcaaagacaataaagatatgtggagcagaaagatgtctggaggaagttcccgctaagcgtttatagtctgaaaggtacacactgtatgattccaactctatgacattctggaaccggtgaaaccatggaggtagtaaagagacccattgtacagtgattacaacaggtttgtaggggacaagggagtggatggggggacacgggatttttaggagagtgaagctactctgcacaacactataatggggaatgcatgtcattatacatttgtccaaacttgtagaatgtggaacaccaagagagagccctaatgtgaactgtggactcgggtgatgatgatgtgaggggtcagtgttggttcatcagttgtaacaaatgtaccactctggtaggagatgctgacagcaggggaggcttgggccagggatggaggtagggggggcaggagggggagtaaacaggaaatctctgtactttttgctcaatttttctataaaactaaaactgctccgaaacataaagactattttaaaaacaaatagaaaataaagagagatcagactctttcaaacattctgtactcaaaatcggtgttgtcacataggagcaaaccctgaaaagatagagaagactgctacttatctccactccttaaagctaacagactacagccaagcaatgatgccttatgataggaaagagcttctgaacatctaacctcagctctcttctgcaacttactatgtttctttttattaaaaccttcaatatacatttcatttattttcattagtcctaatgataaagaagtatttaagtaagctagacctcctacatggctggataagctttatgttcatcttttggctgcagtaacatttctaaattgagctgataatcaatacatagtctcagtttgggtacacttccaaaggaccttatgctagacatgctcataaaatgaggcttaaaaggtgagccaatattttgaaagacaagctctgagccctgaaaggctgacacaatggcaatggaaatggtatatggcacacagcacacaaaacgtgtaggacaaaatgtgtcagacgcaaatgaaagacctacttgtgtccaaaacctcaatttatgtgactacaagatacagaagcttagcacatataagactcagtgggtaaggtaggcagaataacggcccccaaagatgatgacatcctaagcccagaacctgtgactatgttagggtgcatggcaaaggggaatcaggttgcagtgaaattaaggctgctaataaagagggcgagtatactggatcatccagagtgcccaacataatcacaaggatccttaaaagtggacgaggaagacagaagagaagagccagagggcaacgtgatggcaaaagaatgctcagakggatgcagggttactgcctttgaagacagaggaagggcccacaagccaaaggatgtggatggcctacagaggctggaaaaggcaaagaaacagattctccccagagcctccagaaaggaatgcagccaagccagcaacttggctttagtccaatga

SEQ ID NO: 671011 - DNA, 1763 bp, Homo sapiens
aactagtcacttgcttaatagccctttgacatgttgacagagcactggaatgggaatcttaaatactaggttaagttacagatcttcatggaaaactgagtgagctcacaatgatgccaacctcagttccctcatgtgcaatgcaagtgacctcccaggtgatctctgcatttcctcccacagaccctgagcaggcaaagacaataaagatatgtggagcagaaagatgtctggaggaagttcccgctaagcgtttatagtctgaaaggtacacactgtatgattccaactctatgacattctggaaccggtgaaaccatggaggtagtaaagagacccattgtacagtgattacaacaggtttgtaggggacaagggagtggatggggggacacgggatttttaggagagtgaagctactctgcacaacactataatggggaatgcatgtcattatacatttgtccaaacttgtagaatgtggaacaccaagagagagccctaatgtgaactgtggactcgggtgatgatgatgtgaggggtcagtgttggttcatcagttgtaacaaatgtaccactctggtaggagatgctgacagcaggggaggcttgggccagggatggaggtagggggggcaggagggggagtaaacaggaaatctctgtactttttgctcaatttttctataaaactaaaactgctccgaaacataaagactattttaaaaacaaatagaaaataaagagagatcagactctttcaaacattctgtactcaaaatcggtgttgtcacataggagcaaaccctgaaaagatagagaagactgctacttatctccactccttaaagctaacagactacagccaagcaatgatgccttatgataggaaagagcttctgaacatctaacctcagctctcttctgcaacttactatgtttctttttattaaaaccttcaatatacatttcatttattttcattagtcctaatgataaagaagtatttaagtaagctagacctcctacatggctggataagctttatgttcatcttttggctgcagtaacatttctaaattgagctgataatcaatacatagtctcagtttgggtacacttccaaaggaccttatgctagacatgctcataaaatgaggcttaaaaggtgagccaatattttgaaagacaagctctgagccctgaaaggctgacacaatggcaatggaaatggtatatggcacacagcacacaaaacgtgtaggacaaaatgtgtcagacgcaaatgaaagacctacttgtgtccaaaacctcaatttatgtgactacaagatacagaagcttagcacatataagactcagtgggtaaggtaggcagaataacggcccccaaagatgatgacatcctaagcccagaacctgtgactatgttagggtgcatggcaaaggggaatcaggttgcagtgaaattaaggctgctaataaagagggcgagtatactggatcatccagagtgcccaacataatcacaaggatccttaaaagtggacgaggaagacagaagagaagagccagagggcaacgtgatggcaaaagaatgctcagagggatgcagggttactgcctttgaagacagaggaagggcccacaagccaaaggatgtggatggcctacagaggctggaaaaggcaaagaaacagattctccccagagcctccagaraggaatgcagccaagccagcaacttggctttagtccaatga

SEQ ID NO: 671012 - DNA, 1488 bp, Homo sapiens
tggtaaatatttggtacaacttgggttctgaatatttattagcaccacagtgacctctgagacagtgtccctgctggtatggagacatacaaaacacaggttttcaggcccaacattgtccttttaacatattactactgcctttaatgaatgttaactcatgtaatcctttaaaaaaaaaaaaagccaagatgtaacacccatccaacttgtctccagctgcaaccttgcctcctactgtctatgatgaggagggcattcttaacccaacagcctgtaccatctttaaaaacatgtcagatcatgtcactgctccatttaaagcatccactggctcctatcttgagagtraaagcaagtccttccagtggcttccaaggttccacatgccctggctccttcatcttatactatctctccctcaatcaccccacttcagcctcattggtcttcctgctcttccacacgcatgctgagagagaacttgctgttccctctgcctggaatcccagacatccacatgaattgctcactcatctcctgaagttctctattcaagtgtcactttttcctcaaggccttccctcacttccctatttaaaataactaccctttccccctaaagcaaatccaccctagtactctccatcctcctttttatttttctgtggcacttaccaccatatgacacactatttgtttattttctgtatctacccactagaatgacagttccatgagagtagaacttttgcctgttttattcactactatgtcttcaatgccttgaatagtttctggcacacacgaggcatttagtgtttgctaaatgaattaatacatgctcattccttctagatggcaccacgttagcatctcttctccctgaatgccctgtcactcattctgcatccttgttcaccactatgttcactatgctgcattatccagcacctgtccttgtagtcattccttttggggagagttgtttccatggtgacacaggagcttttcacctacttagcaggcctctcagaaagctctttgcaccctggttctatttctagtgttgttaagactccaacacacacagaactttccattcctatcctggaaagcattctcgatcagtatagctagctggtgcttttcagcagttctgcaggcaggtttatttaagcagacctcttttgatagacatttagtatgttctaaggctttgccttttcattcattcactcaaaatatttataaagggcctattccactccaggcactgttttagtcacctagcatacaccagtgattcaccctggtttcccagagttgaattatcataaattactccacctattgtttatgttgttgtgaaaagtgtcaaagatcttgatcttgcttgctgatctctagctcctgactttgcagcccactgatgcgaaatatgtacagttaaaaaacaaaaaacaaaaaacaaaacatggcgcggtg

SEQ ID NO: 671013 - DNA, 1488 bp, Homo sapiens
tggtaaatatttggtacaacttgggttctgaatatttattagcaccacagtgacctctgagacagtgtccctgctggtatggagacatacaaaacacaggttttcaggcccaacattgtccttttaacatattactactgcctttaatgaatgttaactcatgtaatcctttaaaaaaaaaaaaagccaagatgtaacacccatccaacttgtctccagctgcaaccttgcctcctactgtctatgatgaggagggcattcttaacccaacagcctgtaccatctttaaaaacatgtcagatcatgtcactgctccatttaaagcatccactggctcctatcttgagagtgaaagcaagtccttccagtggcttccaaggttccacatgccctggctccttcatcttatactatctctccctcaatcaccccacttcagcctcattggtcttcctgctcttccacacgcatgctgagagagaacttgctgttccctctgcctggaatcccagacatccacatgaattgctcactcatctcctgaagttctctattcaagtgtcactttttcctcaaggccttccctcacttccctatttaaaataactaccctttccccctaaagcaaatccaccctagtactctccatcctcctttttatttttctgtggcacttaccaccatatgacacactatttgtttattttctgtatctacccactagaatgacagttccatgagagtagaacttttgcctgttttattcactactatgtcttcaatgccttgaatagtttctggcacacacgaggcatttagtgtttgctaaatgaattaatacatgctcattccttctagatggcaccacgttagcatctcttctccctgaatgccctgtcactcattctgcatccttgttcaccactatgttcactatgctgcattatccagcacctgtccttgtagtcattccttttggggagagttgtttccatggtgacacaggagcttttcacctacttagcaggcctctcagaaagctctttgcaccmtggttctatttctagtgttgttaagactccaacacacacagaactttccattcctatcctggaaagcattctcgatcagtatagctagctggtgcttttcagcagttctgcaggcaggtttatttaagcagacctcttttgatagacatttagtatgttctaaggctttgccttttcattcattcactcaaaatatttataaagggcctattccactccaggcactgttttagtcacctagcatacaccagtgattcaccctggtttcccagagttgaattatcataaattactccacctattgtttatgttgttgtgaaaagtgtcaaagatcttgatcttgcttgctgatctctagctcctgactttgcagcccactgatgcgaaatatgtacagttaaaaaacaaaaaacaaaaaacaaaacatggcgcggtg

SEQ ID NO: 671014 - DNA, 616 bp, Homo sapiens
ttatttttcgctacatgataaagtggtaaggattttttggtattcaataaggccagaactattgcatatacattttgattataaattatttggtgctaggctgggcacagtggctcagcctataatcccagaactttgggaggccgaggcgggcagatcgcttgaggtcaggagtttgacgatagcagcctggccaacatagcaaaacctgtctctactaaaaatacaaaaattagcatacctgtaatcccagctactcgggaggctgaggcaggagaattccttgaacccgggaggtggaggttgcagtgagccaagattgcaccactgcactgcagcctgggcaacagagcgagactcgatttcaaaaaaaaattayttgatgcttaatattctgtaacttggaaagtgcttatgaatgaaaataatcaagataaactttgtgcttttcactcttcaggttttatgtgataaaacattgctacctacagttcattgtccctccttggagagtggaacactgctgagcgcaatcaatcaaaatgagagtagtatgtaaaagggaccagaatcatgtagcatgatttgaacagcaaataacaggaaacactggtcc

SEQ ID NO: 671015 - DNA, 2187 bp, Homo sapiens
agttgtcttgaaagagtaagtaagaaataatgcatgcaaaccccagagcatggtgcttggcaagaaaaagaaataagtattttatatttttgtttctttcttccgttcctttcctttccttttcttttccttttcctttcttttcctcttttttgagacggagtctcgctctgtcacccaggctggagtgcagcggcgcaatctgctcactgcaacctccgcctcccctgcaatctctgcctcccctggttcaagcaattctgctgctgagcctcccaagtagctgggactacaggcacatgccaccacacccagctaattttttttgtatttttagtagagacggggtttcaacgtgttagccaggatkgtcttgatctcctgacctcgtgatccacccacctcggcctcccaaagtgctgggattacaggcgtgagccactgcacccggcctgttgtttcttttttattaactttttggtgataatgatttattcaagtatgtaatcaagaatggatgatcttggaagaacattagaaatgggctctgagtcttttttttggtttgttttttttttttttgagagagagggtctccctgtgttgcccaggctggtcttgaattcctaggctcaagcaatcctcctgcctctgctttccaaagtgctggaattagtagcgtgagccaccaagccccacctggctctgagtcttaataaccatcaattgctgtttaagtcagcttttttgtatatttgtgtgtggttgttagaaacttttaatttacatttttctgccttccagaaagctttctagccctagttgtactgaatgcaactgatgattaagcagtaaactacattaaaaaatttttttgttaacaatcaaggccttggcagaacctttttcctcactttgctatacggaatgactcgtggttctgtggagctcacctcatgtatatctgtgctgattgatacaaagttgatatgtctgtctgtttctaacatctttgcttataaatattagatctccaagacgacatagatccacatctccttccccttctcgactgaaagaaagaagagatgaggaaaagaaagaaacaaaagaaacaaagagcaaagaacggcagattactggtaatgttattagataaataactgtaggaaaagtacagtgatgataaaattataaaagtttaatcttgaacatttaaatgttaagccttttatagtattcattgcatatggttttgagttttttttggtttttttttttttgagatagagtttcattcttgtcactcagactggagtgcaatggcacaatcttggctcactgcaacctccgcctcctgggtttaagcaattcttgtgcctcagcgtcccagagtagttgggattacaggcacccgccactatgcccggctaatttttgtatttttagtagagacgggttctcaccatgttagccaggctggtctcaaactcctgacctcaggtgatcctcccgcctcggcctcccaaagtgctgggattatagacgtgaaccaccgtgcccagcctgagattttgttttaattgcaccctagcaagttgctggttatctatggtgctcctgatatagaacgatagttaaaaacatgagaatattctattttggaagtgtcttcagaactatatagtgtcatgcctgatattaaaggtagtccttaatatgaaacccaggtttttttttaaaaggtaatcctgtctaaaggcttcaaggagaggactttttttttgtaccataagttacattctgtccaaatgtaagaggaattttttcattagactcatcttcagctaattgttttgtgtgttctctgctagtgaggtggaatgactattaatctgttaccacctctctttttatttatgtatatatttgaaatgatagagaggtcacaaaattattcttttttgcagaggaagacttagagggcaaaacagaggaagaaatagaaatgatgaagttaatgggatttgcctcctttgactccacaaaagtaagtaaaacgtgcaacattctcatttgaattaatatgttatgactgtcctatctttccatgttcttttccatttatacaaatttatttggttataagacaataactatctgtttgaagggctttgagaatacaaa

SEQ ID NO: 671016 - DNA, 631 bp, Homo sapiens
cactcactatagtataaattgggttctcttgcaggcaacactgaggccagcattctgaatgtgcaactttggactaagcacattgcacatttaggaatgtaatctaagcaaatactttcagttgtggatgcaattatatttattgtaatgttgataacgttatagtaaagaaaaacaatgtgaatatatgtcagtgagagattggacaaatcaccttgaataaatatatgcaacagcatattatatagctgtgaaaatggacaaggtatttatttacattgtcaaatgaaaagatgatagagaattgagtagcaaagtagttccaaatagtatctgtaatataatgtcttttatgttaaaattacatgttaatagatgcactaaacattttcccagtgaaatggtatatgttgctataactgaagttacargaatgtaaagacatggaaaggcttacatttgttcttaccctttcatgcagtctgtatttttatctatctatctatctatatctatctatatctatctatctatctatctatctatctatctatctatctatctatcatctatcatctatctatctatctgtatctatctatctatctatctatctatctatctatctatc

SEQ ID NO: 671017 - DNA, 631 bp, Homo sapiens
cactcactatagtataaattgggttctcttgcaggcaacactgaggccagcattctgaatgtgcaactttggactaagcacattgcacatttaggaatgtaatctaagcaaatactttcagttgtggatgcaattatatttattgtaatgttgataacgttatagtaaagaaaaacaatgtgaatatatgtcagtgagagattggacaaatcaccttgaataaatatatgcaacagcatattatatagctgtgaaaatggacaaggtatttatttacattgtcaaatgaaaagatgatagagaattgagtagcaaagtagttccaaatagtatctgtaatataatgtcttttatgttaaaattacatgttaatagatgcactaaacattttcccagtgaaatggtatatgttgctataactgaagttacaagaatgtaaagacatggaaaggcttacrtttgttcttaccctttcatgcagtctgtatttttatctatctatctatctatatctatctatatctatctatctatctatctatctatctatctatctatctatctatcatctatcatctatctatctatctgtatctatctatctatctatctatctatctatctatctatc

SEQ ID NO: 671018 - DNA, 631 bp, Homo sapiens
cactcactatagtataaattgggttctcttgcaggcaacactgaggccagcattctgaatgtgcaactttggactaagcacattgcacatttaggaatgtaatctaagcaaatactttcagttgtggatgcaattatatttattgtaatgttgataacgttatagtaaagaaaaacaatgtgaatatatgtcagtgagagattggacaaatcaccttgaataaatatatgcaacagcatattatatagctgtgaaaatggacaaggtatttatttacattgtcaaatgaaaagatgatagagaattgagtagcaaagtagttccaaatagtatctgtaatataatgtcttttatgttaaaattacatgttaatagatgcactaaacattttcccagtgaaatggtatatgttgctataactgaagttacaagaatgtaaagacatggaaaggcttacatttgttcttaccctttcatgcagtctgtatttttatctatctatctatctatatctatctatatctatctatctatctatctatctatctatctatctatctatctatcatctatcatctatctatctrtctgtatctatctatctatctatctatctatctatctatctatc

SEQ ID NO: 671019 - DNA, 631 bp, Homo sapiens
cactcactatagtataaattgggttctcttgcaggcaacactgaggccagcattctgaatgtgcaactttggactaagcacattgcacatttaggaatgtaatctaagcaaatactttcagttgtggatgcaattatatttattgtaatgttgataacgttatagtaaagaaaaacaatgtgaatatatgtcagtgagagattggacaaatcaccttgaataaatatatgcaacagcatattatatagctgtgaaaatggacaaggtatttatttacattgtcaaatgaaaagatgatagagaattgagtagcaaagtagttccaaatagtatctgtaatataatgtcttttatgttaaaattacatgttaatagatgcactaaacattttcccagtgaaatggtatatgttgctataactgaagttacaagaatgtaaagacatggaaaggcttacatttgttcttaccctttcatgcagtctgtatttttatctatctatctatctatatctatctatatctatctatctatctatctatctatctatctatctatctatctatcatctatcatctatctatctatmtgtatctatctatctatctatctatctatctatctatctatc

SEQ ID NO: 671020 - DNA, 631 bp, Homo sapiens
cactcactatagtataaattgggttctcttgcaggcaacactgaggccagcattctgaatgtgcaactttggactaagcacattgcacatttaggaatgtaatctaagcaaatactttcagttgtggatgcaattatatttattgtaatgttgataacgttatagtaaagaaaaacaatgtgaatatatgtcagtgagagattggacaaatcaccttgaataaatatatgcaacagcatattatatagctgtgaaaatggacaaggtatttatttacattgtcaaatgaaaagatgatagagaattgagtagcaaagtagttccaaatagtatctgtaatataatgtcttttatgttaaaattacatgttaatagatgcactaaacattttcccagtgaaatggtatatgttgctataactgaagttacaagaatgtaaagacatggaaaggcttacatttgttcttaccctttcatgcagtctgtatttttatctatctatctatctatatctatctatatctatctatctatctatctatctatctatctatctatctatctatcatctatcatctatctatctatctstatctatctatctatctatctatctatctatctatctatc

SEQ ID NO: 671021 - DNA, 2229 bp, Homo sapiens
tgaggtcttcctatgttatccagactggtcttgaactcctggcctcaagcaatcttcctgccttggcatctcaaagcactgggattacaggcatgagccaccacacccagccaatttaggacttttttgtttttatgataggtttatcaggatgtaaccctattgttaaacatgtaaccctattgttaaacaaacagtatctggacttaacgaaggttcaaattacaatatttcaactttataatggttttatcaatgcgttaccccattgtaaatctaggagcttctgtatacatctgtgtrtatatatatatatatatatatatatatatatatatatatatatacacacagattaaaaattacatatatatacatgttatattttatgcatatacatatgtctatcttatatagttgcttaaaatgttatacataaataaaagatatatatatataaattaaatatcatgtatagagttggttaaaattttatatgtgcatgtaaactacattttatatatatatatatacactatatatataatattttaatattatcgtcagctgtggtgcctagggcagggctagaatgtctaatgacacaatctcatcaggcacaaatttcaggaggtaccaaaaaactgaaactaaactccatagtcacgatactgataaatattcaagacgtatataatgttttaattatacacacacatacagacagtgctaagagaccattagcttttttctcataatttagacaaaaccacttttgcagtgggccctgctgtgaaagtaaagggttaatgttgctcaaagaggggtggggcatttgcccccagctcctgagaggtgcacactagccttggaatgtcctgcctagtaggaatgtgtttatgtactgggggacctggggtaactggacaatctagcaatgtgatttagggtagagggggctattcatagcagagatttttagagtatgagatggacatactaggtgttaacaatatggttaagggtgggagctttgggtcttgaagtatcagctcagacctctggagaggctacagattgaggtcaactctgtgggccattgactgtggagccccagctgaagactctgaacactggggtttgggctagctaccctggttggcgatgcttcaggcattctgcacaagctaagactgtgaggctccgtgctgtccacaactccacaaggaaaggacagaaggagctctgtgtctgcaacttttcctggattctatctgtcccacatccctcttctcttggctgctatgtcaatctgtatccttgccacgtaataaaccataaccatgagtgtaatggtgaggtctgtcatcctatccaaagagccaaactgagggttgtcttggggaccccaaaatttgcagttgatgtcagaacagtgggtggtcatatggggattgtcccctctaacaatgaacttgaccaacccttacacctaccctgtcttagttggaatgcatgaaatggagactttagacattcctttcaatcttggatgttatgattttatcaaaacaaagtctattatttttctttgcaggtgacagagagagagagagagagagagagagagagaaagaaacagagagaaagaaaaagaaaaaaaagaaaaagcaagtaagaaaacatgagattgggcaagacagagcccatctcatttctctgtgatttggaggtatcgaataagattctaataagaactgtgtggtatgattggaattcaaactatcaaccttgaagttgatgacagtgcataacgggcttttggtttgcacatctttctggtaatttatcctctttagttccttgtctccacacatctgcttgtgcttagatccaaaggaagagacattaggaggctataatttatttttcagggaggaattaggaagtgaaccaatgtcccattacatttgcatcagtttttgattaaaacacacacacgccacacacatttctcacactgtgagcaccccacactcttgtgtgggtatttttgttgttaattaaatttgtttctaaatagacttccatcctaacctggctttcatgcttagaaagacaagtgataaactgcaataaccctttcacatactttgatacaaatggttttaaacagttgggaagattaagaacaaagaaagcttttaaaaaaaatttctgaacctccaa

SEQ ID NO: 671022 - DNA, 1157 bp, Homo sapiens
gatctttctgggggccactgtttagtccactacatttgtattcacttccttccggaggctctaggggaggatgcttcctgcctcttccagcttctgggggctcctggcatccctgggtttgtggccacatcactccagtctctgttcccatctccgcatggcccttctcctctgtgtctgtctctgagaatggcaaaggtctgacagcattgcttctacagtaggggtgacattgagagggagatggtggtagcaaatgaaagaggagaattttcccagtggagcactgtttaaaacaatagagatggggtcttgctatgttgtccagtctggtcttgaacttctggcctcaagtgatcctcccacattggcatctcaaagtggtgggattacagttatgagccaccatgcctgacccccagtggagcactttgatgcttggctataaaagttatactcccaagaaaaagcccaaagatggagaaaaaaaagtgtgttgtgttcacgaagaacaaggggtctgctttgcatatgacccgaagaggacacctcttagaaagacactggtcattggatttagggcccatccagataatccaagatgatcccatcttgagatccttaacttgattccatctgcaaagaccctatttccagataaggtcstattcccaggttctgaggttaagatgtgaactcatattttaaatgtctccattcaacctactacagcttccatgggacatatttgcccagcatccagtgatgtaaactggatttctgtgtgttttaagagctgtaaaggaaggaataattatcattcctgaaatacccttggtattttagcaaaataaaagttccccagatttgcttaatgaatctttacaataagtagcagggaattaagtatcatgggtgtgatttgagacttggatgaattaagggaaaaacttaaaagttgttaaaaccttactacctcctgccagctcaccagacacctttaatgcttcaggagcagcacacgaaatataatttttgaaggaggagagttccatgtccacatctacgccaatggaaaaaatagctgggtggaaaagactaggaaaatgaacagagagtaattttcaagatttcctttcattaaaaaacaaaacttg

SEQ ID NO: 671023 - DNA, 1157 bp, Homo sapiens
gatctttctgggggccactgtttagtccactacatttgtattcacttccttccggaggctctaggggaggatgcttcctgcctcttccagcttctgggggctcctggcatccctgggtttgtggccacatcactccagtctctgttcccatctccgcatggcccttctcctctgtgtctgtctctgagaatggcaaaggtctgacagcattgcttctacagtaggggtgacattgagagggagatggtggtagcaaatgaaagaggagaattttcccagtggagcactgtttaaaacaatagagatggggtcttgctatgttgtccagtctggtcttgaacttctggcctcaagtgatcctcccacattggcatctcaaagtggtgggattacagttatgagccaccatgcctgacccccagtggagcactttgatgcttggctataaaagttatactcccaagaaaaagcccaaagatggagaaaaaaaagtgtgttgtgttcacgaagaacaaggggtctgctttgcatatgacccgaagaggacacctcttagaaagacactggtcattggatttagggcccatccagataatccaagatgatcccatcttgagatccttaacttgattccatctgcaaagaccctatttccagataaggtcctattcccaggttctgwggttaagatgtgaactcatattttaaatgtctccattcaacctactacagcttccatgggacatatttgcccagcatccagtgatgtaaactggatttctgtgtgttttaagagctgtaaaggaaggaataattatcattcctgaaatacccttggtattttagcaaaataaaagttccccagatttgcttaatgaatctttacaataagtagcagggaattaagtatcatgggtgtgatttgagacttggatgaattaagggaaaaacttaaaagttgttaaaaccttactacctcctgccagctcaccagacacctttaatgcttcaggagcagcacacgaaatataatttttgaaggaggagagttccatgtccacatctacgccaatggaaaaaatagctgggtggaaaagactaggaaaatgaacagagagtaattttcaagatttcctttcattaaaaaacaaaacttg

SEQ ID NO: 671024 - DNA, 2049 bp, Homo sapiens
tgtcaaacatcagcattctctccaaaggccactgtaggaaaatatactgtgacaaagcaatctttgaatgaatgtgtgaacattcaagtcttggaaatctctggatgtctgtaatgtaggtagaagcatgctggtatatatgaagcagtagttttaaactctgcctatattttagaatcacaggggtaaaggaatgtgagaaaggctttaaaaaggaatttcaggatcccagcctcggrgattatgatttcactggtctaattagagcctaagatttaggatttttatttggttttgtcttaatttatcaaagtatttctaatatgcagcaaggtttgagatcactggttaaaggtatagagtatgttataaatatattaaatgacttatttatttgatatttcacagaatagctaaagggaagtagtcatttcccctaaagaaaagatcggcatgtacagattagaggctacctgaagaattttcatagaaaagttggtagaaagaacatgagaatacttgagaacactcagggggtggggttagaaatgatgcttcagaggtgaggtcaaggatgaggaatgggagatggaggcacgaaaaccttactctgcctgtacctcttttttgcagaaggcagctgagggcatggtaatgagccccgatagatgagaaatgattacaaaaatgatgatgatgatgatgatgatgatgatgatgatgatgaaggtggtggtggtgaatatgaggaaagttaacaattagtgagccttcaatatatagtgggaactggatatttttcgtatttacttctcaaaaaaaaggtctatgaaatagatgtcaaatgagaatatctagtttctagtatgtagtggtcattataacccttatctcccttctatagacaaattggaatactttgatctttaataaatttcaaaagcaggagtaattaggataaaaaaattaattgactttcttgaggaattaaaagctggtcaagttataaaaattcttttctggctgggcacgcggtggctcacgcctgtaatcccagaacttagggaggccgaggtggacggatcacgaggtcgggagatcaagaccatcctggctaacacggtgaaaccctatctttactaaaaatacaaaaaattacccgggcgtggtggcgggcgcctgtagtcccagctacttgggaggctgaggcagaagaatggtgtgaacccaggaggcggagcttgcagtgagccgagatcacgccactgcactctagcctggcgacagagcgagactccgtctcaaaaaaaaaaaaaaaattcttttccaaactgcaatccttttactgaaagacagatagacaaatagacacacacacacacacacacacacacacacacagccctctcttatgaactattggcattaatatcatatgtttattaacgtccttaggaagaattcaagagcatgttttcagaagtcaaggtattttttttctagttgtctgtattgcagatgttctcacaataagaacgtccagttacaagtatgcaaggcgttgacctgatatcatgtggaacctggtggtcaaccagaacacttgaaatggaattcaaatccagatgtcaaggactatagacagaataattcagccctgaaactctattcctgagacaaaggttatagacaacttctgtccttcaaccttatccttgtaatagtttgagaaatttagaaagagtcatttcaatctatgtttaattgttaatctcttaatataactgctgcagttggttaaaaagtctcaattattttcttagaaactcgcttatgtaaagggagaaatgcttgaaagtccattcattttgcctctgaataatacagaccttccagacaaactatttaagaaatgtttcttaattttctcacttaccacttttgaataatataaaacaaatctgtgtttagcttctgccaagacaatgcattgaggacttccatcgttccctgggaatcattacattgttttggtttgcttgggttcag

SEQ ID NO: 671025 - DNA, 2049 bp, Homo sapiens
tgtcaaacatcagcattctctccaaaggccactgtaggaaaatatactgtgacaaagcaatctttgaatgaatgtgtgaacattcaagtcttggaaatctctggatgtctgtaatgtaggtagaagcatgctggtatatatgaagcagtagttttaaactctgcctatattttagaatcacaggggtaaaggaatgtgagaaaggctttaaaaaggaatttcaggatcccagcctcggagattatgatttcactggtctaattagagcctaagatttaggatttttatttggttttgtcttaatttatcaaagtatttctaatatgcagcaaggtttgagatcactggttaaaggtatagagtatgttataaatatattaaatgacttatttatttgatatttcacagaatagctaaagggaagtagycatttcccctaaagaaaagatcggcatgtacagattagaggctacctgaagaattttcatagaaaagttggtagaaagaacatgagaatacttgagaacactcagggggtggggttagaaatgatgcttcagaggtgaggtcaaggatgaggaatgggagatggaggcacgaaaaccttactctgcctgtacctcttttttgcagaaggcagctgagggcatggtaatgagccccgatagatgagaaatgattacaaaaatgatgatgatgatgatgatgatgatgatgatgatgatgaaggtggtggtggtgaatatgaggaaagttaacaattagtgagccttcaatatatagtgggaactggatatttttcgtatttacttctcaaaaaaaaggtctatgaaatagatgtcaaatgagaatatctagtttctagtatgtagtggtcattataacccttatctcccttctatagacaaattggaatactttgatctttaataaatttcaaaagcaggagtaattaggataaaaaaattaattgactttcttgaggaattaaaagctggtcaagttataaaaattcttttctggctgggcacgcggtggctcacgcctgtaatcccagaacttagggaggccgaggtggacggatcacgaggtcgggagatcaagaccatcctggctaacacggtgaaaccctatctttactaaaaatacaaaaaattacccgggcgtggtggcgggcgcctgtagtcccagctacttgggaggctgaggcagaagaatggtgtgaacccaggaggcggagcttgcagtgagccgagatcacgccactgcactctagcctggcgacagagcgagactccgtctcaaaaaaaaaaaaaaaattcttttccaaactgcaatccttttactgaaagacagatagacaaatagacacacacacacacacacacacacacacacacagccctctcttatgaactattggcattaatatcatatgtttattaacgtccttaggaagaattcaagagcatgttttcagaagtcaaggtattttttttctagttgtctgtattgcagatgttctcacaataagaacgtccagttacaagtatgcaaggcgttgacctgatatcatgtggaacctggtggtcaaccagaacacttgaaatggaattcaaatccagatgtcaaggactatagacagaataattcagccctgaaactctattcctgagacaaaggttatagacaacttctgtccttcaaccttatccttgtaatagtttgagaaatttagaaagagtcatttcaatctatgtttaattgttaatctcttaatataactgctgcagttggttaaaaagtctcaattattttcttagaaactcgcttatgtaaagggagaaatgcttgaaagtccattcattttgcctctgaataatacagaccttccagacaaactatttaagaaatgtttcttaattttctcacttaccacttttgaataatataaaacaaatctgtgtttagcttctgccaagacaatgcattgaggacttccatcgttccctgggaatcattacattgttttggtttgcttgggttcag

SEQ ID NO: 671026 - DNA, 2049 bp, Homo sapiens
tgtcaaacatcagcattctctccaaaggccactgtaggaaaatatactgtgacaaagcaatctttgaatgaatgtgtgaacattcaagtcttggaaatctctggatgtctgtaatgtaggtagaagcatgctggtatatatgaagcagtagttttaaactctgcctatattttagaatcacaggggtaaaggaatgtgagaaaggctttaaaaaggaatttcaggatcccagcctcggagattatgatttcactggtctaattagagcctaagatttaggatttttatttggttttgtcttaatttatcaaagtatttctaatatgcagcaaggtttgagatcactggttaaaggtatagagtatgttataaatatattaaatgacttatttatttgatatttcacagaatagctaaagggaagtagtcatttcccctaaagaaaagatcggcatgtacagattagaggctacctgaakaattttcatagaaaagttggtagaaagaacatgagaatacttgagaacactcagggggtggggttagaaatgatgcttcagaggtgaggtcaaggatgaggaatgggagatggaggcacgaaaaccttactctgcctgtacctcttttttgcagaaggcagctgagggcatggtaatgagccccgatagatgagaaatgattacaaaaatgatgatgatgatgatgatgatgatgatgatgatgatgaaggtggtggtggtgaatatgaggaaagttaacaattagtgagccttcaatatatagtgggaactggatatttttcgtatttacttctcaaaaaaaaggtctatgaaatagatgtcaaatgagaatatctagtttctagtatgtagtggtcattataacccttatctcccttctatagacaaattggaatactttgatctttaataaatttcaaaagcaggagtaattaggataaaaaaattaattgactttcttgaggaattaaaagctggtcaagttataaaaattcttttctggctgggcacgcggtggctcacgcctgtaatcccagaacttagggaggccgaggtggacggatcacgaggtcgggagatcaagaccatcctggctaacacggtgaaaccctatctttactaaaaatacaaaaaattacccgggcgtggtggcgggcgcctgtagtcccagctacttgggaggctgaggcagaagaatggtgtgaacccaggaggcggagcttgcagtgagccgagatcacgccactgcactctagcctggcgacagagcgagactccgtctcaaaaaaaaaaaaaaaattcttttccaaactgcaatccttttactgaaagacagatagacaaatagacacacacacacacacacacacacacacacacagccctctcttatgaactattggcattaatatcatatgtttattaacgtccttaggaagaattcaagagcatgttttcagaagtcaaggtattttttttctagttgtctgtattgcagatgttctcacaataagaacgtccagttacaagtatgcaaggcgttgacctgatatcatgtggaacctggtggtcaaccagaacacttgaaatggaattcaaatccagatgtcaaggactatagacagaataattcagccctgaaactctattcctgagacaaaggttatagacaacttctgtccttcaaccttatccttgtaatagtttgagaaatttagaaagagtcatttcaatctatgtttaattgttaatctcttaatataactgctgcagttggttaaaaagtctcaattattttcttagaaactcgcttatgtaaagggagaaatgcttgaaagtccattcattttgcctctgaataatacagaccttccagacaaactatttaagaaatgtttcttaattttctcacttaccacttttgaataatataaaacaaatctgtgtttagcttctgccaagacaatgcattgaggacttccatcgttccctgggaatcattacattgttttggtttgcttgggttcag

SEQ ID NO: 671027 - DNA, 2049 bp, Homo sapiens
tgtcaaacatcagcattctctccaaaggccactgtaggaaaatatactgtgacaaagcaatctttgaatgaatgtgtgaacattcaagtcttggaaatctctggatgtctgtaatgtaggtagaagcatgctggtatatatgaagcagtagttttaaactctgcctatattttagaatcacaggggtaaaggaatgtgagaaaggctttaaaaaggaatttcaggatcccagcctcggagattatgatttcactggtctaattagagcctaagatttaggatttttatttggttttgtcttaatttatcaaagtatttctaatatgcagcaaggtttgagatcactggttaaaggtatagagtatgttataaatatattaaatgacttatttatttgatatttcacagaatagctaaagggaagtagtcatttcccctaaagaaaagatcggcatgtacagattagaggctacctgaagaattttcatagaaaagttggtagaaagaacatgagaatacttgagaacactcagggggtggggttagaaatgatgcttcagaggtgaggtcaaggatgaggaatgggagatggaggcacgaaaaccttactctgcctgtacctcttttttgcagaaggcagctgagggcatggtaatgagccccgatagawgagaaatgattacaaaaatgatgatgatgatgatgatgatgatgatgatgatgatgaaggtggtggtggtgaatatgaggaaagttaacaattagtgagccttcaatatatagtgggaactggatatttttcgtatttacttctcaaaaaaaaggtctatgaaatagatgtcaaatgagaatatctagtttctagtatgtagtggtcattataacccttatctcccttctatagacaaattggaatactttgatctttaataaatttcaaaagcaggagtaattaggataaaaaaattaattgactttcttgaggaattaaaagctggtcaagttataaaaattcttttctggctgggcacgcggtggctcacgcctgtaatcccagaacttagggaggccgaggtggacggatcacgaggtcgggagatcaagaccatcctggctaacacggtgaaaccctatctttactaaaaatacaaaaaattacccgggcgtggtggcgggcgcctgtagtcccagctacttgggaggctgaggcagaagaatggtgtgaacccaggaggcggagcttgcagtgagccgagatcacgccactgcactctagcctggcgacagagcgagactccgtctcaaaaaaaaaaaaaaaattcttttccaaactgcaatccttttactgaaagacagatagacaaatagacacacacacacacacacacacacacacacacagccctctcttatgaactattggcattaatatcatatgtttattaacgtccttaggaagaattcaagagcatgttttcagaagtcaaggtattttttttctagttgtctgtattgcagatgttctcacaataagaacgtccagttacaagtatgcaaggcgttgacctgatatcatgtggaacctggtggtcaaccagaacacttgaaatggaattcaaatccagatgtcaaggactatagacagaataattcagccctgaaactctattcctgagacaaaggttatagacaacttctgtccttcaaccttatccttgtaatagtttgagaaatttagaaagagtcatttcaatctatgtttaattgttaatctcttaatataactgctgcagttggttaaaaagtctcaattattttcttagaaactcgcttatgtaaagggagaaatgcttgaaagtccattcattttgcctctgaataatacagaccttccagacaaactatttaagaaatgtttcttaattttctcacttaccacttttgaataatataaaacaaatctgtgtttagcttctgccaagacaatgcattgaggacttccatcgttccctgggaatcattacattgttttggtttgcttgggttcag

SEQ ID NO: 671028 - DNA, 2500 bp, Homo sapiens
aatcagctgggtgtggtggcgcatgtctgtaaccccagctactcaggaaggctgaggcaggagaatcacttgaacccgggaggcagaggttgcggtgagctgagatcgagccattgcactccagcctgggtaacaagagcaaaactctgtctcaaaaaaaaatgctatagaagtcatgttttcccacaaatcttatcacaaccacacctgaattgccctccttcctgcttccaatcttttttttttttcactctgtcttctagaacaccgaaccaactttattgctctcctacttcaaagtgttggcacgcaatgcctacagaacaaagaacaaactgttttgtttttctctccaacttatcttttattgcttttctgactcacatgcaaaacctgatatcctcatccgattgttctaatgaagcccatagaagacttctctgccctctgctgcttatagctctttgtacactgggccaatgactagaataagtgacacctgctctcctttcccagycacccctattaaaaccatcaaggcccatttgagtcatcactttctctgtgaagcctactttgaacttcatcttctatactaaggagaaataaacactctttctttcacatttgtctgaaatgttgtccatccatatctctttttcaccatttctccgctacgacataaacaaattgaggacaggtgccatgttttatctccattgccagtatcctgttggacgtgggcagagaaacttccacatagtacgtgctcagcaaatatatattaaaaggagacaggaaggaaagaagaagggaaataaagaaggaaggtagaaagaatggataacgtaagacacttcaaaaaaaaaaaaaaaaaatcagtcacccagtccagtgcagtcatctacaggatgggaaggaaagcagcactcctttgctttttcttctatagatacagggagaaacagaaagagtttttaaaaactaattttgattagttatgaatgaatatctacctaagtacaagtaaccaagttaaaacaagtttaaaaataggaagatgggggccgggcatggtggctcacacctgtaatcccagcactttggggagtcaaggcaggcagatcactcgaggccagcagtttcagatcagcccgtcccacatggcaaaaccccatccctactaaaaatgcaaaaattagctgggtgtagtggggtgcgcctgtagtcccagctacttgaggctgaggcacgagaatcgcttgaacccaggagttggaagttgcagtgagctgagattgtgacactgaactccagcctgagtgacagagtgagactctgtctcaaaataataataataataataataatattaataataatgataataataataatgagaagtagttgctaatacctgggaattatttcagcttcttcataatatactcaataactatgcataaccaaggttagacattgaggtgaaaaataaaaattccttccctccccaaatgtgtccccaaatccagatgtttagcatagaggtagacaaaacatgcagatgactaaatttgttcattgtccattgatgtgttttgacacaatgggtgaggttatgagtctggagttgtacataaaagcccccatgcttatttatcctatagtttatataataagacagttgccaggaagtgaagagtgcaacagagttaaacagaaggaaatataaacatgatttcctttgaatagaagatatggaatgtcacttctgattgctagcatgagaactttaaaattttcccccaggagagattaataacaaaagaagaacttttttagttcaaggatacacttaatcttccaatatgctggctcaaggctatgccaggaagacctcttcaaatggtttgtgggttgtatagctttcaaggattggttatattactttctaaaaacagtttgaattaagagtctagaataccccatggtaaattttatttttcgaagttggccgcaatactacctctcatcccccatgcttttctcacaatatgactctgacacttttttcaaagaaatgtgggggctgtgttccctctccttgaacaagggtgactttgtcattattgtagaggtgtgactctatgagactcccaagtctaggtcatataagatgatacagcttaggtctgcttttcttgggtctctggctcttgacacccacccaccattgcataaagaaagccaaataattcatggagaggtctatatggggaatatctgaggcccccacccaggcagcccaaagtcctgaccaaattctcagacgacagccagaagaaatatgcctgcataacttgagtggctgcaattgatactgcatgagatcagttgtccctgccaagccatgcccaatttgctgatatgtaaacaaataaaggattgttgctagtttggggttgtttgctatacagcaactaataactggaaagattcc

SEQ ID NO: 671029 - DNA, 582 bp, Homo sapiens
taactcattgttttttcattgattccttaatattacgtgttctactaaaaatgttttcaaataatgaaacacatcatatcaaatgactgtattgcactaagcttacaaggcactttttatatatagtacctcatttaatcttattctagcaatggtgaattaggataggcacatatagagcattattactatcttctgcctctactaagactgagaaaatgcatattcatgacctttcagtattgctggtaaacaaaagttataaaattaatgttccttgaccccagggagctatgtctcagatatatagctagatagggaagagagtaattcacagtatgttcaatgaaacaggcctttgaaatgtccaggatgatttcagtgtaacagaaaaagctcacgacacttgaatcataaacgygctgaatcaattaaaaattttctgaaaaaaggtaggaccaatatgcatataaatttagattgcattctttggatgccatctgttcagtatcttgactttgacactaccacatttcttaaactttgtattgaagcctaacctacatacagagaagttcataa

SEQ ID NO: 671030 - DNA, 582 bp, Homo sapiens
taactcattgttttttcattgattccttaatattacgtgttctactaaaaatgttttcaaataatgaaacacatcatatcaaatgactgtattgcactaagcttacaaggcactttttatatatagtacctcatttaatcttattctagcaatggtgaattaggataggcacatatagagcattattactatcttctgcctctactaagactgagaaaatgcatattcatgacctttcagtattgctggtaaacaaaagttataaaattaatgttccttgaccccagggagctatgtctcagatatatagctagatagggaagagagtaattcacagtatgttcaatgaaacaggcctttgaaatgtccaggatgatttcagtgtaacagaaaaagctcacgacacttgaatcataaacgcgctgaatcaattaaaaattttctgaaaaaaggtaggaccaatatgcatataaatttagattgcattctttggatgccatcwgttcagtatcttgactttgacactaccacatttcttaaactttgtattgaagcctaacctacatacagagaagttcataa

SEQ ID NO: 671031 - DNA, 628 bp, Homo sapiens
tcagtaaaacaaaggataaatctatagctcatgttatattttggtttatagaaaaattacaataattacgggtcatttactttgttttttaaatttagaaatgatgaaaagctgtagttgacataagagtgattcctccctcaaagtggaaagcccagacgtatgaaaatccaaagagctatttggtagtgatggtggtaggaaacctcatccttgcaaacccaaacctactcttttcttttcttttttcttttctttccttttcttttcctttttctcttttctttcttctttctttctttctttctttcttcttttctttctctctctttctttcttctttttctttctttcatttatgtattagagacagggtctcactctgttgcccaggctggagtgcagtggcgcaatcatagctgacttcagcatcgaactcctgggctcaagygatcctccggcctctgcctcctgagttcctaggactcctaggcacacatcaaaatgcccagctacttttttttttcctgtagagatggggtctcactatgttgcctagggtggtctcaaagtcctgggctcaaggattcctcccacctcagcctctcaaagtgctgggattacaggc

SEQ ID NO: 671032 - DNA, 3175 bp, Homo sapiens
ctatcctctcaagatagtggtaccttaaatagctagcctctgcaattaatctggactgaaaaaaagttaggtgcaacaataggcttctcttttctatgtcttcatttttcaatttatcctgctctgttagtttttatgtgtaggaaggaaacatttattttaatctaagaaatatttatgtcttataatctagtaatagaagaagacaaaaaagatgtgatcttgaaaatatgaataattaaaatcaaattttgcaggccaactatttttctgagcatgtgtttctgtgtgtgtgtgtatgtgtgtatgtgtgagagagagagagagagaaagagagaaagaccaagagaaagataggtgtaaaggagagagagccttttctcataactatttttcctagcttaatattttaattgagagatattctagcacaattctacagtaatacaggcttgtattggataaaatacatgcctgacagacatgggagatggtaaaaggccctcttggttaagtactttctaagaggaaagatttagctgactctgaagcccaaataaaataatgcttgcaccctataatatatgagtccattttgaatttacataaatttctttaataccatgttttaatttatcttcttttcttaaaacatttcacaacattaagatcattttttccctaatttcagcccatgaactaattcaacaaatatttgttatctcctacatgccaagcactatacaaaatggttgaagaaatcttcactctaattatggcctaaaattataaaccctaagccatttaacctctttggatgtctgtatttatatctccaaaataatggccgggcatggtggctcacgcctgtaatcccagcactttgggaagccgaggcgagtggatcacttgagctcaggagttcaagaccagcctggccaatatggtgaaactccatctctaccaaaaaatacaaaaattagccgggygtcgtggcacacacttgtaatcccagctacttgagaggctgaagcataggaatctcttgaacccgggagtcggaggttgcagtgagctgaaatcgcaccactgcactccaggctggacaatagagtaagaacctgtcgagaaaaaagaaaaaaaaagaagagacttactctcctctggatttttaaaattttttttaacatgaaaccttctcaaattatatttttttctcatttctgacagaatcagaaatatttttctttcttaatcctacaagaaaaaaataatacaaacacaatgatcaatgtcaacagacaagagtattgccaacccacaggggagtgccagggtggcctcactctagcaagctcagccgcacctacaaggagcacctgctactaaggctggtctctcccatgctgaaagacaggcccagtgctgcctaatattccaaattttcaaaagaagcccaacgtatagatttttcatttgaaatatacctacttagaaactttggcaaccaattcaaaaaagtctaagaacttaatttgggtcattactgtcgagaacaaacaacacacaattgaggcagcttcagcctgggagttgtcagtttgagactttgggactaggagatctctgagatctttttctacttaaatagttctatgactttcattagaaggccttgaggcttggatcagagtggcatgaagccaattaaaatcacagctgcaactgccagaagagacagtctcagtgttatatgcatcctgaaaaaagaatcgtcctaagagaaaccattcattatgtttaataaagtagttggtaacaagaagctaggaagaagatcattaaatctaaattagatgatgtgtatttttaggtgtgggttataattctcctgagaactgtggaacaaccgacctctgatatttcacattagtagggattgaaattgatatattttctgaaatggaaagaccactttggtacattattgatcaaatttttacatcatcagcactcacaatcagagagaaggtgcagaacaggtccttgagagcactcatgggaccatattacattactggtcccattggttcagtagacacatggcttccattgtgatacacatccaccattgtgttagcttaaggcatctcaaagtgaagacaggcacctagttacagagttccggagaacatgaatttatatcttggcaaaatgtttattagttgtgtgaccttggacaagttacttaaaatctctggactcatttttttctcctgccagatagaaattgtgaatattaattaaaacatacatgtagatccgggcaaggtgactcacgcctgtaatcccagcactttgggaagccaaggcaggaggatcgcttgagcccaggagttggagaccagcctgggcaacatagtgagaccccatctctctctctccctctctctctctccatatatatatacacacatgtaaaagactgacataaggtaggtatattcagcaaatgttgcaaatgttgataaaatgaaagaatgtaagtaaccaattggttttgtttagaagaatccagaaaatctaagacagagtttcttgtgagaatatcctaacacactagagggttagaccagggtaggaaaaggctgtagctagggtctgtgcataggaaattacacataacccagagcttatcttatctttgcagcagccagcctgcccaaatctgaacaaactcatggaggtgtcagacatactgggaaaattcaaagatgcttttcacatttccagaaaaaaaatcctttattatttgtgtgcttttttgtatctcaagtcataactaaagcccaactgaatagcccactttattctatcacattattcaggtagaaattaaagcagaattgatacagctaaggggtagcaaggccggacactcatgctgtccaagctcagattaagccaagaattcaatttagtttatgaaaatgtcagagactgtctctgttacagctactctgacctcatgagatcttctccattgacaactccataaaatcaccacagtggctagcttctaggccaccatagtcctttaaataatagctaaaacaagacacaagaacagttatcaagagtagaactgaaggtcaggaggaaatttttggctaat

SEQ ID NO: 671033 - DNA, 659 bp, Homo sapiens
tgagctcccagatgccacacttggccacaaagatctgcctggatacctcatccatttggctgtatgtccaaattttatcttctcaaggaagctaatgctttctataacatgcaccttgaaaagcaagaggcaggtatcctcctctttggggatcayccagatcagtctgggagctcccaccacttccttctcaagcctgggggtttatgctctccccttctttcggcagtaataatgggatagtttttttatttttatttttttttggtgggggcaggaatcagattactgaaaaggaaaatatatcagaagacatatccaaaatgtcattcccattttgagtttcggaataagaggtgaaaagaagacccaggtgaggttggaatggatgggagaaatgaagaggtgaattccttgatatacattttggagaaaacaaactgcttatcatatttaaaaagatgcttgaaggctgcttttatagctgtctctagggctgctttaagtggttgacacacacacatacatggcacacatatatgcacatgtattaacacatacacacatggtgtttgccattactaataactaggagggcatggccactctacttttataaccagggagataatcattgttctttttaaaaatcagaattt

SEQ ID NO: 671034 - DNA, 1178 bp, Homo sapiens
caagccatttgggggctctgctcaggtgtctcaagctgtggggaaagaataaggacatgtttcccccatactacttttaccccttcaagaagaagaggcaggctcattatgtctctaggtggattttatagttctggatttgagcctaaaagttgcatgtggttttcaaatacttattttatcacactccatgattacctccattatgtgtggctaacattgagtcttttcagatttagtagggatataaaaggtttaaataagaccaatatcagatgtgtctgggattccatttcttgcatgcgcactgtaaataaacgctaatgaaaaatatttgagttccaaattctgccaccccaaatcctacaaatatgcacattaaagccccataatcccataaaagcctttttacttgtaaataacactatcttgttttccatctcaaatttcttctcctgtaattacacaatatttggtttcccctttttaggcaattcaaattaaaacttatttcatttcataattacaaacattcattttgagtaaagactaatctgacgggaatttggttccagtgatattgtaacccagacttataatagcaaagcaatccatctcctgactaatgtcttggaatcttttacaactctaccccggctaaacatttgcctttggaaagttttatccttttccttgaaataataatgctttattaagagcacagtgtgatttgagttttttaaaaataatgatttaaatcaaagacttcaagatataaagaatttaaagggtgagccattctaccctcttagttttgggttattttataactcccatgagctttagagtggaacgttgcttagaaaaatgttcattattaagttaggtttcaactgtttcctgaaaaaaggagaaagaaaatattctttgtctgggtatcataataggtgataattttgaaatactagataaagtatatgttattgctattccgagtatagatagagtagaataagatcatggctgactgatcatttaggcatagagagttaatatctaggaaaacacagtgttcattaaaatgagagaaaaacatcacatggagtgtttgcagagtgatcattgcttatctattaaygtataaaaaccactccaaaacatggtggtttaaaacgatg

SEQ ID NO: 671035 - DNA, 1178 bp, Homo sapiens
caagccatttgggggctctgctcaggtgtctcaagctgtggggaaagaataaggacatgtttcccccatactacttttaccccttcaagaagaagaggcaggctcattatgtctctaggtggattttatagttctggatttgagcctaaaagttgcatgtggttttcaaatacttattttatcacactccatgattacctccattatgtgtggctaacattgagtcttttcagatttagtagggatataaaaggtttaaataagaccaatatcagatgtgtctgggattccatttcttgcatgcgcactgtaaataaacgctaatgaaaaatatttgagttccaaattctgccaccccaaatcctacaaatatgcacattaaagccccataatcccataaaagcctttttacttgtaaataacactatcttgttttccatctcaaatttcttctcctgtaattacacaatatttggtttcccctttttaggcaattcaaattaaaacttatttcatttcataattacaaacattcattttgagtaaagactaatctgacgggaatttggttccagtgatattgtaacccagacttataatagcaaagcaatccatctcctgactaatgtcttggaatcttttacaactctaccccggctaaacatttgcctttggaaagttttatccttttccttgaaataataatgctttattaagagcacagtgtgatttgagttttttaaaaataatgatttaaatcaaagacttcaagatataaagaatttaaagggtgagccattctaccctcttagttttgggttattttataactcccatgagctttagagtggaacgttgcttagaaaaatgttcattattaagttaggtttcaactgtttcctgaaaaaaggagaaagaaaatattctttgtctgggtatcataataggtgataattttgaaatactagataaagtatatgttattgctattccgagtatagatagagtagaataagatcatggctgactgatcatttaggcatagagagttaatatctaggaaaacacagtgttcattaaaatgagagaaaaacatcacatggagtgtttgcagagtgatcattgcttatctattaatgtrtaaaaaccactccaaaacatggtggtttaaaacgatg

SEQ ID NO: 671036 - DNA, 606 bp, Homo sapiens
agtgggcatagaaggacctatctgacaggttgagcaaatcattaaaaggtgaggaattccaagtgttaaaaggtattactaatttctaaggtgttgaaggtgtttgttctatgggctaaataatagcaaatggaagggaattatcccccatttaattgtttagtccatatgtccgaatcttttgtctgatactaagcacaaaatttatagtctttttacatttatacacatgtattggcttccttttacactattaggcggtcaagaagcagatcgagacggcggtcacattctaagtctaggagtcggcgacgatccaaaagcccaaggcggagaagatctcattccagagaaagaggtagaaggtcaaggagcacatcaaaaacaaggtatagcattgggtgagaaagcaaattttagggttcccagtacccctagtactgtgctacttagtaacaaaagakgtggttggggtgcggggcagagaaatagggctagacaggggaagaaactgtcaatatttgagtttgaggaggctgacgtttgctttctggtgcttccttgtaaactgaaacttcagcttacagctgagggcctaagtaaaat

SEQ ID NO: 671037 - DNA, 1343 bp, Homo sapiens
acagtctgtggtcacgggatgccacagtgcatcagggaatggcacagatcagcagacctggtctgtgctgggtggagagttgtacctggaggttcctctcacccagcttccgggctcaggggttcttgttggaggtgacaattgctgtagctggtaggtttccagatggcagagacagaacgtgccccgccctggagcttctcaggatctgactcaaggctgggaacacccatccctactgcctgccttttgctcagtcccccaaccaggccatccccattgccaaggccatcacaggctaaggaggtccacagagccctggggtgaggctgctgctcctagtagctgccccctcccttctgaggcagccaccagcccagctcagctggacatcaacgagaagtgactccacctgctccctctgtccctgtgcttggggtaaactccagcccttcagaggattcccaagatgccatccagtcaatagccaaaggccagataggcaaacaacaaaacggacaatgccaccagcttttcttggaggtttctgaactctgggaacagagctgcctctggggttcctggcagctccatgtgccaccccgcccctccccgcccctcctgcccttctgagaggctcttttctcactccgtcccccctgccatctcactgcttcagcctgcactccctggacagctgctgtgggcactagaccgtgagccccgcctagggcaggtactgctcccacctcatctctggtgcccaggcatcagcacaggagaggtttgcagagaggagaagaaatgacgaatgcgtggagggatggtgaatggtagaagagagygagatggagagagaaagagagagagagagaggatgagaggacgaggagagagagggagggttgggtgctaggcccagtcctgggcagagtgagtccatctccaatcagaaggacccccggggctgccagtcactcccggtggcctccttgtcagtcctgccccgaggtgctgggccccacctggccaggaaggcctcaaagggcacacgcacggggaagttggcactgcgggtgccacggcctccagtatggctgcctggtgcagttgctctgtcacatgtcccacgtcaaagaggcctggaagctgtggccacaagacagagccaaagacagctggagtcaaggggcctagagctgtggggagggaggtgcagggagggggaggccctgaggccagttgctggggagctcacctttccagggttaggggtgaggcactggatgaaatagacatggctcctgatgagggaaagaggggtcactcgggcacagactgga

SEQ ID NO: 671038 - DNA, 657 bp, Homo sapiens
gatgctgttcccatgcatggctggttatcaagcacttttctcaagtaataagaaacattttccagtgctatttctttccttgcttgtgagtttctgacaaatttcttaaaagctttccattgtggatgtgtgagatgagaggacatttgatggcaataagatggaggcatcttggaagaattttagttaaacagtttggatgttactttctagatctttgactaaaaatgttatgaattgaatgagtttgaggataggaaggctaatataataataacttgtggtgcatagactctaagtgttaactgtggcaagctttgaaagaaagattggaagggtgtagggagtggtatctgggtgtggttgcaaaagaaagtgtggacattaatagacgcgattaggggtagtgcgagacaaaaactactccmggcaatacgaaaaagtcagccacttcagttatgcagacagaaagctcactgaccagtgtcaaataaaaaggaaatttggactgaaagaagaagatactttatttgaaaggattattacaagagtggtgaaagggatgattataggtggaggaagataatagggagatagcttccactatgagatctggtaggtctcaaaagttgagcaaaagacagattttcttttaca

SEQ ID NO: 671039 - DNA, 657 bp, Homo sapiens
gatgctgttcccatgcatggctggttatcaagcacttttctcaagtaataagaaacattttccagtgctatttctttccttgcttgtgagtttctgacaaatttcttaaaagctttccattgtggatgtgtgagatgagaggacatttgatggcaataagatggaggcatcttggaagaattttagttaaacagtttggatgttactttctagatctttgactaaaaatgttatgaattgaatgagtttgaggataggaaggctaatataataataacttgtggtgcatagactctaagtgttaactgtggcaagctttgaaagaaagattggaagggtgtagggagtggtatctgggtgtggttgcaaaagaaagtgtggacattaatagacgcgattaggggtagtgcgagacaaaaactactcccggcaatasgaaaaagtcagccacttcagttatgcagacagaaagctcactgaccagtgtcaaataaaaaggaaatttggactgaaagaagaagatactttatttgaaaggattattacaagagtggtgaaagggatgattataggtggaggaagataatagggagatagcttccactatgagatctggtaggtctcaaaagttgagcaaaagacagattttcttttaca

SEQ ID NO: 671040 - DNA, 1176 bp, Homo sapiens
tagtatctttatagcagtgggaaaatggactaatacaggcatcaaattggaaactcactttctctctgctatttgcaagttgggcactcaaaatgtgtggtagtcaaatcagtcttggttggatgaaacacagcttgttgaaattatgcttacacaattttgcctctatcctttgctataaccactttataaatgtgttcattgaagaagcagcaaagcagatggagcaagaaaattrgcattccaaggattgttcattttatctaactgattattaagagtggaagacatcagcagctatttcaagaagtttatctacatacctttttccagatctcatcttcaacaatcttttcaatgtactctacatatgtcactgagtggcttggcaatctattaatcattatatagaaggcaattattaatagatccattcctcaggccatcttttcttctaatcgaagtggaaaacaaaatatcttgtgtttaaatttttcactctgggaaaatttctcatcacaacttctgttcagtatattgttcagaagcctctttaatgtcatgcctttttttccttttctattaaaaaaagaagttataagtgttgttttagaaggaaatggcaaaacatcaaaactaattaccataagaattgaagatgcctacttttgaatcttcattgtgcctttgtgacctgcttgaacgtggtgtcatatgaatggtttctttttatgctatagcataagttctacttaatggtctgatgtatcatatgccacttagtttgtgataggcagtgtatcaatgtacttagtgtcctagattaagcattaatttttctactgaatcacaggtataagtcctgagctactactagagaaagacagtttttagcaaaacaaacaaacaaacaaacaaaaaaaacagggagcatagctttgctccaacactctaagaatctggactatgattttcccagtagattttttgagagactccatatagtcttcttatctgctgtagattcatcatcaaataccattgtgtccactaatcgtaaggacagaacatctggacctgctcgaggcattccttcctcatccttatttaatgttggagaccacatcgattaataggtagctgatgagaatcccatccatatgccaaatttgttac

SEQ ID NO: 671041 - DNA, 750 bp, Homo sapiens
atgaccctgctttggttgtctgtctgtttttaaactactactttgttgatatataatcagatactggttttagtaatgatttaagagagaaaaaatctcatgcttcattttgcttgcttttaattggggaaaaaatcatccttttacaaacaaatggggatctcactttaattatgtgactctttgtacataattttacgtaaaattagtcaccctgaatgcatactttaaaaggactagctatagctaattgaccaacagtgaattttcaaagcgatcagtccaattactgtctgccaagatgcagagatcaaacgcggttttctctttttcatagtcctaaggtttgtaggagcagaacatttatactcagaataacttttttaatgcagtaaacttaatgaaataaagttctcatyttaactaggagaagcaaaagaacataaaagaagttatctgaataaataaaagtatattaattttcgttttgcaggaccccttgaatcaaaccggtaacagtataaaatgttagcattgaaaagaaccttagtgactgcactagtccagtctcttaattttgtagatgagacaatcaaggctgaagaggtttcaagagaggtttctttccatgatcaatttttttttggagctaagtacttggagttatttatttatttattattgtgtatatttaaggtgtacagcgtgatgttttgatatacatagtgaaatatttactatgttcaatca

SEQ ID NO: 671042 - DNA, 1798 bp, Homo sapiens
ccacacgtgctaatgacaaatgccaagtgctgctatgtatttcctcagtcttctttgcatattaatttccagttgcagtaacttgtttacagtttcacgacctacttggtccactttaccctgcgccggcaatgcttccttctgtggccacacgctctctgcagatgtggccatcctcagccgggcactgctctaccacagcttatcgaaccaatccccttgattacactcctccgccccatgcctgagctctggaaatgacacgctaggagtcccttcgtacctacgtcaaccaacatttccaatgacttctgcagaaatttccaatgacatttgtacaagtggaatttttctcaggagaacttttcaaagctctcaatacaaactcaagagaggtttgaccagggttccaaagctctagaaatgtattatgcatgcccctgttcctcaactacttattttaccctgctaaagtatgtgtattttaatacttttcccagtgatttttggactaacagggatttttaaatgatctgacgttaccatcctgtgctgtacagggatatgtccctggggcccctgagccattttctcctgcatggaagagcctcagagtcaaaagttctttcagttctgatgcttttgttttcctagaaattttcaactacatgtaacctgagcaatgactaaagctggmccctcaggtgtcagcatggctccccgcaaggtggcagtgacgccatgaggagggcgaggccacagggggccacgtggcttggttcattcaagcccatcctgactcagcggacgaagactccagcaagggtctcccagcttctgggtcaagggctgttctctgcacaaacaccgtcaacccccacactcatttctccctctctgtagttctaatcatgtcaaagctgaatggcctctctgattattactgtggggtggggagggagacatttctccctcacttcttgtgtttcacagacaagagagaattctacatcagcccaggaagaaaagcttgagaagagggacccttctcatttttctccatcctctcttcaggccaggactgagtatccagtaattttagaggaaaaaaactgaaacccccagtgatgccccttggggctcccacgctcccgtcttcctgcagaggttggactcaagggccttgtgggcaggctcgggtgtgatgggggagggccagctagggtggtgatgaacacacagaccctcccacaaacaatgctgggcacttacgcaataggtgcaatagcttcttggcacacctgccgcttttctgtagtatcacggacttggggctctcattaagagatgccgccattccaatgaccaccatcactggttttccgatgttgaatttcccttgacctggccagcccgagaggtgcttcccttccatctctgaaagcacccgtgcttctgacaaggcgatctgggctccatttctgccccccgccttagcattctgcacgttctttaacctgctgactccagaaatctgctactgtctggaaggagaagccacaaagacgcaaaagacagacgtgctcctgagcctgttacctacctgcacttctctgggtgctcatcgcgcttgttgttaaagtccagggatatcttcgcatccaggccaatgccaaaatagttgttcatgacacatttctccgtgtaatactctctgcaaaggtgagttttaaatcaattacaacagccctgctgagcagtcttatttcagactcccaacctctcagcatttctcttc

SEQ ID NO: 671043 - DNA, 1798 bp, Homo sapiens
ccacacgtgctaatgacaaatgccaagtgctgctatgtatttcctcagtcttctttgcatattaatttccagttgcagtaacttgtttacagtttcacgacctacttggtccactttaccctgcgccggcaatgcttccttctgtggccacacgctctctgcagatgtggccatcctcagccgggcactgctctaccacagcttatcgaaccaatccccttgattacactcctccgccccatgcctgagctctggaaatgacacgctaggagtcccttcgtacctacgtcaaccaacatttccaatgacttctgcagaaatttccaatgacatttgtacaagtggaatttttctcaggagaacttttcaaagctctcaatacaaactcaagagaggtttgaccagggttccaaagctctagaaatgtattatgcatgcccctgttcctcaactacttattttaccctgctaaagtatgtgtattttaatacttttcccagtgatttttggactaacagggatttttaaatgatctgacgttaccatcctgtgctgtacagggatatgtccctggggcccctgagccattttctcctgcatggaagagcctcagagtcaaaagttctttcagttctgatgcttttgttttcctagaaattttcaactacatgtaacctgagcaatgactaaagctggaccctcaggtgtcagcatggctccccgcaaggtggcagtgacgccatgaggagggcgaggccacagggggccacgtggcttggttcattcaagcccatcctgactcagcggacgaagactccagcaagggtctcccagcttctgggtcaagggctgttctctgcacaaacaccgtcaacccccacactcwtttctccctctctgtagttctaatcatgtcaaagctgaatggcctctctgattattactgtggggtggggagggagacatttctccctcacttcttgtgtttcacagacaagagagaattctacatcagcccaggaagaaaagcttgagaagagggacccttctcatttttctccatcctctcttcaggccaggactgagtatccagtaattttagaggaaaaaaactgaaacccccagtgatgccccttggggctcccacgctcccgtcttcctgcagaggttggactcaagggccttgtgggcaggctcgggtgtgatgggggagggccagctagggtggtgatgaacacacagaccctcccacaaacaatgctgggcacttacgcaataggtgcaatagcttcttggcacacctgccgcttttctgtagtatcacggacttggggctctcattaagagatgccgccattccaatgaccaccatcactggttttccgatgttgaatttcccttgacctggccagcccgagaggtgcttcccttccatctctgaaagcacccgtgcttctgacaaggcgatctgggctccatttctgccccccgccttagcattctgcacgttctttaacctgctgactccagaaatctgctactgtctggaaggagaagccacaaagacgcaaaagacagacgtgctcctgagcctgttacctacctgcacttctctgggtgctcatcgcgcttgttgttaaagtccagggatatcttcgcatccaggccaatgccaaaatagttgttcatgacacatttctccgtgtaatactctctgcaaaggtgagttttaaatcaattacaacagccctgctgagcagtcttatttcagactcccaacctctcagcatttctcttc

SEQ ID NO: 671044 - DNA, 599 bp, Homo sapiens
atatactgcgaagcaaaacgtacacactcaggggagtgcaggcctactcaagagtcacacgcaacggggtttggggctgctacccttatgggtttctttaaccaaggggtggaacattcatgaaaattcctggaaaaaggtggaaatttctcagaacggcagtgccayccatttttataccaaatatgggtcttcccggaactttcatggcactggtggacttagtgttttaatgcacatataatgagttcctaggagaaacccaggtaaaatccagctccatgttgggtccagttggtcttagccagcttggtccacatgctggttttttaaggtcttagtccttggcttctgtagctatttcaagtttccttttgctggtcatgtgaaactgctgcctggaattttctattctactgcaactatactatattattcctgtctcagacgggccctgtgagaatatctggtccaaccttctttcctctgcaccccattttatagagggaaaaaattgaggcccagaaggtaaagcagcctacatgattagtgcaatgaacacggtttccaaaaccataaaagcttcatttaatttcatt

SEQ ID NO: 671045 - DNA, 599 bp, Homo sapiens
atatactgcgaagcaaaacgtacacactcaggggagtgcaggcctactcaagagtcacacgcaacggggtttggggctgctacccttatgggtttctttaaccaaggggtggaacattcatgaaaattcctggaaaaaggtggaaatttctcagaacggcagtgccacccatttttataccaaatatgggtcttcccggaactttcatggcactggtggacttagtgttttaatgcacatataatgagttcctaggagaaacccaggtaaaatccagctccatgttgggtccagttggtcttagccagcttggtccacatgctggtttttyaaggtcttagtccttggcttctgtagctatttcaagtttccttttgctggtcatgtgaaactgctgcctggaattttctattctactgcaactatactatattattcctgtctcagacgggccctgtgagaatatctggtccaaccttctttcctctgcaccccattttatagagggaaaaaattgaggcccagaaggtaaagcagcctacatgattagtgcaatgaacacggtttccaaaaccataaaagcttcatttaatttcatt

SEQ ID NO: 671046 - DNA, 969 bp, Homo sapiens
tcagtagttgtggagcaagagtaggtttacctcaacccaaactttggttcttaaaatgtttaatgttataggcgttttactcacatcaagaaaataatgacaaaaaaaaaaaagaaaataatgactacttcccttccttacaaggtatattgagattgagtacaatggaatctgtgctacccagtatgcacagtcatatggagarataaaggacttaacatcggactgactgatgtgtagactttatttctctcaatctaatctgctctagctctgtagacaagtgtctgacctatactttccttcctatgccatcaggaaggattcaaatgcccagttaaattcagtcctcacaaaggaagtttatttggatggctaacaatccttctccatttagactcaatataagaaggctaaacttggatctaaattgtaaatctgtctttggcttgagggtgggcacaacacaaagtatgtggttagagagaataatgagaccagtaactgaaagacataattaacatcaatccaccctccttcaattaattaagtctccttcaaatatgcttgattaaaaattttaaaattcaattttggggtactatttggacatatggctatttactaggagattgtcatgcccattgatatcaggaatggcaaggacttcatgataaagtgtggcaggacagctctactgctgaggaaaaggatagaaactgggttccaggcccagctcacagatttgttaacactagagaaatacaggtactaggaagaaactttagctctcatgtgcaataggatggttcaacccgataagaattgtttgcagagaaacaaccatttgaagaaccaacaactcaacctgagagctgaaggctagaacacaggtgtttggatttgcggtgagccctactttttgtcacctgctggtcagacttcaacttcggtggctagtcactacca

SEQ ID NO: 671047 - DNA, 969 bp, Homo sapiens
tcagtagttgtggagcaagagtaggtttacctcaacccaaactttggttcttaaaatgtttaatgttataggcgttttactcacatcaagaaaataatgacaaaaaaaaaaaagaaaataatgactacttcccttccttacaaggtatattgagattgagtacaatggaatctgtgctacccagtatgcacagtcatatggagagataaaggacttaacatcggactgactgatgtgtagactttatttctctcaatctaatctgctctagctctgtagacaagtgtctgacctatactttccttcctatgccatcaggaaggattcaaatgcccagttaaattcagtcctcacaaaggaagtttatttggatggctawcaatccttctccatttagactcaatataagaaggctaaacttggatctaaattgtaaatctgtctttggcttgagggtgggcacaacacaaagtatgtggttagagagaataatgagaccagtaactgaaagacataattaacatcaatccaccctccttcaattaattaagtctccttcaaatatgcttgattaaaaattttaaaattcaattttggggtactatttggacatatggctatttactaggagattgtcatgcccattgatatcaggaatggcaaggacttcatgataaagtgtggcaggacagctctactgctgaggaaaaggatagaaactgggttccaggcccagctcacagatttgttaacactagagaaatacaggtactaggaagaaactttagctctcatgtgcaataggatggttcaacccgataagaattgtttgcagagaaacaaccatttgaagaaccaacaactcaacctgagagctgaaggctagaacacaggtgtttggatttgcggtgagccctactttttgtcacctgctggtcagacttcaacttcggtggctagtcactacca

SEQ ID NO: 671048 - DNA, 631 bp, Homo sapiens
cacacacacgtacacacacacatacacacagacatgcacacaacacactatttttggtataataactgactcttttagttctgccattccctaagattgtctttaactggatggtcaaggtagaattgcttatgtccatgttctacttcatgaatagatgggaaaatactctagggaaggtcattttctgtaatttaagatagtctggaattcaagtacctgacttctactcccatttcaaaaacccaaaattagacacatggccactcctagctgaaacttaactgtctgagagttagggtgagacagctataagagcttraggaaagacgtgataaaatataatcatcaaaaaacagaaaagtaaattgatgggaaacaatataattgcagatagcatttgtcttagtctgttagtgttgctataaacaaatacctgagaatgggtaattttaaaataaaagatgtttatttggctcacagttttgcaggctgtacaaggagcatggtgtaagcatcttcttggcttctggtgaagacctcaggctacttccattcgtgatacaaggcgaaagggaggcagcatgtgcagagattacattgtaagagaggaagcaatggagagagagtg

SEQ ID NO: 671049 - DNA, 597 bp, Homo sapiens
ggcatatgaaatcaaaaaaataaaacataaaactaatgttttcctgttgttgcaaatgcttttcctgttctaaagcctgatgtagggagagaagtgtgacatattgtaataagcacatttgaggaccacacaatctgcgttctagtcctgttactaccatgtaatagtgctaccctactgtaagggttttcacctttggcaatgttgacattttggtctgggtaatttattgttgtgggggccgtgtgtgtttagcagcatccctgacctctacccaccaaatgcaagtagcacccccttctccagctatgacaaccagacatgtgtccaaacactgcaaatgtctcctggaggacaaaatcacctacggttgagaaccactgtgttcgcgagacagtcactgtgttcatgagatggttctgcttttcctcttttgtaaaatgaagagatcatatctctgtcaaaatgttgttaattaaatgagatatttattgttaataaatatcttctacagatatttattaatattgaccaattcatttttaactaatgggttttgcctttaygtaaccacttgcttggggtttttctaactca

SEQ ID NO: 671050 - DNA, 694 bp, Homo sapiens
tgtgggcccagtgttggataggaattgcccctggcatctcttaggaattttccctttactctcttctccttatcagcaggcagctcattacattctaacaggttaagtgcagagtgcatgacttcagggcatctytacaggtattcctttctgcttagatatttccctttctctctgctcatatctagtatgtaagttcgggtggtctttggcattttggtttttccagatctcccttttctaaggggctctccctttttgtttctgtctagctatctgtctactgtaactaaatcattttgaaaatggctaaacacaataccactgtaaaggagcatacggaggcctggatcaatgtacttaatgcttctgagccttggttcttcgactctaaaacgggaatagtcatgctttctctgccctttccacattacttttgtagcagttctgtaagaaaacgtaacaacttatttttttagccatacatatctttaacagctttattgaggtataactgatatgtaaaaagcggcatatatgtaatgtatacaattctatgagtatagacccatgaaactgtcgccacaatgaaggtaataagcatatgtatcacctccaaaagtttcctcatgcttctttgcttttgtttttatctcatggcaagaacatttaacgtgatatctaccctcttaac

SEQ ID NO: 671051 - DNA, 584 bp, Homo sapiens
atatatacacatatatatacacacacacacacacacatatatatatacatgtatatatatrtgtgtgtgtgtgtatatatatatatatctcaaaagagggctgggcgtggtggctcatgcctgtaatcccagcactttgggaggctgaggcagggagatcattaggtcaggagatcgacaccatcctggctaacacagtaaaaccccgtctctactaaaaatataaaaaattagccgggagtggtggcgggcgcctatagtcccagctactcgggaggctgaggcaggagaatggcatgaagccgggaggcggagcttgcagtgagcccagatggcgccacagcactccagcctgggcggacagagcaagactcggtctaaaaaaagaaaaaaaaaaacaaaaaacaaaaaaaaaaaccagaatgtaatatgttcagtgccctagtacctgtaggaaactggatgctaatcttgttttttatttcacaacttaaatttacaaaatcacaaaactaaaatcagaagacagggaaactaggaaaatcctagctggcttaagcttgggagagagaaaacttttttct

SEQ ID NO: 671052 - DNA, 1260 bp, Homo sapiens
ctaaatcattaattttggagagtgaagcagaactaggacattcttttgctttttaaatatcatttaagttatttaacattaatatactatactcattgcatacataaatgattgaaaaagtgaactgataagctaggaaatcaaaagggggatttataagcaagaatggattgattagtccattgtgaaatattaatcaaatacctgcatatactgttacttattcaaattgtactcacaattggaatcaattagcctctggaatttgaaagccggtttctaccaatccgatccatggggataccaaatcgcctttttggatgatctactactttcctgaaacaaaccaaggaggacatttttaaactaaagggcaagttatygatcattatttttgttctttattttatgtagctctgggggctttctttgggagttggaataaacatgatagttcccactcaccagtactcactatgtgccagacactatctcatattttcaacatctgtgggagtagatattattagctccattttacatatgaggaaactgaggcttagagaagttaacttattcaaattcaaatagaccaaaccaaaagccaggtcttatcagcatacgaatctgccaactaagtgctttagtttgagaaaatcccgtcccccttcaaattttatttttctgttattttgtgaatattaaactggataagtagtttttcacaaactttgcttcagaatggctcatctaaagaaggatgatggtgggagaggaaagagtatgatgctaagactgaatgtagaggtaaatatacctctcatgtcttcccttagactccacccagagaagctttgtatgtgatggtcgacatttgcttatattctctttgttaaatactgtttgaaataaattaaacatcttcattattaaaatgaagtataaaaagtccacacagtactaccaaaggtctaatataacttccagcttatattttctatcaattacccctttaaaaataagatgcattttagaaacttttcaatttgatttgctaatattatcatcacttagttctatcaagccaaaatcctaacaagagaggatccagagctttgatcgtataactttcactggccttggagttaagagaagtgtgaatctttatgaagaaagagacagcagggagagtctaagaagcctatgtaaatcagtgatttatctcacagaaaaggtaactggcttataaaattgtgaggc

SEQ ID NO: 671053 - DNA, 979 bp, Homo sapiens
cctcgacctcccaaagtgctgggattacaggcgtgaaccgctgtgcctggccagctgaggttttcacaacctttcttcaaccttccacatgctgcttcctattcttcaaactccaactgtaagagggtgacctttgagtaagatctgtctttgacgccgtggcactgtgtatttcaggggctagctgggctcattgtgtatttattccacgatttccaaggccaagttgttagtcacttaaaatagggcatccatttttattttatacccaaatcataaaagattgcttaaagtcaagcagtcaagcaggcttgtagtggtgtctccataatcatctcagaagatttaaagcaccagaggaagctgayaaattctgtttaaagctaagcataagcatggtctaatgtagactgaatcaattcagttaaaacatccaccaggaaaacatttaaaaaggtgatggctttctgcccctaagccctaagtagcagtcctgagtagtaagttaaaattagaatttgttaaaagtatgcagtatgtttatgaagggtaagggatatttgaaagcaatatttaaatatttttaaaacatgtctgatgcagaagagaagatttcactttctctttagagttactgaggcgcaagataagagtaggaaagttcacccggccatgtatattttactgcaaacatgtcattttagacatctttcaaaatgtatctggaatatggaaaacagtcctactgagctattgtttggcatagctcattgacatatttatgtttgcaaaatcaatcagatcagggcaactgtgagttttgggtttttttttttttcctgtttgagagaatggagtcttggagatttcagtaaaagtaaaaataaaagaaatgtgcaatgcattttgcctattatgttgcccttaaaattaagaaaaaaaaagacagaaaaagggagaaattaggagaatgatttag

SEQ ID NO: 671054 - DNA, 606 bp, Homo sapiens
tgcagactccatcatgtcagtttccatttaccaaaatggcctgtgaaagtatttgcctcctccagtagaatataaggtgctcaatgtcaagactgtcttattcgtctttcaattctagatgccttggttagcatagaggttagctcagtgcctggttgccagtacgtactcaattaatgtttgctggattcaaccactacccactctcaaggagagatacatttatattgcacttatgctatctatatcctatttctccaattctttaatgcttagacttgttcctttagcagcakatgtattatcttatttgatttgttcagtacttctacatattaaccagaccactgtcactacatatcggggaaggaaacaaagaaaaaagatacaatttgctaccggaaatcaccagtcagcacaaagctatagtgagctcttaagcctgtctctctctttttcttctcttctttcccctgtcttctctcttccttcttgttctcttccttccctccctcccttcttttctcactccccacaccagaaagggataatgatggtgcccagatcggtctagaaccctgataactatttcttgaaggatggcag

SEQ ID NO: 671055 - DNA, 1207 bp, Homo sapiens
tgtaaatatttattgagcatctactgtatgaagggcaacctattagatttttctcacagtactgaaaatataattcgatgaattaaaaaggaataaacaaatcccaacaaaaggtgaaccatcagtgatatagtaaatggcctcagaaccttttatactttaggcctatattaacactgatgggaggcatcaggtcaggcttcatgggagaagcctagtatttgctgaagacttgaaagatgagtgtgatgtgaacagaggcaaaggcagagaaacagtgttccagaaagaggaagcagcatattaagggtatattagtataacactgtttgtcaagctcaaaccktactagtggtctgataaggtaggagatcagacttcttgtgaataggcccaaatgagagtgaaagtgacagggaggtgctcgtatcaggaactttaaccctagtccacgtatgaaatagtagttagctcacctggagcatctttgcgtatgattcactttggagaaaccattggaagaaaattaactgaacataacctgaaataactctccccaaatgtgggggagaaaagtagttcagctagcagaaaaacagtggagacatttttgggttgttccttaaagcacaaattgacaagagacaattttaccgaagatagaacaggccttaatatttaagcaaaacattcaaaataatatcccactgactgaaggcaggcaggcattacaaacacaaactcataacatgaaatgctcacagggatagttaacatcaccctccatgggccagtctcattcagttggtctcacaaatttacagtcagtgattccaagcagaaaattcattaaaatcaggaaattgcttaattagtttaaagtcacaaacacttctaaaaataaatttttggactacataaattccaaacaaattcatcacaatcagaactgttgcagtacacctacaatgactaggaaattaattcacaataatgacatgtcaaattgtatgtttcttaacttgttttacctccttctaaaaagaacctacttgttttaaagagtgttgtatttctgcccatcctcagttgcaataattgtgtcaacttgagagcatgctgacttattgccaacttattttgtcctctcctttattgccaaaatatgcttgtagatgttattgtagactcttccatgatagggatg

SEQ ID NO: 671056 - DNA, 1207 bp, Homo sapiens
tgtaaatatttattgagcatctactgtatgaagggcaacctattagatttttctcacagtactgaaaatataattcgatgaattaaaaaggaataaacaaatcccaacaaaaggtgaaccatcagtgatatagtaaatggcctcagaaccttttatactttaggcctatattaacactgatgggaggcatcaggtcaggcttcatgggagaagcctagtatttgctgaagacttgaaagatgagtgtgatgtgaacagaggcaaaggcagagaaacagtgttccagaaagaggaagcagcatattaagggtatattagtataacactgtttgtcaagctcaaaccttactagtggtctgataaggtaggagatcagacttcttgtgaataggcccaaatgagagtgaaagtgacagggaggtgctcgtatcaggaactttaaccctagtccacgtatgaaatagtagttagctcacctggagcatctttgcgtatgattcactttggagaaaccattggaagaaaattaactgaacataacctgaaataactctccccaaatgtgggggagaaaagtagttcagctagcagaaaaacagtggagacatttttgggttgttccttaaagcacaaattgacaagagacaattttaccgaagatagaacaggccttaatatttaagcaaaacattcaaaataatatcccactgactgaaggcaggcaggcattacaaacacaaactcataacatgaaatgctcacagggatagttaacatcaccctccatgggccagtctcattcagttggtctcacaaatttacagtcagtgattccaagcagaaaattcattaaaatcaggaaattgcttaattagwttaaagtcacaaacacttctaaaaataaatttttggactacataaattccaaacaaattcatcacaatcagaactgttgcagtacacctacaatgactaggaaattaattcacaataatgacatgtcaaattgtatgtttcttaacttgttttacctccttctaaaaagaacctacttgttttaaagagtgttgtatttctgcccatcctcagttgcaataattgtgtcaacttgagagcatgctgacttattgccaacttattttgtcctctcctttattgccaaaatatgcttgtagatgttattgtagactcttccatgatagggatg

SEQ ID NO: 671057 - DNA, 640 bp, Homo sapiens
ctcagagggtgacctcttatcaagataggtggggtttcatgacacatttctaaaagcctaaaattaactcagatgtcttggtctccagttagcctcatgttctatgtgagcttcaacgagcatctaggtttctagagcatccttgatatttcgcctgttaacagtagagggtacccctcagcagggatgcaacttgtgtcagatactgctgtaaccattttacatagatcacctcgtttacagtcacaatccagagtagcagtattactattttatcaatgagtattagataagtaatttgcccaaagccacccaggtagtaattggtgaagctgagatttaaaacctagtttatctggctggatgcggtgactcatgcctataatcccagcattttgggaggctgaggcaggcgaatcacgaggtcaggagttcaaggccagcctggccaacatggtgaaaccccatctctactaaaaatacaraaattagccaggcatggtggcacgcaccttagctccagctacttgggaggctgaggcagaagaatcacttgaacccaggaggcagaggttgcagtgagccgagatcacaccactgcaccccagccttggtgacagagcaagattgcatcaaaaaa

SEQ ID NO: 671058 - DNA, 1438 bp, Homo sapiens
tcagaaactgttccccctctttacctcttcaggcctcagggttcaataatgctccctactactactagtcccagagtacctcgatgaagctgccacccacacctttgaaagttgtgcctttactctcttccattactcaatatgagygtgcatctatttcccacctagatcctgattgaaacagagacctttacaatttactgcgatttcatccatttaatattagtctttgctgtgtccaagaccagtttttctacattattttaacagaagaaactctaccaagttactgctcataagcatatggtataatttctgtaactcaggtggaatttgtaaccctttattcaacagcaattctaagttgcgagtaatttccattttaatcatggagaaaaaatctagattaattgcgcgtgacagaattaggtaatgtcattaccatctctgtatattgtcagagccattggggtcaagaggcttcccaatgatgaataaattgcttgactgcctggtgttggttgacctaataatttttaaagtagttattgtatccttaaattattcaggtgccatgaagaacatagatgagatgaagatagatctgtttgctgtgatagtagattaaccatctaaaaccatctttcagaagttttggttcttttatgaatgggttgggtagaaactcactagggttaaaatcaatactggtatttcttttccccaagtgtacattctcctaaaatccaagtcttaagagtacctgctaggagtcgagaccaaaaggccttatattttataaaatggttctctatatcgaaaaaataaatgcataattggctttatgttgtgcaatagacatagtcttaatgaaagttttgggaaaaaagcaagaattacagattgattcctttcaaactcttttatcttgaaccgcaaatatgattaatacatccggctgtttaggtaaggttctttggagattgatataagacaattgtaagaaaaaaacaaatttcaaatatggatttaacaatatacttattaccacacaaaagttgtttacctattcaagagacataacttggctattgctgaagttagccttttatgcataataaatcatcccaaaacttaataggattaacgttcatttaacctgtaagtctctttttcaggaatttgggcagggctcaggtgggcagttctggttacatttgaattgattcaagcatcttcagtcggcagtcaggccagttgagagctgactagcctaggatcacgtctactaggagaactcttctcagttccacatggtctctcttcctccagcaggttggctgggcttgttcatagggcagctgggtagaactccaagaaagccagtaggagcatgaaataaaggcacaatatcacttcctccactttctatgggtat

SEQ ID NO: 671059 - DNA, 1438 bp, Homo sapiens
tcagaaactgttccccctctttacctcttcaggcctcagggttcaataatgctccctactactactagtcccagagtacctcgatgaagctgccacccacacctttgaaagttgtgcctttactctcttccattactcaatatgagtgtgcatctatttcccacctagatcctgattgaaacagagacctttacaatttactgcgatttcatccatttaatattagtctttgctgtgtccaagaccagtttttctacattattttaacagaagaaactctaccaagttactgctcataagcatatggtataatttctgtaactcaggtggaatttgtaaccctttattcaacagcaattctaagttgcgagtaatttccattttaatcatggagaaaaaatctagattaattgcgcgtgacagaattaggtaatgtcattaccatctctgtatattgtcagagccattggggtcaagaggcttcccaatgatgaataaattgcttgactgcctggtgttggttgacctaataatttttaaagtagttattgtatccttaaattattcaggtgccatgaagaacatagatgagatgaagatagatctgtttgctgtgatagtagattaaccatctaaaaccatctttcagaagttttggttcttttatgaatgggttgggtagaaactcactagggttaaaatcaatactggtatttcttttccccaagtgtacattctcctaaaatccaagtcttaagagtacctgctaggagtcgagaccaaaaggccttatattttataaaatggttctctatatcgaaaaaataaatgcataattggctttatgttgtgcaatagacatagtcttaatgaaagttttgggaaaaaagcaagaattacagattgattcctttcaaactcttttatcttgaaccgcaaatatgattaatacatccggctgtttaggtaaggttctttggagattgatataagacaattgtaagaaaaaaacaaatttcaaatatggatttaacaatatacttattaccacacaaaagttgtttacctattcaagagacataacttggctattgctgaagttagccttttaygcataataaatcatcccaaaacttaataggattaacgttcatttaacctgtaagtctctttttcaggaatttgggcagggctcaggtgggcagttctggttacatttgaattgattcaagcatcttcagtcggcagtcaggccagttgagagctgactagcctaggatcacgtctactaggagaactcttctcagttccacatggtctctcttcctccagcaggttggctgggcttgttcatagggcagctgggtagaactccaagaaagccagtaggagcatgaaataaaggcacaatatcacttcctccactttctatgggtat

SEQ ID NO: 671060 - DNA, 1438 bp, Homo sapiens
tcagaaactgttccccctctttacctcttcaggcctcagggttcaataatgctccctactactactagtcccagagtacctcgatgaagctgccacccacacctttgaaagttgtgcctttactctcttccattactcaatatgagtgtgcatctatttcccacctagatcctgattgaaacagagacctttacaatttactgcgatttcatccatttaatattagtctttgctgtgtccaagaccagtttttctacattattttaacagaagaaactctaccaagttactgctcataagcatatggtataatttctgtaactcaggtggaatttgtaaccctttattcaacagcaattctaagttgcgagtaatttccattttaatcatggagaaaaaatctagattaattgcgcgtgacagaattaggtaatgtcattaccatctctgtatattgtcagagccattggggtcaagaggcttcccaatgatgaataaattgcttgactgcctggtgttggttgacctaataatttttaaagtagttattgtatccttaaattattcaggtgccatgaagaacatagatgagatgaagatagatctgtttgctgtgatagtagattaaccatctaaaaccatctttcagaagttttggttcttttatgaatgggttgggtagaaactcactagggttaaaatcaatactggtatttcttttccccaagtgtacattctcctaaaatccaagtcttaagagtacctgctaggagtcgagaccaaaaggccttatattttataaaatggttctctatatcgaaaaaataaatgcataattggctttatgttgtgcaatagacatagtcttaatgaaagttttgggaaaaaagcaagaattacagattgattcctttcaaactcttttatcttgaaccgcaaatatgattaatacatccggctgtttaggtaaggttctttggagattgatataagacaattgtaagaaaaaaacaaatttcaaatatggatttaacaatatacttattaccacacaaaagttgtttacctattcaagagacataacttggctattgctgaagttagccttttatgcataataaatcatcccaaaacttaataggattaacgttcatttaacctgtaagtctctttttcaggaatttgggcagggctcaggtgggcagttctggttacatttgaattgattcaarcatcttcagtcggcagtcaggccagttgagagctgactagcctaggatcacgtctactaggagaactcttctcagttccacatggtctctcttcctccagcaggttggctgggcttgttcatagggcagctgggtagaactccaagaaagccagtaggagcatgaaataaaggcacaatatcacttcctccactttctatgggtat

SEQ ID NO: 671061 - DNA, 1438 bp, Homo sapiens
tcagaaactgttccccctctttacctcttcaggcctcagggttcaataatgctccctactactactagtcccagagtacctcgatgaagctgccacccacacctttgaaagttgtgcctttactctcttccattactcaatatgagtgtgcatctatttcccacctagatcctgattgaaacagagacctttacaatttactgcgatttcatccatttaatattagtctttgctgtgtccaagaccagtttttctacattattttaacagaagaaactctaccaagttactgctcataagcatatggtataatttctgtaactcaggtggaatttgtaaccctttattcaacagcaattctaagttgcgagtaatttccattttaatcatggagaaaaaatctagattaattgcgcgtgacagaattaggtaatgtcattaccatctctgtatattgtcagagccattggggtcaagaggcttcccaatgatgaataaattgcttgactgcctggtgttggttgacctaataatttttaaagtagttattgtatccttaaattattcaggtgccatgaagaacatagatgagatgaagatagatctgtttgctgtgatagtagattaaccatctaaaaccatctttcagaagttttggttcttttatgaatgggttgggtagaaactcactagggttaaaatcaatactggtatttcttttccccaagtgtacattctcctaaaatccaagtcttaagagtacctgctaggagtcgagaccaaaaggccttatattttataaaatggttctctatatcgaaaaaataaatgcataattggctttatgttgtgcaatagacatagtcttaatgaaagttttgggaaaaaagcaagaattacagattgattcctttcaaactcttttatcttgaaccgcaaatatgattaatacatccggctgtttaggtaaggttctttggagattgatataagacaattgtaagaaaaaaacaaatttcaaatatggatttaacaatatacttattaccacacaaaagttgtttacctattcaagagacataacttggctattgctgaagttagccttttatgcataataaatcatcccaaaacttaataggattaacgttcatttaacctgtaagtctctttttcaggaatttgggcagggctcaggtgggcagttctggttacatttgaattgattcaagcatcttcagtcggcagtcaggccagttgagagctgactagcctaggaycacgtctactaggagaactcttctcagttccacatggtctctcttcctccagcaggttggctgggcttgttcatagggcagctgggtagaactccaagaaagccagtaggagcatgaaataaaggcacaatatcacttcctccactttctatgggtat

SEQ ID NO: 671062 - DNA, 656 bp, Homo sapiens
tgtggcccactcaaactgtttcgtctcattgttaactagaaattccttttgaaattcattgccttcaattacattttctaaaagaattttaattgcatggctctaaagaataaagatgctctargctccatttgtttatcatggaggggcctaaaaaatgaggacagagcttcccagctcatgcaggggttgcagagagagggagatgacttttaattcgacaagttcagagagatttcttagtttgacgcgctcagcagggggtctttgagcgcctggcaatgcttcagcattctgagctttgaaagtctttccctgcagcagaaattgtatcaaaagccaatgataatattccctgcaaggtaaagcaccctattgaagatttcgagagctgtttatttattcatcacagttttccttttaggacgtatcaggcatctaggtaataattcacatagatgatagaaaatgcaataaatcctcctcattaatctttcaccttttccttcttctacttctctgtaggccacgtgtagatataaaatggtctttctgcttgtcccaaacatgtatatctttatactgaatctcagtttcttcccctctttttccatttttaaacaaaattgtcatttcagtctaccttctaccaccag

SEQ ID NO: 671063 - DNA, 1317 bp, Homo sapiens
tgcatgggttgtagggggtgagagagcaaaagagtgcaggcaagttctctggtgtctcttcttataagaacactaatcctatcaggtcaggatcctgccctcacaaccccatctaaacctaattacctcccaaagactccacctctgaataccctcacatcagggttagggattcagatgtraattttgggggaaacagtctgtagcagggagtagggggaggggaccaccctcactctcatgtattcacattacaggcttgatgcaacagaaggaaactagagattttcccttattttgtgggaaacggacacatggaggaaagtgatgcctccaagctggccctggtcggggagtcagtggcagagcaggaccagagccgagtcccctgattttaggatcttttgcccagtgtgagatgccctggaaaagcacatctcagttcagctgcttcttggtttgtctgagaaaaagcctatattaagttagcaaaggattggctgctgctagttttattacgagaaaagccaggaagcagtgtaattctatctgtcggcttctggttactgtcttggcagatggccactgtggctttctctctctggggttggggttggttttaacaacgtcttatgtggagccccagacgcaggattgctgtctgtcatcacggcagaggtgcaagtccacagaacacgttgccccactgttgctgcgccacagacttatgtgactcacctgtgtcagcgtgcagggctgctagacagggaccctaaagacccgtgctacatcctaaaacttctaatcatcctgagcacacgctgcagaatccattcacgatgagggtttaattaaacacataggcctgggtccttatgtgtaaaaggaggagaatccttctttgagaggaaaaatgttttctttctccctcttgagatttcttacatcctcccacctatttcacttaagtgatggctcctaatggagtctgtctttactctcctctctgggtttgaatctaggtacttccttaagcgcttggttcctttaccctcgttctctacaaatatttactgtgtacctgcattgtgcggggtgctggggatctctggggttgatgcagattcggtttgtgccctgacagtgtttaaagcttctcggggaagaaggatagcagagacagcgtccattccttatggtgagagtggtgatgtgagaaggatggagccgtgggagcaccccctagtctagagaaagagaagtttaatccaacacccagaggagggggctgtgggagcctcccctagtctagagaaa

SEQ ID NO: 671064 - DNA, 609 bp, Homo sapiens
ctctgagttcaaaacacctcctggttacctcattgggctcagctgcacataaataggatttttacctcaagattcacagagaatgtgatctctagggatacaytaatttaaaccaaaatatttttttaaaagtatttcatgaaatttttcataatgaaattttacttgtgtatttttatttttttgtttttgttctttttcttttttttgtattttttgtataagtatttttaaatatggaaagaaacttttattgcagaatctgagcaaaatattttcccatagtggaacttggacacattgtttaaaattgcttgaaataaatgaccactgatggaatcttaaaaggagtctttgttttgatgagggtttttattattttaaggaacatttgaactgcataaataatcttcctaacaaataatttggtataaatgagagttcccagtccataccagaggaaacaaactgagtaagggaaagatatacaatattcttgaaaggaaaaaatgttgagtgagatgccaatttttcccaatttaaacttatggaaatgttaagcaaaatatacaataatgtccaatttcaaaaatggactgagtagtataa

SEQ ID NO: 671065 - DNA, 2238 bp, Homo sapiens
gcaaataagtcaagtatggaattaaaaatgcataaattgtctaacaatggagtaattctgaaattcagattaactaggctttttcaaaatttattagggaaggggtaagggacattcatgctgtatgaatccatctctacatataagatacctaatgggtgtcctataaatattcattggtgatggtgartaaggctgtctggccatccgtggagaaggaagcaaacaagaacactgggtgtagctatagtatcacattactgggtcatcaatctccttttacaatatgttagcaaaatgccatggtcctgctttccacttcctcttggatatgacaaaatacttgcacttaaacattatacttttatggtctaacaaccacctctagcctttgcaccttttcctgacttttaattcgtgctgacagtatttgaatacgaatttaaaatgagtagaaccttcttagaaaaaaatgaattaactacactgtaataaacactaaacaaaacttaaggcactcctctaaaagcagtatctgaactgtcctgagtttgcatgttagtttgttaatattgatgccacttgaactgtaattgtggttatgcattctcggtgtggttgttctagaaaagcgaaataagtagaggacattatagagtagagaaggtccatcgtaaagataggaatggtattcatcccttacatagtctaaatagttttctttttacactaatatgtgccagtgataacaaactcttttgcagcatatcaatatttctcatcttcttaatcaatctgtcaatcaaacaatgagcaactatttcttctctgtatatcagacactctactggtcctcaggggatacaaagtaacataagatccaatctccaccttgtgagctgaggaaataagctatttaaagctagaaaaggtaaaatcattaccaagtaacacataacagaagtgacagaaacagagaagagaggttttgtcatctaaataaaaatggaattagagggtaacaaaccagaaacttaagacaaatgtttcttacaatgcttttagtttggtttaaggaaacactattaggaaaaaagtgtaaaaagtgtgaaatgggcaaaattcaatagctttcttcgtgtctcgctagtttcatttttctttggtgttcatcaaaattcacaggcaatccaggtgtagccaagatgccttgacaagatttctgaggaaagtgactttgataatcaagttcaagagtattccaagactggaaattgtcctacagaaatgctactggtgcagctgctctttatttagctgcctgccgtgtctctcgtacctatcctgggtcttcttgggcctccagttaatcagcaattctttattgtgcctttggtctctctctctctctctcaagggtaatggtgtggttctggtatttttgaaatggaagtggaaaatgtggagagtatattctcaggctgcccctagctattcaaggttacacttgtatttcacaaaggctttgttttcagtgaaatattgtctattgctctgtgagcctctcataacaatcaggcacaaagatatcttgactgacacctgtctggagtttcacttaatggatgccttcagttttcagatgccttgactgcattgaaatatgtagtttgggtgaaaactttctgagctttccttttcttttttttcccctttgaattgatttattgaaaaaatagtttgaagaatgtgaaatcacaagagacaaaaattgtcaaagtgaaagaggagaaaaaaattagaaaaaaaaaaagctctgttaggtaggttcatgtgtgtacacgttagggatgtcccaggcttggtgttttgagcaggtaatctctttgctgaaacttttaggaagagcacacattcctcaaagagattatttatacagtcaagctaacctaaataccaataagcactaattgaataggagtaggaataagtagattgacctttaaagaaaattactttacatcctttataaccttgctaatgtaaattcttcatttttaactatgagtcaattaacggctcatcatttaaaaataatagcatctgtttgtttctgattatttttggactttaaaattattcagtttttattgtacaaaatcaggaaaaatagaactaaaacatcaataaattaatcattctaagataattaatttataagaaagttatatttctttt

SEQ ID NO: 671066 - DNA, 2238 bp, Homo sapiens
gcaaataagtcaagtatggaattaaaaatgcataaattgtctaacaatggagtaattctgaaattcagattaactaggctttttcaaaatttattagggaaggggtaagggacattcatgctgtatgaatccatctctacatataagatacctaatgggtgtcctataaatattcattggtgatggtgaataaggctgtctggccatccgtggagaaggaagcaaacaagaacactgggtgtagctatagtatcacattactgggtcatcaatctccttttacaatatgttagcaaaatgycatggtcctgctttccacttcctcttggatatgacaaaatacttgcacttaaacattatacttttatggtctaacaaccacctctagcctttgcaccttttcctgacttttaattcgtgctgacagtatttgaatacgaatttaaaatgagtagaaccttcttagaaaaaaatgaattaactacactgtaataaacactaaacaaaacttaaggcactcctctaaaagcagtatctgaactgtcctgagtttgcatgttagtttgttaatattgatgccacttgaactgtaattgtggttatgcattctcggtgtggttgttctagaaaagcgaaataagtagaggacattatagagtagagaaggtccatcgtaaagataggaatggtattcatcccttacatagtctaaatagttttctttttacactaatatgtgccagtgataacaaactcttttgcagcatatcaatatttctcatcttcttaatcaatctgtcaatcaaacaatgagcaactatttcttctctgtatatcagacactctactggtcctcaggggatacaaagtaacataagatccaatctccaccttgtgagctgaggaaataagctatttaaagctagaaaaggtaaaatcattaccaagtaacacataacagaagtgacagaaacagagaagagaggttttgtcatctaaataaaaatggaattagagggtaacaaaccagaaacttaagacaaatgtttcttacaatgcttttagtttggtttaaggaaacactattaggaaaaaagtgtaaaaagtgtgaaatgggcaaaattcaatagctttcttcgtgtctcgctagtttcatttttctttggtgttcatcaaaattcacaggcaatccaggtgtagccaagatgccttgacaagatttctgaggaaagtgactttgataatcaagttcaagagtattccaagactggaaattgtcctacagaaatgctactggtgcagctgctctttatttagctgcctgccgtgtctctcgtacctatcctgggtcttcttgggcctccagttaatcagcaattctttattgtgcctttggtctctctctctctctctcaagggtaatggtgtggttctggtatttttgaaatggaagtggaaaatgtggagagtatattctcaggctgcccctagctattcaaggttacacttgtatttcacaaaggctttgttttcagtgaaatattgtctattgctctgtgagcctctcataacaatcaggcacaaagatatcttgactgacacctgtctggagtttcacttaatggatgccttcagttttcagatgccttgactgcattgaaatatgtagtttgggtgaaaactttctgagctttccttttcttttttttcccctttgaattgatttattgaaaaaatagtttgaagaatgtgaaatcacaagagacaaaaattgtcaaagtgaaagaggagaaaaaaattagaaaaaaaaaaagctctgttaggtaggttcatgtgtgtacacgttagggatgtcccaggcttggtgttttgagcaggtaatctctttgctgaaacttttaggaagagcacacattcctcaaagagattatttatacagtcaagctaacctaaataccaataagcactaattgaataggagtaggaataagtagattgacctttaaagaaaattactttacatcctttataaccttgctaatgtaaattcttcatttttaactatgagtcaattaacggctcatcatttaaaaataatagcatctgtttgtttctgattatttttggactttaaaattattcagtttttattgtacaaaatcaggaaaaatagaactaaaacatcaataaattaatcattctaagataattaatttataagaaagttatatttctttt

SEQ ID NO: 671067 - DNA, 617 bp, Homo sapiens
tgacttgtttagaaaaagytgatctcataggagcagagtagagtggtggttaccagttactgaggaaattgtggggaagaaggggtgggaacatgttggtcaaaggatacatatttgcagttagataggagggataagttcaagagatttaattgtacagcaccatgaccatagttaacaacatattgtattcttgaaatattctgagagagtggatgtaagtgttcttataattacatgaggtgatgctcatgttaattagctagatttagtcattctgcaatgtacatatgcacttcaaaaggtcgtgtacatggcataaaatttatctgtcaatgtaaaaattataaataaattgtccatttaacttgtagaaattttttgaaaactcaaaaaaaattcaacttgcttataagaatattcaaaataaagttatgccaatatacaatttcttccttataatattgcataaaatgcataagattgaaaacatcgtcaattctcaaattcattttggaagtgcctattatcaagaaattccttgcagaaataaaagtgctataagtcctatggagtagatttagcgatatgtatccagattgaatatacatgtacat

SEQ ID NO: 671068 - DNA, 564 bp, Homo sapiens
tcatttgttttattctttttctctgaaataatacaaataaactagaaaaaattaaatagttgttcagagtaaaatgttttgtccatgaaagtacaaaggttagaacggtaatttgtgctgttagttgaatgttcttcctgctatacctttacaccagcttatctttggtttaaacccccaaagaaagaattatcatattatgtcaactaacatgcagagtgtgttttatttaagtcacaatataaagggtgaaacagtcatgcttaccactaaaagaaaacaatctgytggcatcgaagttgagaaatatcaattgggatttgctaaagtatttgtttttgttttaatttttttgaaacagagttttcctcttgtttcccaggctggagtgcaatgacgcgatctcggctgactacaacctctgcctcctgggttcaagcagttttcctgtctcagcctcttgagtagctgggtttacaggcgcccaccacacccagctaattttttgtattttttgtagaaacggggttttaccatgttgcccaggctggtcttgaactcctg

SEQ ID NO: 671069 - DNA, 641 bp, Homo sapiens
acactaacagacactaattctataagagcacatcctgctttcaattatcccaaagaagatttttgaataattttgtttagccaaaaaatgagaaaaaaaactagagagaatagttacaataggaaaaattgcaaacacacataattccctcaagctgcatatatatcctgtatcttattataatagctgaatttgcttggatttggtgttttctaagtgaacttacacaaagttgcatttgtttagaataattttagtatatttttagtataattcaggggtactagagaaattctagtgacacccatgccaactgcttgctaatatgtaacatttttgccaaaaaagctcagtccattactgttgagtaaaatttgcaaagccctgggaggaaaaatgtaacatttcaccaatcacttagaaacatcttttctaacgttggccgtaatcacacattatatattttcggtttaattgtaaaactaccccttccatacactataatctcatgagatgaactrttatataactttagttcattacaaatccccattgtttaatgaggggtctacacttggtaggaacttgaaaaataatggttgaaaaatgtgtaatcctccttattcccaatggataaaaag

SEQ ID NO: 671070 - DNA, 1951 bp, Homo sapiens
aagttaaatcttggggatatgggtgtggacagggctggtttcttctggggctctgatggtaaaatttgcttccttgccttttctccttctagggagcctgcattccctgcctcctagtggcttcctcccatcactcgaacctctgtttccagcctcaggattcctaatgtgactctgacgtttcatctccygtttatgaggacgcttctgattgctgtgagtccacttgataacccaagaaaaacatgcatcgcaaggtccttaaattaatcacggctgcaaaatgccaattatcataaaaggtcacattgacagttcccagggatcaagatgtgaacatactggggacgagggccattattttgtatatcacagacgtctcccatgtggatagtcctctactagttactacattgatttagacagatgtcttctatcgccaaaggacttacaatgcatatagagggacagacttacagtagtgtgagaagtgcagagacatatgggagtgctaggtagtccttgagcacaaggaatcatagctaccatggtgttctggtgacatgaggagctacaagggaacgcacaaggtaagactagtgaaaggacagggagtagaagatgagccttgagaaaatggtcaagttggtgaaaacaggaaaggagtttcccataaagaaatatggggaagaaagaagagtttcccaggcagaaatatgcgggtggtgatgagggtgggggggacatgagggagctcattgaggtcaggagaagttagcgtttacacaagaaaatgaagatccatgagccccatggaacaaggaccagataatacaaaactcttcatatgagtctgagagagtgggtctcagctcatcaatatcacctaggaacttttaacatctctgatgtctagatcctttatcaggtctgcttgacaaaaagtgggtcctggttataggcagtgatgatattaataacattttattttaatgcacgttcaggctgaaaagcatactggatttttaaacacttaaattttatgtggagcatactagaaaactaacaaataattttaaatcatccaggtctgacatgacatagttatatttctactttcagaagatacatacggtgacactatggaagttaacttgaagattaaaaccctgaaaaatagaaagaatcttctatggtatatcacagagattacaagggcctgaattagagtggtgacattttcatcccttgataatggattaaaaacaattgaatgaagctttggggtgaacttacaggactttatggcaaacttcatatgggagacttacatgaagggaggaagaaatgcgtatgtgtacaaaatcatgtggatagatgtgcatttgtgggtatctgtgaatacaaatacacaattttcagacagaagtagtataagaaaaggaaatcaaacaaagtcaaacattttaagtgtagctcttggtgcactttaaaaaattattaaattgaagctgtagtttattctcatcattgtcatcctatattagtgattttctttagcttttgaaattaaattcataatattacaattctgaattcctatgtatgtatatgttaagaatcctttaatgggactgactttcatatgtgtgtggctgcattctgaaatagttgtctagttgatacataaagcagtgagtgctatttgtaagatatatttatatttaaagtcttcatacagttattaactagctccaatattactgaaatgatttctccaaatatcctatatttaattatcatgctggcaaatttattataactttggtttgaaaaaatatattatgatacatatccactgactaatgccacctatctgctttcctgaattcaaagtttatgattatttccataaatgtatttatcagtataatcaaaaataaaaataaca

SEQ ID NO: 671071 - DNA, 1951 bp, Homo sapiens
aagttaaatcttggggatatgggtgtggacagggctggtttcttctggggctctgatggtaaaatttgcttccttgccttttctccttctagggagcctgcattccctgcctcctagtggcttcctcccatcactcgaacctctgtttccagcctcaggattcctaatgtgactctgacgtttcatctcctgtttatgaggacgcttctgattgctgtgagtccacttgataacccaagaaaaacatgcatcgcaaggtccttaaattaatcacggctgcaaaatgccaattatcataaaaggtcacattgacagttcccagggatcaagatgtgaacatactggggacgagggccattattttgtatrtcacagacgtctcccatgtggatagtcctctactagttactacattgatttagacagatgtcttctatcgccaaaggacttacaatgcatatagagggacagacttacagtagtgtgagaagtgcagagacatatgggagtgctaggtagtccttgagcacaaggaatcatagctaccatggtgttctggtgacatgaggagctacaagggaacgcacaaggtaagactagtgaaaggacagggagtagaagatgagccttgagaaaatggtcaagttggtgaaaacaggaaaggagtttcccataaagaaatatggggaagaaagaagagtttcccaggcagaaatatgcgggtggtgatgagggtgggggggacatgagggagctcattgaggtcaggagaagttagcgtttacacaagaaaatgaagatccatgagccccatggaacaaggaccagataatacaaaactcttcatatgagtctgagagagtgggtctcagctcatcaatatcacctaggaacttttaacatctctgatgtctagatcctttatcaggtctgcttgacaaaaagtgggtcctggttataggcagtgatgatattaataacattttattttaatgcacgttcaggctgaaaagcatactggatttttaaacacttaaattttatgtggagcatactagaaaactaacaaataattttaaatcatccaggtctgacatgacatagttatatttctactttcagaagatacatacggtgacactatggaagttaacttgaagattaaaaccctgaaaaatagaaagaatcttctatggtatatcacagagattacaagggcctgaattagagtggtgacattttcatcccttgataatggattaaaaacaattgaatgaagctttggggtgaacttacaggactttatggcaaacttcatatgggagacttacatgaagggaggaagaaatgcgtatgtgtacaaaatcatgtggatagatgtgcatttgtgggtatctgtgaatacaaatacacaattttcagacagaagtagtataagaaaaggaaatcaaacaaagtcaaacattttaagtgtagctcttggtgcactttaaaaaattattaaattgaagctgtagtttattctcatcattgtcatcctatattagtgattttctttagcttttgaaattaaattcataatattacaattctgaattcctatgtatgtatatgttaagaatcctttaatgggactgactttcatatgtgtgtggctgcattctgaaatagttgtctagttgatacataaagcagtgagtgctatttgtaagatatatttatatttaaagtcttcatacagttattaactagctccaatattactgaaatgatttctccaaatatcctatatttaattatcatgctggcaaatttattataactttggtttgaaaaaatatattatgatacatatccactgactaatgccacctatctgctttcctgaattcaaagtttatgattatttccataaatgtatttatcagtataatcaaaaataaaaataaca

SEQ ID NO: 671072 - DNA, 1951 bp, Homo sapiens
aagttaaatcttggggatatgggtgtggacagggctggtttcttctggggctctgatggtaaaatttgcttccttgccttttctccttctagggagcctgcattccctgcctcctagtggcttcctcccatcactcgaacctctgtttccagcctcaggattcctaatgtgactctgacgtttcatctcctgtttatgaggacgcttctgattgctgtgagtccacttgataacccaagaaaaacatgcatcgcaaggtccttaaattaatcacggctgcaaaatgccaattatcataaaaggtcacattgacagttcccagggatcaagatgtgaacatactggggacgagggccattattttgtatatcacagacgtctcccatgtggatagtcctctactagttactacattgatttagacagatgtcttctatcgccaaaggacttacaatgcatatagagggacagacttacagtagtgtgagaagtgcagagacatatgggagtgctaggtagtccttgagcacaaggaatcatagctaccatrgtgttctggtgacatgaggagctacaagggaacgcacaaggtaagactagtgaaaggacagggagtagaagatgagccttgagaaaatggtcaagttggtgaaaacaggaaaggagtttcccataaagaaatatggggaagaaagaagagtttcccaggcagaaatatgcgggtggtgatgagggtgggggggacatgagggagctcattgaggtcaggagaagttagcgtttacacaagaaaatgaagatccatgagccccatggaacaaggaccagataatacaaaactcttcatatgagtctgagagagtgggtctcagctcatcaatatcacctaggaacttttaacatctctgatgtctagatcctttatcaggtctgcttgacaaaaagtgggtcctggttataggcagtgatgatattaataacattttattttaatgcacgttcaggctgaaaagcatactggatttttaaacacttaaattttatgtggagcatactagaaaactaacaaataattttaaatcatccaggtctgacatgacatagttatatttctactttcagaagatacatacggtgacactatggaagttaacttgaagattaaaaccctgaaaaatagaaagaatcttctatggtatatcacagagattacaagggcctgaattagagtggtgacattttcatcccttgataatggattaaaaacaattgaatgaagctttggggtgaacttacaggactttatggcaaacttcatatgggagacttacatgaagggaggaagaaatgcgtatgtgtacaaaatcatgtggatagatgtgcatttgtgggtatctgtgaatacaaatacacaattttcagacagaagtagtataagaaaaggaaatcaaacaaagtcaaacattttaagtgtagctcttggtgcactttaaaaaattattaaattgaagctgtagtttattctcatcattgtcatcctatattagtgattttctttagcttttgaaattaaattcataatattacaattctgaattcctatgtatgtatatgttaagaatcctttaatgggactgactttcatatgtgtgtggctgcattctgaaatagttgtctagttgatacataaagcagtgagtgctatttgtaagatatatttatatttaaagtcttcatacagttattaactagctccaatattactgaaatgatttctccaaatatcctatatttaattatcatgctggcaaatttattataactttggtttgaaaaaatatattatgatacatatccactgactaatgccacctatctgctttcctgaattcaaagtttatgattatttccataaatgtatttatcagtataatcaaaaataaaaataaca

SEQ ID NO: 671073 - DNA, 1951 bp, Homo sapiens
aagttaaatcttggggatatgggtgtggacagggctggtttcttctggggctctgatggtaaaatttgcttccttgccttttctccttctagggagcctgcattccctgcctcctagtggcttcctcccatcactcgaacctctgtttccagcctcaggattcctaatgtgactctgacgtttcatctcctgtttatgaggacgcttctgattgctgtgagtccacttgataacccaagaaaaacatgcatcgcaaggtccttaaattaatcacggctgcaaaatgccaattatcataaaaggtcacattgacagttcccagggatcaagatgtgaacatactggggacgagggccattattttgtatatcacagacgtctcccatgtggatagtcctctactagttactacattgatttagacagatgtcttctatcgccaaaggacttacaatgcatatagagggacagacttacagtagtgtgagaagtgcagagacatatgggagtgctaggtagtccttgagcacaaggaatcatagctaccatggtgttctggtgacatgaggagctacaagggaacgcacaaggtaagactagtgaaaggacagggagtagaagatgagccttgagaaaatggtcaagttggtgaaaacaggaaaggagtttcccataaagaaatatggggaagaaagaagagtttcccaggcagaaatatgcgggtggtgatgagggtgggggggacatgagggagctcattgaggtcaggagaagttagcgtttacacaagaaaatgaagatccatgagccccatggaacaaggaccagataatacaaaactcttcatatgagtctgagagagtgggtctcagctcatcaatatcacctaggaacttttaacatctctgatgtctagatcctttatcaggtctgcttgacaaaaagtgggtcctggttataggcagtgatgatattaataacattttattttaatgcacgttcaggctgaaaagcatactggatttttaaacacttaaattttatgtggagcatactagaaaactaacaaataattttaaatcatccaggtctgacatgacatagttatatttctactttcagaagatacatacggtgacactatggaagttaacttgaagattaaaaccctgaaaaatagaaagaatcttctatggtatatcacagagattacaagggcctgaattagagtggtgacattttcatcccttgataatggattaaaaacaattgaatgaagctttggggtgaacttacaggactttatggcaaacttcatatgggagacttacatgaagggaggaagaaatgcgtatgtgtacaaaatcatgtggatagatgtgcatttgtgggtatctgtgaatacaaatacacaattttcagayagaagtagtataagaaaaggaaatcaaacaaagtcaaacattttaagtgtagctcttggtgcactttaaaaaattattaaattgaagctgtagtttattctcatcattgtcatcctatattagtgattttctttagcttttgaaattaaattcataatattacaattctgaattcctatgtatgtatatgttaagaatcctttaatgggactgactttcatatgtgtgtggctgcattctgaaatagttgtctagttgatacataaagcagtgagtgctatttgtaagatatatttatatttaaagtcttcatacagttattaactagctccaatattactgaaatgatttctccaaatatcctatatttaattatcatgctggcaaatttattataactttggtttgaaaaaatatattatgatacatatccactgactaatgccacctatctgctttcctgaattcaaagtttatgattatttccataaatgtatttatcagtataatcaaaaataaaaataaca

SEQ ID NO: 671074 - DNA, 1951 bp, Homo sapiens
aagttaaatcttggggatatgggtgtggacagggctggtttcttctggggctctgatggtaaaatttgcttccttgccttttctccttctagggagcctgcattccctgcctcctagtggcttcctcccatcactcgaacctctgtttccagcctcaggattcctaatgtgactctgacgtttcatctcctgtttatgaggacgcttctgattgctgtgagtccacttgataacccaagaaaaacatgcatcgcaaggtccttaaattaatcacggctgcaaaatgccaattatcataaaaggtcacattgacagttcccagggatcaagatgtgaacatactggggacgagggccattattttgtatatcacagacgtctcccatgtggatagtcctctactagttactacattgatttagacagatgtcttctatcgccaaaggacttacaatgcatatagagggacagacttacagtagtgtgagaagtgcagagacatatgggagtgctaggtagtccttgagcacaaggaatcatagctaccatggtgttctggtgacatgaggagctacaagggaacgcacaaggtaagactagtgaaaggacagggagtagaagatgagccttgagaaaatggtcaagttggtgaaaacaggaaaggagtttcccataaagaaatatggggaagaaagaagagtttcccaggcagaaatatgcgggtggtgatgagggtgggggggacatgagggagctcattgaggtcaggagaagttagcgtttacacaagaaaatgaagatccatgagccccatggaacaaggaccagataatacaaaactcttcatatgagtctgagagagtgggtctcagctcatcaatatcacctaggaacttttaacatctctgatgtctagatcctttatcaggtctgcttgacaaaaagtgggtcctggttataggcagtgatgatattaataacattttattttaatgcacgttcaggctgaaaagcatactggatttttaaacacttaaattttatgtggagcatactagaaaactaacaaataattttaaatcatccaggtctgacatgacatagttatatttctactttcagaagatacatacggtgacactatggaagttaacttgaagattaaaaccctgaaaaatagaaagaatcttctatggtatatcacagagattacaagggcctgaattagagtggtgacattttcatcccttgataatggattaaaaacaattgaatgaagctttggggtgaacttacaggactttatggcaaacttcatatgggagacttacatgaagggaggaagaaatgcgtatgtgtacaaaatcatgtggatagatgtgcatttgtgggtatctgtgaatacaaatacacaattttcagacagaagtagtataagaaaargaaatcaaacaaagtcaaacattttaagtgtagctcttggtgcactttaaaaaattattaaattgaagctgtagtttattctcatcattgtcatcctatattagtgattttctttagcttttgaaattaaattcataatattacaattctgaattcctatgtatgtatatgttaagaatcctttaatgggactgactttcatatgtgtgtggctgcattctgaaatagttgtctagttgatacataaagcagtgagtgctatttgtaagatatatttatatttaaagtcttcatacagttattaactagctccaatattactgaaatgatttctccaaatatcctatatttaattatcatgctggcaaatttattataactttggtttgaaaaaatatattatgatacatatccactgactaatgccacctatctgctttcctgaattcaaagtttatgattatttccataaatgtatttatcagtataatcaaaaataaaaataaca

SEQ ID NO: 671075 - DNA, 1951 bp, Homo sapiens
aagttaaatcttggggatatgggtgtggacagggctggtttcttctggggctctgatggtaaaatttgcttccttgccttttctccttctagggagcctgcattccctgcctcctagtggcttcctcccatcactcgaacctctgtttccagcctcaggattcctaatgtgactctgacgtttcatctcctgtttatgaggacgcttctgattgctgtgagtccacttgataacccaagaaaaacatgcatcgcaaggtccttaaattaatcacggctgcaaaatgccaattatcataaaaggtcacattgacagttcccagggatcaagatgtgaacatactggggacgagggccattattttgtatatcacagacgtctcccatgtggatagtcctctactagttactacattgatttagacagatgtcttctatcgccaaaggacttacaatgcatatagagggacagacttacagtagtgtgagaagtgcagagacatatgggagtgctaggtagtccttgagcacaaggaatcatagctaccatggtgttctggtgacatgaggagctacaagggaacgcacaaggtaagactagtgaaaggacagggagtagaagatgagccttgagaaaatggtcaagttggtgaaaacaggaaaggagtttcccataaagaaatatggggaagaaagaagagtttcccaggcagaaatatgcgggtggtgatgagggtgggggggacatgagggagctcattgaggtcaggagaagttagcgtttacacaagaaaatgaagatccatgagccccatggaacaaggaccagataatacaaaactcttcatatgagtctgagagagtgggtctcagctcatcaatatcacctaggaacttttaacatctctgatgtctagatcctttatcaggtctgcttgacaaaaagtgggtcctggttataggcagtgatgatattaataacattttattttaatgcacgttcaggctgaaaagcatactggatttttaaacacttaaattttatgtggagcatactagaaaactaacaaataattttaaatcatccaggtctgacatgacatagttatatttctactttcagaagatacatacggtgacactatggaagttaacttgaagattaaaaccctgaaaaatagaaagaatcttctatggtatatcacagagattacaagggcctgaattagagtggtgacattttcatcccttgataatggattaaaaacaattgaatgaagctttggggtgaacttacaggactttatggcaaacttcatatgggagacttacatgaagggaggaagaaatgcgtatgtgtacaaaatcatgtggatagatgtgcatttgtgggtatctgtgaatacaaatacacaattttcagacagaagtagtataagaaaaggaaatcaaacaaagtcaaacattttaagtgtagctcttggtgcactttaaaaaattattaaattgaagctgtagtttattctcatcattgtcatcctatattagtgattttctttagcttttgaaattaaattcataatattacaattctgaattcctatgtatgtatatgttaagaatcctttaatgggactgactttcatatgtgtgtggctgcattctgaaatagttgtctagktgatacataaagcagtgagtgctatttgtaagatatatttatatttaaagtcttcatacagttattaactagctccaatattactgaaatgatttctccaaatatcctatatttaattatcatgctggcaaatttattataactttggtttgaaaaaatatattatgatacatatccactgactaatgccacctatctgctttcctgaattcaaagtttatgattatttccataaatgtatttatcagtataatcaaaaataaaaataaca

SEQ ID NO: 671076 - DNA, 1951 bp, Homo sapiens
aagttaaatcttggggatatgggtgtggacagggctggtttcttctggggctctgatggtaaaatttgcttccttgccttttctccttctagggagcctgcattccctgcctcctagtggcttcctcccatcactcgaacctctgtttccagcctcaggattcctaatgtgactctgacgtttcatctcctgtttatgaggacgcttctgattgctgtgagtccacttgataacccaagaaaaacatgcatcgcaaggtccttaaattaatcacggctgcaaaatgccaattatcataaaaggtcacattgacagttcccagggatcaagatgtgaacatactggggacgagggccattattttgtatatcacagacgtctcccatgtggatagtcctctactagttactacattgatttagacagatgtcttctatcgccaaaggacttacaatgcatatagagggacagacttacagtagtgtgagaagtgcagagacatatgggagtgctaggtagtccttgagcacaaggaatcatagctaccatggtgttctggtgacatgaggagctacaagggaacgcacaaggtaagactagtgaaaggacagggagtagaagatgagccttgagaaaatggtcaagttggtgaaaacaggaaaggagtttcccataaagaaatatggggaagaaagaagagtttcccaggcagaaatatgcgggtggtgatgagggtgggggggacatgagggagctcattgaggtcaggagaagttagcgtttacacaagaaaatgaagatccatgagccccatggaacaaggaccagataatacaaaactcttcatatgagtctgagagagtgggtctcagctcatcaatatcacctaggaacttttaacatctctgatgtctagatcctttatcaggtctgcttgacaaaaagtgggtcctggttataggcagtgatgatattaataacattttattttaatgcacgttcaggctgaaaagcatactggatttttaaacacttaaattttatgtggagcatactagaaaactaacaaataattttaaatcatccaggtctgacatgacatagttatatttctactttcagaagatacatacggtgacactatggaagttaacttgaagattaaaaccctgaaaaatagaaagaatcttctatggtatatcacagagattacaagggcctgaattagagtggtgacattttcatcccttgataatggattaaaaacaattgaatgaagctttggggtgaacttacaggactttatggcaaacttcatatgggagacttacatgaagggaggaagaaatgcgtatgtgtacaaaatcatgtggatagatgtgcatttgtgggtatctgtgaatacaaatacacaattttcagacagaagtagtataagaaaaggaaatcaaacaaagtcaaacattttaagtgtagctcttggtgcactttaaaaaattattaaattgaagctgtagtttattctcatcattgtcatcctatattagtgattttctttagcttttgaaattaaattcataatattacaattctgaattcctatgtatgtatatgttaagaatcctttaatgggactgactttcatatgtgtgtggctgcattctgaaatagttgtctagttgatacataaagcagtgagtgctatttgtaagatatatttatatttaaagtcttcatacagttattaactagctccaatattactgaaatgatttctccaaatatcctatatttaattatcatgctggcaaatttattataactttggtttgaaaaaatatattatgatacatatccactgaytaatgccacctatctgctttcctgaattcaaagtttatgattatttccataaatgtatttatcagtataatcaaaaataaaaataaca

SEQ ID NO: 671077 - DNA, 3222 bp, Homo sapiens
agcaatactaatttgaacaataatttagatctttgaaagactggttacaactacatcagacagatttataaggtattaaatgatgaggatgtaaaaaatatgcatggttaagaactgctagtacaatatagaatagtaggtataataaccaccttgtcttattcctaaatttaatagtgatacttccagaattcactatgagacatgtttggtacagctgttgagaggtaagttgaatactatgtagatatttcaagtgtttaatatgatgaaacttaatatatgcataaacccatgttactaccatcccaattaagatatagaacatttcaatcattccagaaactttacatctagtccttctaatcaattccttaaacaggaaacaacttattattactttattttattactatagattaagtaatatgtcttattttattgcaatagatcatttttgctattcaaaaatttaattataagtgaatcatgcactatgactttataatatcaatgtcttatgttcaacatgatatttttgagaytcatctacatggcagatgccaatttgctctttatatccaactaggtcccatgcacaccctaagccaataaacatttcaaacaaaaaatcatgaatcaaatcatggattcttcaagctaaggaaaatgaaattgctttgctgagtgcaatgcatgaaatgtaattgctttgaccctttaagatacaacagtgaagctgaggatagttcttgaaaatatattgcaggtacctgatggagagagctgcaagatgaccaccttgcaaggttcaacgcgctgtgtgggggttgcaactgtaatcagaacatgacatggttctgcacaagtgaacccatagtctactagtgaaatagactaactaatatgttaagaagcataatgagatattctataattgatatctagaaaaagttatatggcacccaaaaaagagataactatttacctgagtgttttcagggttagcctttgaatgaaggaatgagttgaaacaataatggaaagatagtaggtataaactaagctatattgctaattaagttaaatatagataaactgaatgcatgaattgtcagcaattacaagactggataaaacagtaatctcccagcaacaagcaagagagtcctatagaagacctgacaacaatgatgaatgaggacagagacagaaaacactgtgatccttgatgttatcattgaatcacttgaatcctgctttgacattgacttccaagtatgtgatacaattaactgccttaatggtttaaggcacttggaagggcttttggtgctcttgcaattgaaaccattacaacataacacacatagaaagagtatccgttaaaaattttttgaaagaaaagaagaatgaaggaaggaagaaaggaaggaaggagagaaggaagaaaagaaagaaaggaaggaagaaaagaagtctcaagaactcagatgtcttgatttatactagttgaaaaatggccaaacaacttatctgcaccatgaattacgtatatatatatatatatatatatatatatatatatatatatatatatatgtaattatctatatatatgatttttgtacttcttaaactcagtttaaaattatatatataattatatatatatatatataattttaaactgaattcaagaagtacaaaagtacaaaatccctttcattgtacattttttaaatagatgtacctttaaagtagagtgatattttcagagtaatcaatataatcttgggtttagagacttcatgttgggtgaatatattcttatctgataagaaagatgaaataataacacattctttgaatgtttccagatgataacatttgtaatatgaggccaaataatttggtttgttatcgtcttacacaggttattcaaagcagcaggattagaggaagcagagaactaactagtttttaatttgaatacatcatcgaagcaccccaattagccacctgcattcctgcagtattttttcagcatgtaatcaaaagaatattatttactttgatgattaataaaaatggtctgccaagtgtttgctctttaatgggaaaataatgggcaacattaaggaaaagaaacagtatccatatgcatgatctttgagacatttccattcattcagaagctgactctgtcactgtaaatggcaaacaatcaggaaatgaaaataaaattcttctacaaattatctttcatctgagaatattgttggaccctacagataactttattaatatgtttatagatctgtggaacagttatcagctaatacgggaagaagtctaaggtagcgtcaattctaaatttaaggaattacctctaccttggtcaagaggaagtctttattgcatccaattaagtaagatgtttcttcatttccttctgatctccatcttgtctactttctctgtgttaatgtttgtttgctgaccaaatctctgttctgtccttcatacttcatgattaaaaaattccaactccagctacatcaccttagttcataatcatgacgtttcttcataatctgccataccataccatccctctgatgttatctcctgctatggtgcccccaattcaccctgctaggggtgacacagagctatcttgattatgacaaatttgcctaaatggctactccctccacccacacacaagtccacatcagaatccttgtgtttactctctattatgtctggaatagcttccataaatatgtctttgtggaccagcttctgcttcaattttgtctatggccaaatatcaaaattattatctccaaatttcaaatttcaaacattgaactcttctttatttcaccaaacccattccaccagaacgctcccccgtatccctcatttctcctctatttttctcatatatcatatatagattcttcagaaatcctggaagcactgccttcaaaatatatccagaatttaaacccttcacaccacttgtgtgactacaaggctaatctgatccactatctctcctctcctatactgttataattactggccaagagttgtccctttttccatggtgattcaaagcaatagctaagcaattcctcaaaaaaagtccctatgcacacaccccgatgtaatgcaaaataaaagctaacatatcccaatatcctagaatgc

SEQ ID NO: 671078 - DNA, 1816 bp, Homo sapiens
taaggcaggctccctccttgtgctctaatggacaccacccactcactccctggcagtgtggactactcgtcttttcttgtaaattgtgtctcttgaggctgactgcaagctccctgaaggcaggagagcatcttctgtacctctgtatatctatcctcacactcacagaccactcaacctgttcatgtactcatttcactcattcattcatgtcacaaatattgactgtgacctcctgggttcctggctctgctgtaccacctggagataaagagcaaaacagatgagacagatatctgctttcatgctgcttccattctagtggagtaatacacatcgcaaaggaatggtcatttattgattgagcgtcttttaacaattcttgtcttgaaaattaactgattttagtattcaggaaagtatccaaggaaataagagacatatttttcttctttagttcttttaaataaatttcagaatttttttttaaatgtaagaagttaatgttagaaccctgatactgtatctaaggaaggaggtcgtgtagaagtgtttctctccttttgtgtctttttcatttacaaatgtagggggtagagcttacacttccagagtaatcatcacgtgcaaacgaatgctcattgccaatcagattgcaagtggagtttcacaaatttggtatacaaaggtctatagaaaaattggccaggcacggtggttcacaaatcccagagctttgggaggcagaggcaggaagattgcttgaggccaggagctggagaccagcctgggcaacataccaaagtcctgtctctacaaaaaaaaaaaattaaaaaaaagaaacttagccaagcatggtggcatgtctgcagtcccagctgctcaggaggctgaggcaggaggatcacttgagcccaggagcagtgagtaatgatggcaccactgcactccagcctgggtgacaaagcaagaccccatctctaaaataattctttttaagtattatatgactgatcccaaagaataagttactcaggaaaggaggcagggcgtacttttccagcataagcagcatagatccaaggttgaccacaacagagacaaggaagactatagaagaagatgggacaagacactcacctttgtggagtgtctgctcattatctgctggactctgtgtggggctccccccatacagattatcccctttaatgctcttaacctcactgacacttagccagtattcttcccattctacagaggagagaactgaagctcagagagattaaatagctttcccaaaggcctcttagaaagcttcgttcagggtttgtatctaacttgacagtcctaactacttgagttaggagtcaaacgatatgaattttcagtttcagttccctcagtttactagcaaggaaactaaactgggttactatatttcctaggtcttcctctcctcccctagaaatgagaataataatatctgccatatgagcatgtcaatttttaaaggaaaagctaaatgaaaycattctgtaatccataaagcactctgcgaactataacaattgctgaatgttaagaaatacagaaagtctacaaaagattttctaagaaaatggaaaggaaatgataatcgctgtaatttcatgaaggagaaattgggccaatagctgtcattaattacaaatgataaaacaagaaggaaagcagaatgtcatatcactctcaataaaaaacataggttatgcaaacctgatgcgttccagaagaaatgagaaaagttcctgaaataggattcatttctgaggct

SEQ ID NO: 671079 - DNA, 904 bp, Homo sapiens
cttgcttcctggttggtaggcagccaccttcttgctatatcctcacgtggctgagagagtgaacgttggtttttctcttcttataaggaaactactcccataatgggggttctacctaatcacctcccaaaagtcctaccttctaataccatcccactgggggttagtgtttcaacataygaattttgagaggacataaacatgcagtccataacaccatatataaatcctcacatatatgtagtgggccagccatttttgaaggctctagcagatacatgcaccaccccctcccccatctctatcagctctacctaaaatcttgactttattctcttttttgcattaaggcaagctcatcaaactggcccaaggatcttggatgcatcgcccttggcagattgtgtttcttctttgaaattctcctttgaagtggccctcattgccaaccaccaagcctgcaatggggagacttcccccagtactcctaccgatgcctcccaccctgcctactaccttggacacatgacttcatgatatggaaagaagaatctcttctggaaaagagtgcaataaagaaatccaaggacctgcactcaaagcaaatgttctccgtgggtgattagtataaaccctcattcagcataagttggttattagatttgccagtctctaacatgacctaacgggaaaaatcaccaagtactgaaatgttctgatggaagggtattagaaaaaaccactcaagcaatatttatttatttatgttttcagttgggccaattcagaaaaacaaaaatttgcaggccacatattttgtccaagatgaaaatagctttattattttttcctgattataaaaataatactcatttattattacaaaacttgaaagttatttgta

SEQ ID NO: 671080 - DNA, 641 bp, Homo sapiens
gaatgtaaagtagatggacctaacctagtatggggggttagggaasgcttccaagaggaagtggttgtagagaatcaggtaatgaagcaaaaagaaagtgggtaagcattccaggcaaaagaactggcatttgcacaggtcttaaagtggaaaaaagcctgctaaaatcaaatacctgagaaaagtccagtgtacctgaaggggagaaaaagtgggacagagaggctggcagatggagaggttacttactgggcaggaggaagtattaaagggttttaaatggaaaagtgacatcagatgctgttactctaagaactgcacttttcaagaggtcattatgcaacttgggaggctgcggtgggagtatagcttgaggccaggagttcaagaccagcctgggcaacatgatgagaacctatctccacaatttttttttaaattagctgggtgtggtgccacatgcctgtagtcccagctatttggggtggggggctgaagtgagaggatcgtttgagcccagatgtttgaggctgcaatgagttatcgtcatgccactgcatttcagcctgggtgacagaatgagaccctgtctctaaaaacattaaaagaaaagatcattatgactgaaatgaggagataaa

SEQ ID NO: 671081 - DNA, 886 bp, Homo sapiens
ttgatacattaccatggatctttttgtccctgatttttattaatcttttatatatatagcagcacttgatatagatgactactgcccttgtgatttcctcgtggatttttctaaaccttgaagcaatgaggaagtgaatacagagtttatgcctttgtatgggaaatgaattggattattagagaaaattctctggaaaaccaaccagcaagcagtcatggctctagaatttctataaaggagttaaacggggcaacttattgggacagccagggaatttgtcttaaagttgtatagcaaagaaaccacctttacctagataatatggggtggtagggtggattttggagacaggcaagagacctctgagccatctcttgtcatcaccaccctgtgtaagtttgacatacctaaatacctaaggaacaaaggctttatctaaattrtaagtaaatactcaggtatgaatctgaccaatgtcaccattcaggtactcaggttaaacaaagccaagaataaatcctcacaatcctttcacatgagtactattgcttgcatcctctctccttcttccacatccatcctggtgtaaagtaagactgatacacttgcgatagccatagagcaagttggtaggggtctagtttattaatcctataaaccttgtgacatctcaggacaagtgattacacaatcacagatgccaaaaggctagagactaatactggtcttgtttaaatgtgaaaggcactctcttatagtaaactcaaaagaagcttcggtttttagttggctttcacgtgagaatagtgccctctggtgctttttaaagttcctgcctccagaactggctaaggaaaagaagtcctttgcaatttgaccaaca

SEQ ID NO: 671082 - DNA, 638 bp, Homo sapiens
caaaagacggcagacataaacaaggggaagtttgaaagaaagagaaacggctaattctcagcaacctttcatatgtctgcggaaggcttggcatccatggcccagccttcttcaggatgagcacctatgtctgctactctttgcatcaagtgacttctccatgcctttcttgtgtcttttttctcgctcctttccgttgcctcctttatgttttctcactgcctagctcttcccaatagcaccaccccgagtggttctagggcaaaatagtaaagcattttaaatttgttttcatgacttcccacccttttttcagtctcgttcctttccatctttaaggtggccagcagctgctccgcacttgacaaacgtgctggacactgctgctggggagacatcagccggcaagcaagggaaagttgcagacttctcagtgcttacctcctagctgggaagacaaatattggacaactrttctctaaaggaggcatgcagagtgctgtgagtgcctgtcagtaggtgcagacaggggctcagggagagcatcctggaagaagagatgtttgggttgagcctggaagcgtgaatgttgggtgaagtgttgggaagagaggtgaagacagagaataagacagggg

SEQ ID NO: 671083 - DNA, 638 bp, Homo sapiens
caaaagacggcagacataaacaaggggaagtttgaaagaaagagaaacggctaattctcagcaacctttcatatgtctgcggaaggcttggcatccatggcccagccttcttcaggatgagcacctatgtctgctactctttgcatcaagtgacttctccatgcctttcttgtgtcttttttctcgctcctttccgttgcctcctttatgttttctcactgcctagctcttcccaatagcaccaccccgagtggttctagggcaaaatagtaaagcattttaaatttgttttcatgacttcccacccttttttcagtctcgttcctttccatctttaaggtggccagcagctgctccgcacttgacaaacgtgctggacactgctgctggggagacatcagccggcaagcaagggaaagttgcagacttctcagtgcttacctcctagctgggaagacaaatattggacaactattctctaaaggaggcatgcagagtrctgtgagtgcctgtcagtaggtgcagacaggggctcagggagagcatcctggaagaagagatgtttgggttgagcctggaagcgtgaatgttgggtgaagtgttgggaagagaggtgaagacagagaataagacagggg

SEQ ID NO: 671084 - DNA, 1223 bp, Homo sapiens
gtacaaaactaatcttcaaaagtagttatcttcatctgtcaatgtgatcttatcaaggatttttataatttctataaacaatcattatattttagctgaatcagtagcattatgctgtctaaacagatagtcagattccttctattttaaaacactttctaccagttcccatcccaccactcaccactcacccctacgctggccctgtaaaaggaatttggcttcaactttcttttcttaatccactaagcaatcgcatgaataaaaagataatcacatgccctgcatgcctgatagaatttttataaatcttctaagtgttttaatatttattttctattttgtgaaaataatatttactgaacaagctagatcatcttctttctccacagaaaaaaaggtaaggttggtgaaaatacactgaaagctctgctaggtacacattatttttgcataaaattttgcttaaaattctgtggaggctggcaaagcactgtagaatgattgacatggctgccttgatattgttcttgctttttctttgtccacttatgttgaccctgccactcctaaatatgctaatattacttttgctgaggtagggaatcactctctttatacaagttttgttgttcatcttggtctcccaaaaggatggcctcaccaaattttttcttactctctctcaaggagtttgtttccctcaaaacaggaaagacatctgagggacatayccagaactgtatccataagcattccatcctatcaacaattaacaagtagccagggacagaatttaggcagctccattttcttttttttttttttttttggagacacagtctcgctctgtcgctcaggctggagtgcagtggtgcaatcttggctcactgcaagctccgcctcctgggttcaggccattctcctgcctcagcctcccgagtaactgggattacaggtgcgtgccaccacgcccagctaatttttttgcatttttagtagagatgggatttcaccgtgttagccaggatggtctccaaccttggttggagagtatgagactagcagcccaacagtccaacaaagaactattggacttcttcccaacagtgacccttaggtgtcctctcctggtaagtgctcagagattagtctcccctagaaaccttctttccccatgtcagaccaaaaatatataggcgaacacttagaacatatttgaa

SEQ ID NO: 671085 - DNA, 1430 bp, Homo sapiens
aaatacatcttgatttttttgtttgtttgtttgttttgtttttgagacggagtcttgctctgtcacccaggctggagtgcagtggcgcaatctgggctcactgcaacctccgccccacgggttcaagtgattcttctgcctcaccccccaagtagctgggactacaggtgcatgccaccacacctggctaatttttatatttttagtatagatggggttccaccatattggccaggctggtctcgaaccttgataccttgatttacagtttgattggcttgaagttgaaagacttaattgactaaaacaactttttttttttttgcccacaagtttttacttaacattggcaattttgtggaagagtaggtggtgactatttgacttcagatgattattctaagtaaatctgtattggcaccataactagcatcattgttgaaaaattaaggagtcacatataatctctgggacctctgagttcattcagttgatcctccgaggctaggatgtcctgtacatctctctaatacaaatcaattttgttttgtgatttcatacaagtgaacaatatataaacatattagaaggcagtccaatacaaatcttcctgctatttattctgtcatttttctttaatttcatgcatatattattacttcatagatatcttcattaagattttgaaattgattctatctttctgattcaattgtctcaatatgaataaaaatgacttctaattcacttatctattcagtacttcatttagataacgcatctttactgagtgcctactctatgtctggcactgtactagatgcttagaatacattagtgatcaaaaatgactttatgtggcttatattctaatagcaattttcttctattgctgatatgtaattcctggggcttttgtggattagaaaaataaattatggtatatctgacaatctctcattaaaagaagtcattattactttgccagtagaggtcacatttgaatatttttaatatcyttcccgtatttcttatcacactaaactgtccctgtgcaacagacgataataataaaaaaatgtgcataacctgtgtcagattcaatttagaagattaaccatagatattcatctcctagatcattttcaaaaatcataacaatagttgtgattatcctaccataccgtataataatatgctttgactcatgacagcatttaaattttctcttcattatagcaaagtgaatattcaattcaattcaatgaatacttttgaacaggtacgattgtgttaggtcttatttggctttgagagatatttatctagaaactcttttctcagagaccttacagtttcctgggtgaaattatccaaaactaattaactttaatttaaacgaaggaacataggtgaagaaaaaacaaaga

SEQ ID NO: 671086 - DNA, 663 bp, Homo sapiens
ttgagacagggtctcactctgctgctaagactggagtgcagtggcagaatcayggctcactgctgcctcaacctaccgggctcaagcaatcttcccacctcagcctcctgggtagctaggactacaggtgaacaccaccatgctttgctaactttttaatctttttagagacaagggctcactatgttgtccaggctggtcttgaactcctgggcttgagtgatcctcccacccctcagcctcccaacgtgctgggattacaggcatgagccaccacacccagccctcacatacatttcaagtgaagttaccatagctcagtttggggcaaaaagaagttgtattgtacttgtccagtttccagtccaatagaagtctcttcacctaattcatgtgaatgataaaaacactgcatagattgattaagtcttctgaggatgtaatttctctactaatagcgtaagaacatataattttaatgaattttaaacacatttttcatatacaataaagcctaggttagccaaaatattgaaagaattagagttctgattaatgaaattgtctgacataatttaggagtcacacgaaagtaaacacttttttttaccaaccttgcttgtaattaaaactcttcctacatctcaaaacccattgtcctgc

SEQ ID NO: 671087 - DNA, 672 bp, Homo sapiens
aaatccttagagggatccctgtgtagattttggagatttttctctgtatagttacctcctctccagtattctactactcaaataccagtcaccataatcttccggaactcgagtttatctcttttcaattcagcaagtcttctctgctgtgtttgagtcttgctgttcctgcactgtggttttaaatatgtctctaggcagagagaaggatgayaggccttactccatttttctttttctcaggagtcacagctctatgctgcttagttttcagttgttgaaatcttttgttaaagatttttttttaagttttctaggttttggtttccaatggcaggaaggcaaatatggtgctagttattctctgatggctacagagctgatgtaattcaacgttaaaaattacaactatttgctattccccattatacaccattttataatgaaaaaaagagtgtccgaatcctacactggtcaaattatttaaaacctctactatgacactggaacaaggtcaggatttagaaatttacctgttaacttttttgtcgtttcattttcaaaatttgcattgtgttacccagtattttcataaaaaatttcttctttcttacagtaaaagaagaagagattgtcttttttgctgttgtttttttaaaggcacattataca

SEQ ID NO: 671088 - DNA, 672 bp, Homo sapiens
aaatccttagagggatccctgtgtagattttggagatttttctctgtatagttacctcctctccagtattctactactcaaataccagtcaccataatcttccggaactcgagtttatctcttttcaattcagcaagtcttctctgctgtgtttgagtcttgctgttcctgcactgtggttttaaatatgtctctaggcagagagaaggatgataggccttactccatttttctttttctcaggagtcacagctctatgctgcttagttttcagttgttgaaatcttttgttaaagatttttttttaagttttctaggttttkgtttccaatggcaggaaggcaaatatggtgctagttattctctgatggctacagagctgatgtaattcaacgttaaaaattacaactatttgctattccccattatacaccattttataatgaaaaaaagagtgtccgaatcctacactggtcaaattatttaaaacctctactatgacactggaacaaggtcaggatttagaaatttacctgttaacttttttgtcgtttcattttcaaaatttgcattgtgttacccagtattttcataaaaaatttcttctttcttacagtaaaagaagaagagattgtcttttttgctgttgtttttttaaaggcacattataca

SEQ ID NO: 671089 - DNA, 384 bp, Homo sapiens
aaaggcagcagaaggcaaccttagaagtcatacttaactacacaagtatccacagaaaaagtggtacaaaaaagaataatagtcacaactagtcagtgtctttctctttgccctactctccagtaacccaatgatgagattatactccaactttcaactcaaaattagttttgtgaaaatctagtttataagttttgaaccttttcttacattaccattaatgaaaattggtaaaaacatggcctggaataaattaagcttagaatttaaatgaatgtcatctcatcttcagttgtcaacarcatgcaagtgaggtaattaaatcatctcagattttctgtgctaaaatatccaaatgtttaagaggaaagtaggtgggtggta

SEQ ID NO: 671090 - DNA, 665 bp, Homo sapiens
taaaggtgcttactcttacaaattaataaaaattagatagaaagcacaatagaagaacgtacaaagataaatgtttcttcacaaaacggccaaatcagtaacacaggctttgtgttcaaagtattgattagtgcatacttcactaataaagaatctatagtatgtattttattagtattctagaaaatttcagacaatcagcaaatggaatgaattttattatcaatatgccatagaaattcagtcatctaatttttctagcttatgttatgttgagcctgcwtgtggtctctctacctggaggagggacaggataagaccagcagtatcccatatgattccaaatggaagtccaataatgtattggaatttgctacatctcatatccaaacagtgctttatctacattaatggatgagtttgtgattttaatatggaaataaatgagtgattcgagttgttcaaaatataatttttgaatatacttttgtgattgatagttatgcctcaatcactatgaaactcagagtattattaaaaagaaccttcccctctttcttagcactaaattcaggctcttgtagatctttcccaagctctgctctgagatcaggtggtgctgtggcattaaagttgcaggtttcagtcaaaaaatcccaaagcag

SEQ ID NO: 671091 - DNA, 3830 bp, Homo sapiens
tgaatactgcaagtgtttttaaacaatttttttctgaccgtatttcttggaacctttccattctgcggtctctcaggagccatgtggagagggtagagtcaacccaagccagcagctccctgggttctcctgcaaccagagcagatcaacttagttttcttatgaaaaaggatttctgctgcaccaaaaaaaaaaaaaaaaaagtttggaaactacatgtgggtggcaggaaagaagttattttatctttactaaatttcttgaatttttctagacttcctctggataccaagacagaacctgccagccccaagtcctccaggttcccgtggaatatctagtagtaaagagtcctagcagttgcctgctatctcctcagcagccaaagctggtcctgcttccatttgttacctgaatcctggagacccagtgaagatctgatttatgccacttcttagtcatctcatcttggacaaataccttacttctgctgaacttaaatccttctctctgtaaaatagaacatgagtaacactcttctgtcaacctcatatgacacctgtgaggctcaaatgatctaataagtatcaccttgtgcctttataaattattctgtacatacaagatgaaactattatagctattacagtcagcataaaatcttaaatcagttggtgagcttgtttcctggatgtgaatgaattaagctagtctattctatgtaaaaacagctagctcttgtcacaggaggatgcattgttttataccacagctctgtggttaaattctgatatgacactgacattttattttattttattttattttcttagacatggggtctctcaatgttgcccaggctagtcttgaactcctcgcctcccaccatacttccacctcagcctcccaaagctctgggattacaggcatgagctactgtacctggctgaaattttataatgtgtaatctttaaacctcaagggcctataggctttgtcataaaaaaagaaatcaaaagaaaattttaacagtggccacgatggttgcagtcaggcacatgggtaataaaacctaggcctataaactaaatttgacctcttacctgcgtaactggagtttgttaagtatttcaccaacaggtacaggttataaacgtgtatcagaggtagaacaaagacaagatggaatcactcaccctgtaccagaccctcagatgcctaaccttagtccctacccgctcaactgcatgtacactttatgcatatatatcacctatggatagtgtcactgagcaccagtcagaatcataggaatgtaactgctgcttcatggccctgcttctcccaccttctgtaccacatgcatccttctattaggaaattatatactgtgcctcatggaacctactttggagactcattctcagtctgcactgagtctgtgtttccaggcttaagaccccaaacttggctcaaaataaacctaaccataatttctctaagttttagtgcctgttatttcacttttcagttgatagctttaaatgacttattggtgttaaaaaatataagggctaaaacccttatattttcatttctataaatttgtatatttataattatatacaaatatcaattatatgccatttcaatgattggtattttaaatacatattttgatagatttgaataatatttacatattttattattttttgtgtagtgattattttactacaaatttgtaaatttataatttctacaaattttactagttactttcaatgtacaacactatgtgattctatgtttatgtaaaggtggattggtctaggcagtatgagttttggttatgagcctgaagagcttgaaaactacttgactacaaagcaattgttaacaacttcacagcaactttacaagaacaaagtagttgctaagaagccattgcaagtatttgagaaaattcatgtgataaaaacaatgtgttagtaagaagcagattaattggattaaaaaataagtgattagaaaggtaaataatacatgaacttgagaaactgaaagaatggcattgcccatagaaragtaggatccagctggagatgttcatgaaattttagaacatgaaaaacttttccaatatggccaggatgaaaagaggaaggagtacagaatattcttgtcctgtaacttgtatccacttttaacgaccactgccacctggtggcttgtgaccctgtttccactgaaggaagaaaccctgtttattcttgattttgcatacctaagcagggataaaaacaggataaaaagaacactggcctggaacaccagggatctaagttcctggagcgcaggggttaaagaccatagtatgtcttgttcgttgagatcgtttaactacaaatacctatacttcaacgatttcttatgaaatttgcagccaaatctggaatccagaaagaattctgacatgaattaaaatcttcaaatcccatcatgtatgttgaattactccttttttttttttcaacaagcctcatgtctcccatcctgttagaccttggtaatgtaagcccgtatctctctcctgagttactgagtaatagaagacatggcaagcacaatagctaaggaaagaggaagtgataggtggacagtcacagtgagaaacccaggaaaaataagcagcctgcaatatttcaaggaataagtttacagttgtatttttctgaagcaacattgtgagatgagtacctagctgctactgattttgattctgagaacgaaacttcctctcacgaccaacattcccacacctataactttgtatcatttgccaagaacaacctattttatgacttcttgatgcttttctgcatgcgttctgctgcttggaaattctaccctgtacacatttatttcagaaacccctagttcaaaggttacccctgctataaagccttccaacactctctccaagcagaggcaacatttcttccctctgttccacaattgattgcattttgttttcaccttactgtattcttactaaatcctcattatactcctgtctaaacaacatgtactctcttagtctgtttgggcccctgtaataaaatactataaactaggtatcttataaacaatagaaatttatttcttatagttctaaaggctggggagtccaagatcaagatattggcaggttccgtgtctggtgatggtttgctttttcatagacggaggcttttaaatatgtctttgcatggtggaaggggcaaggaaggtctcttttacaagaacagtaatctcattcatgaggttcctcccatgtgatctaatcatctcctaagggccaccacctcctaatattatcaccttggggctaaggtttcaacatgtgaattttggagtgacacaaacatttgaatcatagcatgtacaacatctgcttaaatgtgtatcagtattactgcacttaagcctttttggcatcaaacactgtgtcttttaaatctgtattccagatattattttggttgatggctactagaacaaacagtgcctctgtctcaccctccaggatgacaattctggggagaaattgaataaccctgtgacagacattgagaacatatgattttatgaggggtaggacataaatgcagagtttctgttagagtttgcatacttgtaacatttatgaaccctgagctcttaatcagtttcttagggctcagaaaacataggtggtattagagctcagaaacctaacaagtgagtttcatcatgaaggataacaaagggcttggctcttttattga

SEQ ID NO: 671092 - DNA, 649 bp, Homo sapiens
cagagcaaggagaaggaggagtacagtttgacaaggaggattggccaaggacaatcagagaacaaaagctcagagacagaaaatcaaattccatggttgaatgcctactctgtaccaggtactggcccagacacgaggggaaaacaaagacgcaggaggcatgggcttctccttcaaggagcttgagactaagacactcccggggcaccaygaccataaaatgccatgatggacagtagaggatatcacagaacaaggatacaataactgggtggcgggggtgcagtgggcacaaggcggtggaatgcttgggaggcagtggtaggctgttttgacaaagggactgcccagaaatttctccctttacatccaaggatccaacctagtgtcgagggaactgcatattggccttttttgtctcccctcattttcccagtccaacaggacatagtcactggccatgggaggaaaggaatgggagataggatgaaggttaataattttttcctggcttgtgctatatctttgctaggaaaattgtaccactcctagttttttctgaggtttatgctttccatggacagatgaaaaaagcacaaataagtagggaatttcagaactaaagacttccttggtattatattcacct

SEQ ID NO: 671093 - DNA, 649 bp, Homo sapiens
cagagcaaggagaaggaggagtacagtttgacaaggaggattggccaaggacaatcagagaacaaaagctcagagacagaaaatcaaattccatggttgaatgcctactctgtaccaggtactggcccagacacgaggggaaaacaaagacgcaggaggcatgggcttctccttcaaggagcttgagactaagacactcccggggcaccatgaccataaaatgccatgatggacagtagaggatatcacagaacaaggatacaataactgggtggcgggggtgcagtgggcacaaggcggtggaatgcttgggaggcagtggtaggctgttttgacaaagggactgcccagaaatttctccctttacatccaaggatccaacctagtgtcgagggaactgcatattggccttttttgtctcccctcattttcccagtccaacaggacatagtcactggccatgggaggaaaggaatgggagayaggatgaaggttaataattttttcctggcttgtgctatatctttgctaggaaaattgtaccactcctagttttttctgaggtttatgctttccatggacagatgaaaaaagcacaaataagtagggaatttcagaactaaagacttccttggtattatattcacct

SEQ ID NO: 671094 - DNA, 649 bp, Homo sapiens
cagagcaaggagaaggaggagtacagtttgacaaggaggattggccaaggacaatcagagaacaaaagctcagagacagaaaatcaaattccatggttgaatgcctactctgtaccaggtactggcccagacacgaggggaaaacaaagacgcaggaggcatgggcttctccttcaaggagcttgagactaagacactcccggggcaccatgaccataaaatgccatgatggacagtagaggatatcacagaacaaggatacaataactgggtggcgggggtgcagtgggcacaaggcggtggaatgcttgggaggcagtggtaggctgttttgacaaagggactgcccagaaatttctccctttacatccaaggatccaacctagtgtcgagggaactgcatattggccttttttgtctcccctcattttcccagtccaacaggacatagtcactggccatgggaggaaaggaatgggagataggatgaaggttaataattttttcctggcttgtgctatatctttgctaggaaaattgtaccactcctagytttttctgaggtttatgctttccatggacagatgaaaaaagcacaaataagtagggaatttcagaactaaagacttccttggtattatattcacct

SEQ ID NO: 671095 - DNA, 1047 bp, Homo sapiens
ttactcactgcaaacacaaccctgagaaatggaccaagtaaagggtggtcaggaatttgtattctgggaatactcagcaaaaggtgtagggggatgagaaattgatcagcaagtatctcctaagaaagagtgagcaggagaaagccctcttgaaggggtaggcacatgagactggccctataggaggaagagtgaaaatgagaaggcaggcaacatagcaagaaatggacctgaatagggaagcaaggaccacattctggcattctctgaagactcagctttgccctgtataggttggaaagccaccaaaggttttttgtttgttttatttcatttgattgaactatacaagattgctggttttgtaggtcaggaacaattgaataatgataatttcatatctctcaacctaatttcactaatgcaggttggaagatgaatgaggaaacaggtacagggaaagatgattcatttctttatctctattttagcacagtgatgcctgatgaatattatagtgactcgatgtctactgaatgaatgaatgaatatggaggattgttttctagaaaaacatgaatattgtggttagttttcaattctcttgaggatcattgaagccatgaagatgaaaacctgacatacggagtttatattgtttcgaattaattgaatcaacccatgaaatrtgtgtcacacttttggaaactgagactctggagagtgtgttaaatatagtagctaatcctgtgaactctggcaccaaatggtcttgaatttatatttcagctatttctagtaatataatctttcagtgccacagttttttcatctgtaaaatgaggctgatgatttaccctccttttggggctatgaggattacatgaaacatcctatgtaatgcagttagaacagtctttgggattattaatatactgttattatcaatgaagattggttgagactggtgagaaataaaagttgccccaaatacccagtggaaggcctatggaaatgaggtcacaatgttgaatcactcagggtgtg

SEQ ID NO: 671096 - DNA, 1367 bp, Homo sapiens
tctcatctacaatcccatgtctcaaagttgcttctgttcataccaaagtttcttaaagaaccaaagaggcccagcccatagaaagagctggtggttatgctgggggctaggcttgaatccagtaatacctccagcccagcacaggagtaaccccaccatgaacttgaatgaggccttaaggctagtgatggagcctgtcccattgaccctaagtagcctgaaaagccccaacaacagcagcatgtggaaaagtgaatgcaagccaaggaaacataaaggcgcaaggaataatttagaagcctagttagaactgattaatttccttgtcaaattaaattcaytagcccggaagccaattgagttggaacatttgtgtattaataaaaatagtgcctaacaaggaccccctttgcggacattggaaatgatttggctacagaaatggcatcacagaaggggctggaggtaaaaaaagaaagtgcttctaatctagttatattggcatcataaagtcttatttcacagaacctgagctatactattatgactgcaaagtgaaataaagtgtgtgaaatatgttgtagcccttaaaatgctctaaaatgtataacagtattacctaggtcaagcccacaaagatgatagatggaagcccagagaggttacataaccagatcaagctagctaacttgctggttatctaagtagggttatcttactggttagataaccagtaagttagtgccttacttggttatcttattggttaaccttacttagataaccttacttgattatcttactggttgtcgaaccagtaagttagtggctcactcgaggacttcaagctgtatctttcaacttccaattcattgttcccttttcatagcatgatacctctatgaccatcatgctaatactttggcaatgtacttcttatcctttccatttatttaacatcaggcatcttgcacatttatctcactaaattctcacaagaactcggcacagtcacatggtggaaggagaggttgagaaactcacttgtgtcacagaggtgaggaagagggaactggagtatatctggttctgaagtccacattctcaaccactgcaatacattgcctccctcccaagggttacctcaatctaaaactctctctcaactgtgtcagcaattttgcaggaaagaatcaacccttgggaaacatttgctgtgttgcagaaaacagactagctacttcacaagccttaactcacattattctggtaatcttttaattagttgttcttagtcctagtttataaaaatagataagccagctaataggaagcaaggaacttgtcacaggtcaaagtgccagtgt

SEQ ID NO: 671097 - DNA, 1367 bp, Homo sapiens
tctcatctacaatcccatgtctcaaagttgcttctgttcataccaaagtttcttaaagaaccaaagaggcccagcccatagaaagagctggtggttatgctgggggctaggcttgaatccagtaatacctccagcccagcacaggagtaaccccaccatgaacttgaatgaggccttaaggctagtgatggagcctgtcccattgaccctaagtagcctgaaaagccccaacaacagcagcatgtggaaaagtgaatgcaagccaaggaaacataaaggcgcaaggaataatttagaagcctagttagaactgattaatttccttgtcaaattaaattcattagcccggaagccaattgagttggaacatttgtgtattaataaaaatagtgcctaacaaggaccccctttgcggacattggaaatgatttggctacagaaatggcatcacagaaggggctggaggtaaaaaaagaaagtgyttctaatctagttatattggcatcataaagtcttatttcacagaacctgagctatactattatgactgcaaagtgaaataaagtgtgtgaaatatgttgtagcccttaaaatgctctaaaatgtataacagtattacctaggtcaagcccacaaagatgatagatggaagcccagagaggttacataaccagatcaagctagctaacttgctggttatctaagtagggttatcttactggttagataaccagtaagttagtgccttacttggttatcttattggttaaccttacttagataaccttacttgattatcttactggttgtcgaaccagtaagttagtggctcactcgaggacttcaagctgtatctttcaacttccaattcattgttcccttttcatagcatgatacctctatgaccatcatgctaatactttggcaatgtacttcttatcctttccatttatttaacatcaggcatcttgcacatttatctcactaaattctcacaagaactcggcacagtcacatggtggaaggagaggttgagaaactcacttgtgtcacagaggtgaggaagagggaactggagtatatctggttctgaagtccacattctcaaccactgcaatacattgcctccctcccaagggttacctcaatctaaaactctctctcaactgtgtcagcaattttgcaggaaagaatcaacccttgggaaacatttgctgtgttgcagaaaacagactagctacttcacaagccttaactcacattattctggtaatcttttaattagttgttcttagtcctagtttataaaaatagataagccagctaataggaagcaaggaacttgtcacaggtcaaagtgccagtgt

SEQ ID NO: 671098 - DNA, 633 bp, Homo sapiens
tcctaacgatatgagggttttccctaaaattatttttcagaacaaaggaagctgccttattttcatgagtttacaatagatctcatataaaaagagtttttctaattatctggaccaatgaactatttgtcaagatatatttgcctgaaatgtactcaatgttgattttcaaagtgatagaggttactgcttgacagcactgggtttttaaaaggaagaaaakgaatttaacacagatttagtaattatttctggggttaaagagtatgatttccagatagaagcactgcttatcgttttaaacaagcctttcaaaaatgattttaaataccaatttaaataaaaatacatgaaatactgatacacgctataacatagatgaaccttgaaaacataatgctaagtgaaagcaccagtcacaaggaaacatattgtacaattatgtttatatcaaatgttcagaacaggcaaattcatggagataaaaagcagatcagtgcttgatgagggctgagggattgggagtaattatacagcgaccactaacagatgtggacttggaaggtgacaatatgtgctaaagttgagcgtgatcatggctgcatagctctgtgaatatactaaaaccactga

SEQ ID NO: 671099 - DNA, 748 bp, Homo sapiens
gaagaacacaggtaacatggtttggatctttgtctcctcaaaatctcctgttgacgtgttccccgtgttggaggtgaggtttggtgggaggagactgtaccctgggaacgaatccctcatgaatggtttagcgccatccccttggtgataagtgagtactcgctcagttagttctggttgtttaaaacagtcttggacctcgctcttatctctcttttactcctgctctcaccatgtgacatgcccactgcgccttcaacttccaccatgatggtaagctccctgagcagatgccagcaccgtgcatcttgtaaagcctgcagaaccaagagccaaataaacctctgttctttataaattacgcagcctcagatgtttctttatagcaatgcaaaaatggccaaacacaacaggggaatcccacagaagtaaggaatcaacaactaagattcaggaaagacatgagccgtgtggctctgggggccttggcagtaaggataggtgaatcttctctcctgcaactgcgaccacagtacacagctctaccgtccattttggccacatctgtgtgcctcaatattcaaattcccaagagasaaaaatggccaatcttgggtcatgtgatcccttagaagctaggagagaaggatctgttgccagatgcagacagacaatcagatataggaaaaggcataaatgcaggactgaggacatctgagtagcctgaaatcacatcgcataaatagtc

SEQ ID NO: 671100 - DNA, 748 bp, Homo sapiens
gaagaacacaggtaacatggtttggatctttgtctcctcaaaatctcctgttgacgtgttccccgtgttggaggtgaggtttggtgggaggagactgtaccctgggaacgaatccctcatgaatggtttagcgccatccccttggtgataagtgagtactcgctcagttagttctggttgtttaaaacagtcttggacctcgctcttatctctcttttactcctgctctcaccatgtgacatgcccactgcgccttcaacttccaccatgatggtaagctccctgagcagatgccagcaccgtgcatcttgtaaagcctgcagaaccaagagccaaataaacctctgttctttataaattacgcagcctcagatgtttctttatagcaatgcaaaaatggccaaacacaacaggggaatcccacagaagtaaggaatcaacaactaagattcaggaaagacatgagccgtgtggctctgggggccttggcagtaaggataggtgaatcttctctcctgcaactgcgaccacagtacacagctctaccgtccattttggccacatctgtgtgcctcaatattcaaattcccaagagacaaaaatggccaatcttgggtcatgtgatcccttrgaagctaggagagaaggatctgttgccagatgcagacagacaatcagatataggaaaaggcataaatgcaggactgaggacatctgagtagcctgaaatcacatcgcataaatagtc

SEQ ID NO: 671101 - DNA, 940 bp, Homo sapiens
ggaagtggggagtgtgaatggttggggtggggaagaccagagaaaataggaggaaaggcagtgagaaagagtctaagaaaggagtgactcctaaaggaaggtcgccttagcccacttcacttaacaggtttttgttgttgttgttttccgggatcagttctgtttacctttgtatagagtgattccacctggcttagtatgttggtgcatagcttttctctctctccttcctactaggttctttttgtaaatcacactttatttgttgccaaccctgatgagttggagtggccgatttaaaggtgaaattataagcaatttaaattaactggtggaaccagacttatgttctatttttattccttccctggtactgtgtaggtcagtggttagaagtgtgattcaaatcatagcaggatatgcttctcttgccttgtcttttaattggtcctctcagccttgtttgatttttgttttgattggaacccagcttcataatctggggtttatcttcataaagcacaacgtgccaaagacagagctatcctgaactgcaaccactgcctaatggtccagacattttccccctcaatttgcactacagctgcatctggcacactgcacaacattctttttcatttattggtatggaatgtgaaaacattttgaaagcagaaacacactatacaaatgtaaattgctattatggataatatgcagttctagggaaaagtttatgtagatatttacttgtaccttatcagcagaacatggctttgttggttttatgatgtgttattagatagatacagctgttattgtaaattggcttctttaatttttygtgacttgtgtctgtagttttaaaatggtttttctcctgacacatggtccctagatgacgtttcataattgattctctgctttcctactcaaaaca

SEQ ID NO: 671102 - DNA, 610 bp, Homo sapiens
tgccctggccctggagccacaaaaattgttgtctccctaaaccaaagcacaaagcattgcatagactaggatggctaaatagagcagcaggagtgaataaaagaatgatttacaccttaaagtaataatgttaataattagtaattaccaagcacttacttagcttgtgccaggcacagaggaaagcactttgaccctaactttttgaccccaaatatattttcattccatggtacatttaaatctcacatttctgctcttctcatttgctttgttctctgtgccaagaaatataaaatccctaactcatccaattcttaacaaatattacctgcagaaagaatctgttcgaagtaaaactagcaatggcaaaagcttcaaacagtaaaatttgttacgaccaaaaaataaaaataaaaaaagaatcctacatcttaggtaatattgaaaatagaaaattcgaactaaaaattttcatatwaaagaatagaatttttaatcccagcactttgggaggccgaggcaggtgggtcacttgagcccaggagtttgagaccagcctggggaacatgacgcgaccctgtctctactaaaaatacaaaaattagcc

SEQ ID NO: 671103 - DNA, 1249 bp, Homo sapiens
cagataatatcattagaatttataagaaaaaagaacccttgtaggcatggcagactgcataaaatagattgaacaagacgaggcttttaatgcaatctacctcattagtgagaggatatggatcaggcagggcacgataaattctgaggaccatcccaaagtgatccctgggacctattctgtaatgaagtaggaaggccagacctatcttaaaacactaagtctccctataatgttgggtgagtatcatccacaagttacatggcactttaattaagaggaccactaaaattataagctagaatacagacattgaaatagaaactttccttcctttctcccttccttcctccctctctcccttccttccttcctccctcccttccttccttttctcttcttcctgtttctttctttccattttatctttttacagaaagaacaacaggctactgacaaaaacacttacactgtaataagatgaactattagagataggggagactaatattcctggacatacagtcaagaaattcctctgggtttatgccaagagatagacatcagactgagtcaagcccaagcacacatgattgagatctctaaaatatgcctgacatgtgagaaaaaatttatctggagttcagctaatccatatcattcagttttctttttcttttgttaaactgaagtaaactttaatagttctttattaaccaccagctgttgtatgatccaattttaataacgttttccatttatcttgctttttgtttgtctaatcttttatctgtatataggcatagagaagtctggaataatattcacctaaagttagcaacagtcattttctgagtggtaagagggggctttatttgttgtgcttttataaattgcttgaatttttaaatgatttatttaaagaaatcagagggtttttaaataaaataatccacaacactgatttttcacttacccagtttctgattaaaagtggcaaatgaggaatgacgttacattgttaagccattaaatttgaaaaaaaaatgcaaatattgtaatcatgcaggtaaaccaaaaaaatttaagatgcaatttatcaaagccagaaatcattyaaagtaggcaagcaaagaaagtaaacattaagcatagtgaaatacaagagaccaactctacttaaaccatttcccactcaattaaacaattaaataaaacatttatttctaacagctggctgccagagatg

SEQ ID NO: 671104 - DNA, 2086 bp, Homo sapiens
ggtctcgatctcctgacctcgtgatccgcccgccttggcctcccagagtgctgggattacaggcatgagtcacygcacccggcccctccccattaattaaggtgagaaatacataaatgatgatggtagtcattgacgcaccagttacgaaagagtgaggctgggtaactggatgacacctgcacagggctctgaggtctcaaggaaaatgacaggtgtttgtgtatttcaaaaatgtggacatgatggcatgaggcccagtgaagaaggggtagattatgaatggtgttatcctgaacataaggagactgagatagtgtagttttaaaaatggcagcatgaaaaaaggtgaatgctaaccccaccccaccttacggtaagtgtctgaaaaataatctttccaggtactactagtaggtattcttaaaggacagaggcagctttctgtttgagtaggaaggtattggaagcagtatatgaaggaataaaaatataaaagagagaaatattggagcaagagtgggaagtatggttaaagataaagaaatggcagagcactttagggaaatatggtgtgagacagaaaagaggcatttttgagtgatgaaaatactaatcatggctaacacttacatagcatttatcgtatgtcaagcatttacgtgtattaactgttatgatgctcacattaaccccaggaggtcaggcctatcactttacaggaagtttaagcaacttctgaaatattaacaattcttctgaattgcttctctggtgacaggaataagagtcgcagtagcatcaacttgctaaaaagtttaaaatggtgctcagaataaaggtattttactgctttttgagactcattgtaaaatggcttgaaatgtctttgccctgaatctctgccagtgggaaattggatgagttgctaaagaatgtggaattaattatccaaaaacactttagatatttctctttgtatagggtattgtaaatggtctttagctaattataatttaatatctcacttgtctctctcatacataggtatatatgttatatacacatgtgtatgtgtacaattcaatacatctatgtgtctatgtagctacctatgtatgcatgtatgtatgtatgtatctgcctatctattaatctatctctgtgtatctacctacctatctatatctgtgtctatcaacttcaggaatgcttggcattcttctaacatctgcggggtatttagggattaggctatgatgatagatttccagcttcatttctttttaaaatcttttattcttcttgctcattttccttttcctgtccctaaaggacagtttctcctcagtttaggacttcttccttttgctctcttatcatttgcagactttccgttctcagccagaacctcccttttgtgcactgtacaacctgttgacactgtcacagttgccacttgatcattgcagataaaggaggaagtagcaattctggaatgggtggcttatctcttggctttataactggatatcttcatctgctattcagtcactcttttttattatggagacatgttttctgggaaaatgctaccatgaagcaggaccaatctccagttcaaggtacctcttgatttgttcattccaaagcatcccctgttaggaattagggctcagatcatggggtcatctattctgtaagtaaaaggctgacaaaaagtctgttacttcactgctctttacattagggtaatattaacaatggaaatccagttcattcaataaaacaagtgtcgatgaagagtcaaactcggtaaaatattttaagagacttattctgagccaaatatgagtgaccatggcacatgacacagccctaaggagatcctgagaacacgtgcccaaggtggtcagggtgcaggtcagttttatacattttagggagacatgagacatcaatcaaatacatttaagaaacacattggtttggttcagaaaggcgggacaattcaaagcaggggtgggggggtgctttcaggctataggtaaatttaaacattttccaattgataattggttgagtt

SEQ ID NO: 671105 - DNA, 1073 bp, Homo sapiens
gtctgtactaaaaatacaaaatttgttgggcgtggtggcgcatgcctgtaatcccagctactggggaggctgaggcaggagaatagcttgaacccgggaggcggaggttgcggtgagccgagacagtgccattgcattccagcctgggcaacaagaacgaaactctgtttcaaaaaaaaaaaaaaggagacttttataattaaatggagaggcagagtacaaaatttaatctcaactatgcactaagtatgcagcgaaaaggacccaaaagaaggtttgaggtgtggatattttttcatttgacttttctgactgtgaaggttttgtgaggctgtattcctttttaaaagctcctaagggccaggcatggtggctcacacctgtaaccccagcactttgggaggccacggcaggcagatcacgaggtcaggagattgagaccatcctggctaacacggtgaaaccctgtgtatactaacaatacaaaaaatttgctgggcgtggtggagggcacctgcagtcccagctactggggaggctgaggcaggaaaatggggtgaacctgaggggcagagcttgcagtgagccgagatggcgccactgcactccagcctgggcgacagtgcaagactctgtctcaaaaaaaaaaaaacaaaaaacctcataaaacattacagagctgtctccaagtactttagcatgttgattctcttaatgccccaggttaatatccccatgaagtccttagcagtcaactcatttacagagcctcagctgtggttccagtctctgctggttattgcttgtgctgcagggcagaaaacaaactgaacagtgtataatctaggtggactgatttggttggaaattattttactcccacaagaagagaaataaaaataaaataatatagatgtttttcaaccaatacattcttaaaattcttctatttccatccttctgcttaaagataaagtgatctactttcagctgtattttttatccaggtaataatattatgkttttttttttaagtgaaagccccactgaacaaaattaaaacacacacgcaa

SEQ ID NO: 671106 - DNA, 631 bp, Homo sapiens
tgataaacaagaaaatatttcacaattcaaaagaggcaggacataactacagacaaaaccctggacagaaagaattttttttgtaaatagtagtttagagaatacagcaagcactttacttgatatagttgacaccgggtttacggaagaggtagaaggtgggttgcggtcttgaaggatggctagaactttatgattatatcagagaagacaccattcaaggaagccataatagcatgaattggaaagtgcataatttatttsagaaatgtgaagaaaccatgtagttggatccatgagcttaggacagccagatactgcatcttgagacttttaattaaaaattcaaccatcatttctatacctaacttctgcaaaacttctatatgtaatatttttaaaacctttactaattaagtaaccagcattactgtatttactgtagtattcttactaaaatgcatattctcattctaatctcataatccaaattcataatctcattcgagtcatgagaaacccttagacaaacctaaattaagggacattcttcaaaacacccaaccagttactcttcaaagtgtcaaggacttgagtcatacgttttataacatgtattacaaaaacatac

SEQ ID NO: 671107 - DNA, 631 bp, Homo sapiens
tgataaacaagaaaatatttcacaattcaaaagaggcaggacataactacagacaaaaccctggacagaaagaattttttttgtaaatagtagtttagagaatacagcaagcactttacttgatatagttgacaccgggtttacggaagaggtagaaggtgggttgcggtcttgaaggatggctagaactttatgattatatcagagaagacaccattcaaggaagccataatagcatgaattggaaagtgcataatttatttgagaaatgtgaagaaaccatgtagttggatccatgagcttaggacagccagatactgcatcttgagacttttaattaaaaattcaaccatcatttctatacctaacttctgcaaaacttctatatgtaatatttttaaaacctttactaattaagtaaccagcattactgtayttactgtagtattcttactaaaatgcatattctcattctaatctcataatccaaattcataatctcattcgagtcatgagaaacccttagacaaacctaaattaagggacattcttcaaaacacccaaccagttactcttcaaagtgtcaaggacttgagtcatacgttttataacatgtattacaaaaacatac

SEQ ID NO: 671108 - DNA, 656 bp, Homo sapiens
ttaaataatatataaaattactttcaggctatgtataagaggtatacatgagacataatagaatgtcatgtttagatttgggtcccatccctgagatatattattatgtatatgaaaatatttcaaaatctgaaaaaatatgaaacacttctgatcccaagcatttcagataacagatatttrgcctgtatcaatgtcggtatgagccaggcactatgctaaacctttgcaatactttataaatattatctcattaaattcctaaaatagccctttggggtagatcttatattatcctcatagtgcagatgaggaaaataaggataagaaagggtaaaattgtctcagatgacacagtttaacagcggaaaaactaaggttacaccccaatcattgtaactcaggagtctgtacttttaaccttggaaagcactgacccccttaataaaaataagagaatggatatgtgagaatacatgattacatctcaatggagtacatagatttctctaaaaattctaatgctcttcctatttttctatatttacaccaaattttattttcattaaactcacagggagtttcacctattaggtatgtggttttatcttctttgtaagtgggtattccaacattttggggatacaccctagaca

SEQ ID NO: 671109 - DNA, 1463 bp, Homo sapiens
tctgtcactttgaatttctggacaatgttaacagcaaaatttgttacatacatacatgaagggagaggggagaaggcacacctgagagcctatcccaggcatgtattagaaacaggagggctgaggaccaggttcagtgcatctccacatctctgttgtctgcagcagggaacacataaaacctcttcaaggagttaaatcatccctccttattctaaattaaggcataccccaggaaccattgtcttgattcctgtgacctaacccagagcttggtacacaataggaatacaacatatatttattgaataaattaatagaagcaaatttatcctgacatttttggagaccagggctctgaatggaattggacaatatgagtttgaacaaagtaagcataattaaaatgttgcattatgtgtactcctttgaaatattaaaatcagctatagttttgttattagagtgattacatcgcctttgtttaagttgtaatgaacactcttactgcaaagaatatagttcatttaagaactataaaacattgcaaaagaaattgtttttttaaagctcatactaaagtgccatttacaaaacaagtcacaagtagttgtctataccagtaaccatcataggggtaaaataacaagatttgataaccaagtattagatctgtagattaggagtgtaaataatctttcttttcagttgttgaatactacaaaaaaaaaaagagygtgaaatgaaacattttacgcatgggtaattatgaagagagacacaaatatggtgcaaatttgaaagccttctctttctacacagagaaaagacaacattgccctttacaggccaattggaaagactttttaatgagaagtatggtttggaagataaatactgtatgttattgttttaatccctaaaaatctgttttcactaattgataatcgctggcaagtgaggactgttagtgataaatatagttatgatgcttccctcttcatttccaatgaaaatctgtttttttaaaaaaattttaatcaacaggagctagaaagagaattgaggtcatgtactgcctacaaatggtgtatacaattctaatgctgaaagcactggcattttcacaagagcttacatgaactcttcttaaattatgaccttttctctcatcacaaagggtttagggctttgtctttaaattcaataagataaaagaagaaatcaataaaaggatatcatatcagtcctcttggaggtgatcagcagaaaccaactatggttttatggaaagactctctggggagtcagcattgacaggaacctggagggacctacttggaaaattcattaggcaagggatggaaacacagcaaacatcgtggagttgaaaacatcctagtcaggatacctctgctgggatgaaggactaagggcacccagttcttgcctatatcctgtaa

SEQ ID NO: 671110 - DNA, 648 bp, Homo sapiens
agtcaagatgatccctaaaattaaccatcacaaggatatttattatctatctcatgaatctatatttttstgttgctgcttgtacatgtcatatctaagaaaccattgccaagttcaaggccactaaagtgactgctgtgttggagataaacaatacacaagatagttgtgttccactttccagagaatatagttgttgctacaaaaaaaaattaactgtctagacaaagactgcatctcccaggctcttatgccttcagatatggccatgagactatatcttgccaatagactatgagcagaaatgaagagtgttacttccagacccaggtttttaacaagtgagtctgcattaatcattatctttctccctatcctccatctgacagcagaggagtctagggcccccaaggatacagagatcacaaatggatatatggattcagggaggaacctgaatccatatatccctgaagaaaggaaaactacccaccaagtaggaaccactcacgctgaaatgaactcagaactcatgcccttacacatcaggtaaacatgcagttgttcttaaatgtcattgtgtatataaacaccagtgcaggatattacaaatgcagattttctgactccaacccagagagtactctt

SEQ ID NO: 671111 - DNA, 1993 bp, Homo sapiens
ctgtttaattcagaccaagtagcacttaccagaaaggaggaagggcagataaaaaattctcgtgtgacctttctgattacatctcttgagtgtgtaacagccattacacacttagggtccttatacacttagttggcaattcattgagagcatgaccatgtcattaagctgactgcttttgagtttagatcttgtttcagaaactgctgaaaagcagggccagctacataatttacctggaccaaatgtaaaacagccacctgggatatcaatctccccttagcatgggtcactgccctcacccatagaggatgggagacccctcagggattactacttctgtgctagaacacccttggcatctagttcagggtgggcaacaggcccccaacaagcgtcctgccaaatgcactgtggtgcttccagctagtagccagatggatagttaggataccatgaggcaccccaccctctccagtgcccagggcacctcagtgcagagagtggaggcagactgtgagttcctccatcctactcccacctcacaggacctgtatccatctcttctggaggatagcagaggtatggagggagacctggcagggtctcctgcccccacgggcagctgagactctgttgggggtgggggatggaaggtgtatggaagaagagtgagaactagaccacacttgcaccggggttccccacactcagcgcaggctctgttgttctgttaaacttcacttgcaaaacacaaattccaagacaaaaattaaaaatttcaagaggaccaccagagaacattaaaccccaagtactgaaaccttgtgagcaaaggtgctgtattactacactggtcacacacccatgagccaggcttgctaaatggttgttcaagactatccacaggctgggtgaggtggctcatgcctgtaatctcagcactttgggaggctgaggcaggaggattgcttgaggccaggattttgaggcaagactggagaacatagtgagaccccatttctataaaaaatttttacgaatcagctgggtgtggtggtacacacctgtagtcccagctacttggaaggctgaggtgagaggattacttgaggccgggagtttgaggctatggtgagttatgatcatattctagcttgggcaacagagcaagaccttgtttcaaaaaaagaaaaaaaaaaaagagactaaatatcaggctgcgtgggaataagtgaagttgaagtactaaaccaaaggaggaaattgacttaatttgcattaaacatactattccacaaattctgtggggcagcatgactaaattgtgccattctgtctgtattagtcagggttctctagagggacaggactaatgggatagatgtrtatatgaaggggagtttattaaggagtattgacttacacaggtgaagtcccacaataggacatctgcaagcagaggagcaaggaagccagtctgagtcccaaaacctcaaaagtagggaagctgacagtgcagccttcagtctgtggtcaaagacccaagagcccttggaaaaccactgatgtgggtccaagagtccagaagctgaagatcttggagtctgatgttcgagggcaggaagcacccagcatgggagaaaggtggaggccagaagacttagccggtagagtccttcctctgcctgcttttatcctagccacactggcagctgattagatggtactcacccagattgagggtgggtctgcctctcccagtcccctgactcaaatgttaatcttctttggcaacaccctcacagacacacccagaaaccatactttgtatccttcaatttaatcaagttgacactcaatattaaccattacactgtccatcactgctctctcttcaaccatcttctaaaacgtccttgccacttccccactgagataacttacaagggcaagccagttgctccccagaattgccatcttggttatttcc

SEQ ID NO: 671112 - DNA, 655 bp, Homo sapiens
tgcagaatgtgtcgtctgttgttcagacagctggagtccttggcatgtagcaatttttgtcagccgttttcagaagggaagcagttggcttttaatgctggcaggcggtcattggtaggtgactgctgtattatggagcaaaactttgtaggtgatcattggtagttgactattgcgtagcagaactttgcccattactttaagataaacaaataaaaagcatagctcattcctaaatcttaaatcctttgcttgtcagtgatactaccccacaccccacaaacctctttcagcttttacttataagggccactctggaaaattccatgccatagggggracaagatatgacaaaatcattaaaaaggtaaaggaggatagaagagtgtgtcccattaaagaaaatatcttcagtattgataaccaggaaactagaattcattcatttctatgaatgagaaaacaagtatgttgaagagacatcaaaggacatcatttcaagaatttagggaactcaatgttaaattaaagtctcatgccagtgggattcgagtggaaccaggccagagatgaggaggcagatgacatttcttgttctggtgctcatataaaaatgttccattttggtaatacaaaataattgaattaaatgaat

SEQ ID NO: 671113 - DNA, 818 bp, Homo sapiens
gtaattactgagtagaggaagaagatatagattttaaaaagaaaaatgataatgggggcttggaagaattttatgaaatgattatgagagttctatctactctgtctgccaaaattctaatattcaggcagaactaaagagtttctagaaatcctgtaggttttcttagctttcctttggatgatttgacacctgcataaactctgttgtgttaaaatatcaatcaaagctgtgatttctgcagcaccgcagtgagagaggcagagttctagctgctacatgctaaatcatctgattctgtatttgttcttttactgtaagaaattgtagcagagactgagtagctgttcacccaacccacttattccgcttcctgcacaaatagcaagccttcattcctcaacctgtcttgcagttttccatgaacaggtgattgagttctagccaaagactgactttattttaggtagcgtggttttctttcatattgttattgttgaactccaattccatttttatttttttaattaaaaaagagctattacttttataaaaacatacatgtatttttattttatttattataaataktttatctgtgaaaaaagttaaaaagaataaaaaaaactcagaaataactattgccaacatttggggaatatagtctcaacatttctctgtaaagagagagataaaaagaaagaaagaaagagaaagaaaggaagaaagggaaagaaagaaaaaaagaaagaaagaaaagaaagagactttcttttacccttgctatctctgatctctctagcattcagtataatctc

SEQ ID NO: 671114 - DNA, 485 bp, Homo sapiens
accatcatgtgatagcaaaaggaactagcctaggacaggcttaaataccaaggatgcataaccaaaagattgaaagaacccaggtgcttgacgcatccttgagccgtcagattaactagcactggcatggcccctatctctgggttaactactatgtaaaatagtgctgctttctgttgttgaagccatttaagggtgtgcgattgctctgtttcttcctgttgaaagcacccaaataaactacacctttagtacaccattctagatgataccttttgaaggtttaagtccctgctttattgaatgaagatcaaaatagctctatcattgagttgttgaaagagattaatgagataatgttaataaattatttgggccaggtgtggtggctcatgcmtgtaatcccagcactttaagaggccaaggagggcagatgacttgaggccaggagttcaagaccagcctggccaacatggtgaaacccc

SEQ ID NO: 671115 - DNA, 1620 bp, Homo sapiens
ttgcttttgaaaatattttatttcacttaactgtgatggttgtaaaaagttgcagaatttgcagaaatatttcattatatttggcatttatcatttgtttatcacttttgccaacaacgtaaggaggtgatgaattcaaatttgaaaataaacattgaatgtgttcagtctgaattgtttgcttakcatgaattacacttaaaggactattcagttttatgtgaggtaatggaaataccattctgtgtcaatggaaatattaagaagaggttggttagagaaatttctgcattttgaagagatggttccagaccaatggcttgaatcctttgttagactttggaatgacaaatgaagttgagtaaataacaaaaacagaaaaagaaaacaaaataaaaacaaaaaaactggtgtctaacctccacacctgattctcttgtttgtatttgggtctgggtataaatattatttgaaagctccctaatacgcaaccacagttgaaaaccgttcctctggaagatttcattatttccttccagcactaagattttgcccttcctagaaagtgttgtactttattgtagcttaaggaacaggaaaaaaagagtgtatattttaattttgcaagtaaaaatattaattgggattgaatgaatcttctgatgcagataacgtaaaatcacttttaatgaaaaaaattaaatatttatacaaatatctgctatgttccatgggtggtatacgtagtttacatatatgaactaattgaactcttggagtatagcctattaactaatattagaataattatatgaggatggtagcaccagcatcatcatcattatccccattacaggtaaactgatagggttgttaaggagtatgtttatctatcaataagtggaaaaactgaaaccaggcagttggctttaggggatacatagttaccccaaacactctactgcctgtcacagttctacaaacaggacccgccacaatgtgtacacccaaatccttcatccagcctagtgcccttttttaggacattataggacacttgggaaaaacttgatttattttcaatgaataagtgcagaattcagccctgtctaaaagaatgagctatagtctccagtatcatcttgacattccattagaaacaccttgaagacagatggaaattcatccctgttgtgaaaccctccagaaaatgatatgacacaatatccctgaggtcatacattttaatacctaacctcttcttcccccaagtttcttcttatatccaatccaaatgtctcatattctagttttaactcttttattttattatcttctcctttgtctagagaggagcttgaaaaaaaaaaatctgacttggaacagtttcattttccttagccagcagctgggatataggtggagctttgtgctctgttcctaccagatggccgaaactgctgccccagtggcggacaaccatgaatgggtgccagcattgctcaggagctttgaaaagtgacccatggccaagccccaccctaggccaattccatgctgtggtcatctgtccatgtcaaaaatctactacttcctaactgttaatatctcttcacgcaa

SEQ ID NO: 671116 - DNA, 1620 bp, Homo sapiens
ttgcttttgaaaatattttatttcacttaactgtgatggttgtaaaaagttgcagaatttgcagaaatatttcattatatttggcatttatcatttgtttatcacttttgccaacaacgtaaggaggtgatgaattcaaatttgaaaataaacattgaatgtgttcagtctgaattgtttgcttagcatgaattacacttaaaggactattcagttttatgtgaggtaatggaaataccattctgtgtcaatggaaatattaagaagaggttggttagagaaatttctgcattttgaagagatggttccagaccaatggcttgaatcctttgttagactttggaatgacaaatgaagttgagtaaataacaaaaacagaaaaagaaaacaaaataaaaacaaaaaaactggtgtctaacctccacacctgattctcttgtttgtatttgggtctgggtataaatattatttgaaagctccctaatacgcaaccacagttgaaaaccgttcctctggaagatttcattatttccttccagcactaagattttgcccttcctagaaagtgttgtactttattgtagcttaaggaacaggaaaaaaagagtgtatattttaattttgcaagtaaaaatattaattgggattgaatgaatcttctgatgcagataacgtaaaatcacttttaatgaaaaaaattaaatatttatacaaatatctgctatgttccatgggtggtatacgtagtttacatatatgaactaattgaactcttggagtatagcctattaactaatattagaataattatatgaggatggtagcaccagcatcatcatcattatccccattacaggtaaactgatagggttgttaaggagtatgtttatctatcaataagtggaaaaactgaaaccaggcagttggctttaggggatacatagttaccccaaacactctactgcctgtcacagttctacaaacaggacccgccacaatgtgtacacccaaatccttcatccagcctagtgcccttttttaggacattataggacacttgggaaaaacttgatttattttcaatgaataagtgcagaattcagccctgtctaaaagaatgagctatagtctccagtatcatcttgacattccattagaaacaccttgaagacagatggaaattcatccctgttgtgaaaccctccagaaaatgatatgacacaatatccctgaggtcatacattttaatacctaacctcttcttcccccaagtttcttcttatatccaatccaaatgtctcatattctagttttaactcttttattttattatcttctcctttgtctagagaggagcttgaaaaaaaaaaatctgacttggaacagtttcattttccttagccagcagctgggatataggtggagctttgtgctctgttcctaccagatggccraaactgctgccccagtggcggacaaccatgaatgggtgccagcattgctcaggagctttgaaaagtgacccatggccaagccccaccctaggccaattccatgctgtggtcatctgtccatgtcaaaaatctactacttcctaactgttaatatctcttcacgcaa

SEQ ID NO: 671117 - DNA, 638 bp, Homo sapiens
atatgtaacctgcctagggcactgcctggtgtgtagatcagctgcacatattagctgctggcatcactggcctccacgcaggagagtggggcttgaggatacttgcgtgtcacacgtgggacagaaagaatgggcgcagctcatatgcagggttttcatttgaacttggacatctgtggcattgcaacagggcattgaaggggaaggcccaagataagggcgatccccactttggtggagcaggaaccaggctaccccggctgtctcatctgggaacaccgtctcccaacccacacacacctgcctcagtcccggagcgctggcgacctctggtggtgaaaaaggcaatacgcttcgttttcagtccatcttcatttctggggggaggaaaaagagacaaaatttgaggacagcacgacaaaagcattacttttggctgtgatgttataatgccaagccacggagatagggagcaattcatgtgcaactcttcagggcctggcaggggygcacgctgcagtggcggctgcctttttcactgcccccacccctccccgcagaggtcctccttggggtgcaagttccaccgtgatactgcagaagtggccttctgcagataacgggggcggctggtctcc

SEQ ID NO: 671118 - DNA, 2031 bp, Homo sapiens
ttttgttacggcagactgaatagactaggacaccctctctggacaccagagaggtggtgggtccagacaccctctccggacccattacacccactgtgtatatatatatatatatatatatatatgctatatatacatgagaatcctcaagcccttttataagggccctaatcccatccgagagggctctgccttatgatgcagatacctcctaaaggccccacctcttaatactaccacaytggccattacatttcaagacatgaatcttgggggacacattcagatatatatatatatgtatatgccaacacagtttttttcttctgatgaagtcttcctctgtcacccaggctggagtgcagtggtgcaatcttggctcactgcaacctccacctcccaggttcaagcgattcttctgcctcagcctccttaatagctgggatcacaggcgcctgccaacacacccagctaatttttgtatttttagtagagacagggtttcaccatgttggccaagctggtctcaaactcctgagctcaagtgatctgcctgcctcggcctcccaaagtgctgggattactggcgtgagccactgcgcctggccacagatacagttttattagaaagttcaaaccaacagcgacaatagccacagtaactgtgagcttctccccaggtgcctggggcaccaggatttctctcgctggaagactgaagctatctgaccccgtgaggtatgagctgggacgagacggtggtcgtggggcaaaggcagcttcggcagcagtgcttacatttcacttttttcttagtttcctctgggagagtgggaaagaaagcaagtcttcgactttagaaggcaaatcttggtttaggtggtgccccaatcagaaagccacgcgtgccaatggcctctggcccatcactccacttctctctccatggaagctacggctccatgaagctctttggaagaattacaagcaaagccaaagttatattgtggcctggatctcttttggaagtaggtgatgtataaattcttaattaaggagatatacaatattatatttgaattttcaggcccagagccatcctggatagcacaatgagtggaagggaagtctcttatgtcccctgaacctccctcttcgggtgtctgcttcataaaaattgccagagaatttgctttcccagaagagattctgcctccagacctcctggcctgggtggggacagagcatttaccttgccaagctatgggaacagagggactgtccctttacagggctacagggttgctgagctagtaggatgcatctttttagctcctttcatgaggggaggcctacctgtgataagatgagatagagaggccctggatagagccatacctgaagccacctactcagacgcctcagttatattaacctacaagtcccctctcctttttttcctacagaagatggcttgtggttgacagagccttgcccactgtaagcaccaggaagcatgcagtaagaagaatgtgggcttcctcaaccatccacccacaggctgctcttgactcaggccctgtgatgtgtgctgggggcccagggatgaattatgtcctcagttacgacctcagtccattgaagggtcactgagacaaagccacgctgccctatgctgaatattggaagggtgggtgggaagagactaagggagggcttcccagaggaggtgacaccttaactcaagggaagaatggggcttgccaaagagaggagaaagcgtgggcacaggccacgaggctgtcaggacatggagtgtatgaagaaaccgcaggcagtgagccgggccagacttccctgtgctgggggagggtggagcggtgggaagacagctgcagcccccacgccagtcctgcaggggccccaggctggccctgctgcgtggagtgttggcaggaagaggctggagggaaactcaggaagacacgcatggctgagaacagtggtgggggaaggaggggagaaagccat

SEQ ID NO: 671119 - DNA, 717 bp, Homo sapiens
ggagctcttgcatggtccacgtgccgttgaggtttggctctgcaggggaatggacagacctgggctcagtcctggctgtgcctgctgctagcgtgttcctttctgtggcaataagattgagaacagacttgtgygatctgctgagactgggactcatttccaagtcctcacttgaagtgccctcagaaagaagtgaggaaggcatgctgcaatacttcaacgccattcccaggcacgccacctgggttggtgcagactccacaagttcaggacacggtccccaacaagactgccctcccttcacacaccagctccaagtccggccacccacacttttgaccaactggctacaaatcaaggattcctacgagccactcaggtttcataatttactagaacaatgcacagaactcagggaagcgctatatggatggttacaatcttataaaggttacaaatcaggaccaggcaaatgaagaggcacaaagggtgaggtctgggatggtctcaaacgtagagttcccatattcttgcctcgtggaatcaggactcatccccctccatacacattgacgtgttcaccaatcagcaagctccccctaggaacccagaacaaaagccagacacattccttaataggaaaacagggtgttggacacaatcctattccagccacacaccaacccatcctcccctctgctaccgcccagcggtctc

SEQ ID NO: 671120 - DNA, 1849 bp, Homo sapiens
agagaaagagagttttaattctttttctcttctttataatgttaacctgaatttttgtatttaaagttttttcccttcaaatgtctgcattttggcatctaacttcagagacccaggatgagttacatatgatagatccttataacgaaccattagtctcacttcttggaaagaatattggagtttgtgctaggctcaccatgagaggtaaatgcttaccagctgattaacctattgataaaagtggtggtagatgtggctacatggctattgcgcagaagcacaagggaaatcttcatggtaatgggatagatctacatcttgattgtgatgctgtctgcacaaatctatatgtgtgataaattagtatagagctatccatataaattttacatgtatcaatggcctggttttgatattgtactatagttatgcaaatataaccattgggagaaacttggtgatgagtacataagacctttgtaactatctttcaaactttttgagaatctataattattttaaaataaaatgttaaaaaacgttcttttctgcatgacaaatrtgctagtcatgccactgtacattctccttggatcattgtacccactctgatgacttaaactactgcaggcatattgaagacctaagaatctttattttattcagatatcccccctgagttccagactacataactctcaggctgtcccatgggtacctcaaattcaagatgtccaatgtgcatccccccaaacgacaaaataaatgtcatcttaaaaataatattggttatatatatcttattttctcaaaatacttttaaaagtcttatttaattctcacaacatccttcctaattggttaacagaaatactattatcctaatctaagagttaaagaaatcaaagagagttgttaaatgacttgtctgaggactctggttaatatagtagaagagtaaatattaaacccacatatcttgatttatattccagtactcttttcaaaatactattattgccatctgaagtcaaatgctagtgcatctttaatatattataacacatgcaagtaacttaaaagtagtgtgtttatactttttttctaaagtacctgattaaatagttctctagagaaacccacatgaagtaggtctatatttttgggcattttaaatagggcactgaatgtagtatttctcgtcagccattcagcatatattactctcatttttaactctgtttctttgtgttttaattctgggtgataggggcacttaatataacaggacacagcatgaagctttttgctttcttagggctttaagaccaatagaaaaaattaacattcttatagaggaaaaaattctgaaatacaaagtctctgacatctgtttccctcatttatttggatcttttaagattagcttatctcttctgggctcttggagtcttaaattgaaaacactgctttgatatatgtgtgtcgctatgatttgcacactgttaaaatgaatatcagatggttttatatttttgcaaaggcaatagctcaagcaggtaaactttatcttatgatctgaaaaccaagatgttgagacatggatatcaaagaatattgcttaattactttaaatatcttaatattttaaagacttgaccttaacaaaaattaatttaaattatgttgtacgttataagatgtatatccagcacacacttattaagtatctggacacagacaggaaagtaagaaaggcctttcaccaaggaagttaaacaaagctacagatacgttccattttaaagagaagcaggaggaggagccaagatggccgaataggaac

SEQ ID NO: 671121 - DNA, 1849 bp, Homo sapiens
agagaaagagagttttaattctttttctcttctttataatgttaacctgaatttttgtatttaaagttttttcccttcaaatgtctgcattttggcatctaacttcagagacccaggatgagttacatatgatagatccttataacgaaccattagtctcacttcttggaaagaatattggagtttgtgctaggctcaccatgagaggtaaatgcttaccagctgattaacctattgataaaagtggtggtagatgtggctacatggctattgcgcagaagcacaagggaaatcttcatggtaatgggatagatctacatcttgattgtgatgctgtctgcacaaatctatatgtgtgataaattagtatagagctatccatataaattttacatgtatcaatggcctggttttgatattgtactatagttatgcaaatataaccattgggagaaacttggtgatgagtacataagacctttgtaactatctttcaaactttttgagaatctataattattttaaaataaaatgttaaaaaacgttcttttctgcatgacaaatgtgctagtcatgccactgtacattctccttggatcattgtacccactctgatgacttaaactactgcaggcayattgaagacctaagaatctttattttattcagatatcccccctgagttccagactacataactctcaggctgtcccatgggtacctcaaattcaagatgtccaatgtgcatccccccaaacgacaaaataaatgtcatcttaaaaataatattggttatatatatcttattttctcaaaatacttttaaaagtcttatttaattctcacaacatccttcctaattggttaacagaaatactattatcctaatctaagagttaaagaaatcaaagagagttgttaaatgacttgtctgaggactctggttaatatagtagaagagtaaatattaaacccacatatcttgatttatattccagtactcttttcaaaatactattattgccatctgaagtcaaatgctagtgcatctttaatatattataacacatgcaagtaacttaaaagtagtgtgtttatactttttttctaaagtacctgattaaatagttctctagagaaacccacatgaagtaggtctatatttttgggcattttaaatagggcactgaatgtagtatttctcgtcagccattcagcatatattactctcatttttaactctgtttctttgtgttttaattctgggtgataggggcacttaatataacaggacacagcatgaagctttttgctttcttagggctttaagaccaatagaaaaaattaacattcttatagaggaaaaaattctgaaatacaaagtctctgacatctgtttccctcatttatttggatcttttaagattagcttatctcttctgggctcttggagtcttaaattgaaaacactgctttgatatatgtgtgtcgctatgatttgcacactgttaaaatgaatatcagatggttttatatttttgcaaaggcaatagctcaagcaggtaaactttatcttatgatctgaaaaccaagatgttgagacatggatatcaaagaatattgcttaattactttaaatatcttaatattttaaagacttgaccttaacaaaaattaatttaaattatgttgtacgttataagatgtatatccagcacacacttattaagtatctggacacagacaggaaagtaagaaaggcctttcaccaaggaagttaaacaaagctacagatacgttccattttaaagagaagcaggaggaggagccaagatggccgaataggaac

SEQ ID NO: 671122 - DNA, 1849 bp, Homo sapiens
agagaaagagagttttaattctttttctcttctttataatgttaacctgaatttttgtatttaaagttttttcccttcaaatgtctgcattttggcatctaacttcagagacccaggatgagttacatatgatagatccttataacgaaccattagtctcacttcttggaaagaatattggagtttgtgctaggctcaccatgagaggtaaatgcttaccagctgattaacctattgataaaagtggtggtagatgtggctacatggctattgcgcagaagcacaagggaaatcttcatggtaatgggatagatctacatcttgattgtgatgctgtctgcacaaatctatatgtgtgataaattagtatagagctatccatataaattttacatgtatcaatggcctggttttgatattgtactatagttatgcaaatataaccattgggagaaacttggtgatgagtacataagacctttgtaactatctttcaaactttttgagaatctataattattttaaaataaaatgttaaaaaacgttcttttctgcatgacaaatgtgctagtcatgccactgtacattctccttggatcattgtacccactctgatgacttaaactactgcaggcatattgaagacctaagaatctttattttattcagatatcccccctgagttccagactacataactctcaggctgtcccatgggtacctcaaattcaagatgtccaatgtgcatccccccaaacgacaaaataaatgtcatcttaaaaataatattggttatatatatcttattttctcaaaatacttttaaaagtcttatttaattctcacaacatccttcctaattggttaacagaaatactattatcctaatctaagagttaaagaaatcaaagagagttgttaaatgacttgtctgaggactctggttaatatagtagaagagtaaatattaaacccacatatcttgatttatattccagtactcttttcaaaatactattattgccatctgaagtcaaatgctagtgcatctttaatatattataacacatgcaagtaacttaaaagtmgtgtgtttatactttttttctaaagtacctgattaaatagttctctagagaaacccacatgaagtaggtctatatttttgggcattttaaatagggcactgaatgtagtatttctcgtcagccattcagcatatattactctcatttttaactctgtttctttgtgttttaattctgggtgataggggcacttaatataacaggacacagcatgaagctttttgctttcttagggctttaagaccaatagaaaaaattaacattcttatagaggaaaaaattctgaaatacaaagtctctgacatctgtttccctcatttatttggatcttttaagattagcttatctcttctgggctcttggagtcttaaattgaaaacactgctttgatatatgtgtgtcgctatgatttgcacactgttaaaatgaatatcagatggttttatatttttgcaaaggcaatagctcaagcaggtaaactttatcttatgatctgaaaaccaagatgttgagacatggatatcaaagaatattgcttaattactttaaatatcttaatattttaaagacttgaccttaacaaaaattaatttaaattatgttgtacgttataagatgtatatccagcacacacttattaagtatctggacacagacaggaaagtaagaaaggcctttcaccaaggaagttaaacaaagctacagatacgttccattttaaagagaagcaggaggaggagccaagatggccgaataggaac

SEQ ID NO: 671123 - DNA, 623 bp, Homo sapiens
atcaggttgtatacttcatagatatgtggtttattgtactttagttgtatctcaatgaagctggaaataaagtattttaaattttttaaaggtactattgaatttgaaatccatttgtgttttgaaaaatttcaacattacttttatcaataaaaaatggagagttttatattctttaagtgtaatcccaattgtaaaatgtttaatgctttaataaatgattttacattatttatcacctcctggcctgaaccgtatggcttatcaatcacggtcttttacaattttaagaaagcaaaatgaaagtcctgattaggaattgtatgtagtcacttcagatataacatccattatttaaaaagagaaagctgtgatcatgaatgaaaactgacggaaagctttaatttaaaaaattgcatataaatttagtgtgtaataccttcctaattatgtgtatgttactttattaaaattatttaatataartaaaccatggctttttttttttttttttaccaagccccaggtaacctctatccagcttactgtacaaaaattgtcattgcactctgatacagtttggctatgtcccacccaaatctcatcttgaattgtagctccca

SEQ ID NO: 671124 - DNA, 568 bp, Homo sapiens
ttctcctttcctaatctctggcttaaacggatttggaagagagagagagagagagagagagagagagagagagagagagagwgtgtgtgtgtgtgtgtgtgtgtgtttgagagagaaagtatgtgtgtgtctgtgttggggataggctatccagattatggcagaatagttcatgtctgagcttctctttaaaaggtgtgaagtgctgtgactctttttcctttgctgtgagccctagtcatcaattccatagcaacaggaaatatcatgttcactgtgcactagtatatggatgaatcagtaagctcctgaaggggaatagaagagagaggtgtcaagttaggttgagttagatcacaatcaaattttgaaactagtccaggagtttcttatataccaaaagcgaatggaagaatactataatctctttacattaatttggataacttcagtgctaaattctgaaatacaggtattttgctatttttgtgatggttaaatcaaaagaaagttatttctgtcttgttctgaagcagaagtggctttccaataaagtgagttctgaaaa

SEQ ID NO: 671125 - DNA, 568 bp, Homo sapiens
ttctcctttcctaatctctggcttaaacggatttggaagagagagagagagagagagagagagagagagagagagagagagtgwgtgtgtgtgtgtgtgtgtgtgtttgagagagaaagtatgtgtgtgtctgtgttggggataggctatccagattatggcagaatagttcatgtctgagcttctctttaaaaggtgtgaagtgctgtgactctttttcctttgctgtgagccctagtcatcaattccatagcaacaggaaatatcatgttcactgtgcactagtatatggatgaatcagtaagctcctgaaggggaatagaagagagaggtgtcaagttaggttgagttagatcacaatcaaattttgaaactagtccaggagtttcttatataccaaaagcgaatggaagaatactataatctctttacattaatttggataacttcagtgctaaattctgaaatacaggtattttgctatttttgtgatggttaaatcaaaagaaagttatttctgtcttgttctgaagcagaagtggctttccaataaagtgagttctgaaaa

SEQ ID NO: 671126 - DNA, 663 bp, Homo sapiens
actagtcaacccaggagacccactcttttgacggagtgataatgtcaccctctgttctcagactgctaataaagacacacccaagactgggtaatttataaagaaaggaggtttaatgagctcatagtttcacatggccgaggaggcctcacaatcatggtggaagatgaatgaggaccaaagtcatgtcttacatggcagcaggcaaaagaccttgtgcaggggaattcccatttataaaaccatcagctcccttgagacttattcactgccacaagaacagtatgggtggaacagcccccatgattcaatgatctccaccaggccatgcccttgacacatggggattattacaattcaaggtgagatttgggtagggacacagccaaaccgtatcacgcccccacttcacagagcatccagaaagtaaagaaacttacytaaggccacagagctagaaagtagcaaagctggatttgcacccaagagcgtctttgatgagagtcttcactcactctacacagccaagctgtctccaggggatggaatgtcatgccagcctcggaacagcacagggaacttggggtgctctgggtgccatcgatggattataacggctggagcaggcatggagacaggtcagttgaaatgaagttggaatga

SEQ ID NO: 671127 - DNA, 663 bp, Homo sapiens
actagtcaacccaggagacccactcttttgacggagtgataatgtcaccctctgttctcagactgctaataaagacacacccaagactgggtaatttataaagaaaggaggtttaatgagctcatagtttcacatggccgaggaggcctcacaatcatggtggaagatgaatgaggaccaaagtcatgtcttacatggcagcaggcaaaagaccttgtgcaggggaattcccatttataaaaccatcagctcccttgagacttattcactgccacaagaacagtatgggtggaacagcccccatgattcaatgatctccaccaggccatgcccttgacacatggggattattacaattcaaggtgagatttgggtagggacacagccaaaccgtatcacgcccccacttcacagagcatccagaaagtaaagaaacttacttaaggccacagagctagaaagtagcaaagctggatttgcacccaagagcgtctttgatgagagtcttcactcactctacacagccaagctgtctccaggggatggaatgtcatgccarcctcggaacagcacagggaacttggggtgctctgggtgccatcgatggattataacggctggagcaggcatggagacaggtcagttgaaatgaagttggaatga

SEQ ID NO: 671128 - DNA, 598 bp, Homo sapiens
aaaataggttaactaccttattgaatccttattgaataaggtacatcaaaagcctgaaagaaatggtataaaaatgtatctgtgcatatagctgatgcatcctaaaagagtaattggycatccttctttagctatttcaaagtactttgccttccaattaatggcctgtcttaggggtgagtattaacccatttatgcctgaggttgcaatttttgcagtcagaccttggtgatgaccttgagcagaatataaataaattaagaacagatgaaaataattgcttccattttccaacttggaaatctacactttagctacaattaacaacgaaacttaaacagaagctatttgctaagaaattatatcttaaatcagaccattagtctgtcaaaatgaaagtgaaaatttaaaatatggaagtgaaacatgggatgcagagaagaacacatgtcagagaccacgcgggtgtaaattttaacatttagtcttgactgttcttaagatcttcactgctttctggtaagttaaatcattctgaccagcaatcttggagaacttagataaagagacacctctcctgggcctgggaaagtgatg

SEQ ID NO: 671129 - DNA, 641 bp, Homo sapiens
tggtaacacaggaatcgatccagccaggcacaggaaggtttaaaactgctggtaaaaatctctgcttagaaacactgaacttttattccctattttgtggatactgtatagtctaaaaacaaatgtttagatttccaggctggaaagtttttttcacctgttcctgatgcttggcaggcagggcacacctccactgtatcttcgccagcatcatttcaacagcctttgacctgatctcctatctccagtcacgctcccacctaagcatcagcgcaatcttgcattgagtagktttgagtccagaggagccagacagacctagttttgactcaggatgttacttaatctctctatgcctatttctccatctgtaaaatgcaaataatagggttgttatgaggactaaatgcgttaatatgcataaaatgctcataactgtggctggactagtctgtccttcacatgcggaaaaagcttctgtgccttcccatcctccacatgtggccctgcctttctgccttcccacactgtcgtgctattctctatctgaaacagcttcaactccaaaccacagacaacaaagaccttgtgacatatctttccgtcatgtctttttcaaccttaaataaggaataacagta

SEQ ID NO: 671130 - DNA, 641 bp, Homo sapiens
tggtaacacaggaatcgatccagccaggcacaggaaggtttaaaactgctggtaaaaatctctgcttagaaacactgaacttttattccctattttgtggatactgtatagtctaaaaacaaatgtttagatttccaggctggaaagtttttttcacctgttcctgatgcttggcaggcagggcacacctccactgtatcttcgccagcatcatttcaacagcctttgacctgatctcctatctccagtcacgctcccacctaagcatcagcgcaatcttgcattgagtaggtttgagtccagaggagccagacagacctagttttgactcaggatgttacttaatctctctatgcctatttctccatctgtaaaatgcaaataatagggttgttatgaggactaaatgcgttaatatgcataaaatgctcataactgtggctggactagtctgtccttcacatgcggaaaaagcttctgtgccttcccrtcctccacatgtggccctgcctttctgccttcccacactgtcgtgctattctctatctgaaacagcttcaactccaaaccacagacaacaaagaccttgtgacatatctttccgtcatgtctttttcaaccttaaataaggaataacagta

SEQ ID NO: 671131 - DNA, 1784 bp, Homo sapiens
ctttatttctacctgggagaattgacataccagaccaatgattataactagccacacgatcattattgggtgagagctagcaaatgaatgtagaatcataaggattgtttagattttcataataataatacacctattattacatgtagattaaaacaattcataaccaaagtcctatttattttacaggtaaatgtctattttttgtaggttttttttttactacatgccttaacaaaattatattcatatcattaaatgggataggcttttcaaggaatgtaaatcatgttgaaatgtttcagttcttgccaacraacatgcttaaattaataacaatacaaaagtaataactttttatccaaagtttgctctctaaaggttcttttttttctattttttgacttgattttattttattttaatttttattttactttaagttccaggatacatgtgcagaacatgcaggtttgttacataggtatacgtgtgccatcgtggtttgctgcactatcaaccccgttatctaggttttaaaccctgcatgcattagatatatgtctttaagctctccctccccttgtccccaaccccctgactggccccgttgtgtgttgttcccctctctgtgtccatgtgttctcattagaactcttttttttttaacttttattttaagttgaggggaacaagtccatgttggttacataggtaaacttgtgccatggagatttgttgtgcagatcatttcatgactcactagttatttttcctgatcctcttcttctgcctaccctccactctgtgaaaggccccagtgtgtgttgttcccctctatgtgtccatgtgttctcatcatttagctcccacttataagtgataacacgtggcatttagttttctgttcctatgttagtttgctaaagataatcaccaccagctccatccatgccccttcaaaagacatgatcttgttctttttaatggctgcatagtattccaaggtgtatatgcaccacatttcctttatctagtctatcattgaggggcaattaggttgattccatgtctttgctattgtgaatactgctattaatacaatgaacatacttgtgcatgtgtctttacaatagaatgatttatattcctttgggtatatactttgtaatgtgattgctgggtcaagtggtatttctgcctctaggtctttgaagaagtaacaggtgctggtgagattgtggagaaaaataaccctttacttttaataaatattagcattagagttcctctacctttaacactcacttttcatttgccatcatctttctgctctagcccatatcctaaattttaatagaaattaggcacaccagccatcaatcaacactcgtgtctgatactttgaacattacatttattttatcaataatatactgattatgaaaattaaatagcagtcaacaaatttaagttactctacattgattacctgaataatttaacaggtaaaatataaaataacatatataacacattgagatccgtttattttcacagatgggacagtttgagtgcttacatagtcaaatgactgtttcagaatatggtcatgcaacaggaaatcctaatttgccgtttagtttaggagtcaaaactcttctattacatacaaaagtattatttattattattattattattattattattattattattattattgagatggagtcttactctgttgtccaggctggagtgcagtggtgtgatctcggctc

SEQ ID NO: 671132 - DNA, 1784 bp, Homo sapiens
ctttatttctacctgggagaattgacataccagaccaatgattataactagccacacgatcattattgggtgagagctagcaaatgaatgtagaatcataaggattgtttagattttcataataataatacacctattattacatgtagattaaaacaattcataaccaaagtcctatttattttacaggtaaatgtctattttttgtaggttttttttttactacatgccttaacaaaattatattcatatcattaaatgggataggcttttcaaggaatgtaaatcatgttgaaatgtttcagttcttgccaacaaacatgcttaaattaataacaatacaaaagtaataactttttatccaaagtttgctctctaaaggttcttttttttctattttttgacttgattttattttattttaatttttattttactttaagttccaggatacatgtgcagaacatgcaggtttgttacataggtatacgtgtgccatcgtggtttgctgcactatcaaccccgttatctaggttttaaaccctgcatgcattagatatatgtctttaagctctccctccccttgtccccaaccccctgactggccccgttgtgtgttgttcccctctctgtgtccatgtgttctcattagaactcttttttttttaacttttattttaagttgaggggaacaagtccatgttggttacataggtaaacttgtgccatggagatttgttgtgcagatcatttcatgactcactagttatttttcctgatcctcttcttctgcctaccctccactctgtgaaaggccccagtgtgtgttgttcccctctatgtgtccatgtgttctcatcatttagctcccacttataagtgataacacgtggcatttagttttctgttcctatgttagtttgctaaagataatcaccaccagctccatccatgccccttcaaaagacatgatcttgttctttttaatggctgcatagtattccaaggtgtatatgcaccacatttcctttatctagtctatcattgaggggcaattaggttgattccatgtctttgctattgtgaatactgctattaatacaatgaacatacttgtgcatgtgtctttacaatagaatgatttatattcctttgggtatatactttgtaatgtgattgctgggtcaagtggtatttctgcctctaggtctttgaagaagtaacaggtgctggtgagattgtggagaaaaataaccctttacttttaataaatattagcattagagttcctctacctttaacactcacttttcatttgccatcayctttctgctctagcccatatcctaaattttaatagaaattaggcacaccagccatcaatcaacactcgtgtctgatactttgaacattacatttattttatcaataatatactgattatgaaaattaaatagcagtcaacaaatttaagttactctacattgattacctgaataatttaacaggtaaaatataaaataacatatataacacattgagatccgtttattttcacagatgggacagtttgagtgcttacatagtcaaatgactgtttcagaatatggtcatgcaacaggaaatcctaatttgccgtttagtttaggagtcaaaactcttctattacatacaaaagtattatttattattattattattattattattattattattattattattgagatggagtcttactctgttgtccaggctggagtgcagtggtgtgatctcggctc

SEQ ID NO: 671133 - DNA, 2978 bp, Homo sapiens
  misc_feature 441, 442, 443, 444, 445, 446, 447, 448, 449, 450, 451, 452,453, 454, 455, 456, 457, 458, 459, 460, 461, 462, 463, 464,465, 466, 467, 468, 469, 470, 471, 472, 473, 474, 475, 476,477, 478, 479, 480, 481, 482, 483, 484, 485, 486, 487: n = A,T,C or G
  misc_feature 488, 489, 490, 491, 492, 493, 494, 495, 496, 497, 498, 499,500, 501, 502, 503, 504, 505, 506, 507, 508, 509, 510, 511,512, 513, 514, 515, 516, 517, 518, 519, 520, 521, 522, 523,524, 525, 526, 527, 528, 529, 530, 531, 532, 533, 534: n = A,T,C or G
  misc_feature 535, 536, 537, 538, 539, 540: n = A,T,C or G
ctcaacctccagagctcaagtgatcctcccacctcagcctccagaatagctaggactgtagccacacaaaactaggcctggctaatttttttattttttatagagatgaggtctcactatgttgcccaggcttgtctcgaactcctggcctcaagcaatccccctgccttagtctcccaaagcactggaatacaattgttactagatctttccactttgtcatatatatctgaaaggagtgacaaacctcaccagatatagtattcacagataagaatcatgtttatggttctcttatcaaaggcaatcattgcttaataaagattctatgacttcattacccttaattgagggtaggcctccagtgtaaaataaaataataaacatgctacaaggtgaacaatctaaaaaaagattctaaaaatattttcactcactggnnnnnnnnnnnnnnnnnnnnnnnnnnnnnnnnnnnnnnnnnnnnnnnnnnnnnnnnnnnnnnnnnnnnnnnnnnnnnnnnnnnnnnnnnnnnnnnnnnnncaagtaggttcttccgccgacgcgaattaatttggcaaaaagtatgaagaccatttaggcttgaaattaggaggcttgggttttggccccagttttgccattaactctttaggattagtgtcatttcatgtaaaatgagagggtagaatttaaaatttctaagtatgaatatgtaagaactcaactcctgactttatttccaagaattcaatctcttttttttgtacactatagtatcttaagtttcaaaaggtaaaattatgtcgcttgctaataagtttccaattccctttatatatctgaaactaagaacctatttttatagaaaactacccaatacaactaacttttgtgctgtgcttttcattttacaaaatgctaataacaattctgtatgggaggtattattattccaattctacagaaaactgagttcgaagaattgttaaacataaccctttttaaaataatccacattttactaaatctatagtttaaaaaatggctcagtgaacattgtttcttatagttaaattgattctgaagatgtcttggaattataattcagctaaacaaaaagggaggggggcagtttagtattgttcaaccagaagctgctacttgtaagcaacagaactagaattcatatgatattttctaactccaaatacctcatataacatattaaaacaccaagccatattaaatcttaaagtcatattatgactttgaacagtgaaatttaaaacatatgcaaagatttttaaataatacatatagaggagaggtaataataaataaaaataaggccgagagtggtggctcatacctgtaatcccagcactttgggaggccgaggcagacagatcacctgaggtcaggagtttgagaccatcctggccaacatggtgaaaccccgtctctactaaaaatacaaaaattatctgggcatggtggcgcacccctgtaatcccagctactgaggaggccaaggcaggagaattgctcgaacccaggaggcagaggttgcagtgagcygagatcataccactgcgctccagcctgggtgacagagtgagacttcgtctcaataaataaataaataaataatcaagttatacagtcaaaaaaatatcaaaaggtcgaacaaacttactggatcccaaaagtatgtggaaagcttaaacactggcatttcttttctctattagaattctttaatattacactttaaaaacatgaaagagcaatttttgcaaatatcttcatttaagcttatatttctaatcaaatttctcaaaatgcatatgcccaatttatactatcagctgaagtgctctcgattttttaggaaccaactcagcacagctagcacaattatcaaaataatcctttctaattcaaaatttaacatttgattgttttattaacttaaacgttttatctgctatgatactgtaatagtaaaagtttttctacaagtgccagaagaatttagagtaactagcaaactatcagggccaagttacaaacaatggttaaggtaaaaactgaaatactcactttattattttgtgtcacaagaatactcccacccccaggtttcaaaggcacctcttccattgctccaaacacatcagtctcaacagaaaaagttagttctagacccagatcacttatatcattatctaaaatccattgcaaatttttcgcatattctggatcaatggatgccacatcttggtaatttacaggaatacctaaaaaatgcaaacatacagcagttatagtctggttttgccttcccttatctatttaatggtaaaatactgccctctacagatattctgaaaaactgcaaaatataatacaatcctacacacagcatattttaaatggattcctgaatttgaaagtctgttaaattaattctgtgtttctttcacattgttacaatgtaatctttctttgagataactattcaggaagttattataaacttcaaaaatgccaattatcttaagtatactcacactgaaatgtattcttagcataaaaatacacacccaaaaattgaaaaaaaaaaaaaaaggctaacttaactagaggtgtttggaaaaaaaaaaggtaggtcattttattctccttcaaaccccgaatggcttacatatacagatgggctccaatcaaaataaaaattatctcatccaaaatactactgcttatctagttttcctcaaactgaaaaaaaaacaatataaataaatgtctgcagaaataataatagagccataccaagaatgtgcttgtagaaggatcgtgtgaagtaaatattgaccagctgcctgtggttcaacgctaatcccaagatctgcccagcaaaccgaaaatagttcaagtgatcaggatttacataagagttgctattaggctgaaaa

SEQ ID NO: 671134 - DNA, 2978 bp, Homo sapiens
  misc_feature 441, 442, 443, 444, 445, 446, 447, 448, 449, 450, 451, 452,453, 454, 455, 456, 457, 458, 459, 460, 461, 462, 463, 464,465, 466, 467, 468, 469, 470, 471, 472, 473, 474, 475, 476,477, 478, 479, 480, 481, 482, 483, 484, 485, 486, 487: n = A,T,C or G
  misc_feature 488, 489, 490, 491, 492, 493, 494, 495, 496, 497, 498, 499,500, 501, 502, 503, 504, 505, 506, 507, 508, 509, 510, 511,512, 513, 514, 515, 516, 517, 518, 519, 520, 521, 522, 523,524, 525, 526, 527, 528, 529, 530, 531, 532, 533, 534: n = A,T,C or G
  misc_feature 535, 536, 537, 538, 539, 540: n = A,T,C or G
ctcaacctccagagctcaagtgatcctcccacctcagcctccagaatagctaggactgtagccacacaaaactaggcctggctaatttttttattttttatagagatgaggtctcactatgttgcccaggcttgtctcgaactcctggcctcaagcaatccccctgccttagtctcccaaagcactggaatacaattgttactagatctttccactttgtcatatatatctgaaaggagtgacaaacctcaccagatatagtattcacagataagaatcatgtttatggttctcttatcaaaggcaatcattgcttaataaagattctatgacttcattacccttaattgagggtaggcctccagtgtaaaataaaataataaacatgctacaaggtgaacaatctaaaaaaagattctaaaaatattttcactcactggnnnnnnnnnnnnnnnnnnnnnnnnnnnnnnnnnnnnnnnnnnnnnnnnnnnnnnnnnnnnnnnnnnnnnnnnnnnnnnnnnnnnnnnnnnnnnnnnnnnncaagtaggttcttccgccgacgcgaattaatttggcaaaaagtatgaagaccatttaggcttgaaattaggaggcttgggttttggccccagttttgccattaactctttaggattagtgtcatttcatgtaaaatgagagggtagaatttaaaatttctaagtatgaatatgtaagaactcaactcctgactttatttccaagaattcaatctcttttttttgtacactatagtatcttaagtttcaaaaggtaaaattatgtcgcttgctaataagtttccaattccctttatatatctgaaactaagaacctatttttatagaaaactacccaatacaactaacttttgtgctgtgcttttcattttacaaaatgctaataacaattctgtatgggaggtattattattccaattctacagaaaactgagttcgaagaattgttaaacataaccctttttaaaataatccacattttactaaatctatagtttaaaaaatggctcagtgaacattgtttcttatagttaaattgattctgaagatgtcttggaattataattcagctaaacaaaaagggaggggggcagtttagtattgttcaaccagaagctgctacttgtaagcaacagaactagaattcatatgatattttctaactccaaatacctcatataacatattaaaacaccaagccatattaaatcttaaagtcatattatgactttgaacagtgaaatttaaaacatatgcaaagatttttaaataatacatatagaggagaggtaataataaataaaaataaggccgagagtggtggctcatacctgtaatcccagcactttgggaggccgaggcagacagatcacctgaggtcaggagtttgagaccatcctggccaacatggtgaaaccccgtctctactaaaaatacaaaaattatctgggcatggtggcgcacccctgtaatcccagctactgaggaggccaaggcaggagaattgctcgaacccaggaggcagaggttgcagtgagccgagatcataccactgcgctccagcctgggtgacagagtgagacttcgtctcaataaataaataaataaataatcaagttatacagtcaaaaaaatatcaaaaggtcgaacaaacttactggatcccaaaagtatgtggaaagcttaaacactggcatttcttttctctattagaattctttaatattacactttaaaaacatgaaagagcaatttttgcaaatatcttcatttaagcttatatttctaatcaaatttctcaaaatgcatatgcccaatttatactatcagctgaagtgctctcgattttttaggaaccaactcagcacagctagcacaattatcaaaataatcctttctaattcaaaatttaacatttgattgttttattaacttaaacgttttatctgctatgatactgtaatagtaaaagtttttctacaagtgccagaagaatttagagtaactagcaaactatcagggccaagttacaaacaatggttaaggtaaaaactgaaatactcactttattattttgtgtcacaagaatactcccacccccaggtttcaaaggcacctcttccattgctccaaacacatcagtctcaacagaaaaagttagttctagacccagatcacttatatcattatctaaaatccattgcaaatttttcgcatattctggatcaatggatgccacatcttggtaatttacaggaatacctaaaaaatgcaaacatacagcagttatagtctggttttgccttcccttatctatttaatggtaaaatactgccctctacagatattctgaaaaactgcaaaatataatacaatcctacacacagcatattttaaatggattcctgaatttgaaagtctgttaaattaattctgtgtttctttcacattgttacaatgtaatctttctttgagataactattcaggaagttattataaacttcaaaaatgccaattatcttaagtatactcayactgaaatgtattcttagcataaaaatacacacccaaaaattgaaaaaaaaaaaaaaaggctaacttaactagaggtgtttggaaaaaaaaaaggtaggtcattttattctccttcaaaccccgaatggcttacatatacagatgggctccaatcaaaataaaaattatctcatccaaaatactactgcttatctagttttcctcaaactgaaaaaaaaacaatataaataaatgtctgcagaaataataatagagccataccaagaatgtgcttgtagaaggatcgtgtgaagtaaatattgaccagctgcctgtggttcaacgctaatcccaagatctgcccagcaaaccgaaaatagttcaagtgatcaggatttacataagagttgctattaggctgaaaa

SEQ ID NO: 671135 - DNA, 2978 bp, Homo sapiens
  misc_feature 441, 442, 443, 444, 445, 446, 447, 448, 449, 450, 451, 452,453, 454, 455, 456, 457, 458, 459, 460, 461, 462, 463, 464,465, 466, 467, 468, 469, 470, 471, 472, 473, 474, 475, 476,477, 478, 479, 480, 481, 482, 483, 484, 485, 486, 487: n = A,T,C or G
  misc_feature 488, 489, 490, 491, 492, 493, 494, 495, 496, 497, 498, 499,500, 501, 502, 503, 504, 505, 506, 507, 508, 509, 510, 511,512, 513, 514, 515, 516, 517, 518, 519, 520, 521, 522, 523,524, 525, 526, 527, 528, 529, 530, 531, 532, 533, 534: n = A,T,C or G
  misc_feature 535, 536, 537, 538, 539, 540: n = A,T,C or G
ctcaacctccagagctcaagtgatcctcccacctcagcctccagaatagctaggactgtagccacacaaaactaggcctggctaatttttttattttttatagagatgaggtctcactatgttgcccaggcttgtctcgaactcctggcctcaagcaatccccctgccttagtctcccaaagcactggaatacaattgttactagatctttccactttgtcatatatatctgaaaggagtgacaaacctcaccagatatagtattcacagataagaatcatgtttatggttctcttatcaaaggcaatcattgcttaataaagattctatgacttcattacccttaattgagggtaggcctccagtgtaaaataaaataataaacatgctacaaggtgaacaatctaaaaaaagattctaaaaatattttcactcactggnnnnnnnnnnnnnnnnnnnnnnnnnnnnnnnnnnnnnnnnnnnnnnnnnnnnnnnnnnnnnnnnnnnnnnnnnnnnnnnnnnnnnnnnnnnnnnnnnnnncaagtaggttcttccgccgacgcgaattaatttggcaaaaagtatgaagaccatttaggcttgaaattaggaggcttgggttttggccccagttttgccattaactctttaggattagtgtcatttcatgtaaaatgagagggtagaatttaaaatttctaagtatgaatatgtaagaactcaactcctgactttatttccaagaattcaatctcttttttttgtacactatagtatcttaagtttcaaaaggtaaaattatgtcgcttgctaataagtttccaattccctttatatatctgaaactaagaacctatttttatagaaaactacccaatacaactaacttttgtgctgtgcttttcattttacaaaatgctaataacaattctgtatgggaggtattattattccaattctacagaaaactgagttcgaagaattgttaaacataaccctttttaaaataatccacattttactaaatctatagtttaaaaaatggctcagtgaacattgtttcttatagttaaattgattctgaagatgtcttggaattataattcagctaaacaaaaagggaggggggcagtttagtattgttcaaccagaagctgctacttgtaagcaacagaactagaattcatatgatattttctaactccaaatacctcatataacatattaaaacaccaagccatattaaatcttaaagtcatattatgactttgaacagtgaaatttaaaacatatgcaaagatttttaaataatacatatagaggagaggtaataataaataaaaataaggccgagagtggtggctcatacctgtaatcccagcactttgggaggccgaggcagacagatcacctgaggtcaggagtttgagaccatcctggccaacatggtgaaaccccgtctctactaaaaatacaaaaattatctgggcatggtggcgcacccctgtaatcccagctactgaggaggccaaggcaggagaattgctcgaacccaggaggcagaggttgcagtgagccgagatcataccactgcgctccagcctgggtgacagagtgagacttcgtctcaataaataaataaataaataatcaagttatacagtcaaaaaaatatcaaaaggtcgaacaaacttactggatcccaaaagtatgtggaaagcttaaacactggcatttcttttctctattagaattctttaatattacactttaaaaacatgaaagagcaatttttgcaaatatcttcatttaagcttatatttctaatcaaatttctcaaaatgcatatgcccaatttatactatcagctgaagtgctctcgattttttaggaaccaactcagcacagctagcacaattatcaaaataatcctttctaattcaaaatttaacatttgattgttttattaacttaaacgttttatctgctatgatactgtaatagtaaaagtttttctacaagtgccagaagaatttagagtaactagcaaactatcagggccaagttacaaacaatggttaaggtaaaaactgaaatactcactttattattttgtgtcacaagaatactcccacccccaggtttcaaaggcacctcttccattgctccaaacacatcagtctcaacagaaaaagttagttctagacccagatcacttatatcattatctaaaatccattgcaaatttttcgcatattctggatcaatggatgccacatcttggtaatttacaggaatacctaaaaaatgcaaacatacagcagttatagtctggttttgccttcccttatctatttaatggtaaaatactgccctctacagatattctgaaaaactgcaaaatataatacaatcctacacacagcatattttaaatggattcctgaatttgaaagtctgttaaattaattctgtgtttctttcacattgttacaatgtaatctttctttgagataactattcaggaagttattataaacttcaaaaatgccaattatcttaagtatactcacactgaaatgtattyttagcataaaaatacacacccaaaaattgaaaaaaaaaaaaaaaggctaacttaactagaggtgtttggaaaaaaaaaaggtaggtcattttattctccttcaaaccccgaatggcttacatatacagatgggctccaatcaaaataaaaattatctcatccaaaatactactgcttatctagttttcctcaaactgaaaaaaaaacaatataaataaatgtctgcagaaataataatagagccataccaagaatgtgcttgtagaaggatcgtgtgaagtaaatattgaccagctgcctgtggttcaacgctaatcccaagatctgcccagcaaaccgaaaatagttcaagtgatcaggatttacataagagttgctattaggctgaaaa

SEQ ID NO: 671136 - DNA, 2978 bp, Homo sapiens
  misc_feature 441, 442, 443, 444, 445, 446, 447, 448, 449, 450, 451, 452,453, 454, 455, 456, 457, 458, 459, 460, 461, 462, 463, 464,465, 466, 467, 468, 469, 470, 471, 472, 473, 474, 475, 476,477, 478, 479, 480, 481, 482, 483, 484, 485, 486, 487: n = A,T,C or G
  misc_feature 488, 489, 490, 491, 492, 493, 494, 495, 496, 497, 498, 499,500, 501, 502, 503, 504, 505, 506, 507, 508, 509, 510, 511,512, 513, 514, 515, 516, 517, 518, 519, 520, 521, 522, 523,524, 525, 526, 527, 528, 529, 530, 531, 532, 533, 534: n = A,T,C or G
  misc_feature 535, 536, 537, 538, 539, 540: n = A,T,C or G
ctcaacctccagagctcaagtgatcctcccacctcagcctccagaatagctaggactgtagccacacaaaactaggcctggctaatttttttattttttatagagatgaggtctcactatgttgcccaggcttgtctcgaactcctggcctcaagcaatccccctgccttagtctcccaaagcactggaatacaattgttactagatctttccactttgtcatatatatctgaaaggagtgacaaacctcaccagatatagtattcacagataagaatcatgtttatggttctcttatcaaaggcaatcattgcttaataaagattctatgacttcattacccttaattgagggtaggcctccagtgtaaaataaaataataaacatgctacaaggtgaacaatctaaaaaaagattctaaaaatattttcactcactggnnnnnnnnnnnnnnnnnnnnnnnnnnnnnnnnnnnnnnnnnnnnnnnnnnnnnnnnnnnnnnnnnnnnnnnnnnnnnnnnnnnnnnnnnnnnnnnnnnnncaagtaggttcttccgccgacgcgaattaatttggcaaaaagtatgaagaccatttaggcttgaaattaggaggcttgggttttggccccagttttgccattaactctttaggattagtgtcatttcatgtaaaatgagagggtagaatttaaaatttctaagtatgaatatgtaagaactcaactcctgactttatttccaagaattcaatctcttttttttgtacactatagtatcttaagtttcaaaaggtaaaattatgtcgcttgctaataagtttccaattccctttatatatctgaaactaagaacctatttttatagaaaactacccaatacaactaacttttgtgctgtgcttttcattttacaaaatgctaataacaattctgtatgggaggtattattattccaattctacagaaaactgagttcgaagaattgttaaacataaccctttttaaaataatccacattttactaaatctatagtttaaaaaatggctcagtgaacattgtttcttatagttaaattgattctgaagatgtcttggaattataattcagctaaacaaaaagggaggggggcagtttagtattgttcaaccagaagctgctacttgtaagcaacagaactagaattcatatgatattttctaactccaaatacctcatataacatattaaaacaccaagccatattaaatcttaaagtcatattatgactttgaacagtgaaatttaaaacatatgcaaagatttttaaataatacatatagaggagaggtaataataaataaaaataaggccgagagtggtggctcatacctgtaatcccagcactttgggaggccgaggcagacagatcacctgaggtcaggagtttgagaccatcctggccaacatggtgaaaccccgtctctactaaaaatacaaaaattatctgggcatggtggcgcacccctgtaatcccagctactgaggaggccaaggcaggagaattgctcgaacccaggaggcagaggttgcagtgagccgagatcataccactgcgctccagcctgggtgacagagtgagacttcgtctcaataaataaataaataaataatcaagttatacagtcaaaaaaatatcaaaaggtcgaacaaacttactggatcccaaaagtatgtggaaagcttaaacactggcatttcttttctctattagaattctttaatattacactttaaaaacatgaaagagcaatttttgcaaatatcttcatttaagcttatatttctaatcaaatttctcaaaatgcatatgcccaatttatactatcagctgaagtgctctcgattttttaggaaccaactcagcacagctagcacaattatcaaaataatcctttctaattcaaaatttaacatttgattgttttattaacttaaacgttttatctgctatgatactgtaatagtaaaagtttttctacaagtgccagaagaatttagagtaactagcaaactatcagggccaagttacaaacaatggttaaggtaaaaactgaaatactcactttattattttgtgtcacaagaatactcccacccccaggtttcaaaggcacctcttccattgctccaaacacatcagtctcaacagaaaaagttagttctagacccagatcacttatatcattatctaaaatccattgcaaatttttcgcatattctggatcaatggatgccacatcttggtaatttacaggaatacctaaaaaatgcaaacatacagcagttatagtctggttttgccttcccttatctatttaatggtaaaatactgccctctacagatattctgaaaaactgcaaaatataatacaatcctacacacagcatattttaaatggattcctgaatttgaaagtctgttaaattaattctgtgtttctttcacattgttacaatgtaatctttctttgagataactattcaggaagttattataaacttcaaaaatgccaattatcttaagtatactcacactgaaatgtattcttagcataaaaatacacacccwaaaattgaaaaaaaaaaaaaaaggctaacttaactagaggtgtttggaaaaaaaaaaggtaggtcattttattctccttcaaaccccgaatggcttacatatacagatgggctccaatcaaaataaaaattatctcatccaaaatactactgcttatctagttttcctcaaactgaaaaaaaaacaatataaataaatgtctgcagaaataataatagagccataccaagaatgtgcttgtagaaggatcgtgtgaagtaaatattgaccagctgcctgtggttcaacgctaatcccaagatctgcccagcaaaccgaaaatagttcaagtgatcaggatttacataagagttgctattaggctgaaaa

SEQ ID NO: 671137 - DNA, 590 bp, Homo sapiens
tttctttgttactttcacctggttcgacatctaagtaaatcaacattgctaatctgttagtttttttttttttttttttttttttttgagatgaagtctcgctatatcgccaggctggagtgcagtggtgcgatctcagctcactgcaacctccgcctcctgggttcaagcaattctcctgcctcagcctccggagtagctgggattacagrcaggcaccaccacgcccagctaatttttttatttttagtagagacaggctttcactatgttggccaggatggtctccacctcctgacctcgtgatccgcccaccttggcctcccaaaatgctgggattacaggcataagccactgtgcccggccacctcttagtttttttggaacaaagggaatctgaagatttttcagagtcaggaaagaattttgttaggatattaaatgtgggcaatgtttatttttaagtctacagatctgaagttacctttttcaagaacaaaaacactctttggtttgctcatagattgattattcctagtatattattttaaaagtactttattttaaaaagtcatatttaatgcatagag

SEQ ID NO: 671138 - DNA, 590 bp, Homo sapiens
tttctttgttactttcacctggttcgacatctaagtaaatcaacattgctaatctgttagtttttttttttttttttttttttttttgagatgaagtctcgctatatcgccaggctggagtgcagtggtgcgatctcagctcactgcaacctccgcctcctgggttcaagcaattctcctgcctcagcctccggagtagctgggattacaggcaggcaccaccacgcccagctaatttttttatttttagtagagacaggctttcactatgttggccaggatggtctccayctcctgacctcgtgatccgcccaccttggcctcccaaaatgctgggattacaggcataagccactgtgcccggccacctcttagtttttttggaacaaagggaatctgaagatttttcagagtcaggaaagaattttgttaggatattaaatgtgggcaatgtttatttttaagtctacagatctgaagttacctttttcaagaacaaaaacactctttggtttgctcatagattgattattcctagtatattattttaaaagtactttattttaaaaagtcatatttaatgcatagag

SEQ ID NO: 671139 - DNA, 590 bp, Homo sapiens
tttctttgttactttcacctggttcgacatctaagtaaatcaacattgctaatctgttagtttttttttttttttttttttttttttgagatgaagtctcgctatatcgccaggctggagtgcagtggtgcgatctcagctcactgcaacctccgcctcctgggttcaagcaattctcctgcctcagcctccggagtagctgggattacaggcaggcaccaccacgcccagctaatttttttatttttagtagagacaggctttcactatgttggccaggatggtctccacctcctgwcctcgtgatccgcccaccttggcctcccaaaatgctgggattacaggcataagccactgtgcccggccacctcttagtttttttggaacaaagggaatctgaagatttttcagagtcaggaaagaattttgttaggatattaaatgtgggcaatgtttatttttaagtctacagatctgaagttacctttttcaagaacaaaaacactctttggtttgctcatagattgattattcctagtatattattttaaaagtactttattttaaaaagtcatatttaatgcatagag

SEQ ID NO: 671140 - DNA, 590 bp, Homo sapiens
tttctttgttactttcacctggttcgacatctaagtaaatcaacattgctaatctgttagtttttttttttttttttttttttttttgagatgaagtctcgctatatcgccaggctggagtgcagtggtgcgatctcagctcactgcaacctccgcctcctgggttcaagcaattctcctgcctcagcctccggagtagctgggattacaggcaggcaccaccacgcccagctaatttttttatttttagtagagacaggctttcactatgttggccaggatggtctccacctcctgasctcgtgatccgcccaccttggcctcccaaaatgctgggattacaggcataagccactgtgcccggccacctcttagtttttttggaacaaagggaatctgaagatttttcagagtcaggaaagaattttgttaggatattaaatgtgggcaatgtttatttttaagtctacagatctgaagttacctttttcaagaacaaaaacactctttggtttgctcatagattgattattcctagtatattattttaaaagtactttattttaaaaagtcatatttaatgcatagag

SEQ ID NO: 671141 - DNA, 669 bp, Homo sapiens
atgtctaagtattcagaggttgtaaattaaaccatacccacaatctctggcttggtcctgacctgggccacagtggtccccagggactgtcctgcaacctagaggttgaagagccccagtctgccagcctgagtggaagcacagctctgcctgggcaggcagggtagacgggggtccaggctcagacagctgtgagtgaattcacctgcctgatcctggggcagggactgacctgggccaagcttttcagggagttctcagcgctcagtgcctttaccatcaaagcagaagaatgtcactgttaaatggctttgggaaaccctgcttgttaacttccctgcgcaccttcttgcggattcataacttatattrcactatatagtaaaggttctgacagatcataagatataaaaacctgcttagctttgtttaactcagcattttccacatggaatacgtttttgggaaagcttcctttttttttcataagtcttagtaatatcctgctttcataagtcagagttcttcaacacacctaaggaactgctgtttctggaaaggtttttggacctaaaatgcagagcactgaatgaatcatactccttagttcctgacatacaattatcagttgttcctacaaggacccattgtcattcattcattcattta

SEQ ID NO: 671142 - DNA, 784 bp, Homo sapiens
ctgagtcagagggcacctgcatacttaatttggttatgtaatgctagaagtctctccaaaataaatgctgttttcatatttttcttttctgtgctggtcattttggggtttgctgtaatttattttagctttgtaaaataaattgggtaattcttttttaaatcctggaacattttatattgcattggaattaattattctttgcaartgtgagactataggcagtatgactacttgatgccaaaacccatatgtagaggcaattcttgaaaatattttcagtttcttccttggctattggtttgaataaatttttattgttctcaatctgatgttggcatcaggcaggaataactaggtccatgagacacagacacaaagatatgtatttttttggttttgtttatgattttgtgacttgctgtaataccttaggaaggctctctgtgcccatgtgtactcaattgcactattgatgggcttgaaatgattggactccaaatgtacatggcaagagttcattctctgcatgtcacataagtctgctctggtcaacgaataggtcttctccctctttttatgatcttgaatttttgctcttaaattaacaatgatgtcatgcactttttggcacttaaaaatatatacataatatatacacataccttcaaggatttttctcctctgaagaagccaaggctggcaaattactacttataaatcaggtgatacttttggagtctgaattattctgactacctggagaacattgctttcttccttc

SEQ ID NO: 671143 - DNA, 1463 bp, Homo sapiens
tactttttctaactttctttttcctgattcatatttccctgcagcaacattggtgcaagtgatacttttctcagtagctgaggaatttcctagccacacattgcagggcccgggggtgtgcaggagggaaagttgtttgaaaattctacttttccatctgttcccagaactggaatgaaatgacagagttggtctcctccaacggcaattactgcaattaccgcaagccctttccgacctgcgatggctccaaaatccccatcctgggagtacacttgaaagacttgatagctgtccatgtcattttcccagactggacagaggagaacaaagtgaacattgtgaaaatgcaccagctctccgttaccctgagtgaactagtctccctgcagaatgcctctcaccacttagaacccaacatggatttgatcaacctgctcacggtgagttccaaggagccaagtttgggctcaataattcttctgcacctttctttccaggagacacaggaagatgtgtgccagcaattcattctgggggaaaattggtttcagagtcaatagatgagaggaaatctcatagaacaagggaaaaggagccctgattaatattttccataaccagcaaatcttggggcaaagaaatctacctttgttcggaggggcccagtctctgccatatgactccacttctggagttcttaggctcctccagactgtgcctcagccctcactctccttcaccacattcatccaacttatcacatccttctgtatgtcctccagtcatctgctcctctttatcctcactgcactgctttggctgaagcctggagtaatgcaaggaccttatctgtgatccccctgttcccattatgaacctcccaaacctccaggatgtagtttacagtctggcattcgaggttcttgaagactcagtctccaaccttctttgccatcaccctatcccacattttaccagcctttgagaaatattgaacttcttatactttccaccccatgaaatgctgtcttctgcttcctggcctttggacttgcttggagaatcccatcccaacccatccatgtggcaagttcaatttcaaaagcctgtctttctggagcattctctctccccctccawagcagtcatgcatctgtcacatcaccctggcactttatattttccttaactataggaggtatcactctttattcgatttttatctgtttatctgccttacatatcatatgcctagcacctctcacagttcctggcatatttgggaactcaataaatgaactgcatgctgtatttaggaatgatgtggcttagacaaaagaagttcacctaccactcatagttttttggcatttgtggcacacatgtttagctggtctctgcatcctagaacttttagacacaacggtgtatagaagagaacatttcccactggctgctgc

SEQ ID NO: 671144 - DNA, 618 bp, Homo sapiens
tagaaaacgcctactcatgggcaaaatagaagataaaattagaactggagggctgggtgcagtggctcatgcctgtaatcccagcatttttggaggccaaggcgggcagatcacaaggtcaggagatagagaccatcctggttaacacagtgaaacccygtctctactaaaaacacaaaaaaattagctggggtggtggcgggtgcctgtagtcccagctactcgggaggctgaggcaggagaatggcatgaacccgggagtcagagcttgcagtgagcccagatcatgccactgcactctggcctgggtgacacagcgagactccatctcaaaaaaaaaataaaataaaaaaagaactggaccaagtagaaaaagatatatggcattataaacactcactgaagtgttaatgtagccactaaatgtaaatatgcggtgaattataaatgacattataaatagcacaaaaatatgcaggaatattttaaaaaatcatttgcataataaccttccagacataaaggtattacctttaggagtggagtgctgagggatttcagtgaaacaagagctgtgtgaagcccagggtctcatatacaaattgagagactgcactg

SEQ ID NO: 671145 - DNA, 618 bp, Homo sapiens
tagaaaacgcctactcatgggcaaaatagaagataaaattagaactggagggctgggtgcagtggctcatgcctgtaatcccagcatttttggaggccaaggcgggcagatcacaaggtcaggagatagagaccatcctggttaacacagtgaaaccctgtctctactaaaaacacaaaaaaattagckggggtggtggcgggtgcctgtagtcccagctactcgggaggctgaggcaggagaatggcatgaacccgggagtcagagcttgcagtgagcccagatcatgccactgcactctggcctgggtgacacagcgagactccatctcaaaaaaaaaataaaataaaaaaagaactggaccaagtagaaaaagatatatggcattataaacactcactgaagtgttaatgtagccactaaatgtaaatatgcggtgaattataaatgacattataaatagcacaaaaatatgcaggaatattttaaaaaatcatttgcataataaccttccagacataaaggtattacctttaggagtggagtgctgagggatttcagtgaaacaagagctgtgtgaagcccagggtctcatatacaaattgagagactgcactg

SEQ ID NO: 671146 - DNA, 586 bp, Homo sapiens
caaagcatattataagtgttaaataacagattatcacaacaccaagatatatgagcatgtgaatctttatttttttggaaccaaaagttgcactataggctgtgtgagcacatagtgcaagcagtggccaaactctaatttcaattagagtgttttcctcccactcctgtgccaaactcaatgctcccacctaatagaatatgtcctctaaaaaggactaagaataaaacaagaacattgtacctcccatccattcaattaacaagtctttattaagcacctactawgtgtcaagcactgttccaggaacctgggaaatactgataaacaaaacagaccaaaattgctacctgcatagagcttctattctagtaagggaaaacagcagtaaacaataataaataagtgaactatatagtatgtaacaaaatgaaaagtgttgtgaagacaagacaaagtagaacaggaaaagactgggaatgctggggggatgataaagtataattcctaatatagtggtcacaatgggcctcgctgggaagatttgaagcatatgaacgaatgagccaagagtgtatcagagaga

SEQ ID NO: 671147 - DNA, 1258 bp, Homo sapiens
tgtgtgtatgtatgtgtgatacttttaggcaaccctctatcagacatcagggcaacttcttctrcaaaggtctctttatttgtgcaatgtaacgtacatacatcctttgaggcttgatgtttcgcaaaagttgacgaatctcagataatttcagatacaaaataaattttcaaagtcagctactttaacaggaatttgctggatgtttttccacatattttgtgtagctatgaagacataattttgctacaactcctgtgagccaaaggcaattttgtgaatattctttctcaatttactattggcagaaactgacatgcaaagaaaaatgatgaagcaaagcagaagagtgactgctcaggagactaggaactaattttctgatgccatgttcattgcatgatggtggaaaaataactttacaatttctggcatgactaaaaggatcagaacaaaaatctttagagttcagaaatatgggagatagattaattatattttcagcaaagattgtcgactagagatttcaggtaaaaccttctggaaggaactagtggagaataacacaaggagtatctgaatatatttgtctgaagaactgattcctgtgctcttaaggaagtgccctgttctcttaaagataggaacaagaatataatgaattttccagggactctttttgtcagtagtttattcaatagcattcttaccagtgtttttctcaacttggatttgtatcttaagtaccactcaaatttaataatgtttcattatacatcattcttcaaataaactagatttatattatcttctctttagaagaaaagtttacacctatttacagttggtcagacaggagacacatgtaagtaatctttaagtaacaatgtactctactaaacatttcacagatgtttttcatgttctaataatgtattttatagtcaaactcttcatttttttccaaccatcattttactttttgttttcatgccctacaagaaaaatacaagtaagcgtcaatgacaaaagcattggaaatgtgtctcgatttccagttttccctcagctatttaacctacgtaaaacccactacaggaaatatatggttgcaataataaaaatagagatggggttctgaagggcagatttctaagtaagaaattatttttcatgagcaaaaactgaaagcacaattcacataatatgcttttttaaaataaaagttttacttcaaaataataaaactgatctttgt

SEQ ID NO: 671148 - DNA, 1258 bp, Homo sapiens
tgtgtgtatgtatgtgtgatacttttaggcaaccctctatcagacatcagggcaacttcttctgcaaaggtctctttatttgtgcaatgtaacgtacatacatcmtttgaggcttgatgtttcgcaaaagttgacgaatctcagataatttcagatacaaaataaattttcaaagtcagctactttaacaggaatttgctggatgtttttccacatattttgtgtagctatgaagacataattttgctacaactcctgtgagccaaaggcaattttgtgaatattctttctcaatttactattggcagaaactgacatgcaaagaaaaatgatgaagcaaagcagaagagtgactgctcaggagactaggaactaattttctgatgccatgttcattgcatgatggtggaaaaataactttacaatttctggcatgactaaaaggatcagaacaaaaatctttagagttcagaaatatgggagatagattaattatattttcagcaaagattgtcgactagagatttcaggtaaaaccttctggaaggaactagtggagaataacacaaggagtatctgaatatatttgtctgaagaactgattcctgtgctcttaaggaagtgccctgttctcttaaagataggaacaagaatataatgaattttccagggactctttttgtcagtagtttattcaatagcattcttaccagtgtttttctcaacttggatttgtatcttaagtaccactcaaatttaataatgtttcattatacatcattcttcaaataaactagatttatattatcttctctttagaagaaaagtttacacctatttacagttggtcagacaggagacacatgtaagtaatctttaagtaacaatgtactctactaaacatttcacagatgtttttcatgttctaataatgtattttatagtcaaactcttcatttttttccaaccatcattttactttttgttttcatgccctacaagaaaaatacaagtaagcgtcaatgacaaaagcattggaaatgtgtctcgatttccagttttccctcagctatttaacctacgtaaaacccactacaggaaatatatggttgcaataataaaaatagagatggggttctgaagggcagatttctaagtaagaaattatttttcatgagcaaaaactgaaagcacaattcacataatatgcttttttaaaataaaagttttacttcaaaataataaaactgatctttgt

SEQ ID NO: 671149 - DNA, 640 bp, Homo sapiens
taaggaaggctattaaacatttttctttaaagtggatctgagagtgacagttctctctcctctcttcatgagagagaaaaagtgctctacgccctattgtcgcccacgattagccaaactacgtggttagtttgttcaaaacacgtatagaaacaacacagagagctgaagcatgtaagttagcggtgataacaacgactagctgcgacttaagtgtcctgtagctcacaaggttcctacaactttaaattcaagtctgtcwgctgttatgatatatacctcagaatgtttacgtttctttaagataatattgggtttgctgttgtttgccatgttcttcatttcaggaacatgtgcaaatcattatgttcaccataaatcatcacctcccccataggcattcatgtatctgtattttatttttcattttattttattaagactgcccaaaaccccaaaaatacagattatctttgagactcttgaatgagacatctatgtacaatatcctgaaagaataagatgcttattaaagccaactaattgctcctcatcttgttagtggaaatgaagtctttatattgagctgcctatcctcaccctgagagaataggagcttctgtttctttcaattaataaa

SEQ ID NO: 671150 - DNA, 806 bp, Homo sapiens
aaaaatacaaaaatcagccaggcgtggtgacatgcgcctgtaatcctagatactcgggaggctgagaggcaagagaatcgcttgaacctgggaggcggaggttgcagtgagcagagattgtgctactgcaccccagcttgggctacagagcaagatttcgtctcaaaaaaaatttctttattgatttaattgtatttctaaagaagtgagagttcaaatttaaaagaggcactcatatattcagtttgcctttttaattactcttgccttgcatagcgaatctwttataaggcagggaacttagcaatattttactgaagaaatgcttggtgacttctagggtggggaaatgatggggcggggattggactgaaaaactatctgttgggtactatgctcactacctgggtccaatacccatgtaaaaatccaacccatatcaaatataaaagctggaatttaaaaaagatggtgacatactaacatgattaaaatggatagagagacagatataatataaaatttgggtctagcagtaaaagaacctggtatagagagactgaatgtagataacgaggaatccaacttctgtcagaactgtaaaaattatcgtttttctgtcttggttgtaatttgttgtttgtatcagaggtgctatcataagacatttatttttattctgcttaactgaaatggggacataaggcaacgtacttcctggttacagttttattcccattctcagtatctagagtgaataaaataagtctgtgataacgataaaaatatgtgttgataattcttgg

SEQ ID NO: 671151 - DNA, 291 bp, Homo sapiens
tctcctcattaatactttggtwaattgatgcatatttttgagttactggtcacttaaatacatacatgaagaaaataaaatattaacatcctgtgtatcgactgagtttgtatgcagcccgctttggagatcagtatatcataacctgggaggactgctgtcagacatagtaagtttaaacatttgtcctttcatatgtggtagctaataatctctagagctcatttagccatattaaatataatcatgaagaagaaacagtaacttgcatgcgtgttcgtgtgtgtgtgc

SEQ ID NO: 671152 - DNA, 640 bp, Homo sapiens
taaaaagaaactagttctaaaatataaaaatgtattttttcctgcaaaccagaattaacaatttttaacactgcacttatctcacagataacgcttaataaaatatatgcaacatgaaagttcatattacctttatcaccactccaacacagtttccctcctgattttagaggcagtctggcatgtgtttttctgatatcacagcacacattttagttttayaacaaatcatagcatgtctattggatcactcgttattattttatataggttaaaatactttatgttttgttttgtaacattgatgtcattaatgtattcctgtgtttatggacatttgagttatcattatttccaattagaaaatacggtgcacatctttgtggcatattttacatttttatagtaattcattgaggctttgtactttgaagtagaattattaagcaacagaattttagtgaatcagaacatatttgtgcttcttgatctttatttttgattaagtactttgaatatcagaatttgtcgcgctttgtttttgttttttggtttttgtttttttgactgggtatcactatgttgctggggattgaatttttgggctcacacagtcttcctacctctgcttctgtagtag

SEQ ID NO: 671153 - DNA, 640 bp, Homo sapiens
taaaaagaaactagttctaaaatataaaaatgtattttttcctgcaaaccagaattaacaatttttaacactgcacttatctcacagataacgcttaataaaatatatgcaacatgaaagttcatattacctttatcaccactccaacacagtttccctcctgattttagaggcagtctggcatgtgtttttctgatatcacagcacacattttagttttacaacaaatcatagcatgtctattggatcactcgttattattttatataggttaaaatactttatgttttgttttgtaacattgatgtcattaatgtattcctgtgtttatggacatttgagttatcattatttccaattagaaaatacggtgcacatctttgtggcatattttacatttttatagtaattcattgaggctttgtactttgaagtagaattattaagcaacagaattttartgaatcagaacatatttgtgcttcttgatctttatttttgattaagtactttgaatatcagaatttgtcgcgctttgtttttgttttttggtttttgtttttttgactgggtatcactatgttgctggggattgaatttttgggctcacacagtcttcctacctctgcttctgtagtag

SEQ ID NO: 671154 - DNA, 640 bp, Homo sapiens
taaaaagaaactagttctaaaatataaaaatgtattttttcctgcaaaccagaattaacaatttttaacactgcacttatctcacagataacgcttaataaaatatatgcaacatgaaagttcatattacctttatcaccactccaacacagtttccctcctgattttagaggcagtctggcatgtgtttttctgatatcacagcacacattttagttttacaacaaatcatagcatgtctattggatcactcgttattattttatataggttaaaatactttatgttttgttttgtaacattgatgtcattaatgtattcctgtgtttatggacatttgagttatcattatttccaattagaaaatacggtgcacatctttgtggcatattttacatttttatagtaattcattgaggctttgtactttgaagtagaattattaagcaacagaattttagtgaatcagaacatatttstgcttcttgatctttatttttgattaagtactttgaatatcagaatttgtcgcgctttgtttttgttttttggtttttgtttttttgactgggtatcactatgttgctggggattgaatttttgggctcacacagtcttcctacctctgcttctgtagtag

SEQ ID NO: 671155 - DNA, 640 bp, Homo sapiens
taaaaagaaactagttctaaaatataaaaatgtattttttcctgcaaaccagaattaacaatttttaacactgcacttatctcacagataacgcttaataaaatatatgcaacatgaaagttcatattacctttatcaccactccaacacagtttccctcctgattttagaggcagtctggcatgtgtttttctgatatcacagcacacattttagttttacaacaaatcatagcatgtctattggatcactcgttattattttatataggttaaaatactttatgttttgttttgtaacattgatgtcattaatgtattcctgtgtttatggacatttgagttatcattatttccaattagaaaatacggtgcacatctttgtggcatattttacatttttatagtaattcattgaggctttgtactttgaagtagaattattaagcaacagaattttagtgaatcagaacatatttgtgcttcttgatctttatttttgattaagtacttygaatatcagaatttgtcgcgctttgtttttgttttttggtttttgtttttttgactgggtatcactatgttgctggggattgaatttttgggctcacacagtcttcctacctctgcttctgtagtag

SEQ ID NO: 671156 - DNA, 640 bp, Homo sapiens
taaaaagaaactagttctaaaatataaaaatgtattttttcctgcaaaccagaattaacaatttttaacactgcacttatctcacagataacgcttaataaaatatatgcaacatgaaagttcatattacctttatcaccactccaacacagtttccctcctgattttagaggcagtctggcatgtgtttttctgatatcacagcacacattttagttttacaacaaatcatagcatgtctattggatcactcgttattattttatataggttaaaatactttatgttttgttttgtaacattgatgtcattaatgtattcctgtgtttatggacatttgagttatcattatttccaattagaaaatacggtgcacatctttgtggcatattttacatttttatagtaattcattgaggctttgtactttgaagtagaattattaagcaacagaattttagtgaatcagaacatatttgtgcttcttgatctttatttttgattaagtactttgaatatcagaatttgtcgcgctttgtttttgttttttggtttttgtttttttgactgggtatcactatgttgctggggattgaatttttgggctcacrcagtcttcctacctctgcttctgtagtag

SEQ ID NO: 671157 - DNA, 831 bp, Homo sapiens
tggggttcaagcacatgccttgaggtgtggaaggcggcactgacaacctaggatgaaaccaaaagggctcagtccagtgtgagggcattgcaagattctctgcttaagccagacactgggacatgtcactcctgcttggcacaatggctttatcggaaggtatgggactggaggttattgtgtgaggggaaaaaaccctcacccacatgtggtgagcaaacaacccaagattctaagaccagttatcaaaatccccaacattactacagarcaagagactccaaacactattttaagacctaattctgaaatattctgcaggtagggagtaaccataaaactacagaatcactagagaggatggatgggagtgaacattaaaaatttaaaatgaaactcattcaaaatgagcctacaaactaaatttcccaaaacataaaaaagtagttctaaaagagacaaatatccaaatcaacagtcatgatataataccataaaatgtaaagaacatctcaagaactaagaatgtctaagatgaaaaagaaaagatgaagttatgaaagttttcaaatatttagaggattatggcagaagaggattaaacttaagaacccaaaccagctcttaagttcaattctctcaaatcaattttgagagatgtttcttatcagaaaagtaagttttaggtttgtcagatgatgagataaactgattaaaaacttttttttttaactactgctaataaatagccaagatgtaagttgggttccacagatcaatgtagtccctagcttcaaaaaagagatgtgacataaaagatctgaagatcat

SEQ ID NO: 671158 - DNA, 955 bp, Homo sapiens
accaatagattagcaaaaaaattttaaagtctgataatactgtgtattcataagcacacaggaaaagaatcgctcctgtaactgctggcgggcatatagattggtacagctcctttggaggatattttgaaatatttcatcctgttgaagatatatactactttttggaaatgtatcatagggaaacatcttgcaagcatttttcaatgcaggcacttggttggaataaaacattgcagacaactaacaggcctgttaatagaggaatggaaaatagtggtatatttatagaaaagaatatcataaaggaattaatgatgtcaactctgtccttatgtatcaacatggataaatctcaaaatgtaatattaacacagaaaaaataacaagctgcaaaaagattgtgttgatatgatcccattatgtgcattgtgaaacatacaggatcatatattgtttatagatatatctatacacatacagaagtacaaaaatgcagcagtaagatatacatcaaccttagggtggaggtagtggacagaaagaatgagaaagacctgttgttttatctgaatatattagttttttaaaaaataaaatctgaagttgatatgacaaaaatttgatatttatccaatttgagtaatgggtacatcagtgtgtattatattattttctgtaagtttatgttgtatatattgagatagttcaaaattcaaaattttaatttgatgattaatcctggcagtcatgtgcctgtagaytggagatttattttttccttccaaaacataaaactatctcgtcactctactgtcacacaactgagaatgttggatagtttgaatccaagggtcagaaaaggtgttcaagaatcaaaaaagcaaattgccaagttgggtgtcaaggtgagttgatctcttctgaatactggaagtaacttgcaattcaactg

SEQ ID NO: 671159 - DNA, 955 bp, Homo sapiens
accaatagattagcaaaaaaattttaaagtctgataatactgtgtattcataagcacacaggaaaagaatcgctcctgtaactgctggcgggcatatagattggtacagctcctttggaggatattttgaaatatttcatcctgttgaagatatatactactttttggaaatgtatcatagggaaacatcttgcaagcatttttcaatgcaggcacttggttggaataaaacattgcagacaactaacaggcctgttaatagaggaatggaaaatagtggtatatttatagaaaagaatatcataaaggaattaatgatgtcaactctgtccttatgtatcaacatggataaatctcaaaatgtaatattaacacagaaaaaataacaagctgcaaaaagattgtgttgatatgatcccattatgtgcattgtgaaacatacaggatcatatattgtttatagatatatctatacacatacagaagtacaaaaatgcagcagtaagatatacatcaaccttagggtggaggtagtggacagaaagaatgagaaagacctgttgttttatctgaatatattagttttttaaaaaataaaatctgaagttgatatgacaaaaatttgatatttatccaatttgagtaatgggtacatcagtgtgtattatattattttctgtaagtttatgttgtatatattgagatagttcaaaattcaaaattttaatttgatgattaatcctggcagtcatgtgcctgtagattggagatttattttttccttccaaaacataaaactatcycgtcactctactgtcacacaactgagaatgttggatagtttgaatccaagggtcagaaaaggtgttcaagaatcaaaaaagcaaattgccaagttgggtgtcaaggtgagttgatctcttctgaatactggaagtaacttgcaattcaactg

SEQ ID NO: 671160 - DNA, 611 bp, Homo sapiens
cgaaattttatgaatatgataaaattcagattgaagattctctcttaaattaactgctttggaaaggccagcattcacaattaagagctataaacatttaggagtaagtcatcccagcttttgtagtttttttaacacttaacataaaaataacacacatacctatatattctataattgaggaagatgtttttrtaaagaacatcacttgctttctgccttaaatccttccaccagggaatgaggagcaaacacgtgctcatttgtaagcccacgatgacactcagtaaatctgtccagtagtcaaagctcaatcattgccacacgaaatcctcccaaatctcctccagcttactcctgaagttgcagactttccgatattgtagtactcctaatgaaagacagatccctctgatagagattccctgcccaagactctcttaggtcatgaaagatactaattcatcttttcatctggtccttaatgaccaataatggatcctctttccatttgttaggcttagtttagtaaaagcactttttggaagcaagttcctgtttaagtttgtaagtggcatttcttacgcctaaaatttttgcactggacaatt

SEQ ID NO: 671161 - DNA, 611 bp, Homo sapiens
cgaaattttatgaatatgataaaattcagattgaagattctctcttaaattaactgctttggaaaggccagcattcacaattaagagctataaacatttaggagtaagtcatcccagcttttgtagtttttttaacacttaacataaaaataacacacatacctatatattctataattgaggaagatgtttttataaagaacatcacttgctttctgccttaaatccttccaccagggaatgaggagcaaacacgtgctcatttgtaagcccacgatgacactcagtaaatctgtccagtagtcaaagctcaatcattgccacacgaaatcctcccaaatctcctccagcttactcctgaagttgcagactttccgatattgtagtactcctaatgaaagacagatccctctgatagagattccctgcccaagactctcttaggtcrtgaaagatactaattcatcttttcatctggtccttaatgaccaataatggatcctctttccatttgttaggcttagtttagtaaaagcactttttggaagcaagttcctgtttaagtttgtaagtggcatttcttacgcctaaaatttttgcactggacaatt

SEQ ID NO: 671162 - DNA, 782 bp, Homo sapiens
  misc_feature 4, 35, 114, 117: n = A,T,C or G
attntgaacttatccataattgagatcatggccanaatatcttctatcaaaacttaagataagtgacttcctgaagttcatggtgaatcacgtgacttggctgatattggtaanggnaagccatatttgaaagatgctaaagtagtcattcacattttctgagtttttactgtgtgccaagcactgttctaagttccttgtgtacgttgtctcatttcattcccacagcagccctgtgatataagaactsttatcctcattctacagattaggaaactgaggttttgtaacttaccacagtcacctggctggtaggggacagagctggcgttcgagtacaactgacggactcgagagctcagaccctaaccagtaagccctgctgccttctttacttatgtccgtacaatccacttgaatcatcttctgcctctgcaaaagagtcattaagaattccacgagtgagatttcagcatcggagctccatcgcaggaaccgccccattcttaccacagtccttcctgcagctgccatcttcccagttgtagccaggccaagcagctgcattctgctattgcagcttatgtaacagctccatatttacaagtgaagttttgatgtgcctattaaaagtaaatatgtaattggaaccttgagaggattggtgtgattcatgcatcatttaaataacagagccgtgcttctggaggtgggttgatggtgccctgttgtaactggtttctcattctccatcaggtgtgccaggtcagtgcccagcagcc

SEQ ID NO: 671163 - DNA, 942 bp, Homo sapiens
acattttcaagtttaactcttctagaattatgaaattcaaaacaagagctattagtattaggttcaatcagtatcagggaagggaatttttgtgtatattagtttggattcctttcttattttttcctccaaagaatcattaattggattcctctggtgatggtcagaaaagtaagttgtcagtaatgatgagtactcacaaactgaaaagctgcttcaaagttataaaattccacatatgtgctctaccgcatttctacaatacgttgtatccttaaaaataaaaatgtctctttgggaggccgaggcgggcggatcacgaggtcaggagatcaaggccatcctggctaaaacggtgaaacaccgtctctaccaaaaatacaaaaaattagctggacgtggtggcaggcgcctgtagtcccagctactcgggaggctgaggcaggagaatggcgcaaacccgggaggcagagtttgcagtgagccaacatcacgccactgcactctagcctgggtgacagagcgaggttccgtctcaaaataataataataataataataataataataataataataataataaataataaaaatgtctgatccaagacaccaagtttttcaaagaccaacagcaaaaaaaaaaaaaacaagttgtgactaagcagctatcatataattaaagggtacttataaaagaagagttgagaaaatattcttcatttgtaccagagatatattctcttatttggtatatatatatatggaaaaaatatatatatatatggaaaaaaaaatatatatggaaaaaawatatatatggaaaatacatatatgaatgtatatatatggaaaatacatatatgaatgtatatatatggaaaatacatatatggaaaatacatatatggaaaatacatatatggaaaatacatatatgga

SEQ ID NO: 671164 - DNA, 641 bp, Homo sapiens
tctctctgccacccaggttgcagtgcagtggtgccatggctcaatgcagcctcaacctcctgggctcaagggttcctcctatcccagcctcctgagtagctgggattacaggtgcatgccaccattcccagctaatttttttaatttttttttttttttttgtagagatggagtctcgytatttttccctggctagtcttgaactcctaggctcaagtgatcctccccaccttggcttcccaaagtgctgggattataagtgtgagccaccatgtccagcctatttttacattttctaaatcatttcctaagtcattaaatatatgtctcttctttgctagattttgcccggtgatctaatctaaaagtctttttaaaaaaataggtgcattttacccatttatataaagtgatatgatagatacatttggccttaaacatgtcatattagctcatattacgcttgagttttttcttaagttttgaagttcaagaattttactaagaagtggtacattttggaccagacatgaaaaaagccagagtgcacaaataagctgtgtgaacaggtgacccggacccctgtgtcatcaaccactatagaaataacatcttacactcaggtgacacttatggccaca

SEQ ID NO: 671165 - DNA, 638 bp, Homo sapiens
tgcccaataagcttagtcatcattattatacattgttgcctttcaaaggtagttttctaaaaactctgcaaagtttacaaatatctgagaacatttggtgtattaaaatgtattctgcaggccaggtgtggtggctcatgcctgtaatcccagcattttgggaggctgaggcaggcggatcttgaggtcaggagttcaagaccaacctggccaacatggtgaaaccccgtgtctaaaaaaaaaatacaatagttagctgggcgcagtggtgtgcacctgtagtcccagctactccggaagctgaggcaggagaatcgcttgaacctgggaagcgaaggttgccgtgagtcgagatcgcactactgcaatccagcctgggtgacagagtgagactctgtctcaaaaaaaaaaaaaaatgtattctgcaataacatcactatcctagaattttgctgaaaaatgcatgttggtaaaggctaaatggagcgaactaggtytactgaatttcacaggtttattattttaggaacttggtggtggcaaaaagagagaaccaggttgggttctgaattcttggaaattatagaattattgtctgaagttaactgatagtgattcaacttttttaaaaaaaagca

SEQ ID NO: 671166 - DNA, 1418 bp, Homo sapiens
ttgccttgttttcttagcctctgtcaatctggaatgcctccttcctcactccactcaacctctgacaacttgctataggtcaccaccagtgctgtctcctgtctctccaggtccccacccttgctatactgtggatgctttccttaccctgctggtttctgaatgctctgccatggtcctgggcctccccactacccagcatggatgcctaagctgaactgaatgaccttggactgaattgttcaaaaagagaaggggaaaggaagaggaagaagaatgccaagtaatttgatttttcttttttcatgatcaaaccaatgtcttggaattgattatcatttccatgggctacttcagctccgtactgtttgtatagagtttggtgaaaatgaataaaggcatgtgaactacattttttgtttttttttttttgtttttttttgagacagagtctcactccgtcacccaggctggagtgcagtggcacgatctcagctcactgcctcctcacaggcacctgccaccatgccctgaaattttttcatatttttagtagaggcagggtttcaccgtgttgtccaggctggtttcgaactcccgacctcaagtgatccacccgcctcagcctcccaaagtgctgagattacagctgtgagccaccgtgcccagcctgaactccattttttatagagtaccatttgacactaaaattaagagtctgttactcatctgcagaatctctcttaaaatggtattactaaaaggtccaaaatgaaacatctgtaaaaataattattcctacactctgtgagatctctttcctgacacatttcacatctaagtgagtttcctaactaacccacacacactctatagtaggcttacccktctttccccaggctggctggcgaacttgcaaaacataaccatttaggggaaaaaattgaggcaattaaaattaaaagtgttttaggctaagtaatgaataaattaacccactgaaaagttacatcaaaggctattactcagcattttaccaattacaggaatttctgcaaaatctgcccagccatttgtttgtgtatccctgggatcagtgcccagagttcaatctttctcttgatgcttcctgttgttttcagggactcaatgagagcagtaagtgacctttcactcagtgcaagtctatgggcactgaagttacgaaaatatttcccttcatgcagaatcttcctaacaaagctttcccatgtatttgtcaggtcaaataacattcagataaactgcacataatccccaaaatgccaaatgtttagagagcttttttttttttgagacggagttttgcgttttgctcttgttgcccaggctggagtgctatggtgggatctcggctcactgcaacctccacctcccag

SEQ ID NO: 671167 - DNA, 1418 bp, Homo sapiens
ttgccttgttttcttagcctctgtcaatctggaatgcctccttcctcactccactcaacctctgacaacttgctataggtcaccaccagtgctgtctcctgtctctccaggtccccacccttgctatactgtggatgctttccttaccctgctggtttctgaatgctctgccatggtcctgggcctccccactacccagcatggatgcctaagctgaactgaatgaccttggactgaattgttcaaaaagagaaggggaaaggaagaggaagaagaatgccaagtaatttgatttttcttttttcatgatcaaaccaatgtcttggaattgattatcatttccatgggctacttcagctccgtactgtttgtatagagtttggtgaaaatgaataaaggcatgtgaactacattttttgtttttttttttttgtttttttttgagacagagtctcactccgtcacccaggctggagtgcagtggcacgatctcagctcactgcctcctcacaggcacctgccaccatgccctgaaattttttcatatttttagtagaggcagggtttcaccgtgttgtccaggctggtttcgaactcccgacctcaagtgatccacccgcctcagcctcccaaagtgctgagattacagctgtgagccaccgtgcccagcctgaactccattttttatagagtaccatttgacactaaaattaagagtctgttactcatctgcagaatctctcttaaaatggtattactaaaaggtccaaaatgaaacatctgtaaaaataattattcctacactctgtgagatctctttcctgacacatttcacatctaagtgagtttcctaactaacccacacacactctatagtaggcttacccttctttccccaggctggctggcgaacttgcaaaacataaccatttaggggaaaaaattgaggcaattaaaattaaaagtgttttaggctaagtaatgaataaattaacccactgaaaagttacatcaaaggctattactcagcattttaccaattacaggaatttctgcaaaatctgcccagccatttgtttgtgtatccctgggatcagtgcccagagttcaatctttctcttgatgcttcctgytgttttcagggactcaatgagagcagtaagtgacctttcactcagtgcaagtctatgggcactgaagttacgaaaatatttcccttcatgcagaatcttcctaacaaagctttcccatgtatttgtcaggtcaaataacattcagataaactgcacataatccccaaaatgccaaatgtttagagagcttttttttttttgagacggagttttgcgttttgctcttgttgcccaggctggagtgctatggtgggatctcggctcactgcaacctccacctcccag

SEQ ID NO: 671168 - DNA, 1418 bp, Homo sapiens
ttgccttgttttcttagcctctgtcaatctggaatgcctccttcctcactccactcaacctctgacaacttgctataggtcaccaccagtgctgtctcctgtctctccaggtccccacccttgctatactgtggatgctttccttaccctgctggtttctgaatgctctgccatggtcctgggcctccccactacccagcatggatgcctaagctgaactgaatgaccttggactgaattgttcaaaaagagaaggggaaaggaagaggaagaagaatgccaagtaatttgatttttcttttttcatgatcaaaccaatgtcttggaattgattatcatttccatgggctacttcagctccgtactgtttgtatagagtttggtgaaaatgaataaaggcatgtgaactacattttttgtttttttttttttgtttttttttgagacagagtctcactccgtcacccaggctggagtgcagtggcacgatctcagctcactgcctcctcacaggcacctgccaccatgccctgaaattttttcatatttttagtagaggcagggtttcaccgtgttgtccaggctggtttcgaactcccgacctcaagtgatccacccgcctcagcctcccaaagtgctgagattacagctgtgagccaccgtgcccagcctgaactccattttttatagagtaccatttgacactaaaattaagagtctgttactcatctgcagaatctctcttaaaatggtattactaaaaggtccaaaatgaaacatctgtaaaaataattattcctacactctgtgagatctctttcctgacacatttcacatctaagtgagtttcctaactaacccacacacactctatagtaggcttacccttctttccccaggctggctggcgaacttgcaaaacataaccatttaggggaaaaaattgaggcaattaaaattaaaagtgttttaggctaagtaatgaataaattaacccactgaaaagttacatcaaaggctattactcagcattttaccaattacaggaatttctgcaaaatctgcccagccatttgtttgtgtatccctgggatcagtgcccagagttcaatctttctcttgatgcttcctgttgttttcagggactcaatgagagcagtaagtgacctttcactcastgcaagtctatgggcactgaagttacgaaaatatttcccttcatgcagaatcttcctaacaaagctttcccatgtatttgtcaggtcaaataacattcagataaactgcacataatccccaaaatgccaaatgtttagagagcttttttttttttgagacggagttttgcgttttgctcttgttgcccaggctggagtgctatggtgggatctcggctcactgcaacctccacctcccag

SEQ ID NO: 671169 - DNA, 670 bp, Homo sapiens
aagaatcccagtgagaaggccacattcatccctgagacaggagcctgggggctgtgacaagaaccacccccgccccccaggccccaggccctttttccagcagttgctactttttagataagatttccaggccgggccgggcgcagtggctcatgactgtaatcccagcactttgggaggctgaggagggcggatcacctgaggtcaggagttcgagaccagcttggccaacatgatgaaaccccatctctactaaaaatacaaaaattagctgggcgtggtggcgggtgcctgtaattccagctactcgggaggctgaggcaggagagtcgcttgaacccaggaggtggaggtygcagtgagccaagatcgggccacggtactccagcctgggtgacaagagggagactccatctcaaaacaaacaaacaaacaaaacaaaacaaaacaaaacaaaaacagaaaaaagaagagctaatgaggaaattaaaagaattgtaagaatctatttagcttagttattcaaattagtttgataatcttaataaagtatatgattttccaagaaaatataatttaacaaaatgaatcctataaaaattagaaaagtctaaattgactgacttccatgcaaaagacaaagaaaaatgtcagtccttcagaatattag

SEQ ID NO: 671170 - DNA, 1748 bp, Homo sapiens
ccttttgggaaagaaagggtaattagacaagagtaaaggcagactcttaagtgtatatatagagagatagataaacacacacttttttttttttttgagacagagtcttgctctgtcaccaggctagagtacaatggtgcaatcacggctcactgcaacctctgactccctggttcaagtgatactcctgcctcagcctcctgagtagctgggattacaggcgtgcaccaccacacccagctaattttgtatttttagtagagattgcatttcaccatgttggtcaggctggtctcaaactcctgacctcagatgatctgcccgcctcagcctcccaaagtgctgggattacaggtgtgagccaccacacctggaggttaagtttcttaaaccctccaagtctcaattttctcatccataaaatgatttgttataagaatgaggggtaaatgctaataacataggcaaacacctaaaacagtgtttaatgcaatacaatggtaattattattggtacttttatcatcattattggttctttctataattgataattcttcttactttttttttgagatggagtctcactctgtcgcccaggctggagtgcagtggagcaatcttagctcactgcaacctctgcctcccaggttcaagtgattctcttgcctcagcctcccgagtaggtgggactacaggcatgcagcactatgtccggctaatttttttgtagttttagcagagacggagtttcaccgtactagccgggctgatctcgaattcctgacctcggatgattcacctgcctcggcctctcaaagtgctaggatttcaggatttcaggtgtgagccacggcagctggcctcttcttacctttttctgttgctgtttgtttccaaaacctcttcgaaatgcattatcttcttgtgttatcaattctcctcagcttctaatcatcaatcactttatggtaaagatacaaaacatctaaataaaaataatttttaaattcaattgtactttcccattttacaaaaaaaaaagtgttacacagcatgtgtgccttctgtgatttgtactgggatagaacccggattttgtctttacctggaatacaaagatgattattgaaatgcaggctccaaggagctcctagtccagtggaaatgatagatagcagatattgctaagtacktgttcagagatgtctgaaactgcctttctttctcattgctgtgtgggagactgtcatactcccttattaggtatggcatttaggcaggaaacttcaattggaagtaaaaccccctgatttctgagagcagtcagagggtagctcctgcctgccttcccagctaattgccttccattaagatagtgagtgggtacaggacagggaaaggagacaagtaactaaagataagcatgaggaattaggagcagaggatgccagggagtgaagaagaggaagcagtgtaattaaaagaggcagtagagggatgttggcgggactaagcaaaatgactgagggtccaggctctggaatcaaaatgcttgggttcatatccagctcctttacctatgaagtctttgaccctagacaatcctcttgatcatgagtatctctgttttccttatctgtaaaacgggggtcataaattactatcttcatagggttgttgtgagaattaaatgagataatagatatagaacagacagagcctgggatacagtaaatgcttaacaa

SEQ ID NO: 671171 - DNA, 593 bp, Homo sapiens
tacacagctcattatgttctagagaaatgtttagctccaagctccaggccacattataatgagtacaggagtacacactagtgtatacacactctacagtaccgctccatatttccaggcgatggggagatcaccacaggtctaagtaaaaagcaagcattcgtttgcggcctttaaaggtggtttcctgaagttttaaaccatttgccataaaacatagttttaatcttgttacgctgttaatgtttttctttttcatctacagcctttttcaaaagaaaaatgcatatgcagacataggaaagaaggaggtagataaatatttttttcaaattcttaatgagtgaatgtgtgtgtgtgtgtgtgtgtgtgtgtgtgtgtgtagacaacttcttttaaataacagatataaaagaattacttttggggcggatttccattattcccrttgttggtttaggcagaaactcaagagcctcattaaggcaatagttttatttatacttgatttgcccttcttactttgggaaggcaggaaaatgaacagaacctctcatcatcccattctgctctctaatctttttgctctttca

SEQ ID NO: 671172 - DNA, 1085 bp, Homo sapiens
tggtaggcaaggatgcagggcaagggcactagtgggagaggcccaccttacccaggactgcctcagtaatctggatagcaaagggcctcactcagtgttctctcacactaggcttggaagcagcctaagagcaactgactcttgtggtccaacagccaccatttccatttcaggcccttgttctagaagagacagtaatggaagaaggaaaaccagtttatccaaaaagaggttggctcaaggtctctatagcctagtatggaatctccttgcctctttgttgtggccaatatcatcttggtcacgtcacttagttgctctgagcctcaggctcttatttattgttttgtatttaaattagttcacacttagcctgataccaggcttcttggtaaatggtaaatatcatcttctcctgaaatgtttagatagcctgctcaaaattcagctgggccttgtcatacatttattaactagctttgctctcaattctaaagccctgcctgggactcaggtgatttcagtagaaggggttttatttcttttacattagaaaattctaatgtccaggtctcatcccatatcaactgaaatcraatgtctacaaaggaagtaaaacttgtcaaggttctccaggcgactcaaatgcatgggcagggttgagaactccttaaagtgatcttacttggccaaaactaagctgaaatttgtagagagatactgtcatttcatgcagaggtgactggtctgataaaactctgaaaacttttttctctgagaaatggttgaaggaagtgaatatgtttaaccttgggaaagaggttgagggggagactcaggtggggacatggaaactttcttcaaacatttgaagaggcctaagataactatttttaaatgaaatgattaatcatcttctttgtattgctctgagatgtagaagttaacaggtatgcagatttaatctcaagataagaaagatcttctagtaatttccccaaagagaatgactctctaaaacataatgagtttctaatcactagaaatgctcaagcgagcctagatgattatcttcagaaagagat

SEQ ID NO: 671173 - DNA, 586 bp, Homo sapiens
gagcagcctgggccagtcacttgctgtgtagggagctatctggaaatgccagctgcaagcatctggtgaacatttggtgtgaggttgggtttagttgtagctcttccaactgcagagaagcaaagccaccagtcccgtggaatgccagtttgaagtgcagccatttcctgacagttgggtgagcccctacttgcagctatctcatgacttgatccatggaaaggcgcaaccctttactttcattccttccattcattggtcagtcaatctctccacagggcaaataaacgcttataaaatgctgtctaactaaggaataattctaactcaatgttaaatgcatgttcagaagcatacacatatgtgattacacacacacacacacacacacacacactcccaccagagtttatccatataaaacatagccacatatctttcctaaattttcactctgttgtgttttgaatagattaggttgaagraatgactaaacttggttgtccctatttaagagtatggtgtcagctcttctgtcaacaagaagaagtatgaccccaaggtcaaaaaaccaaaatcagtgttc

SEQ ID NO: 671174 - DNA, 636 bp, Homo sapiens
tggggacgcgtcaggtcgggagggtgctgcccggctcccggtccacacatgtggacgcgtcaggccatcagggtgctgccyggctcacggtccacacatggggacgcgtcaggtcggggggtgctgcccggctcacggtccacacgtggggacgcgtcaggtcgggagggtgctgcccggctcacggtccacacgtggggatgtgtcaggtcgggagggtgctgcccggctcacggtccacacatggggatgtgtcaggtcgggagagtgctgtccggctcacggtccacacatggggacgcgtcaggttgggagggtgctgcccggctcacggtccacacatggggatgtgtcaggctgtcagggtgctgcccggctctcagtatcagccgcatatgcacattctccactgaagccactgcatgaagccacgctggaagcactttctggcaggtttaggaagctcacgtccaaggtcattaaacgcatggcaagctcgccttggaggcattttactttgctaatgacaacgaagcattctcattgcactgaatagtttagagcagtctttcatgtccactgcctctttgaaataggcatattgtgcctgttttacagattacatcaaggccctaa

SEQ ID NO: 671175 - DNA, 636 bp, Homo sapiens
tggggacgcgtcaggtcgggagggtgctgcccggctcccggtccacacatgtggacgcgtcaggccatcagggtgctgcccggctcacggtccacacatggggacgcgtcaggtcggggggtgctgcccggctcacggtccacacgtggggacgcgtcaggtcgggagggtgctgcccggctcacggtccacacrtggggatgtgtcaggtcgggagggtgctgcccggctcacggtccacacatggggatgtgtcaggtcgggagagtgctgtccggctcacggtccacacatggggacgcgtcaggttgggagggtgctgcccggctcacggtccacacatggggatgtgtcaggctgtcagggtgctgcccggctctcagtatcagccgcatatgcacattctccactgaagccactgcatgaagccacgctggaagcactttctggcaggtttaggaagctcacgtccaaggtcattaaacgcatggcaagctcgccttggaggcattttactttgctaatgacaacgaagcattctcattgcactgaatagtttagagcagtctttcatgtccactgcctctttgaaataggcatattgtgcctgttttacagattacatcaaggccctaa

SEQ ID NO: 671176 - DNA, 636 bp, Homo sapiens
tggggacgcgtcaggtcgggagggtgctgcccggctcccggtccacacatgtggacgcgtcaggccatcagggtgctgcccggctcacggtccacacatggggacgcgtcaggtcggggggtgctgcccggctcacggtccacacgtggggacgcgtcaggtcgggagggtgctgcccggctcacggtccacacgtggggatgtgtcaggtcgggagggtgctgcccggctcacggtccacacatggggatgtgtcaggtcgggagrgtgctgtccggctcacggtccacacatggggacgcgtcaggttgggagggtgctgcccggctcacggtccacacatggggatgtgtcaggctgtcagggtgctgcccggctctcagtatcagccgcatatgcacattctccactgaagccactgcatgaagccacgctggaagcactttctggcaggtttaggaagctcacgtccaaggtcattaaacgcatggcaagctcgccttggaggcattttactttgctaatgacaacgaagcattctcattgcactgaatagtttagagcagtctttcatgtccactgcctctttgaaataggcatattgtgcctgttttacagattacatcaaggccctaa

SEQ ID NO: 671177 - DNA, 2040 bp, Homo sapiens
tgtgaaactgtatccctctcctaatcacccctgggccaggtaccaggcaactagggacagccccattgccccagaccttgctgaaattattcaaaatagttcattctaaacctgctcactctgtcttgcctgttccttctgcagacaaccacaataaaggccctttcccacatttccctctcattccctctgctttctgaccaccccagtcctacttccctagaggtcctgcttctgttttctaggaatatgtgagtattaaaaatgtcttcctttttctagttcccttgaaagggtgaaagggtgagagtgggtgagagatgagagactacctaatgagtacaatgtacattatttgaatgatggttacacgaaaagcccagacttcactactacataatatatccacgtaacaaaactgcaccccttagatttatacaaataaaaaattaaaaaattaaaatttctttcttcacaacaaaactttctgtgtctgcgtaggatataataaattcctcttcaaaggttttagccagtaaattgttaagtacaatgagttctgagatcctctccaaagaactaatgtatcagtatgttcagctctcttgttctttgttcttcattttaaacttcctcattctttacgtctcttgcccctagtttcagtaaataaccccctcctagcctctatcacctgctctgaccttagtcaccccggtcacctactctgaccttagtcatctttggtcacctgctctgttcttagtcaccctgagtcacctgttctgtaaccatccttcccaccaaactagtcaccctgccactccagctcgtacccctgctctttttaaaatagccaatcagaattagcttagactgtgtggtccaaccctagccaataggggaacgacacagcagtaggggctacctgcgtcagggataagaaccccttcccctcccttgttcaggtgtgctctcgccattgctccatccacaagatacacccttctacagaagtaaaattgccttgctgagaaaattaaatttatgtttgagtgctatttatttgtggcactgaaaatttatttccaacatctgtatagactactggagaaagatacctacaggaatgtcttctctgtactcctctattgatgtaaatcttgagccttttaacgtacaactgagacataaggaatagcatgtgtagtaggttagtgggaccctagtcaagttgagctgtggaaatgataatcttgtcaatgcaaaggaggaaatgcctcagtaaatcaaagtattgatcgtatatacagccctcaacagagacctaaaacatcaggccttaattaataaagaggtttatatttcttatattaccagaaatctgggragaggaaatccagagctgacccagctcctcaaatatgcaggctcctactatttttctgttccatcatccttaccttttggctttcatgcttatggccacaaaataactgctgcttctccaggtgttatgtctgagtgatccaggaagaaaaatgagggaaggaatagggcaaagggctttgctagctcagtctgaccatttccatagacactcagacttttccacaaaccccaccccatcgattgctgcttatgtctgtttgaccaaactgtgctacttggtcacaggagcctagaaattagattttaaaatgccaacgctgcatatctgattcttcctgtgcaaactggggttttgttatcaaggaagaatgagagagaaaaggaatctggtaggcaaattgcacttctgctacaatttttaacaaaagtgaggttaaggggcttcagggtaggctcaggcaacagcaacagcatagccacctgcctcttcatggatccaaacaaaggacaaaaagtgaatttatatgcaagccacaccttcagcataacctaaagacagaatgtccaaacttcaaaataattatgaatagaaagagaataataagtcctcagaacataatttctcattccctcaccacaccctagccc

SEQ ID NO: 671178 - DNA, 966 bp, Homo sapiens
aatttcctaagagttctttccatttcccttctgtctctctgttctcttcattttttttttctgagtgtgctgatcagtaattcatttttgtagagctccagtttaaaagtttgtgggatagggaagttcagtgttaagaaaatggcagatccataggctaaggttttagtccttgctctgtcattgtttaacattaataattcttataggtcatttagcattcatatgtcttagattcaccatttaccaaatgcagtgacagcagtttcctcctaccagcttagcaggactatagtggcaatgaataaagtacatgaattactttgagattctttagaaaaatcttgagttcttgaccttactctgccaacaactctgtttgcagcctgtggaagttgctttgactgttctttgctttggcttctccatctgaacaatctgagggataattacttaatctactttacagagatgcctgagtctccataggcaattgtgatactttgaaaataatttaaggcagtatggtccagcttctggaatagaaakaatagtgcactatggctatcaatggcctgttatgtgtagacacttgcgctttatgttaattacatgatctctcataaccttttaccatctctgccacgtgtttataataacctctatttttcatgcagatgagaaaacaggcttggtatgtgaaaaactagtccaaagccacaaaacctagtaagaggcaaaaccagaatttgaatctagtttgtttcatttttgagtgtttttcaacttaaataagttatggctggtatatttttattaatttttgttttttgagacggagtttcgctcttgttgcccaggctggagtgcaatggtgcgatcttggctcactgcaacctctgcctcccgggttcaagcaattctcctgcctcagcctcctgaatagctgggactataggcatgcac

SEQ ID NO: 671179 - DNA, 652 bp, Homo sapiens
tatagaaatgttgtgatgataaaatgccaaatgtgaaagctccttagaaagcaaaagagctgttgttttattctytaaattctcaacactccttcatacttgtttgctttaatttctcacagtaactcttgagttttgtgagatgggtattatttgctgctgaaatagagcaaaataacatttgctcagagaggttaagtcacctgcatcaagacttacagctccataatgccttgtgtcaacctgtcattctcctacctaagagaagctcaaagcctgctgccatgggtgccagtgcatgctcggaggtcatagagccagacaggaaagttcccagagttcaggactaacctgcaagatcatagagttcggtgtcagaggcactggccaaagcttcttccagttctgggtcaagggtcactttttcttctttacgagtttctataggcttttctttagggataaagactctccctttaaatcagaagaaaaacaaaaatattgagtactactgccttattggtagggtaagtagactgagcagagaatgcagttctggccattgagacccatataattaagccagttcatatccaaccgagattcctggattgccaggatggtaccaacatcaataagtcactgtcagagg

SEQ ID NO: 671180 - DNA, 1240 bp, Homo sapiens
aggtgtgccagcacatagtgttcagaactgtggttgtgcagcctctcttgaggacctcatagtagcctcccgctgctcctggatggttcactggtccttctggggcccctgcatactcttcgctctgctctgctgctctgattagaaaacttgctccctgctcactttattcagttgtgctacttctcaaccttctcctaagctacactatgcaactgtataccccttttatatcactattactcagacagctcctacgttcctaactcccccaccaaccatctggagattaatcttgatcatgagataatttaccatagccactcctcagacctctacactaagaacaaaagataacagctttcaacttattatgctgtcactacttgatgttaattgggacttcattgaagatttgacattataatttttttcacaattaaattagtccaacagcaactatgttgctatagaaacagatccatattttcacagcaatccttgattatttgcctggtttgtcactgttcactattatttatttatttattatttttttggagacaggatccactttatcacccaggctggagtgcagtggcaggatcatagctcatggcaatcctgaactcctgggttcatgggatccttccacctcagcctcccaaagtgctgggattacaggtgtgagccattgcatgtggcccaattttactttcttaatgacattctcaatgatgygtgatccactgaatgtgcacaatacagagggcagcctcggcattatgtgagacaaggcagtagcactctgcctcatgccaactaggagctggatgctcctgctcctactgctgcagtacagatttctgagatgccattcactggaacccatgtttatcaagtgcctcccatgccagttgctgtgccaggataaaaaaaagaccctatcacatgaaaacatgcaaaaaccaaagtaagtaaagtgatgaacattgttacagtgctgtgaaagcaataagcagctgtcatgatagagagaagagaggtcagagaaagcccgaggccctgaaatttaagctgagacccttaggatgtgaaaaatggggacatgcgtcagaaggaagagtacatgagaagaccagcctgagagaggaaaagaactcagcaggttcaggggagtgaatgaagacagtgggggctgaggattagcaagggaaggccagatgcaggtagagagctg

SEQ ID NO: 671181 - DNA, 1240 bp, Homo sapiens
aggtgtgccagcacatagtgttcagaactgtggttgtgcagcctctcttgaggacctcatagtagcctcccgctgctcctggatggttcactggtccttctggggcccctgcatactcttcgctctgctctgctgctctgattagaaaacttgctccctgctcactttattcagttgtgctacttctcaaccttctcctaagctacactatgcaactgtataccccttttatatcactattactcagacagctcctacgttcctaactcccccaccaaccatctggagattaatcttgatcatgagataatttaccatagccactcctcagacctctacactaagaacaaaagataacagctttcaacttattatgctgtcactacttgatgttaattgggacttcattgaagatttgacattataatttttttcacaattaaattagtccaacagcaactatgttgctatagaaacagatccatattttcacagcaatccttgattatttgcctggtttgtcactgttcactattatttatttatttattatttttttggagacaggatccactttatcacccaggctggagtgcagtggcaggatcatagctcatggcaatcctgaactcctgggttcatgggatccttccacctcagcctcccaaagtgctgggattacaggtgtgagccattgcatgtggcccaattttactttcttaatgacattctcaatgatgtgtgatccactgaatgtgcacaatacagagggcagcctcggcattatgtgagacaaggcagtagcactctgcctcatgccaactaggagctggatgctcctgctcctactgctgcagtacagatttctgagatgccattcactkgaacccatgtttatcaagtgcctcccatgccagttgctgtgccaggataaaaaaaagaccctatcacatgaaaacatgcaaaaaccaaagtaagtaaagtgatgaacattgttacagtgctgtgaaagcaataagcagctgtcatgatagagagaagagaggtcagagaaagcccgaggccctgaaatttaagctgagacccttaggatgtgaaaaatggggacatgcgtcagaaggaagagtacatgagaagaccagcctgagagaggaaaagaactcagcaggttcaggggagtgaatgaagacagtgggggctgaggattagcaagggaaggccagatgcaggtagagagctg

SEQ ID NO: 671182 - DNA, 1816 bp, Homo sapiens
tttaattttccccttgtcatatcctaccacctggcacatcattattttgtgtctgttgcatacctccccaacctaccccagtacgatgtaagctgtagaagtcagggactgtatctcctcattctctactgtatccttcattttaagaatcatccctgttatggccaggtgtggtggctctggcctgtaatcccagcactttgggaggccaaagcgggtggatcacgaggtcaggagattgagaccatcctggccaacatggtaaaaccccgtctctactaaaaatacaaatattagctgggtgtggtggygtgtgcctgtaatcccagctactcaggaggctgaggcaggagaatcacttgaaccagggagctggaggttgcagtgagccaagatcacaccactgcactccagcctggcgacagagcgagactctgtctcaaaaaaaaaaaaaaaaaaaaatccctattacatagagggtgcttaataaatatttgttgtcaataagtgaacatctgtcaactttaagaagctacagcttcataagactagtgttgttctccattagtccccaatgcatggcagagtctggctcatgaaagacacttaaaatattaatagaagagtgaatgaacaaacaattagggtagcttattgactgtgagatgaggatcctaaaacatgtagcgaaagggtctggaaatgtgaggcagggtgatctgccacctatgaaggtcatttgagaagaacaagtcaataccccattttcagaggcccaaggttagattctgggctggaggatagacacagggttgagggaacatcctggaagtcagaagtgtggcaaagttgggcctgtaggagtgagcacttgatgctttatcccagggcattagagcctatgagctctctctggcctctgttgaggattaacattggaaacagtaggaggaagtctccattgaagtgtcaagggcttccatgcagctggagaagctgagcagtgcagaggctgggaatggcagtgtctatgcatgaggcatttcaaaggtagatttttgttttcccagggaagtttttacttgggtggtcagggggactgttagtccatggagagtttcctggcttgaactgaatgtggatccaattcttctaaagaggcactgtgccttccaacatgttttatttcagtcagtgcaggcacaactgtagtgccacattttgctgacccacctgaaatgcaaataggaagagcctgctttgcttcagaggttgcctcccctcctactctgcaagaagccaatcaataataattttactgaagacactaggttccaagggactgaatctgaagagatgtcttgatataatgaggaaaagtaaatggagggtggaggagatgccattcaaatttaaaagaacataaacaatgagttatctgtgctacatatctgagaggcagcgtgatgggaaggaaagaaagcgagctgagcactccagaccaagccttactccagaacctacagaatgtggggctttgaaatggcacttaagatttctgagcctttttgatccaaaaaatattgtttcctatatgcttcttaaaactcaatcaagaggttaataatatttgcatagtcttttttgaaatactcacatgaatttgttaatgtaatcttctcattcattctacagagtagaaattagtgtcattctcattttatagaggaggaaagtgaagatttaaaagttgcaggagcctaccccagccctggtggtattgtggcaacccagccactcagctgtcctcctctca

SEQ ID NO: 671183 - DNA, 979 bp, Homo sapiens
ccagcctgcttaaaccccctgtgcagtcaccctgcaagaacactcttgggccaggaaatgtactcccagggaggtggaccagccccttacaagcaagtaagtctgttaggcatagacagggagggcgtggccagatgtcctgtgggtggacttctcccccacagcctctaagagctccctctgaacagacctacagagagtgcctggcagtgcggcctcctgggagattcattaccttcctcgctccccttaccggggtccccagagtgagtcctggaggctcagaaaccctctttgttttccgacatccccagaaagtgcagctcccctgcctggacctgcctgacctggccacagccctcgccctgagcccgctgtaggtgtcctctccttgctgtgggcatgtggcggctgcgagaactcacacgagtcccgctttgcctccagagtccagtctgacctttgaaagcctggcttctagccccgtgtctggctttgggtccaaaccctgaatcttgccttcccccacataccctgattgcccccccctctgacattccttgccacatatgggggtcccgggggccactacacctctgaaataagaggcagggaatgccaggacccagtgttggccagggaggcctctttctgctcttccagcagcatctcccgggtgttgtgtgccaggatggaggggcaggggacactgagctccccaggccctacagtcatccagggggtgcccctgatcctcacccaccaagctctgggcattaaccatcatgattcccaccacatgttctagtactttcctgaccttgcacccacagaaagtccctaggaacccctcaggtgtcccatgctctgactctgtaaggggcactttccacacgttggggcaggaggcagccatcgggggggkactcctccagggatgcgtgttccttcagcaatgaaatttaatcagcagcaatta

SEQ ID NO: 671184 - DNA, 648 bp, Homo sapiens
gagacagagatcagagttgagggcagcttaggcaggatagagtagggcatgaaagacaagggaaattggcaagagaggtgactccaaaagcttatgcacaacaatgccaagagtcatcctcagtggttaggggatgggttgtccacggatagggaaagaccacatggtgcttaccagattaaagtactacaggattaacagtgcaatacaaatactataaaatkagcagtgctggagaagagcaggtctagacatactttggagtatgtcttgacatctacctccttcttacctttggcattctgctatcacaatagtaagaaatccctggcattagctagacaccataaaatcttcacattaggtttgaggaccaatctctctaatttctactataggtctaccctagcaaagcataaaatgaagccccatcaatatctgggcttcatccagatctgtactagcaaagcgaaagttcaagtccaagtaagatcaatatgatcagtcagtaattagcctaccttctaaaacaagaacgaacagttttcagaaaaagatttttaaaatctagaggcttaacaatgtattattcaaaatgtccagtattttcatttaaaaaaatcacaaggcaatcaaagagacagaaaa

SEQ ID NO: 671185 - DNA, 438 bp, Homo sapiens
atgaataaatatttcttgcctacaatagtgcagactcctgagaagtcaaaacaggtttgctcttcccaaggcttgcctcttactactccaacagcaagaaaaagaaatctagaacatatgtaaatgggaaataaaaaaatgttgacctcaaggtctagggtgaactgtcctaggattcctttgcaaagccttccaatgctgaacagctgctgtggccccagagctccctttacctcatcagtgtttggaaaaactccctaagcaggcaaaagagggaagccagaaagacagagcaatggctgcaatttcttccaacaagtagcttcaatgtscttatttgtatatcagctactgagaaaaactacattaagaaacagagatgtgggtcctgaactttaatccatttctacttcaaaaaaatctataatatatattgta

SEQ ID NO: 671186 - DNA, 1396 bp, Homo sapiens
tatttattatattacattctaattgcagagatgccatcctgcgtctcggcaattacaatgtaactcaacgggaacatttaacttgacatacaagaattgtacttkcttgcaatgtttaaggatatacaacaattaaagacagcataaatgaaagaattaaaatgtaccagctttataaactgtaaagcccactttccccatgcaccagtggatgagaattgaagacagacttaccggtaaataggtaaatcacagttgttcccagatcgggatggcatcttcattgtcaggtcacccacacctagagtaatgtctgtcacatagcaaacactcagtaaatacttagtgaacaaatgaatgaacagatgaataagatttacagtcttcaataggaatcaatcagtgctcttttcttaaactaaacagaaagctttgggggagatctgacagctgcgaggcacctgaaggagaaagaatgaaaaagcagtttagaatgtgtacatttcaaagggtgaaatcaactaaggtgcacatagatcatgaaatggaaattggacttttgtttctacttttaactaggaggccctgaaacttctgaatgaagttcaagaacatctggaggaagaagaaaggctatgccgggagtctttggcagattcctggggtgaatgcaggtcttgcctggaaaataactgcatgagaatttatacaacctgccaacctagctggtcctctgtgaaaaataaggtaagagaaaaagagagctcaagatttcacagttcttaaggcacctatttcagcttacttttttattaatttatgttaatatttagaacggagatgcctgatctgataggggccttttgctttctagaatctaatactaatgtttacataccatcacctgtgtatacgcaatttataaggtagagcacccattcagtggtcactgaatgcatctcttaaaatatcctggctttctgccttgtatttgttatttgtgaacatgttcccactagatagtaagctctttgagggcagggatcatatcttatttgtcttcacttatgcattggtggcatccagtaaatgtttaccaaattgcatttggaatcatagcattgcagtctctgatttcaatccacattaatttttccttctggaggccaaatatttaaagatactctctgcctcccaaatcttaccttcaacatgcttgcctccttatgcataacacacacacacacacacacacacacacacacacaccccttcatgtccccttttgccctacccatgtatgtaggactggcatgttttcttttttgtaccctttggttatcttctgagcagagggatcacagagggtggtgacctgaataggatgagctctgcc

SEQ ID NO: 671187 - DNA, 584 bp, Homo sapiens
agtagagatggagtttctccatgtgggtcaggctggtctcgaactactgacctcaggtgatccgcccccctcggcctcccaaagtgctgggattrcaggcgtgagccaccacacctggcatttccctccaaaagtctatgttctcaagtgagtttttacctacgtggttcgctattatttttaaagaaagcaaaaccaaccacacacatttttctcatactccttataaaacccattatgctatgtgaatagtgcacagttaaaattttttcttctcagttaatgaatttccctttgagtttaattcgatacacattagttacaaatattctaaatacagaggttaaaactttactaagaaaagttaaataagttagaatagtcgtatgctttaataaagttaaaactataaaataagttagattattttaactcccacaaaggggatatttatctgctttacgtatatttactattttaaaaagaaaacaaccacagaaacctccattatttgatcaacatttggaatgtctttttaatacagtcgtaaactagcaactgtactagtaattatgcagttatca

SEQ ID NO: 671188 - DNA, 1604 bp, Homo sapiens
caccctggtaatcactcacctgtctctcagtgatcctgcattcaattttaacgtttaaaaggaataaatgtggccagatgcagtgactcaagcctgtaatcccagcactttgggaagcagaggtgggaggatagcttgagcttaggagttcaagcccagcctgggaaacatggcaaaatcccattgctacaaaaaaataaaaaataaaaaatattagctgggcatggtggcatgtgcctgtagtcccagccacttgggaggcagaggtgagaagatggcttgagcttgggagatcaaggctgcagtgagctgaggttatgccactgcatttcagcctgggtgacagagcaagacccagtctcaagaaaaaaaagtgggggatggctggggaggtaagtgcaacagccacagcctgagaagggcctggtaactgggagctcagaccactcagggatgaggatctggatcatcccaccaggtgagccaccacttccatccacagaggtgcccactaagggttaggggaatctaggtcaggtggttaagggaaatgaggagcaccatttttgtcctcgacagcagctgctgtggcaggggctatagtttgtccctctaactttccttttacaagtttccctcgggaagacaggtccatcagaatcctgaattagcttcacccagaaattatatagaagccagtggatctggctgtgtgcggtggctcacacctgtaatcccagcactttgggaggccaaagcaggcggatcatgaggtcaggagatcgagaccaatctggctaacacggtaaaaccccgtctctactaaaaatacaaaaaattagctgggtgtggtggcacacatctgtagtcccagctactcaggaggttcaagaattgcttgaacctgggaggcggaggttgcagygagccgagatcgtgccaccgcactccagcctgggtgacagagtgagactgtctcagaaaaaaaaaaaaaaaaaaaagccagtggaactaagtggtgcaaggggtggactgtagtggaagccacaaggtactgcccagattccaccatccatacccctgcccttggagcccctgcccttagaattgaagccctcatcctctcagatgctgggagtgttggcagctgacagttcatagctgggttctccttcccagtgattgcccttggctgaagacatccaccttgctcaaggtcatccccccttcctggggactgctcatgcccagtgactgacagtcaatgagaagttttaaagcacaacttccttgcgccagtttggaatgccttgggatcagccatcctaggtccagaattcaccatgggaccagctgacacctttgttgtgacttggttacagcccagcctctctctgcccagtcctggtttcctccctcccccacctgggtgatctgaaaagcacattcaaattaattttctgcatacaaatctcagactcagagtgcttccgatggaaaccaacctgcaacaatcccaagagttggacctatccctttctatgtcttctcatttaaaacattaagatatccttaagaaaaaaaagtccctttaatgtcctctg

SEQ ID NO: 671189 - DNA, 1604 bp, Homo sapiens
caccctggtaatcactcacctgtctctcagtgatcctgcattcaattttaacgtttaaaaggaataaatgtggccagatgcagtgactcaagcctgtaatcccagcactttgggaagcagaggtgggaggatagcttgagcttaggagttcaagcccagcctgggaaacatggcaaaatcccattgctacaaaaaaataaaaaataaaaaatattagctgggcatggtggcatgtgcctgtagtcccagccacttgggaggcagaggtgagaagatggcttgagcttgggagatcaaggctgcagtgagctgaggttatgccactgcatttcagcctgggtgacagagcaagacccagtctcaagaaaaaaaagtgggggatggctggggaggtaagtgcaacagccacagcctgagaagggcctggtaactgggagctcagaccactcagggatgaggatctggatcatcccaccaggtgagccaccacttccatccacagaggtgcccactaagggttaggggaatctaggtcaggtggttaagggaaatgaggagcaccatttttgtcctcgacagcagctgctgtggcaggggctatagtttgtccctctaactttccttttacaagtttccctcgggaagacaggtccatcagaatcctgaattagcttcacccagaaattatatagaagccagtggatctggctgtgtgcggtggctcacacctgtaatcccagcactttgggaggccaaagcaggcggatcatgaggtcaggagatcgagaccaatctggctaacacggtaaaaccccgtctctactaaaaatacaaaaaattagctgggtgtggtggcacacatctgtagtcccagctactcaggaggttcaagaattgcttgaacctgggaggcggaggttgcagtgagccgagatcgtgccaccgcactccagcctgggtgacagagtgagactgtctcagaaaaraaaaaaaaaaaaaaagccagtggaactaagtggtgcaaggggtggactgtagtggaagccacaaggtactgcccagattccaccatccatacccctgcccttggagcccctgcccttagaattgaagccctcatcctctcagatgctgggagtgttggcagctgacagttcatagctgggttctccttcccagtgattgcccttggctgaagacatccaccttgctcaaggtcatccccccttcctggggactgctcatgcccagtgactgacagtcaatgagaagttttaaagcacaacttccttgcgccagtttggaatgccttgggatcagccatcctaggtccagaattcaccatgggaccagctgacacctttgttgtgacttggttacagcccagcctctctctgcccagtcctggtttcctccctcccccacctgggtgatctgaaaagcacattcaaattaattttctgcatacaaatctcagactcagagtgcttccgatggaaaccaacctgcaacaatcccaagagttggacctatccctttctatgtcttctcatttaaaacattaagatatccttaagaaaaaaaagtccctttaatgtcctctg

SEQ ID NO: 671190 - DNA, 1604 bp, Homo sapiens
caccctggtaatcactcacctgtctctcagtgatcctgcattcaattttaacgtttaaaaggaataaatgtggccagatgcagtgactcaagcctgtaatcccagcactttgggaagcagaggtgggaggatagcttgagcttaggagttcaagcccagcctgggaaacatggcaaaatcccattgctacaaaaaaataaaaaataaaaaatattagctgggcatggtggcatgtgcctgtagtcccagccacttgggaggcagaggtgagaagatggcttgagcttgggagatcaaggctgcagtgagctgaggttatgccactgcatttcagcctgggtgacagagcaagacccagtctcaagaaaaaaaagtgggggatggctggggaggtaagtgcaacagccacagcctgagaagggcctggtaactgggagctcagaccactcagggatgaggatctggatcatcccaccaggtgagccaccacttccatccacagaggtgcccactaagggttaggggaatctaggtcaggtggttaagggaaatgaggagcaccatttttgtcctcgacagcagctgctgtggcaggggctatagtttgtccctctaactttccttttacaagtttccctcgggaagacaggtccatcagaatcctgaattagcttcacccagaaattatatagaagccagtggatctggctgtgtgcggtggctcacacctgtaatcccagcactttgggaggccaaagcaggcggatcatgaggtcaggagatcgagaccaatctggctaacacggtaaaaccccgtctctactaaaaatacaaaaaattagctgggtgtggtggcacacatctgtagtcccagctactcaggaggttcaagaattgcttgaacctgggaggcggaggttgcagtgagccgagatcgtgccaccgcactccagcctgggtgacagagtgagactgtctcagaaaaaaaaaaaaaaaaaaaagccagtggaactaagtggtgcaaggggtggactgtagtggaagccacaaggtactgcccagattccaccatccrtacccctgcccttggagcccctgcccttagaattgaagccctcatcctctcagatgctgggagtgttggcagctgacagttcatagctgggttctccttcccagtgattgcccttggctgaagacatccaccttgctcaaggtcatccccccttcctggggactgctcatgcccagtgactgacagtcaatgagaagttttaaagcacaacttccttgcgccagtttggaatgccttgggatcagccatcctaggtccagaattcaccatgggaccagctgacacctttgttgtgacttggttacagcccagcctctctctgcccagtcctggtttcctccctcccccacctgggtgatctgaaaagcacattcaaattaattttctgcatacaaatctcagactcagagtgcttccgatggaaaccaacctgcaacaatcccaagagttggacctatccctttctatgtcttctcatttaaaacattaagatatccttaagaaaaaaaagtccctttaatgtcctctg

SEQ ID NO: 671191 - DNA, 2818 bp, Homo sapiens
gtaataatgaggtatgtatagaaataatgaggtgccattcttaattactactgaaagattctgagtaaacagatactctcatgaatcaatacattcattgattccacagatatatattcagtacatactgtgtagtaggcactatactagatctttatatgttggttagaccaaactagaaatgtgtagttttttcatcaatatttcatcaatagctgctaagctctccccatctccagtcttaggacttcatcctgacattcttcagcagttgacagttaagaatatatagcaacatacacatttgactctcaccacaagccctaaagagacagagggttaccagctaacataaggcgtgtggaatgctgtacacatagcagagatttcagaagttttttcagtgagcgatcgaccaaggctcaaataaattaagcaactattttacacagtatgtttgcttaactttgatgaacaatctatagtctgatgtgaatggcatcagcagccatagccaaggtcaaatagacccagctttgatactattcttttttgatatttgcaagatatagcagtcctatatttattcttagacacttttcttttttctcattttctcacacactggaagggtttgatgtgtcacgtgagtaaagtcactctttacagacattgtaaccaatggtcagtatcttggactctgttatgtgtcactgacacagaggaaatcccctgtggaaacccagattccggtaatggacagcatttgggctggcgggagtcgaacatgacttcatacttaatggtaagttaatgaagagttgagtgaagtagcaccaagaaatgcaactgttagaaaaagaaagaaatgcaggaaggaaggcaaaaggaaggagaacaaaataagaaaaggggggagggaaggacagaggaaagcagggaagagggaaggaggaagaaaggaagatggatgatagaattttttggtttgaaaggagaaggcattgagccttaaactgttgattataataacgcaggtgatttagcttctttttattcctgagtttatastgtggatatatagaatatgtgaaaccacattcccaggcatggattgggtcacagaacctaatttattcaatcatccctctagcacatttccgctctgttcatcccctctgaacacagcttaaacactgacaagaaatcagtgtaaaagtcacgatgagattaaggcaattttattttcttaatgaacaactatctcttttccaagtgcttatgttcctggaatgcagctaaccacaattatagtacaacaggatttaaattaggttcataaatagaaatatatcttctgtaaaagttataggaattaaattatttgttgtaatgaactatatgccatatagcatattacttaaaataaatacataactagtagtagcacctacatagttaggctatctaggtcttctaaatcactagcaccacttttatattaacttggggcaataatgataataacataaagaccattctttacctttttacattatttcagaacttataaatagattcatgtagaattttaagttaatttaaaataattattatttaatatttaaaataattattatttaatattttatatagtacttaaaaactttatgtcatatatggcattaactcttattttgggactgatttaagagatttaggagaaagatccccaggaccacaaagctgggacagagccaagacttgcatgaggctggtcagcccctccagcctgcactaatcctgttattcgatgcattctttttttgtttgtttgtttgtttgtttgctttttgagttggagtctcactctgttgcccaggctggaatacagtggcacaatcttggctcactgccacctccacctcctgggttcaagtgattctctggcctcagcctcctgagtagctgtgattacaggagtctgccatcacacccagataatttttgtatttttagtagagatggggtttcaccatgttggccaggttggtcttgaactcctgacctcaagtgatctgcccaccttggcctcccaaagtgttgggattactggcatgagcccagcctcaatgcattctcaaactaatgctgaccatgttggcagggcgaccaaaagaaagacatccctccctgaatgactatgggtggttattaagcttagtacagtcatgcactgcataaggacacttcagtcaacaacagcctgcgtatatgactgtggttccatgtgattataatggagctgaaaatgtttgtggcctatgacactgtaatcacctgaaggtcttagcacaacacattactcacgcgtttgtggtgatgctggtgtgaacaaacctactgcgttgccattcacataacagtgtagcagctataatgacacacaatacataaaaattgatcatgataaacagctgtgttactgctgtgtgtatttgctatactatacttttataattattttagagtgttttccttttactcttagaaaaaagttaagtgtaaacagttaactgtaaaatgtcacatccttcaggaggtatgcaaaagaagcgttgctatcacaggagatggcagctccatgcgtgttgtggctcctgaagaccctccagtgggacaagatgtggaggtgaaagacagtgacgttgatgatcctggccctgtgcaggcctaggctaatgtgtgtatttgtgtcttaagttttaataaaacagtgtagaaagtaaaaaaaaagttaaaaaagtctgaaaaaata

SEQ ID NO: 671192 - DNA, 1156 bp, Homo sapiens
cagtattttaaaggctgcatgtggattaaatcatttaatacacaaaacaatcctctgaggtagttacggttattatatccccttacagattagaacacacggggtcaaagaggttaagaaactggagatctaagggacacggtttgaaaatgaacctactacatgatctcttccagccacttattaaatgtgttctttttccctaaagtgctgctagccgttttgttatcaccagttttagtttgttccttgaagacactattctatggcctcactccagagccagtctgagtgatttcaaggtttagctgtgtcatttgctaactgagtgaccttgagaaggtttccatgcgggggaggtgtgtgcatctgtgcagtatgtgtgtgtacatgcatacaggggttctgtgcagtgtgtgtgtgtgtacatgcaggtacggggtccatgcagagtgagtgcgcgtgtgtgtgtgtgtatgcatacaggggttccgtgcagtgtgagtgcgtgtgtgtgtgtgtatatgcatacaggggttctgtgcagtgtgtgtgagtgcgtgtgtgtgtgtatatgcgtacaggagttcygtgcagtgtgagtgcgtgtgtgcctgtgtgtatatgcatacaggagttccgtgcagtgtgtgtgtgtgcgcgtatgcgtacaggggttccgtgcagtgtgtgtgtgtgtgtgtgtgcctgtgtgtatatatgcgtacaggggttccatgcagtgtgagtgcgtgtgtgcctgtgtgtatatgcatacgggagttccgtgcagtgtgagtgcgtgtgtgcctgtgtgtatatgcgtacaggggttccgtgcagtgtgagtgcgtgtgcgtatgcatacaggagttccgtgcagtgtgtgtgtgtgtgtgtgtatgcgtacaggggttccatgcagtgtgtgtatgtgtatatgcatctatgggggatccatgcaatgtgtgtgcacaaacccacatggggtccatgtcaagccctcggggagaatgaggtaccccatgtgctgtccttactgtaatcaattctatacactcgtctcttgtgagtgatgccctttttaaaatggcccagctgctaaaagaattgtttaaaaaccagacagaacaacacaaattgcctggagtaattg

SEQ ID NO: 671193 - DNA, 1244 bp, Homo sapiens
tttagttacataatcagtttgaacctactaacaatggccagaaatagctattgcaaatttttctagaaaaaattaagacactcaggactataagtttttagaataatagacacactttaaaaaactaaataattataaagcaatcctattatgaacgagagcaaacaaataacaccaagacttaggcttgtactaattttaaaaaatgctttcttaggcgagaaaatgcaaactgtatcttatttmagagttagtctccttgatttattatttgtgatagtattcattcttaaatccatagaacaactgttttttgcctaggtatatttgagcagtacccttattaccaaattaaaagttcctcatttatctttaaagtaaaaatacaagctcaggttgataaatttcaaaaaacaaccactataatgtgtctttggctaatagagaaaaaataagccaactctgtcattttaacagacacctttgaaatgtacatgctaaacccatggccaaaggggaaaaaattctctcacagaatattgtaaaagcaaataaaactcttactagtgatgtttctcctctcattgcttcactcctagagcccatgtattgtcagtcagcacccactgctttgtgaccatttctattgagatttatgtgcaagtgacctgaaaaatgattataccaataatcgtgccttcaaaacatctagattctattttgttccaccctaggctctcttgtttatataatgccattctgataccctctttagccttcaaaacatctagattctactttgttccaccctagcctctcttgtttatataatgccattctgataccctctttagccttcaaaacatctagattctattttgttccaccctaggctctcttgtttatataatgccattctgataccctctttagccttcaaaacatctagattctactttgttccaccctaggctctcttgtttatataatgccattctgataccctctttagccttcaaaacatctagattctactttgttccaccctaggctctcttgtttatataatgccattctgataccctctttagccttcaaaacatctagattctactttgttccaccctaggctctcttgtttatataatgcccattctcataccctctttagccttcaaaacatctagattctactttgttccaccctaggctctcttgtttatataatgcccattctcataccc

SEQ ID NO: 671194 - DNA, 1244 bp, Homo sapiens
tttagttacataatcagtttgaacctactaacaatggccagaaatagctattgcaaatttttctagaaaaaattaagacactcaggactataagtttttagaataatagacacactttaaaaaactaaataattataaagcaatcctattatgaacgagagcaaacaaataacaccaagacttaggcttgtactaattttaaaaaatgctttcttaggcgagaaaatgcaaactgtatcttatttaagagttagtctccttgatttattatttgtgatagtattcattcttaaatccatagaacaactgttttttgcctaggtatatttgagcagtacccttattaccaaattaaaagttcctcatttatctttaaagtaaaaatacaagctcaggttgataaatttcaaaaaacaaccactataatgtgtctttggctaatagagaaaaaataagccaactctgtcattttaacagacacctttgaaatgtacatgctaaacccatggccaaaggggaaaaaattctctcacagaatattgtaaaagcaaataaaactcttactagtgatgtttctcctctcattgcttcactcctagagcccatgtattgtcagtcagcacccactgctttgtgaccatttctattgagatttatgtgcaagtgacctgaaaaatgattataccaataatcgtgccttcaaaacatctagattctattttgttccaccctaggctctcttgtttatataatgccattctgataccctctttagccttcaaaacatctagattctactttgttccaccctagcctctcttgtttatataatgccattctgataccctctttagccttcaaaacatctagattctattttgttccaccctaggctctcttgtttatataatgccattctgataccctctttagccttcaaaacatctagattctaytttgttccaccctaggctctcttgtttatataatgccattctgataccctctttagccttcaaaacatctagattctactttgttccaccctaggctctcttgtttatataatgccattctgataccctctttagccttcaaaacatctagattctactttgttccaccctaggctctcttgtttatataatgcccattctcataccctctttagccttcaaaacatctagattctactttgttccaccctaggctctcttgtttatataatgcccattctcataccc

SEQ ID NO: 671195 - DNA, 1244 bp, Homo sapiens
tttagttacataatcagtttgaacctactaacaatggccagaaatagctattgcaaatttttctagaaaaaattaagacactcaggactataagtttttagaataatagacacactttaaaaaactaaataattataaagcaatcctattatgaacgagagcaaacaaataacaccaagacttaggcttgtactaattttaaaaaatgctttcttaggcgagaaaatgcaaactgtatcttatttaagagttagtctccttgatttattatttgtgatagtattcattcttaaatccatagaacaactgttttttgcctaggtatatttgagcagtacccttattaccaaattaaaagttcctcatttatctttaaagtaaaaatacaagctcaggttgataaatttcaaaaaacaaccactataatgtgtctttggctaatagagaaaaaataagccaactctgtcattttaacagacacctttgaaatgtacatgctaaacccatggccaaaggggaaaaaattctctcacagaatattgtaaaagcaaataaaactcttactagtgatgtttctcctctcattgcttcactcctagagcccatgtattgtcagtcagcacccactgctttgtgaccatttctattgagatttatgtgcaagtgacctgaaaaatgattataccaataatcgtgccttcaaaacatctagattctattttgttccaccctaggctctcttgtttatataatgccattctgataccctctttagccttcaaaacatctagattctactttgttccaccctagcctctcttgtttatataatgccattctgataccctctttagccttcaaaacatctagattctattttgttccaccctaggctctcttgtttatataatgccattctgataccctctttagccttcaaaacatctagattctactttgttccaccctaggctctcttgtttatataatgccattctgataccctctttagccttcaaaacatctagattctactttgttccaccctaggctctcttgtttatataatgccattctgataccctctttagccttcaaaacatctagattctactttgttccaccctaggctctcttgtttatataatgcccattctsataccctctttagccttcaaaacatctagattctactttgttccaccctaggctctcttgtttatataatgcccattctcataccc

SEQ ID NO: 671196 - DNA, 1733 bp, Homo sapiens
tgagggaggttgtcgcattaccaacgaaggatttgagaatgagggacaaaggagattgaggtcatcctttcacaagaggaagaaactgaaacattaaacatcgcttgtctgtgtaaaaggtttgtgacatttctcttcaaagaggtgttattgctctgagctgggtggcagcttgtgccctggtcaactgaagccagactcctaagggttaaaggtgattatctgaataatcttttctcctctttatcctgcacctgccagccttgaacattccagcacattccactcaaatgcatatcccattcaagggttagaggctttttaaaaccaggttgcaaaggtaagaggaggggagcaaggctgtttctaagtgaagaaattgaatgcacctcacaataatattggytatctcttggtgacggttctaatgatcccgagcaagggctagaagatgtaaaggaagattggatgggcatcaaagtaaattccactgatttgaccttgtctataagtaattaacaaatattttgattgtctcctgtgtttccggcatatttcaagctgatgagcaagagatactaaatcctgctttcatagacctaatatttgctcttgatagaaggggggaaagactgaaaaaaaataaaaagagagagaaggagagactatcaagtagtgactcaaacagggtggtaagtcaaacggtggatggggtagtcagcaacgacttcctaagtgaacttgggactgatggttgaatgatcataaagggcaggctaagctcagagacaagactcttgcctcacttcatctaggctgcttatatctggtttatacagtggagtaaaatcttagaaactactagagtagataatattgagagacccccaagtcttgtaaaagtctaacatgcaggcagccttagctttttttggatggtagagtgaagatgctaaaatttttgtgacaaaaataattgtatctttactgaacactcactatatcctgggtgttatctactatttaattcaattctcacaacaatctaataggttaatgcccattggttggtgatccagcccccgttatttttccatctactaatttttgggacatagcatttctacagcagaaatgcatttacatggcctctacctgtgtggttgcatctatctatctatctatctatccatccatccattctcccatccatccatccacccactcacccactcatctgactatctgtcttctgaaataaaagtttaataaaatgacattttctttttttgtaatatatttgtataatttcaattatatcctggtcgatttcttttttaaaaaaatgctggtaattagtaactaaatttattttacaacttatttttgtaaatcagtggcataaatagtagcagttatgtgtctgcattttgctttagactgatctgtgtttgaattctgggcaggtatttactagctatctaaattaggaaacgttaatttgccttttactataatctgaatgtttcctctaaaattcatgttgatattgttgggctgtgtccccacccaaatctcctcttgaattgtagctcccatagttcccatgtgttgtgggagggacctgatgggagataattgaatcatgggggcagtttccctcatactgttctcttagtagtaaataagtctcacaagatctgatggttttatgaggggaaacccctttctct

SEQ ID NO: 671197 - DNA, 1733 bp, Homo sapiens
tgagggaggttgtcgcattaccaacgaaggatttgagaatgagggacaaaggagattgaggtcatcctttcacaagaggaagaaactgaaacattaaacatcgcttgtctgtgtaaaaggtttgtgacatttctcttcaaagaggtgttattgctctgagctgggtggcagcttgtgccctggtcaactgaagccagactcctaagggttaaaggtgattatctgaataatcttttctcctctttatcctgcacctgccagccttgaacattccagcacattccactcaaatgcatatcccattcaagggttagaggctttttaaaaccaggttgcaaaggtaagaggaggggagcaaggctgtttctaagtgaagaaattgaatgcacctcacaataatattggttatctcttggtgacggttctaatgatcccgagcaagggctagaagatgtaaaggaagattggatgggcatcaaagtaaattccactgatttgaccttgtctataagtaattaacaaatattttgattgtctcctgtgtttccggcatatttcaagctgatgagcaagagatactaaatcctgctttcatagacctaatatttgctcttgatagaagkggggaaagactgaaaaaaaataaaaagagagagaaggagagactatcaagtagtgactcaaacagggtggtaagtcaaacggtggatggggtagtcagcaacgacttcctaagtgaacttgggactgatggttgaatgatcataaagggcaggctaagctcagagacaagactcttgcctcacttcatctaggctgcttatatctggtttatacagtggagtaaaatcttagaaactactagagtagataatattgagagacccccaagtcttgtaaaagtctaacatgcaggcagccttagctttttttggatggtagagtgaagatgctaaaatttttgtgacaaaaataattgtatctttactgaacactcactatatcctgggtgttatctactatttaattcaattctcacaacaatctaataggttaatgcccattggttggtgatccagcccccgttatttttccatctactaatttttgggacatagcatttctacagcagaaatgcatttacatggcctctacctgtgtggttgcatctatctatctatctatctatccatccatccattctcccatccatccatccacccactcacccactcatctgactatctgtcttctgaaataaaagtttaataaaatgacattttctttttttgtaatatatttgtataatttcaattatatcctggtcgatttcttttttaaaaaaatgctggtaattagtaactaaatttattttacaacttatttttgtaaatcagtggcataaatagtagcagttatgtgtctgcattttgctttagactgatctgtgtttgaattctgggcaggtatttactagctatctaaattaggaaacgttaatttgccttttactataatctgaatgtttcctctaaaattcatgttgatattgttgggctgtgtccccacccaaatctcctcttgaattgtagctcccatagttcccatgtgttgtgggagggacctgatgggagataattgaatcatgggggcagtttccctcatactgttctcttagtagtaaataagtctcacaagatctgatggttttatgaggggaaacccctttctct

SEQ ID NO: 671198 - DNA, 655 bp, Homo sapiens
gagttattattgttattatcaatgatcacaactgactattttgtacatacaaggaactgtgctagatgtttcacatattttcactttaatttcatgagggtgatgaacctgatttctctccattttacagataagcaaaatgaggatcagaaaggtgcagatacttttccaaggttttttagcttagtagaaaaacagtcttgaaactcaagtaaccctaatctatctgacttaaactaatctaggtggaaaaatctcacaatgtcactctttaaagaactgttaccttctacactggaaaatatggatgcaggtagcttggctcaaaawctcttgaggggtcttagaagagcctgacatgctgcataaaaggagtttctgcttctcaaatctagtctcctctcccagatagattggtacagggacccatgacatcggctcagaaatacttctggtccactgtttgttttgtacacacagcccagaatgtctccaggcatacgctgctgctttcactcagaaagcaaagtttgtacctggtaataaacattggggtctgaggggtttgcagttaattggttggatcattcttcatttgtaatctatagaagttttgagagtgagggagagtactgtaatacatgtgctgggacaa

SEQ ID NO: 671199 - DNA, 610 bp, Homo sapiens
gggccaggcatgaggatcttgaagtatttatccaattctgccttgagagctctgttcaggtttagaagctttcctgagcatatacatatctgtacctgtgcttaggactaggacaaggggaggacaccataacactgttatttcttcaacagcttcattgtgttacattagcttccttttgttggagggatggtgtggttgaatactcagagtaagagggaaagtgaatagaatcagctgatatgcatttttagctctctatcttccaggtccacttcttgtcatcttctttccataaacctgagcatatcatacctggcctcattcataccaggacagcatcagctcactccttagcaaaatttagggtgtatgggaagcttgggaccatgagaaggaatagaattgaagagatgagtaatatggggtagggtcacttggccaactgataaacttgtatattaattttatattatgcccccctttttaagtcagtgagttgggcttcatttcttcccaaggccatgcacacttttaagaaaagtgtgcatacttgagaaaaaaatctaactgtattttcaatgcaatttcttttrtttatttatttatt

SEQ ID NO: 671200 - DNA, 645 bp, Homo sapiens
taagtacagatccatcaatcacttgttactggtctttgtcaggaagaagaaccaacgagaagataaactagctatrttactaaggatgttacttagttcaattgacatttttttctaatgtaggaaggaatgcactgatttgtattttgtcctgatttgttatttgttagtggagcagtaatggttaggggaaccacactttgagtcgcaatgcactagattgttttggcagaagtcaaagaagaaagtaatgtagattttgagtaaatgttccagaaagtaacggagatttcaggaatggtacaaaccagacagtaaggaatagaacaagtttaacttttagcctctttttaccctcaaaaatgcaattcaaaaagaatctgccactaagagcacaaacacagaaattgtatactgattatttaccacatgccaggtactatggtaggcaatatacatgcagaatttgtttgggaaacacatccatttgtccccaaataaattagagatccagggaatgtgctttggaaaatgctgactaacatcttatgttttggataatcttgatttctttaaataaaatgaatcacatcatcttccaccctcttcattgttccatgtcttccctattccaacattcaaatt

SEQ ID NO: 671201 - DNA, 645 bp, Homo sapiens
taagtacagatccatcaatcacttgttactggtctttgtcaggaagaagaaccaacgagaagataaactagctatattactaaggatgttacttagttcaattgacatttttttctaatgtaggaaggaatgcactgatttgtattttgtcctgatttgttatttgttagtggagcagtaatggttasgggaaccacactttgagtcgcaatgcactagattgttttggcagaagtcaaagaagaaagtaatgtagattttgagtaaatgttccagaaagtaacggagatttcaggaatggtacaaaccagacagtaaggaatagaacaagtttaacttttagcctctttttaccctcaaaaatgcaattcaaaaagaatctgccactaagagcacaaacacagaaattgtatactgattatttaccacatgccaggtactatggtaggcaatatacatgcagaatttgtttgggaaacacatccatttgtccccaaataaattagagatccagggaatgtgctttggaaaatgctgactaacatcttatgttttggataatcttgatttctttaaataaaatgaatcacatcatcttccaccctcttcattgttccatgtcttccctattccaacattcaaatt

SEQ ID NO: 671202 - DNA, 663 bp, Homo sapiens
tggctggcagaactgggctttgcctgaactgtcagctagttttactcaatgakaatgtacacataatagaaactaagggttcttctagctatccaatacaataacaagcaggaccacagaatgtagtgccgagggtactgctatggtctaaatgtttgtgtctcttcaaaatgtatacgttgaaaacctagcctccaagataatggtattgggacgtggtacctttgggagggtatgggtcgtgaggatagagccctcataaatgggattagccctaaaagagaggcccaagaggggtctttccactcaccaggcactgaatttgctggtgccttgtcttggacttctagcctccaaaactgtgagaaataaatttctgctgtttataagccacccatttataatattttgttataaaatcctggaaaggctaagacagaaaattggtactgagaatggagtgctgttgcagcaaataccttaaaatgtaaaagtggttttggaactgtgtaatgagtagatgctgaaagagttttgaggtgcatgctagaaaaaccctgcattaccaagagcagactattaagggctattctggtgaaagctcagaaggagaggaggagagttgtacagaaaacttccttttagagattacctacgtaaaca

SEQ ID NO: 671203 - DNA, 663 bp, Homo sapiens
tggctggcagaactgggctttgcctgaactgtcagctagttttactcaatgagaatgtacacataatagaaactaagggttcttctagctatccaatacaataacaagcaggaccacagaatgtagtgcygagggtactgctatggtctaaatgtttgtgtctcttcaaaatgtatacgttgaaaacctagcctccaagataatggtattgggacgtggtacctttgggagggtatgggtcgtgaggatagagccctcataaatgggattagccctaaaagagaggcccaagaggggtctttccactcaccaggcactgaatttgctggtgccttgtcttggacttctagcctccaaaactgtgagaaataaatttctgctgtttataagccacccatttataatattttgttataaaatcctggaaaggctaagacagaaaattggtactgagaatggagtgctgttgcagcaaataccttaaaatgtaaaagtggttttggaactgtgtaatgagtagatgctgaaagagttttgaggtgcatgctagaaaaaccctgcattaccaagagcagactattaagggctattctggtgaaagctcagaaggagaggaggagagttgtacagaaaacttccttttagagattacctacgtaaaca

SEQ ID NO: 671204 - DNA, 514 bp, Homo sapiens
ccgggaggcggagtttgcagtgagttgagattgcaccgctgtattccaacctggacaacagtgccaaaccctgtctcaaaagaaaaaaataataataatataaagtgaccaggtgtgttgactcatgcctgtaatcccaccactttgggtcgaggcaggaggatcactggagcccaggagtttgaaacgagcctaggcaacagagtgaraccctgtctctatattaaacacacacacacacgcgcgtgcacacacacacacacacacacacacacacaaaggcagccagactatgcactaggaactgccctgggaatccctttgtgttctcacaacaatcccatttcacatgaagaaacctaggcacagaaatattcagtaacgtgtccaggtgcggtggctcacgcctgtaatcccagtactttgggaggctgaggcaggcagatcacgaggtcaggagttcgagaccatcctggccaacatggtgaaaccccgtctctactaaaaatacaaa

SEQ ID NO: 671205 - DNA, 1118 bp, Homo sapiens
gggaaatctgagtttcagggggtctgattcgaggagatctcaggtctaagttttaaagaaatggagtctgggctccagggaatttagggtctgggttttgaggatctggggtctgtgttccggggatctggagtcggggttttgaagaacctgaggtctggcacccctcagtccttagacgaccccatgataagaacctcccctccagcgcgactggggaggggctgcagggagcccgcggacagcatagcctcggaagaggtaagggctccaaggactccacaccgcccggtgtcagagacgaggccagcgcggcccagagaggctgaaccaccggcccggcgactcggcgccgggcggcggggcgggcgctcacctcgatgagagagtagttgatctccacgtccgacttgacgaagccaccgcagcccaccacgatgtcctccgagccgtgcgccggccccacgccgctcagcagcagcaccaccgcggcggtgaccaccgcgggccccagcggccccgcgccctggcccaccagcatggcccgacctcccccagctagacccaccgccggcagccgggtcccgcccctcacactgcacgccgcaggctccttcctcctcctaggccggctgacagcccaggccccgccccaccgccgtcgccagagccgccgcgcacgcgcgcttcgaccccacgttcacagccccagaagagagaactaaggcgcatgctcggcaaggaaacgagaccatctctgccttctagaggcctggaggactccgcgcgacatctggcaggygcaacgcaaggtgcatgcctacagggagaagctccaaagatgaattctactttagaattcaccatcacagctggaaaggacgggagattttgttggtggaattatctaacaactttctcaaatctttctgacccatatatttcgcaggtaaaatatataatctcacaaaaagctttagggccgggtgtgtggctcacgcctgtaatcccagcactttgggaggctgaggtgggtggatcgcttgagcccaggagttcgagaccagcctgggcaatatggcgaaaccccatctctacacacacacgcgcacacgcac

SEQ ID NO: 671206 - DNA, 1433 bp, Homo sapiens
ttcacatctgtgtgggctaaagttcctttaatgttttgaatcactgtcctttggatggagttttttccttttttatattctttaatgcccttgagggtttgactgtggcacaaggtagtttcagtcaaatggattcatttctggaagatttcaggggrcaaaggctcagctcagcactcctgaactgcatgctctaactttgcaaggctggtaccatacccacagttttgttgtctggcccttcagtgttaagcactgaggtgttcccagtccactggcaacaacactctgatggggtgtgtcagccaaagtgcttcattgtagtgattgtagcaaggtccccactcacacatatgtgccagcagcagcagcacagagcaggtatgcttgtgttggcaggggtgcagtgccggcaggagtgggatggggtgttctgcatacttacacgtgccagccggggcaatggtgctgtggggagcactcatgtgctgctggagacagagtggcagcatcttcatgagttttatgttatcattctagatctttaaaaataatgttctggacttctaacaaatgtatttgtgaacccagagaaaaaaagagtattattttgtgcacttttacttaatcatacccaagaaaattttactttacaatttgttcttttcattcaacaatagtcttgaagtttatccatctcaagatagatacatatgtagtttattccttttaattgtataagattacattgtatgtcaacagcagattttatttacaatgttataacaaaaatagcattttatttgtctcattttacataaatataagtttgtctagaatagttacctgggttacatgcatttttagtttgatgtatactgccaaaatcctttcagtatggccactttaatttgccccaataccaatagcttatgagcctacctgatgttcttgaaaatccttgcaaatctttgatattattaaattttataatgttttccagtctgataattgaaaaaatggcatatttttgttattttaatttgcatttctgtgattattcacaagcttgaatatcttttatatatgtgttgtccttcagcttttccttatctgtaactagcctgttcatatcctttgtccatttttttgttgagttgatcttctttattaattatatctgttatatgcatttgtaaattatatgtattgcaaatatcagtagatatttaattttgtttgtgatgattttttttcactctaagaagtgtattttgttattttcaacagacagaattgccaatacacagcactgttcacttgactttgaaaatgaaaaagagtaaaaggggaagaaagagcagaattgcttttgaagtagtactttattatagtacttttgaagtactactttaatataattgaatgtatca

SEQ ID NO: 671207 - DNA, 1433 bp, Homo sapiens
ttcacatctgtgtgggctaaagttcctttaatgttttgaatcactgtcctttggatggagttttttccttttttatattctttaatgcccttgagggtttgactgtggcacaaggtagtttcagtcaaatggattcatttctggaagatttcaggggacaaaggctcagctcagcactcctgaactgcatgctctaactttgcaaggctggyaccatacccacagttttgttgtctggcccttcagtgttaagcactgaggtgttcccagtccactggcaacaacactctgatggggtgtgtcagccaaagtgcttcattgtagtgattgtagcaaggtccccactcacacatatgtgccagcagcagcagcacagagcaggtatgcttgtgttggcaggggtgcagtgccggcaggagtgggatggggtgttctgcatacttacacgtgccagccggggcaatggtgctgtggggagcactcatgtgctgctggagacagagtggcagcatcttcatgagttttatgttatcattctagatctttaaaaataatgttctggacttctaacaaatgtatttgtgaacccagagaaaaaaagagtattattttgtgcacttttacttaatcatacccaagaaaattttactttacaatttgttcttttcattcaacaatagtcttgaagtttatccatctcaagatagatacatatgtagtttattccttttaattgtataagattacattgtatgtcaacagcagattttatttacaatgttataacaaaaatagcattttatttgtctcattttacataaatataagtttgtctagaatagttacctgggttacatgcatttttagtttgatgtatactgccaaaatcctttcagtatggccactttaatttgccccaataccaatagcttatgagcctacctgatgttcttgaaaatccttgcaaatctttgatattattaaattttataatgttttccagtctgataattgaaaaaatggcatatttttgttattttaatttgcatttctgtgattattcacaagcttgaatatcttttatatatgtgttgtccttcagcttttccttatctgtaactagcctgttcatatcctttgtccatttttttgttgagttgatcttctttattaattatatctgttatatgcatttgtaaattatatgtattgcaaatatcagtagatatttaattttgtttgtgatgattttttttcactctaagaagtgtattttgttattttcaacagacagaattgccaatacacagcactgttcacttgactttgaaaatgaaaaagagtaaaaggggaagaaagagcagaattgcttttgaagtagtactttattatagtacttttgaagtactactttaatataattgaatgtatca

SEQ ID NO: 671208 - DNA, 601 bp, Homo sapiens
ccattgccacaaaagccagtctctggcaattcctgagctctaatgaacaaatgtgcaggatccacagggagacaaagatgttctgtgatgtgggcaagagcctgctctgttttctgtgttctaactctcaggaacactggggcacwgaaacactggcccactgaaggggcagctaaggaacactgtgtaagtgatgactcagagcactttgaaagttggagggcagcacaggtaaagagattaggaggaagatgaagagcatgaggattaatctattctttaccgagtgtcatgtactgcctaggcatcagtgatataattgttatcctgctatcaaatctactgataagtggctcatttaacttatatgcactcatcacaatgcaagaaatcctctgactgctcctaccatcatggcccctagccatgatatgacttgtctccacactagaagaaacgaatcgagtccctatattagggataagaggcatttatatatatatatatttttatatataaattttatatgatatataaaatataaatatttatacaatatatattatatacatatatacatacatacatacatatatatgtg

SEQ ID NO: 671209 - DNA, 674 bp, Homo sapiens
ctgaaggaatttctcaaaagtaacatttaatgtttcataacgttcaagttgctatctctagtgcagttaaggggaactatgatcttgtaaccaggtctacgtgattctagaacagcaggcaccagacaactaagaggaagcagatcagggggcagctgacctcatgatcagcgctgggtgtgctgcaagcctggcttgtttccatttctcctctctgttctctgattaattgcatgaggtttacagggatggtttcattttcccatcctcaagcctccaggtgcatgtaaaatctgccacgaggaagtttattttcttcctgcttagagttacaccttcgtgacgttgctaggcayacctatgacaacccagcgccatcagcttggagtaaacgcagagggctgggagctcccaggagggcacctaacctctctggagatagggagatgaaggcacacttcctggaggaggtgaagcttgttttctaattcttttatttttaattaattaattaatttaattttaattttcttttcttttttctttttttctcttttttttgagacagagtcttgctctgtcacccaggctggagtgcagtggcacgatctcggctcactgcaacctccgtgtcccgggttcaagcgattctcctgtctcagtctcctgagtag

SEQ ID NO: 671210 - DNA, 1383 bp, Homo sapiens
ccacctctgtttcagagagggggtaacccaagcacggaatagcgcagtcccttgcctaaggacacacagcgaggaagcgcccagcggggactcgaacccacgcactctggctccagagtcgatgctcttaatattatgttgagccgctctccgtgatccagccgtaaggggactaattaagggacagcaaactgagctgcctaaatttctcgtgtgtgcggcctgaggtgggccggctgtcggcctgcatttgggcgagcagtacagggcgatctcaggatgttcaccctccctgcgtctccgcgcgggccaggctggccgggctcagctgctccaagtccaagtcctaatatggaagtcgtgccccgccgcagagccggacctgttgtgtctttgcctttctacgcatctgcgcccacctcggcccagaacaaggatttcaaaaagtgccccgcatatttgacttcagaaggactcaccccaagccgcggaagcagcgagagtggccaggacaagagcagggagccacatcctggaagggcgacagttccgggggcctgcgaggtctccgtgcagctcagagggactgtgctgtccagccctggcgcccagccccgcccagagttaccgccctgcgctgccaattgcctaatcctctaattgggagagatcagaaaagccctccctttcctcagatctccctgggcttctagtgggggcctcaggccacgcccacccacagtttaccctctttcatcaaaccagtctggactctactgtcagattacagagagctgtaaacttgcccaactacttgttacataagggttcacccttgcaggactctaacctcagtgcactgtgacggccccccaagggcccacaccagcaggcagatgcttttaggcaaagggaagctttgatctgaggtcctcagaaacaactggaaaatgttagagccactcacacctcacagctcagctgggtaagttaggacatatctcagctcccagggcttgtgttttcatagctttccaggctctcaagcttggaagcgatcttaaatttcatcgagtcccctttctgaggcctgaattagcttcacaatatcctgccaactggtccagcctcctgtcacacaccatcrgtgtcagagaactcactactttccaaagcagggatttttggacagaatgtaaaaatgaactccgtccccccatagtccctggctgttatcatccatccatccaagtacccatccattttgtgaacatttaccaaaatgcttggcacctggccatgtataatggatacaaagaccaattcaagacatggttcagcttctcaaggggctcaccattgtagacaagacagatggggtgg

SEQ ID NO: 671211 - DNA, 672 bp, Homo sapiens
caaacaaatatcacaaggctaattgtggtacagctggacccaagagcaagtctagtaaattttcagtcttggactctcaatatttcttcatatgccctgccaaatgtgctaccgtccaaaggccacacagatgcagaacaggaaatacaagtgttctgagttaattatcctgtgccaacggtcattgatcttcctgaggaagagctactgttgattcacctaaagtttaataatctaccaacgaaggcactattaagaatagcttaacataagcgcaacctgccagttaggagaaacttggcacagaatgggtccattcaaccgaggacattttattataatctccaagattggcttagtcttgaggaagcaataccaaagtggctgtagaagtacaattcagccctaggtgatttactcagaaggtctcactctttgctttcttctaaagtcagtgtccaactccagcactggcattgggaacagatctctgtgctgcagacttcyagtgcacttcccacatctcaatggaagcctgtgttatactgtcagcatctgcctgctggtaggagtgagtcctccctcagctcatctcactagcaagtatacacagccttctccacagcctctgccacatgtgttaacagtgtctctctctgaaaccatccacta

SEQ ID NO: 671212 - DNA, 983 bp, Homo sapiens
agtatgtgttcagctgtgtgatggaaatttttgctttaccaaaatttcatgtacatatgtttcacatgtgagtgctccataaatattaatatttagatgatgctataactccagctctgaaacagcatcaggtacaaaataagtgctcaggaaataatatttgttgaatgagtgcatctttctctgagtgccagacctatattcttagctatttattagaaatctctaccttgatatcctgcagcaacctgaaaatttatgtacacatgatcttatttcttttccttacagagcatgtttccttctctgtgaacagtatacatagagttttggggacgttggacagcctgtgttcaaatcctggctcccccttatactaattggtgaccttaggctattcactaaatttctccttgcctcattttcctcacctgtaaaacaacyataataatagtacctaaattatagggtagtcttgaaggttaaataaggattagcatggatctgaatataatagcacacagtaaaagttagctactattatctcctattttagccaagtgctcttctgactaagttaaactttgttgttaagtttaccatctactttttctctccagatccaatgtgactttatcgctccctgcattttgttcatcctaatacttccatagtccaaaaatctcaattcgcttgaccttttaacacaacatctgaagaccaagctgttctttctaagctctgcttattctcctcaccatggcttgggggtccaccttccttagtacagcaatctaagcctttgatgaactgcttctgactccaaacccacacttccattccatcattagccattccttgccactcccagtcgccatgctctacccatactggactccttacggcttccagaaaacatcatagacttccacctctctttggctttcttgcctctctctgggatcctctcacctgtcttgtct

SEQ ID NO: 671213 - DNA, 645 bp, Homo sapiens
tatcaaaactaagaagttaacattggtacattactgttagctagctgcaggctctaattggagaccactggttttctacaaatgtcctatcctgttccaggattgcatctggtatccacttggtacgtggctgcaatgtctcctctctcagtctgtgatagacccttaggttttcttgttttttatgttcttgacacttttgaagtgtactagtcaggtattttgcaaaatgtccttcaatttggggtcatctgatattttcctatgattagatttaggttatgcattttgggaaataataccacatccaatytgtaatctggattttgtgaataggtagacatttagttcactttcatcctgacttcccacaggtaacatgcctccttgtattatctcccagtcctttgcccctctcaggaactaagtgttagaaatcttcccaactctgatgaccctttcctccaatgcatttcatcaacacatacacatggcttggctgtcacttgaaactgcttcatgtataagaccatagtctctggatctacttttcttcaataaatcctgttactcttatacttctgtgctttcacttattctgaacttgatgcggtttcctcattctgatctctagttttacacctt

SEQ ID NO: 671214 - DNA, 618 bp, Homo sapiens
caacttggccaggcgtggtatctcacgtctgtaatrccagcactttgggaggctgaggcaggtggatcacctgaggtcaggagttcaagaccagcctggccaacatggtgaaaccccatctctactaaaaatacaaaaattagctgagcatggtggtgtgtgcctgtaatcccagctactcaggagactgaggcaggagaatcgcttgaacccaggaggcggaggttgcagtgagccgagattgtgccacatgcactccagcctgggtgacagagccagattccttcttaaaaaaaaaaaaaaaaaaacttaaaggaaaaaaaaaaaccttgcttacctgatacctgatggtcatcagggcatagagatggagactatggattgcatggataactgaaaagaaactcacagaaacaattttacaaaaagagaggtactggttcatcttctgcaccagaccctttcagatactagtcattgcctatatgggtgtctggctggtccccaagcttacccctacctctactttttcgttagatgtgtctataaaagttgagtggttacatttcacatgtcttggcagaagaggaaaaaacacgttatcactctattaattct

SEQ ID NO: 671215 - DNA, 667 bp, Homo sapiens
tgcccttttagctttgaaagtaagtatcaccctagcaagtttactggagcactaccacatatttgaaagatacgtttttctgaaaatggcttcaacatcaattggataggttcagatatggggacctattgaacttgatttgaaactcccaccacataaatgaccttttttttctttatttcttctaaaaaaaaaagtgatacatgtgyagaatgtgcaggtttgttacataggtatacatgcaccatggtggtttgctgcacctattgacctgtcctctaagtttcctcgcctcatccccactccccaacaggccctggtgtgtgttgttcccctctctgtgtccatttgttctcattattcaactcccacttatgagtgagaacatgcggtgtttgattttctgttcctgtgttagtttgctgaagatgatggcttccagcttcgtccatgtgcctgcaaaggacatgatctcaccccttcttatggctgcatagtattccatggtatatatgtgtcacattttctttatctagtctatcattgttgggcgtttgggttggttccacgtctttgttagtgtaaatagtgctgcaataaacatatgcgtgcatgtgtttttatagtagaatgatttatattcctttgggtatatacccagtaatgg

SEQ ID NO: 671216 - DNA, 1200 bp, Homo sapiens
ttccaagtaaaattatttggtcttctctacaactctctagggtatgtaaggtgggtatatgcccttttttacagatggcatacaaaaatgattaaatgattttatatgccatctgtaaaaaaggcgtatacctttttagaaaaacaaggacaaagtcatttaaatgactgctcaagatgataccagcaaatcagtggtaaaactaggactagacccaggtttccagaatcttatcccatactaccttttaaaagaagtcaaaagaagttctaacttatattgtaaacattacttcatctttatcataccccttgaagctaaagctatgaaacaggcaaacacatgttatatcactcatgctcatagcagggcagaatcaggaatgaatttcatttgtattagtctcatgattctctgtttttaaaattacagttccttttaactactaccgtaatcactgtcacgttccattatggaagraggaagcaatattttatcttatcttttgaaaattaatgttgaggccaggcgcggtggctcacgtctgtaatcccagcactttgggtggctgaggtgggtggatcacgaggtcaggagatcgagaccatcctggctaacacagtgaaaccccgtctctactaaaaatacaaagaattagccgggtgttgtggcgggcgcctgtagtcccagctacttgggaggctgaggcaggagaatggtgtgaacccgggaagcggagtttgcagtgagccaggatcgcgccactgcactccagcctgggtgacagtgcgagactccatctcaaaaaaaaaaagaaaaagaaaattagtgttgaaatgaaaagtatttcccttggaaattagtaactttttagattctttgaattcatctttaatataaaaataatttgttgtcattatgcatattcattaaggagccaaataatacagttaatggtatggtgtttggtaaaacattagctataattttaatctctgtgcttcaagaggatatttaaaattcatgcttactgtgtacatggcaagtttccagttctcattctaactaatcgtttacatgtagcacataagctagaatttcttatagttacagttgacccttgaacaacacaggggctaggagtgccaacccccgtatgcagtcaaaattctaggtataacttttttttttttttttttg

SEQ ID NO: 671217 - DNA, 1200 bp, Homo sapiens
ttccaagtaaaattatttggtcttctctacaactctctagggtatgtaaggtgggtatatgcccttttttacagatggcatacaaaaatgattaaatgattttatatgccatctgtaaaaaaggcgtatacctttttagaaaaacaaggacaaagtcatttaaatgactgctcaagatgataccagcaaatcagtggtaaaactaggactagacccaggtttccagaatcttatcccatactaccttttaaaagaagtcaaaagaagttctaacttatattgtaaacattacttcatctttatcataccccttgaagctaaagctatgaaacaggcaaacacatgttatatcactcatgctcatagcagggcagaatcaggaatgaatttcatttgtattagtctcatgattctctgtttttaaaattacagttccttttaactactaccgtaatcactgtcacgttccattatggaaggaggaagcaatattttatcttatcttttgaaaattaatgttgaggccaggcgcggtggctcacgtctgtaatcccagcactttgggtggctgaggtgggtggatcacgaggtcaggagatcgagaccatcctggctaacacagtgaaaccccgtctctactaaaaatacaaagaattagccgggtgttgtggcgggcgcctgtagtcccagctacttgggaggctgaggcaggagaatggygtgaacccgggaagcggagtttgcagtgagccaggatcgcgccactgcactccagcctgggtgacagtgcgagactccatctcaaaaaaaaaaagaaaaagaaaattagtgttgaaatgaaaagtatttcccttggaaattagtaactttttagattctttgaattcatctttaatataaaaataatttgttgtcattatgcatattcattaaggagccaaataatacagttaatggtatggtgtttggtaaaacattagctataattttaatctctgtgcttcaagaggatatttaaaattcatgcttactgtgtacatggcaagtttccagttctcattctaactaatcgtttacatgtagcacataagctagaatttcttatagttacagttgacccttgaacaacacaggggctaggagtgccaacccccgtatgcagtcaaaattctaggtataacttttttttttttttttttg

SEQ ID NO: 671218 - DNA, 1296 bp, Homo sapiens
aggtcaagttgttttaataactcctgaattaaaagtaatacatggtcgggcatggtggctcatacctataaactcagcactttgggaggccaaggtgggcggatcacctgaggtcaggagtttgagaccagcccggccaacatggtgaaaccccatcactactaaaaatacaaaaattagtcaggcatgatggtgggcacctgtaatctcagctactcaggaggctgagacaggagaatcacttgaacctgggagacggaggttgcagtgagctgagmtcacaacactgcacttcagcctgggtgacaaaccaagactctgtctccaaaaaaacaaaggtaatatgtaagccaggcacagtggtgcacacctgtagtcccagctactccagaggctaaggcaggagggtggcttgaggccagcctaggtaacatagtaagatcctgtctctactaaaagaaatagataaaagtattatctatttatttgtggaattgtgaaaaataagaaaaatctgttggctaaaattaagcttttcaaaaatacaattttggccaggcgtggtggttcatacctataatcccagcaccttgggaggccaaggtgggaaggttgcttgagaccaggagtcagagaccagcctgggcaacatagcgaggtcccatccctataaaaaacaaaaaaaatatcaaggcatggtggcgcacacctgtagtctcagctacttatggaggctgaggtgagaggatcacttgagcccaggaggtcaaggctgcagtgagccatgactgtgccactgcactctagcctgggcaacagagcaagattctatctcaaaagtacaattttgcatatacaaagttggagtcaatgaccacacacagtggttcatgcctattaattccagcactttggaaggctgaggagggtggattgcttgagcccaggagttcaagaccagcttaggcaacatggtgaaaccctgtctctacaaaaaatacaaaaattagctgggcacagtggtgcgtacctgtattcccagctactagggaggccgaggtgggagaattgctggagcctgggaggttgaggctgtagcaagccatgattgtgccaccgctctccatcctgggtgacaaagcaagaccctatctcaaaaaaaaaaaagaaaattgggatgttatatataaaataaggtgttttttttggtttgtttgtttttgtttttttaatatactgtgaacattttccttaataaatattctgggctgagtgcagtggctcacgcctgtaatc

SEQ ID NO: 671219 - DNA, 657 bp, Homo sapiens
tttaaaaattgatttagctactttagaagacttgaattacctgatttaactggcatcgtgaaaatgtaaagcaaatttttcttaagttttagtttcctcatcagtaatgttggattagtagtgtctgtcacatactacatcaacgagtgcacttatgatagtgtcagaagactaaacctaacctgctttttagcataattttggagatgatcagtaagtataacagccaaaagaaaatgccatggttctagcccttttaagaccaaatttaagcacaagtagcaatacatcccataggaaawaaaacaaaaaaacaaaaaaaaaacaaaaaaaaaaaccaccaacaacaactaaaaaagcaactttttttcctggataaatttccttctttgaggtacaaaggcaatggcctttgatgttcgtcttgcaatattgctggaagtattcgttaaacacctgatgctgaagggctaatactcttttctactagatagcaggtggtttccatttaattctacttattttagttgaacagttttgagcatagcatatgtttctggaactataaatccaattctccaacattaagtgctataggacatccttagaataattatttttaggctttttctttatggaaaacaagaacctgataga

SEQ ID NO: 671220 - DNA, 657 bp, Homo sapiens
tttaaaaattgatttagctactttagaagacttgaattacctgatttaactggcatcgtgaaaatgtaaagcaaatttttcttaagttttagtttcctcatcagtaatgttggattagtagtgtctgtcacatactacatcaacgagtgcacttatgatagtgtcagaagactaaacctaacctgctttttagcataattttggagatgatcagtaagtataacagccaaaagaaaatgccatggttctagcccttttaagaccaaatttaagcacaagtagcaatacatcccataggaaaaaaaacaaaaaaacaaaaaaaaaacaaaaaaaaaaaccaccaacaacaactaaaaaagcaactttttttcctggataaatttccttctttgaggtacaaaggcaatggcctttgatgttcgtcttgcaatattgctggaagtattcgttaaacacctgatgctgaagggctaatactcttttctactagatagcaggtggtttccattwaattctacttattttagttgaacagttttgagcatagcatatgtttctggaactataaatccaattctccaacattaagtgctataggacatccttagaataattatttttaggctttttctttatggaaaacaagaacctgataga

SEQ ID NO: 671221 - DNA, 665 bp, Homo sapiens
tggaatgtcactatgttgcccagctgatctcaagctcctggcctcaaacaatcatcccaccttgcctcccaaagtgctagaattacaggcatagctaccttaccaggcaggaaaagacatgtcaaactggctagggtgagtgactttctccaagaaccccaggaaagaaatttataacaaaagatgatggttaaagttcagtcttcacttcccacttacctgaggtctgcatgattggctgatcccttcagtgtgggtccccagtggggktctgagtttctgaaagacaactcagaagtacaggttaagatgttctccttggattctttaggaaaaacaaacatccctaggactctaatttcctcaggtgtcctttaggctactattgccttcttttttaataagttacttattgacttctggagctagctaggtgcctggaacttcccttgaaggcaatcatgattctccttgatttccatgtttggggtctgcaggcccctaataaagggggctcctgctccatctcaatagggaaagagaaactagatcaggtcctcagggaagaccttggcattgagacctgaatgagaggagagacccaggtaagtgaagtaagaacattccaggaagaaacaaaagcaaggataaaatccttgagttga

SEQ ID NO: 671222 - DNA, 734 bp, Homo sapiens
aacttggcctttgtagtgagaaagcagctgtatgcacgcagtaaaccatgagtgtagctgcttctaacacaatgccactcacaaaggcaggcctgcgggtcaaatgcactttgcccaccctgatagaaacacactcacacattctctctcttcctccccactcctcctcattctttctccccctccaagcgtgtgctgcaacaggaggaggtgaaactggatctgatttggggacaaggatggtttgcagagaggaatcggtgaacagtggtgggaaaggaaaagaaacatccagaggagattggtgagcaaaagtaggagtcatctttgtgtaagagggaaatagattttttttaaaaaaatggtttaactatgaggactatgcaaatcaggcaaaaacaatcagggccaccttcaagaggcattagggagacacaggaatgggggtcccaggaggatggccccggcaggaggacaggccaccacacagcatcyccacatcggccccagtgagagctgcagaaaggctgtttactgtgctggatcccacaccaaactactgattaactgtgtcacagcttaaatgtgtcattttgtcagcaaacttgtatcttcctacaagctgttaattaacgtgtcagaaaaagcgacttgcagaaggcttctcggtgcaaaacaggagcccaaaaccaaccactaagcagcacattcagaaatggctcctgacagacatg

SEQ ID NO: 671223 - DNA, 2536 bp, Homo sapiens
atccattcacccattgctagacacttaggttgttgattccataacgtggccatagtgaatgatgctgcaatagccatgggagtgcagatatatctttgatttttttcttttgggtgtatacccagaagtgggattgcagatcatatggtagttctattttttaggaccttccatactgttttccataatagctgtacaaatgtacattcccatgatcagtgcgcaagcgtccccttttctccatgtgcttgccccacatccttcttatcttttgtctttttggtaacagccaactcaccaagtgtgaggtgatatttcattatggtttttgatttgcttttccctgatggttaatgatattgggtaccttttcttgtacttgttggccacttgcatgtcttccttagaaaaatgtctgttgaggtcatttgcccatttttaaatcagatttgtttggttggtagattgctattgagttgtatgtgtttccaacatattttggatattaaccctttatcaaacatatgttttacttttgtctctcagatgaggcatccaggctagctgtgtggcagagcctagctgtgtcagcaggtattgaagcctcagggatgaatgagagaaactggtaaaagaatggagaagaagagatgagagaaacaagccaggacttaattcagagaaattcaacattagaggttcgatttgatatttaatgaatattgcttgtgtgcaaagcttaaatgtcactgtacaaattattttatcacaactatttcatgcatcttgctatttaaactgtccaacattttttggctacaaatatatttaaacatgaatgtctgaatatctgaaatatctagataacttctggcatccacacctttcataatgaccatgaattctcttacactcttccaggaagtagcaaacagatgtgttgctcagtgtgwcacaagagaccataggaatgaggctgagaggaaggtctctgcctccatcctgagaggtatcattttcagagggaccccactgaccagatggtgcgatgttcttctctgtctaaatggacaccccaggtatgcagctcagtttgataaaccttgaaacctagtacaggtcagagcctgtggctctcccctcatttactgctcccctcaccaccaagtccctgcctgtctcagatgctcacaccatctggtttctggaggttcctgtaaggaaggccatctgcttcttgttaccatgtcattagaacaattatgacaaaggtgaaacatgaacttgcatgaatcaggcctctctggctcggcttccccatggagaaatatgtactgactttatggtaatttttcatggcaaacctctatctccaagctcctaactctggaaaacagctggaaaataactaagaaacttcaaaaattcaataaatgtcagagttggacctagagcaggagtgacagggagctacatgggatcaaagaggttcgtgttacccattcatagcctagaatgaggcaatcaactaaaaaaaatagaattgcaaatggaagacttttaagtatcaattaggcagggatttgagattaagcatattatctagggctgggcaaggtggctcatgcctgtaatcccagcactttgaggggccaaagcaggaagatcccttgagcccagggttcaagatcagcctgggcaacatagtaagaccccatctctacaataataatattgtagagatagtaaaaccccatctctacagctaataatgataataataataataataataataaattgagacaggcatggtggtgcatgcctgtatccaagccactggaaaggctgaggtgggagggtctcttgagcacaggagtttaaggctgcagtgaactgtgattgtgccactgccctccagcctgggcaacagagtgaaactctgtctcagcaaaacaaaacaaaacatttaatgtcattaatcctaaaattcagagaccgccaacactcaaataaagttgggctcacatgcaaagaccaactctccaagaactgggcgtaagatgcatggaggagccaccctccctgcccatctctcctggaaccagcagtttggaatacagaaggggaaatgctagaatagacagctcacctttatttcttacatacttatgatttacaagacttctctgaccattcaagaggcctcagtgccttcattctacattggagtagaataatacgcaaagagatttgcacaaacactttgctagcattgcagcccttactcccccatcaatttagtttgagaccaaatactaaaataccccagcacccagtagcaacctgcttgccagcagagaaagatttgatacaaggtgttttcttttataagagatggttaatcaaatcaggcctgaattatctagatttcatgcattttagcataaaattaattagtttggagaattacgcagtagataaacacaccaaacagctaggcctccttaattgcatgtttacatttttacatcca

SEQ ID NO: 671224 - DNA, 2536 bp, Homo sapiens
atccattcacccattgctagacacttaggttgttgattccataacgtggccatagtgaatgatgctgcaatagccatgggagtgcagatatatctttgatttttttcttttgggtgtatacccagaagtgggattgcagatcatatggtagttctattttttaggaccttccatactgttttccataatagctgtacaaatgtacattcccatgatcagtgcgcaagcgtccccttttctccatgtgcttgccccacatccttcttatcttttgtctttttggtaacagccaactcaccaagtgtgaggtgatatttcattatggtttttgatttgcttttccctgatggttaatgatattgggtaccttttcttgtacttgttggccacttgcatgtcttccttagaaaaatgtctgttgaggtcatttgcccatttttaaatcagatttgtttggttggtagattgctattgagttgtatgtgtttccaacatattttggatattaaccctttatcaaacatatgttttacttttgtctctcagatgaggcatccaggctagctgtgtggcagagcctagctgtgtcagcaggtattgaagcctcagggatgaatgagagaaactggtaaaagaatggagaagaagagatgagagaaacaagccaggacttaattcagagaaattcaacattagaggttcgatttgatatttaatgaatattgcttgtgtgcaaagcttaaatgtcactgtacaaattattttatcacaactatttcatgcatcttgctatttaaactgtccaacattttttggctacaaatatatttaaacatgaatgtctgaatatctgaaatatctagataacttctggcatccacacctttcataatgaccatgaattctcttacactcttccaggaagtagcaaacagatgtgttgctcagtgtgacacaagagaccataggaatgaggctgagaggaaggtctctgcctccatcctgagaggtrtcattttcagagggaccccactgaccagatggtgcgatgttcttctctgtctaaatggacaccccaggtatgcagctcagtttgataaaccttgaaacctagtacaggtcagagcctgtggctctcccctcatttactgctcccctcaccaccaagtccctgcctgtctcagatgctcacaccatctggtttctggaggttcctgtaaggaaggccatctgcttcttgttaccatgtcattagaacaattatgacaaaggtgaaacatgaacttgcatgaatcaggcctctctggctcggcttccccatggagaaatatgtactgactttatggtaatttttcatggcaaacctctatctccaagctcctaactctggaaaacagctggaaaataactaagaaacttcaaaaattcaataaatgtcagagttggacctagagcaggagtgacagggagctacatgggatcaaagaggttcgtgttacccattcatagcctagaatgaggcaatcaactaaaaaaaatagaattgcaaatggaagacttttaagtatcaattaggcagggatttgagattaagcatattatctagggctgggcaaggtggctcatgcctgtaatcccagcactttgaggggccaaagcaggaagatcccttgagcccagggttcaagatcagcctgggcaacatagtaagaccccatctctacaataataatattgtagagatagtaaaaccccatctctacagctaataatgataataataataataataataataaattgagacaggcatggtggtgcatgcctgtatccaagccactggaaaggctgaggtgggagggtctcttgagcacaggagtttaaggctgcagtgaactgtgattgtgccactgccctccagcctgggcaacagagtgaaactctgtctcagcaaaacaaaacaaaacatttaatgtcattaatcctaaaattcagagaccgccaacactcaaataaagttgggctcacatgcaaagaccaactctccaagaactgggcgtaagatgcatggaggagccaccctccctgcccatctctcctggaaccagcagtttggaatacagaaggggaaatgctagaatagacagctcacctttatttcttacatacttatgatttacaagacttctctgaccattcaagaggcctcagtgccttcattctacattggagtagaataatacgcaaagagatttgcacaaacactttgctagcattgcagcccttactcccccatcaatttagtttgagaccaaatactaaaataccccagcacccagtagcaacctgcttgccagcagagaaagatttgatacaaggtgttttcttttataagagatggttaatcaaatcaggcctgaattatctagatttcatgcattttagcataaaattaattagtttggagaattacgcagtagataaacacaccaaacagctaggcctccttaattgcatgtttacatttttacatcca

SEQ ID NO: 671225 - DNA, 647 bp, Homo sapiens
ggcccttcctaatcctacctctcacctcccagcactggaccctatattgtccgagttgctcactgtgtgctgcaagtttgaagtggcctgtgggtgtgacatgcataacaaaccacgtggttaaaagtttcatcggaacaatcgggaggctgcagtgagctgagatcatgccattgcacttggcctgggcaacagagcaagaccctgtctggaaaaaaaaaaaaaagaacagtggcagtttgggaatcgtcctgtggttcattcctgcccttccctcccctgcactcaccctgatttttttctccctctaattgagggagcaaaggtttcagggttgtggcctctgggcgatctttcccctcccccaggtgtggcgtgtccagccaacagctactatgactcctgtgggccacccttcccggccacctgtgctagcctcaactcctccgygccctgcaccctccagtgcacagtgagctgcttctgcctcgagggctttgccctggaggcgggcatcttcggtgccccacgcttgctgcggctgccacctgcagggccgctatatccgcctgggtactgaggtgctgcctgcagccccctgtgatcagaggtgcgtgtaccatggacctggacgcccgctcgagtgc

SEQ ID NO: 671226 - DNA, 601 bp, Homo sapiens
tagagacgggtttcattatattggtcaggctggtctcgaactcctggcctcaggtgatctgccggcctcggcctcccaaagtgctgggattacaggcgtgagccaccgtgcccggcctcagatttttaaagactacaactttactctgcctgctgggggtggggatgcagcactagtggtacaacgttggcttgamtttgcagttacatgttttatttatttactattattttttaattttaaatgtaaattttaaatagagatagggtcttgctatgttgcctaggctcaagtgatcctcctgcctcagcctcccaatgtgctgggattaaaggcatgagccatcacacctcacctgtgttatttattgatcaaatgcttttatgcccttactaaatgccttctcctagacaattcacacctcttaatcctcacatacaggtaggtaccattcacttcccttttacagatgggaaactgaggcacagagatgtaaagccactaggtccagttccacagctagcaaatggcacagtgggactcagtcctggtcccctgggcccatcaccacaggcttcaccgtgttaccacgttgccagct

SEQ ID NO: 671227 - DNA, 584 bp, Homo sapiens
tgattagtkttcaccatggaattattttacaataatttttaattttcgaaaagataatcacatggcaagattatttctcttgcttgctgagttgttttatttttggttcttaaattgtgtgcccaaagtgagtgcctcacttgcctcacactagtccaggcactggaaagcaaggcccttgtatccccaaacacacttgtccaggccccagctcctcccctccaagattaactcctcccctctccccaccccgcactcactgcttggcagcaagaggactgtgatgctgtgggttgcagggaaattccaggtctcccagctggaccctgagggtgggacatgtgtgttctcctcctccagaccctcccctacccacctgtgtactcgttttgcagggagaggctcagggaaatgtgctgggagcctagagggttctgagctcggcaggtgaattccccttcatccttcacatgcactcgaggcagctccagcaccccaaggttcgaggactgtgaggggctcagggtcaggctcccccaggtccagctcagcctggcagggggattgctgtcgacagcacagac

SEQ ID NO: 671228 - DNA, 584 bp, Homo sapiens
tgattagttttcaccatggaattattttacaataatttttaattttcgaaaagataatcacatggcaagattatttctcttgcttgctgagttgttttrtttttggttcttaaattgtgtgcccaaagtgagtgcctcacttgcctcacactagtccaggcactggaaagcaaggcccttgtatccccaaacacacttgtccaggccccagctcctcccctccaagattaactcctcccctctccccaccccgcactcactgcttggcagcaagaggactgtgatgctgtgggttgcagggaaattccaggtctcccagctggaccctgagggtgggacatgtgtgttctcctcctccagaccctcccctacccacctgtgtactcgttttgcagggagaggctcagggaaatgtgctgggagcctagagggttctgagctcggcaggtgaattccccttcatccttcacatgcactcgaggcagctccagcaccccaaggttcgaggactgtgaggggctcagggtcaggctcccccaggtccagctcagcctggcagggggattgctgtcgacagcacagac

SEQ ID NO: 671229 - DNA, 584 bp, Homo sapiens
tgattagttttcaccatggaattattttacaataatttttaattttcgaaaagataatcacatggcaagattatttctcttgcttgctgagttgttttatttttggttcttaaattgtgtgcccaaagtgagtgcctcacttgcctcacactagtccagrcactggaaagcaaggcccttgtatccccaaacacacttgtccaggccccagctcctcccctccaagattaactcctcccctctccccaccccgcactcactgcttggcagcaagaggactgtgatgctgtgggttgcagggaaattccaggtctcccagctggaccctgagggtgggacatgtgtgttctcctcctccagaccctcccctacccacctgtgtactcgttttgcagggagaggctcagggaaatgtgctgggagcctagagggttctgagctcggcaggtgaattccccttcatccttcacatgcactcgaggcagctccagcaccccaaggttcgaggactgtgaggggctcagggtcaggctcccccaggtccagctcagcctggcagggggattgctgtcgacagcacagac

SEQ ID NO: 671230 - DNA, 2431 bp, Homo sapiens
tccataaacagggctagaggcagtccagttgtaatgggggtaaaggacactgcagggcacagagacacacagaccctcctgcacagtcaccgactctggcacctccagcctgtatcttgacagtaggtcctgggacgctgtggagaaacgagggtcagcccagcccccactgtccctctcttcatttgcccatagcaggggcagcagcatctctgaggcagaggcttcctgggctccctgtgtgagcagagaagggggagggagaggaggggcagggctgtgggacccacagggggctggagaggagctggagacctcagccctgcatggaagagaaactgcaaacccacatgctataggaactcattccctctgcacagagtgaaggaaaccctaaagctcagagaccctagagacccacccagggaggagaagagaccgtgtcccgcctcctacctccgggcttccctgaagcaccagggcctgcaccagacacgtaggtcctgccctcccggcctctggaccatcgtggaggtccctcctgtcttttgagcatctaaatgtggatctccgaggacctcggggcatgagagatggaggggccgtgtgctgagtctccctgtccaggctcaggtgcctctgctgcccttggtttgcgccaggaagtgcttcctccctggcctggcctgagagagtcacggggttgtgtagacctaaggctctcaactggggaggacttaaccccccaggacgtttgacaatgtgtggagataattgtctcgctgcatgggtggggtgggtgcttctggcatctggtggggagaggcctgggatggtgctaaaccccggccatgcctaggacaggccccaaaacaaggagtcataaggccccacatgccacagtgccagcgtcagaggcaggatgaggatgtcaggcctgtgggtcagggctggtgaggggaggggcttgcaggatcaggaggggcatccaaggtgcggtcctggggaagctcaggctctggtccagctcctcccctgagtccatcacccccggccccctcccaggacatgtgtcccgtctcagccgtgccctaaagccctcatcacatttgcctttggcctctcttggagcccgtgccttacctgtcacattcacagagagctggtcatatttataattccatttcatatttcctctctctacacaaaagacgtatgtccctgcatcactctctctggtgtctctgatgctcagggtacaatccttgttctgtgggtccccaaggaggtggaatcggtcccgagtctcctcctgcactgctcgagctgkgttgtttgtggccactggaatgttccggcttacatggtcccctgcccggaaccagtagccatgaactggatcggaggcagtccagccattttgggggtaggagaaggagcaaagcacagagacacacaggccctcctgcaccgtcacggacttctgcattgtcagcaggtaatccttctgttccttagcccccactctcccacagagcaggggtggcagcagtagcagcagcagtagcatgtgtcgggttggaggtgccagggttgctgaggtaagtctgttcctcagggttcttctctcaggaactgagaactcaagatttcgaggaagccgcacaggaagttgggggtgggttctgaacggtgacctcacaggaggaacttcacacacagacactgtcagggccgggtcacccctggaagatccaccgtccactaccccgtccactcctggggaccctgaggccagagaggatgaaagactcacccagattccaaccccatgcagggcccaccccgcccactgcctccctctcagtgcccttccccttgggtgatattttccataaggtgaaaatgagtcccatgtggccagacctatgaagtacaggctgtggatgtctctctgtaggtcagaggtgacactaggatataagagatgggggtgcaggtgggatgagcaggcaacctctccttcctccctcagcggccgtgaggtggagttcaacacagcagagctagacactgtccccaaagagtcactgtgtagtggggagacactgaggctcctgatatctgagctctccatggcaggagcttcagtgggggtaccaggcagggtgtggtcgctctctcctatgttggggaatcagtctcgggaggactgagcagagagacacggggtcgtggaggtgaggattccgtgtgttgatacacaccaaagacacagagaagagcccagttcacaggaggcctgagaagctaaggctgtgactgttgtacagtgaggtctggaagggaggaatgttggatgggaagggacagatttctaaaggggcaggcgtttctctctcggccatggctctctgggttcaggatggga

SEQ ID NO: 671231 - DNA, 661 bp, Homo sapiens
tgcctttatgtagcaatcagcatagtgaatgtggatgttctacaaaaaagcataaatatttgagagcaatgagaagtcactcgttgaatttaagcaagagaattaaatgatctagtttacattttaagagagacagggtcgggagaggggggagggatagcattaggagatatacctaatgttaaatgacaagttaatgggtgcagcacaccaacgtggcacatgtgtacatatgtaactaacctgcacgttgtgcacatgtaccctaaaacttaaagtatatataaataaaaataataaaaaaaataaataaataaataaaagagacagggtcttgctgtgtcacccaggctggtgtgcrgtggtgcaatcatagcttgctgcaaccttggaatcctgggctcaagaaatccccccacctcagccttccaagtagccgaaatcataagtgcacaccaccacacccggctaattaaaaaaaaactttttttgtagagacgggggtctcactgtgttgtccaggctggtctcgaacttctgaactcaagtgatcttcctgccttggcctcccaaagtgctggtattacaagggtgagccaccacacctggcctgatttccatgtttgaacggttgcactggttgagtgttgggatggtgtca

SEQ ID NO: 671232 - DNA, 630 bp, Homo sapiens
ttcccctccctgggggcacctgccactgcccttatcggggggacctggaatgggtaggctgcctcttagaggggccacctccctgttctgtctctgatgtggctctgactgggccgagcaacctcgactctaggactacacaaggtccgaggcagccatatctctgtgacgggacgcaaatagcccagatcgatgcatctctgtaactagatgctagaggcctagatgactgcatctctataactagctgccagagacacaggtggccacgtctctgactagactccagaggcctaaacggccatgtctgtgcaactaaattgtagagacytagagagtcgcatctgtgtgactagatgccagagcctcagacgaccgcatcggtgtgactggaagctagagcctcaaatagctgtgtcagtgtgactggatgtgtcagtgtgactgtgtcagtgtgactagagccttagatggctgcgtctgtgtgactagaccctggagccttagatggccacgtcggtgtgactggacgctagagccttagatggctgcgtgtgtgtgagtagaccctggaaccttagagggccatgtctgtgtgactagacactagagccttagacggctgcattg

SEQ ID NO: 671233 - DNA, 584 bp, Homo sapiens
tcctttctagggtttcaacccaaagcctggaattgagtttgggacaaaaagctgcctcaggagggttcataaactcattaagttccaggtggccctcatcaaactccagtaagttaccagtggtgccccctgctgaggtccagctgacactttctccctatcataatcagaatgctaaggtgaagctgtggaaccaggtcctcttaaaacaagggaaagaaagggagtcctgagaattggggacctctcatagaaaatctccctgtatttgcaggactatgtgaactcctgacatggtagaaaagagggaaaataraacagcttaagtgcagggaggggaaggtgtctggtgtcttgctctatgcaaatgggtttcttcaacagaaaaaaaaaaactcttaatcactgcatcctctttgcctctaagaatagacagaaaccacattgttctaaattgcatagctgattgctgggtcagatgctcattctacccagtaatatctctgtagttagcaacaacacccttaatattatatacgaagaagagataggtgccatgaaagagagaaggaaaatgcaaaaga

SEQ ID NO: 671234 - DNA, 626 bp, Homo sapiens
ttctttacagactatcaaatgcatcctggcacattgtttcatttggttggcatagcatttctatgcattcagtgggctagaaattaaggctcagagaaaaaaagtgatgtgtttaatgtcacacagctagtaaatcgtacaatgggaaaagtgaacctaaatggcttaactctacagcccaagtttctctgaatatcttcacacttctaaagtaactctcaaagataaacactttatttatatgtttatctgatgsattgagtggcaacagatttttggaagggactttggtgccattgaccttttctctttcttttcaaaagaatattgaaagtaaaaagtgttaattaattttatttctggtgccacctgactttcaggtactttttattgtattttcaagcaagtttgattttcatgcacatttttttgctgagaaacatcgatctcagtctgtttacgcagtgcagctgtgctcctgtgatttattgccaggatactgaaagatttttttcctcttttcaggttgcctaagaacaaatgttttcttcattaacagcagctttgttgtctaaacaattttctatccaaagtttggtgatgaccgtgtcagtgttccttcagct

SEQ ID NO: 671235 - DNA, 626 bp, Homo sapiens
ttctttacagactatcaaatgcatcctggcacattgtttcatttggttggcatagcatttctatgcattcagtgggctagaaattaaggctcagagaaaaaaagtgatgtgtttaatgtcacacagctagtaaatcgtacaatgggaaaagtgaacctaaatggcttaactctacagcccaagtttctctgaatatcttcacacttctaaagtaactctcaaagataaacactttatttatatgtttatctgatgcatkgagtggcaacagatttttggaagggactttggtgccattgaccttttctctttcttttcaaaagaatattgaaagtaaaaagtgttaattaattttatttctggtgccacctgactttcaggtactttttattgtattttcaagcaagtttgattttcatgcacatttttttgctgagaaacatcgatctcagtctgtttacgcagtgcagctgtgctcctgtgatttattgccaggatactgaaagatttttttcctcttttcaggttgcctaagaacaaatgttttcttcattaacagcagctttgttgtctaaacaattttctatccaaagtttggtgatgaccgtgtcagtgttccttcagct

SEQ ID NO: 671236 - DNA, 1958 bp, Homo sapiens
tgtggtactgaatgattcttccttcactaaaattgacttatttatcttgatttaaatataggcatacattggtaaataaaacctaggttttttcataatatattagagaatttttgatacataacaaatgaggtaattccagatcgattggaattcaggtttagtgcttcgtaaagagttgaaaatagttcctggtaggtaagtaaattgtggtgggaaggacaggacattctctaaaagtgcttggttttagagatgttttggttaagagtttgaccaggtggtagcagatttactttttcctaactcagttttacttgaaaggccttcagattaaatacttacagaaccaggaagaaatgtatctgagttacagaacttgaatggggattgtcaaactggagaatgcttgccccatctgaaggagatagctggcaatatgtagggaggggaactctaggtatttttgtttgtttgtttgtttgtttttgaggcggactctcgctgtcacccaggctggagtgcagtggggcgatctcggctcactgcaagctccgcctcccaggttcatgccattcycctgcctcagcctccggagtagctgggactacaggcacctgacatcacgcccggctaattttttgtgtttttagtagagacggggtttcaccgtgttagccaggatggtctcgttctcctgacctcgtgatccgcccgcctcggcctcccaaagtgctgagattacaggcgtgagccaccgcgcccgactgggaactgaaggttttaaacctcctaaacattcaaaagaagcccaaatctcaactttaatgtgacattttctgtgtgctttaaatgttggatcaaaaggaaaaacaaaattaaaaatatgttggacaaactcaggcctgctgtccatatttgatccaaggaggaccaatttacccactctatcctacacctttcaggtcatagcattttcctttgttatctttcggcattaatgtcatattccaatttttccatatctatgagcaaggcccaaggtctgtagccaagcccagggtttgcatgtgatatctttagaaaaaccccagagaagctttctcttgttttctcactatgctgtaagtatgaatagcccaaagcaaaaaagacaagtaccctgactatcatgatcttctaagtattcatggagctcgctaaaattatagttccctgtgaagagcgtgtcgttgcagaaaagcactggagagtgggcttagataccttcctgtttgatctcaatagtttaatgtttactagctcactgagaagagactgccaccttagtgttaccctcttgtaccaccctaaacaagtcatttatttctcttgttttctctctttaaaaaaatttccatatgaaattctgtgattttttttcccctcattacctattttctatcatcattgtatccaaaaggtcaagagagagaaaaggccacttctccattgactggttatctcttagactgtatgacagcaaaaatataagcaagggttaaatttcaaatgcatccactctgctcatacacatttgtgatttaaaaaacacacttcattgaataatttaaaatatggttgtaccatctgttcttgtggggattaacattgttcatgatggcaaaataatcacgttaaataaattctagatactgcactcttattattaataatagcaatgatattgttagttcagatgacccggccttttctgtctccatataatcacactattgattttccagtattggaaaggagaacgagagagtacatgcttttatttctaaatggaacatgctgttcaggaattctgccatttcttttatggaaataaaaaataaagtgcaaacatatgccatctttgaaggtaacattatgtaagcctttgagtataacatttgctgtctttatctatt

SEQ ID NO: 671237 - DNA, 1958 bp, Homo sapiens
tgtggtactgaatgattcttccttcactaaaattgacttatttatcttgatttaaatataggcatacattggtaaataaaacctaggttttttcataatatattagagaatttttgatacataacaaatgaggtaattccagatcgattggaattcaggtttagtgcttcgtaaagagttgaaaatagttcctggtaggtaagtaaattgtggtgggaaggacaggacattctctaaaagtgcttggttttagagatgttttggttaagagtttgaccaggtggtagcagatttactttttcctaactcagttttacttgaaaggccttcagattaaatacttacagaaccaggaagaaatgtatctgagttacagaacttgaatggggattgtcaaactggagaatgcttgccccatctgaaggagatagctggcaatatgtagggaggggaactctaggtatttttgtttgtttgtttgtttgtttttgaggcggactctcgctgtcacccaggctggagtgcagtggggcgatctcggctcactgcaagctccgcctcccaggttcatgccattctcctgcctcagcctccggagtagctgggactacaggcacctgacatcacgcccggctaattttttgtgtttttagtagagacggggtttcaccgtgttagccaggatggtctcgttctcctgacctcgtgatccgcccgcctcggcctcccaaagtgctgagattacaggcgtgagccaccgcscccgactgggaactgaaggttttaaacctcctaaacattcaaaagaagcccaaatctcaactttaatgtgacattttctgtgtgctttaaatgttggatcaaaaggaaaaacaaaattaaaaatatgttggacaaactcaggcctgctgtccatatttgatccaaggaggaccaatttacccactctatcctacacctttcaggtcatagcattttcctttgttatctttcggcattaatgtcatattccaatttttccatatctatgagcaaggcccaaggtctgtagccaagcccagggtttgcatgtgatatctttagaaaaaccccagagaagctttctcttgttttctcactatgctgtaagtatgaatagcccaaagcaaaaaagacaagtaccctgactatcatgatcttctaagtattcatggagctcgctaaaattatagttccctgtgaagagcgtgtcgttgcagaaaagcactggagagtgggcttagataccttcctgtttgatctcaatagtttaatgtttactagctcactgagaagagactgccaccttagtgttaccctcttgtaccaccctaaacaagtcatttatttctcttgttttctctctttaaaaaaatttccatatgaaattctgtgattttttttcccctcattacctattttctatcatcattgtatccaaaaggtcaagagagagaaaaggccacttctccattgactggttatctcttagactgtatgacagcaaaaatataagcaagggttaaatttcaaatgcatccactctgctcatacacatttgtgatttaaaaaacacacttcattgaataatttaaaatatggttgtaccatctgttcttgtggggattaacattgttcatgatggcaaaataatcacgttaaataaattctagatactgcactcttattattaataatagcaatgatattgttagttcagatgacccggccttttctgtctccatataatcacactattgattttccagtattggaaaggagaacgagagagtacatgcttttatttctaaatggaacatgctgttcaggaattctgccatttcttttatggaaataaaaaataaagtgcaaacatatgccatctttgaaggtaacattatgtaagcctttgagtataacatttgctgtctttatctatt

SEQ ID NO: 671238 - DNA, 1397 bp, Homo sapiens
  misc_feature 1297, 1298, 1299, 1300, 1301, 1302, 1303, 1304, 1305, 1306,1307, 1308, 1309, 1310, 1311, 1312, 1313, 1314, 1315, 1316,1317, 1318, 1319, 1320, 1321, 1322, 1323, 1324, 1325, 1326,1327, 1328, 1329, 1330, 1331, 1332, 1333, 1334, 1335: n = A,T,C or G
  misc_feature 1336, 1337, 1338, 1339, 1340, 1341, 1342, 1343, 1344, 1345,1346, 1347, 1348, 1349, 1350, 1351, 1352, 1353, 1354, 1355,1356, 1357, 1358, 1359, 1360, 1361, 1362, 1363, 1364, 1365,1366, 1367, 1368, 1369, 1370, 1371, 1372, 1373, 1374: n = A,T,C or G
  misc_feature 1375, 1376, 1377, 1378, 1379, 1380, 1381, 1382, 1383, 1384,1385, 1386, 1387, 1388, 1389, 1390, 1391, 1392, 1393, 1394,1395, 1396: n = A,T,C or G
cattgtaagtgtgcagttccagagccagaagataaccagataatttataatccaagcaataatattgcaaaagtaaaaggaggcactatttaatcatcattccagggcaatagctgtatactattcagacaaactgaagagtaaagtcccctagtttaaaaactcgacaaacgtaaaatatgcttgcacatctttttagtaataaatatttaccttgcatctactattttcagagacacatactaggcactgtagcaatatatatagaacagtgtacagggcactgtggtgaatttaaagacaagtcatatatcttcctatcttgtggttcagaattcactttaggacagagaacattaaaaatacaataaaaagcagtaaatgatggtgcaagctgaattaagcttgatgtgatgttagccagccacaaggtttccaacagaattactgatatgatttggctgtgtacccacccatatctcatcttgaatcctagttcccattgaattatagttcatttctataattcctatagttccaattttatagttcagccaacaatccccatgtgttgtgggagggacccggtgggaggtaactgaatcataggagcagtttcccccatgcagctgtcgtgatagtgagtttctcatgagatctgctggttttataagcttctagtgtttcccctgctggcactcattctctctcctgccaccctgtgaagaggtgccttctgccatgattgtaagtttcctgaggcttccccagccatgcaaaactgtgagtcaattaaacctcttttctttataaattacccagtctcaggcatttcttcatagcagcatgagaacagactaatacgctgatgctgtaccacttttatttctatctcataatattgtcaattgaaatcagtcctgtcttgatgcatgaattgcacatcaaawgaattgtatgctttttttttttcctagataggagttatgccatctacttcttgtgtgtatacatagtacatgctcaattaatgctggctggctggttggggtagaaaaatgaattgatagatttaaaaaagtcatctggcaaccaaatatagagccttgtttgccaaagacccctcctctttgctgaactagctagttgacagagtaagaacttgcagcatgattattttttatcttacaactttataatgatacatttggttatttggaaataagtttaaagtgttttaattctttccactggttcctactgttggaaattcttttgcagctgaatattggcaacnnnnnnnnnnnnnnnnnnnnnnnnnnnnnnnnnnnnnnnnnnnnnnnnnnnnnnnnnnnnnnnnnnnnnnnnnnnnnnnnnnnnnnnnnnnnnnnnnnnnt

SEQ ID NO: 671239 - DNA, 602 bp, Homo sapiens
attttattttttcttggatgaactagataaacatgtatggaagaggtagtaagattcctagcatcaaagttgctatagaagtgattgaggttctgctataaggttattgaaaaaagttagacatcttgggtggtaaaaacatactgctgccacccaaaagatgttcatggcctcacttgagctatctgtagagtgcacagtttttaaaatggaaggtagcttagagaaagcatcaaagtaagtggcatccaatatttttgctttaaagcaatcatttattctctttccctttycatggtttccagcctttgaaagattttgtttattaaacaacaaaatcttacttggttttatgattactaatttttaagttactatcttatactgttcatgcatgtatataaattttaagattatttttaacaatatctaaaataacttttcttagaattaaaaaataacagtggtaataacatctttgttttgtttctgacttaaatgggaatatcttgtactttatagttacaagactgatagcttttcttttatatacactttttattaagaaggattcatagctatgtatgttcccctttccccca

SEQ ID NO: 671240 - DNA, 602 bp, Homo sapiens
attttattttttcttggatgaactagataaacatgtatggaagaggtagtaagattcctagcatcaaagttgctatagaagtgattgaggttctgctataaggttattgaaaaaagttagacatcttgggtggtaaaaacatactgctgccacccaaaagatgttcatggcctcacttgagctatctgtagagtgcacagtttttaaaatggaaggtagcttagagaaagcatcaaagtaagtggcatccaatatttttgctttaaagcaatcatttattctctttcccttttcatggtttccagcctttgaaagattttgtttattaaacaacaaaatcttacttggttttatgattactaatttttaagttactatcttatactrttcatgcatgtatataaattttaagattatttttaacaatatctaaaataacttttcttagaattaaaaaataacagtggtaataacatctttgttttgtttctgacttaaatgggaatatcttgtactttatagttacaagactgatagcttttcttttatatacactttttattaagaaggattcatagctatgtatgttcccctttccccca

SEQ ID NO: 671241 - DNA, 602 bp, Homo sapiens
attttattttttcttggatgaactagataaacatgtatggaagaggtagtaagattcctagcatcaaagttgctatagaagtgattgaggttctgctataaggttattgaaaaaagttagacatcttgggtggtaaaaacatactgctgccacccaaaagatgttcatggcctcacttgagctatctgtagagtgcacagtttttaaaatggaaggtagcttagagaaagcatcaaagtaagtggcatccaatatttttgctttaaagcaatcatttattctctttcccttttcatggtttccagcctttgaaagattttgtttattaaacaacaaaatcttacttggttttatgattactaatttttaagttactatcttatactgttcatgcatgtatataaattttaagatyatttttaacaatatctaaaataacttttcttagaattaaaaaataacagtggtaataacatctttgttttgtttctgacttaaatgggaatatcttgtactttatagttacaagactgatagcttttcttttatatacactttttattaagaaggattcatagctatgtatgttcccctttccccca

SEQ ID NO: 671242 - DNA, 637 bp, Homo sapiens
ggaaagctaaaagagagtatacaataagctttttttttttttttgagacggagtcttgctctgctgcccaggctgtagtgcagtggcacaatcttggctcactgcaagctgcccctcccaggctcaagcaattctcctccctcagcctcccaagtagctgggattacaggcatgcgccactatgcctggctaatttttgtatttttaatagagacagagtttcaccttattggccaggctggtctcgaactcctgaccacaagtgatcsccccgcctccacctcccaaagtgctgggattacaggcgagagccaccgcgcccacaataagccattttattttttaatggtatctttcagttttaaaaactccttttgatgtaaagatctcagtcagatatttgctgcataacaaactacacaaaaccccacaggcatataacaacaagcatttattgctaatattctgggatagccagctaggtagtcctgctgatgtgtctggggatctattggctgatttaggaaggcctggactgggatgactggggtgacttactgggttccatatgtctctcatcttcaagtacactaatcctggcacattcccatggcaatggccgaggtgttagagataa

SEQ ID NO: 671243 - DNA, 599 bp, Homo sapiens
agtggaatcaaaccattgttcacagacaacaagctagaaagaaattgttaatatagtggtcaaagcatccaattctctttgggaaatttgaggtamatggtaataagaattgaggaggcagaaaattttcagtgatacttagccctggctggacattagaatcatctggggtatgattcttttaaataatatttcgctgtttaaaatcccaaggcccaggctacacccaagatcaatttaaaaagaagctcttgtagggactcaggcatcagttgtttttaattccccaggtgattctgcagagatggagaattactgtcttcaaccaaagattttcaactggctgaacatattatcctgaagaactaaaaattacctgaactgaaagaactaaaaactactcaagtagttctcaaggtgtggtccacagaccagcagcatcactgtcacctgggacctgctagaaaattcaaattgttgagtaccatcccagacccccaaaatcagaagctgccagggtggagcccaactatctatctatctatcgatctatctgtctatctaactatttttattgagacggagtcttgccctattgc

SEQ ID NO: 671244 - DNA, 599 bp, Homo sapiens
agtggaatcaaaccattgttcacagacaacaagctagaaagaaattgttaatatagtggtcaaagcatccaattctctttgggaaatttgaggtaaatggtaataagaattgaggaggcagaaaattttcagtgatacttagccctggctggacattagaatcatctggggtatgattcttttaaataatatttcgctgtttaaaatcccaaggcccaggctacacccaagatcaatttaaaaagaagctcttgtagggactcaggcatcagttgtttttaattccccaggtgattctgcagagatggagaattactgtyttcaaccaaagattttcaactggctgaacatattatcctgaagaactaaaaattacctgaactgaaagaactaaaaactactcaagtagttctcaaggtgtggtccacagaccagcagcatcactgtcacctgggacctgctagaaaattcaaattgttgagtaccatcccagacccccaaaatcagaagctgccagggtggagcccaactatctatctatctatcgatctatctgtctatctaactatttttattgagacggagtcttgccctattgc

SEQ ID NO: 671245 - DNA, 599 bp, Homo sapiens
agtggaatcaaaccattgttcacagacaacaagctagaaagaaattgttaatatagtggtcaaagcatccaattctctttgggaaatttgaggtaaatggtaataagaattgaggaggcagaaaattttcagtgatacttagccctggctggacattagaatcatctggggtatgattcttttaaataatatttcgctgtttaaaatcccaaggcccaggctacacccaagatcaatttaaaaagaagctcttgtagggactcaggcatcagttgtttttaattccccaggtgattctgcagagatggagaattactgtcttcaaccaaagattttcaactggctgaacatattatcctgaagaactaaaaattacctgaactgaaagaactaaaaactactcaagtagttctcaaggtgtggtccacagaccagcagcatcactgtcacctgggacctgctagaaaattcaaattgttgagtaccatcccagacccccaaaatcagaagctgccagggtggagcccaactatctatctatckatcgatctatctgtctatctaactatttttattgagacggagtcttgccctattgc

SEQ ID NO: 671246 - DNA, 629 bp, Homo sapiens
tcacttgattaattaataaaagaccagactaacataccagcaacatcagaaaaaaaaatagagtcaagtcctgagaggtaggcagttagtggttggtctgaagagaaaagacctcggcattagatggattctttttagtaactgagaaaaggatttaggcctgagagacaagagcaggaaagggctcctgaaattaatggtcagaatggtgcttgcttatatggaaggagggaaagtagcccagttattgaaactcatatacaagatagggtcagttcaattcataggcctgacttacttcaactagcctggcttcatggcttctatctctgtgcaaaactggacaaggattttacctgtaggagtaaattcaaaagatcaaagtttcagtggaagaaaacaaaataaatatcttacatttctttgataaattccaaggatatataaatgtcatgttgcatgatactcattataactataaactgcctttgaaatggaatcagacattcagacaaaccctcaattgatgtttcattttcataatattgttagatagtctatagcctgattwggataggaactcctatcatatttctcccactctaggcagtattgtgtagcctgtttta

SEQ ID NO: 671247 - DNA, 621 bp, Homo sapiens
tttttgaatccgttaactccctgtcactctctgaaagagtcatccagttttactatgttcctcttcaagagtgatgtacagaagcggatacagccctccccgttaattgtctgccaccacggagaggaagaggactgagattgcctgtgtttcagatatttctccattctccacctgtgtgatgctgcctccagcatcttgctccacttacatcctcatccttctccagggactgtggtgctgcttcttccctaggaggytgcaactcaccctcctggggaagaactcctctttccttccatggaaattgagagttctaggttatgttcctcacctttcttctttgtggaagaaaaaaggtaactccaattctcccagtaaacctaattgagaaatatttgtcaagcctctagagtgcagggactaacttgcaatatatacctatggagttgacccctgaacaatatgggcttgaactgctccaatccactcacaagcagaagtttttcaataagttacactgagtgtgtccgcccttcctgtctctccttctacttcttccaccccttctgcctctgccacccctgagacagcaagaccaatacctcttttctttctcct

SEQ ID NO: 671248 - DNA, 424 bp, Homo sapiens
aaaagaatgtttctacatgtcccagaccatctgaagtacagagtcagaacccagctaaagtattatcttgcctcacactaccagttttcttttcctgcatgtgagaatataatttccctctggtattcttggagaagagatgtgatgaagtcaagcagaactgactcattcctgggtcccatattttaatagcaaagtaatagcttcccaacctgaacctaacttcttacaggtatttattttccatttctcactatttgaaattgaaatcaatatatttatattaaatctttgtatrctactttaattatctcatggtaattgatttctggaagttgagttgtattgtcaaaaaatatgaactgagaattaaatttttcacaaaaacaccaaatttccctctaaaaaagttgtactgatatat

SEQ ID NO: 671249 - DNA, 491 bp, Homo sapiens
attatgtaaaataatcatcaaaaaattatttcctaaaatattacttagggggcccaaaccaacagttagagaatgaaattctattaaaatataacctgtaaggtctgtttgacattttaatctctttcgggtgttttttccttttgtttctttatcagagagacacaaagaagaagaaaaggcttctatattctaattgcaaatccatcacataaattattggcagattcacttttgttggatgagctaatgtaattttccaaactctcaactgagctaatgtgattacactccattcccattaaccggggtcagccaggccaagcccctgccccctgacttatcacgagctggagtcgataatagaaggaatggcagcygctcaaaaatgaaagcatcaccgtcatcagatagtacatagaaaggcaaagctgtgtcaacaccgctctctcttcatttacagaatgcccaaaaggaggtatataaacatc

SEQ ID NO: 671250 - DNA, 642 bp, Homo sapiens
attttagaatgtggggaaataatccatttacatcaccctaggaatattcctcctccattgctacagaagtcctgtgaagggaatgcaattctaacacacagcttgataaagcctttagtagatttaaatattcaatatacaatattatatgttggccttaaacttttagaaccaaactgtagacaaaataaagctgaattcagtgttgtacgtggaaactaagaataaataaataaaaatacagcagaattcactggggcttgtcatgggcttaattgtgccctctctcttaaaaaaaaaaaaaaaagaaagaaagaaaatttaaaaaattaaaaaaaaaattcagatgttgaagcctaatccccaattccgaggaatatgactgcctttggagatagggccttcaaacagatggctaaatttacatgaggccgttagggcaggccctaatccaatctkactgttgtccttataaaaagactacatttggacgcacagaagagacaccagggacgcacgtgcaaagagaaaacaccaagagaggacatagcgagaagcggccaactgccagctaaggacagaggcctcaggagaaaccaaacctgctgacactttgatattggacttccagtctccaaagct

SEQ ID NO: 671251 - DNA, 646 bp, Homo sapiens
caaataactaacaagtacagaaatcacagcacaggatgaaaaagacaagggacagagatgaacatccaaatgacacaataagaaaaagtataaagagatccaaaagaacatctacataggaaaaatggcaaaggtgatgcatggaagtgctagacaccagaaaggaaatggtattttaggtttcagagtgttggaaatgactgggacctcaaacacctagaaacatttcctaaaatcaaatctctccttcagtctatacctataccagttaccatcaccaaggggttacaaccagagaaatcaaaataggaagtatgtaataaaaacacctgggtgttttccctcacacttgtccaaagccagaggcaacgctatgtgaggtgctataaaagtcatgttacaggccgggcacagtggctcacgcctgtaatcccagcactttgggaggccaaggcaggcggatcacctgaggtcaggagttcaagaccagcctggccaacatggcraaactccatctctactaaaaatacaaaaattagctggacattgtggtgcatggctgtaatcccagctacttgggaggctgaggcaggagaatctctttcttgaatccaggaggcagaggttgcagtaagcaagactctat

SEQ ID NO: 671252 - DNA, 423 bp, Homo sapiens
  misc_feature 317, 318, 319, 320, 321, 322, 323, 324, 325, 326, 327, 328,329, 330, 331, 332, 333, 334, 335, 336, 337, 338, 339, 340,341, 342, 343, 344, 345, 346, 347, 348, 349, 350, 351, 352,353, 354, 355, 356, 357, 358, 359, 360, 361, 362, 363: n = A,T,C or G
  misc_feature 364, 365, 366, 367, 368, 369, 370, 371, 372, 373, 374, 375,376, 377, 378, 379, 380, 381, 382, 383, 384, 385, 386, 387,388, 389, 390, 391, 392, 393, 394, 395, 396, 397, 398, 399,400, 401, 402, 403, 404, 405, 406, 407, 408, 409, 410: n = A,T,C or G
  misc_feature 411, 412, 413, 414, 415, 416: n = A,T,C or G
aaagagcatgttttattctgggacctcagtgaattttgttgtatttaaaatgyaatatgcatggataacagcagataatgctagaaagctagctttagagccaaattctgaagtcataggagaaatggaaagagatctggggattttacttaaatgaccctcataaagcttatttctaaagatagattagagcagactgaaaatattttaagagtagtaggtgaaaaattgtaaataacaattggtgctattacttaagtttggaacaggaaagaaatagaaaggtggcgagttagggtaagatgagggtttttttnnnnnnnnnnnnnnnnnnnnnnnnnnnnnnnnnnnnnnnnnnnnnnnnnnnnnnnnnnnnnnnnnnnnnnnnnnnnnnnnnnnnnnnnnnnnnnnnnnnngaaaatg

SEQ ID NO: 671253 - DNA, 2093 bp, Homo sapiens
gatccaaagaatataaaagtttcaagaaaaaaaaccaaggtggacttttaatttgtcatctatcttcattccagttctttacaagaaggtttagagatagcttacaaaataagacataacaaataataaatgaataacatattcaaggcagaggaaaaggggagctcattgtacatggcaatattgaagtctgaagatctctgcaaagggagtttctgtagtgagtggaagcaaaaaccagactaccaaggactgaagaaagtattaaacatgaaataaaggcaaaaatgcagagaggataaaacatgaaaaagtaaagctgaaaatgcaaagaatttcttatagaaatttggtaaagaagaaaaggaaattagaatccagcatgacaaagaatccaatatgagaaaactgaatcaatgggtggccttgaaatgggacagtgcattatttgtaaagggattacacttggaacagaagaaaatcagcttttctggagaataaagggagagaactatagttactccatctctagacagtgttaggctctactgtatatgtatgtatgtatcatcctctcaatagaaaacgaaataggtgttatttcatgagattacttgtctaaatatccagaacaaatatgtggtagaagtaggattggtacccaggttctattcctttacctggattatttgaagacaaaaaagggaatataagtcagttctagcctgctctgtagaatgctagatcctttacttgagagccaggaagacggtatcttgttcagattgtgaaattttaattcttgatcattgaaatcgtttggatgttcatctcctccaaatctcatgttgaaatgtaatctccagagttggatgaggggcctggaggtggaaggtgtatggctcatagcggtggatccctcctgagtggcttagtgctatccccttggtgatgagtgagttctcactctaagtccacacgagatctggttgtttctaagtttgtagcacctctccactctctctcttactcccactctggcaatgtgatgctgggtccccatcaccttctgccaagagtgtaagcttcctgaggctgtgtaagcttcctgtggcctcaccagaagcagatgccagcacgatacttcctgtaaagcctgcagtatcatgagccaattaaaactcttaaattatccagcctcagttatttctttatagcaatgcaagaatggactaacacaaccatgaatccctaaatgccaaaccacctctcattcctttaaattcacagagtgtgcatgatctcacttggcaagattttgccacactttcctttctgaactttacattacttgaactttcctaaatataaaattataattaaatactgattacccattttaaaaatacatctctataccccaagccctcaaataatcagttagatagtttatacctccattaatactctaaacctcatcccaaaactgccattcaagtacccatgtactatccttcccataacaaacaacaaattaaagaaagaacagtttcgttggaataaaaaaatagcaacagaccattaacattcattcttctggtcctaagaggaaaaatgatacacttatcaggacaaggtgtaatttaaaaaataaataaataaaccaaaaacttatataaaaaaagataattcatgtcacggaaaaaaagactataaagccaagaagaggccactaaatttgacaattaractatcacaagtagtcttttccaatgcaatttagagaactaatggtacaagccagattacaatgaattaaggaattagtaagtaaaagcacaaagtagaaattaacctccaagagtatgacagtgaaggaaagcagaagagtagcaacttttaaagatgcatatcaagagaatgtattttaaaatgaaaaaacctgagtatgtatcaggaagagccagtgggaagagactaaataaacaagggaaaaaagaacagatgagcaatgtgggaaaagagagaatccaatgtagagactaaatactggtcttaaaaagagtaggatctcttcctcctctgacataaga

SEQ ID NO: 671254 - DNA, 1326 bp, Homo sapiens
cactggtaagtgttcgtccacaagtaatatgtcattcttctcatggagtgtgatttatattttttaacrgtgatgatttcagtaatgtctatcatcttacaagaaatttacctttgaatcagaaaagagtaaaattcattttgtgctggtctcatcaagcaactttgttcagttaccttaaatatgaacaccagggaagacagtttatctttgatatgtgaatataatttccaaatggatccttaggctaaaagtaattcatgagtatgaaaaaatgagctcttaatattgcgtcatttaaaactttatttcctttatagaaaggtatgatattgctaatgtcctttcacagaaaagtgaaaaaaaaatccatttcaatagggaaaaaaagtctggttttgttttgaattttaccattttctaaagttgaatattctcttaagtttggaatacttcttagatatgaagaaggagttaatgtgcttacagatgttggaatgtcaactcccactgatttagccagcagactctaagtttcacggtgtggttaagtcattcaaatagcagttaaaaagtgtgtcctggacacggtgggaaaagaggattaaactgagtatgctgccttctttttcacaacactcacatttctgttttgtttttgtgtgtccactgtatgcatttgtgaacagctctcacaagtgtccaagtgatacacatcatagtgtaataaatatagcatgcacacaaaaccagagatcacagaggcctatcattcaagtttgtttattacttatctttaggtttcactttcaataaaagtcagatgtgctgaggaactatcaaacatgttttagttattgtgttattccatggaaaaattatagctacctgtgataattaaacatctttaaaaaaacatgtattttgggaatgtatatgtgtgcatacacatgtaaatatatgcaagtgtatacccaatttctttaagacttctaaaatataagagttattggtcttcatttccaaattcttgtcatctattttctgaagaaacaaagatgtccatcttgtcccattccaccagtcaatagttagaaggattaaattgaaccattgtttgtgagctcaggaattaggttctgaataattcattaggatagtgaattaaaggactatttctgtgcaaaattcagtttgaggtcacaaaaatttatcagaattgaaaaccattaaaatataaccagtactgattattcatttgttcattcccatattcattaattccacaaagattcatgaagccccactatgtatatcagggactct

SEQ ID NO: 671255 - DNA, 1326 bp, Homo sapiens
cactggtaagtgttcgtccacaagtaatatgtcattcttctcatggagtgtgatttatattttttaacggtgatgatttcagtaatgtctatcatcttacaagaaatttacctttgaatcagaaaagagtaaaattcattttgtgctggtctcatcaagcaactttgttcagttaccttaaatatgaacaccagggaagacagtttatctttgatatgtgaatataatttccaaatggatccttaggctaaaagtaattcatgagtatgaaaaaatgagctcttaatattgcgtcatttaaaactttatttcctttayagaaaggtatgatattgctaatgtcctttcacagaaaagtgaaaaaaaaatccatttcaatagggaaaaaaagtctggttttgttttgaattttaccattttctaaagttgaatattctcttaagtttggaatacttcttagatatgaagaaggagttaatgtgcttacagatgttggaatgtcaactcccactgatttagccagcagactctaagtttcacggtgtggttaagtcattcaaatagcagttaaaaagtgtgtcctggacacggtgggaaaagaggattaaactgagtatgctgccttctttttcacaacactcacatttctgttttgtttttgtgtgtccactgtatgcatttgtgaacagctctcacaagtgtccaagtgatacacatcatagtgtaataaatatagcatgcacacaaaaccagagatcacagaggcctatcattcaagtttgtttattacttatctttaggtttcactttcaataaaagtcagatgtgctgaggaactatcaaacatgttttagttattgtgttattccatggaaaaattatagctacctgtgataattaaacatctttaaaaaaacatgtattttgggaatgtatatgtgtgcatacacatgtaaatatatgcaagtgtatacccaatttctttaagacttctaaaatataagagttattggtcttcatttccaaattcttgtcatctattttctgaagaaacaaagatgtccatcttgtcccattccaccagtcaatagttagaaggattaaattgaaccattgtttgtgagctcaggaattaggttctgaataattcattaggatagtgaattaaaggactatttctgtgcaaaattcagtttgaggtcacaaaaatttatcagaattgaaaaccattaaaatataaccagtactgattattcatttgttcattcccatattcattaattccacaaagattcatgaagccccactatgtatatcagggactct

SEQ ID NO: 671256 - DNA, 1326 bp, Homo sapiens
cactggtaagtgttcgtccacaagtaatatgtcattcttctcatggagtgtgatttatattttttaacggtgatgatttcagtaatgtctatcatcttacaagaaatttacctttgaatcagaaaagagtaaaattcattttgtgctggtctcatcaagcaactttgttcagttaccttaaatatgaacaccagggaagacagtttatctttgatatgtgaatataatttccaaatggatccttaggctaaaagtaattcatgagtatgaaaaaatgagctcttaatattgcgtcatttaaaactttatttcctttatagaaaggtatgatattgctaatgtcctttcacagaaaagtgaaaaaaaaatccatttcaatagggaaaaaaagtctggttttgttttgaattttaccattttctaaagttgaatrttctcttaagtttggaatacttcttagatatgaagaaggagttaatgtgcttacagatgttggaatgtcaactcccactgatttagccagcagactctaagtttcacggtgtggttaagtcattcaaatagcagttaaaaagtgtgtcctggacacggtgggaaaagaggattaaactgagtatgctgccttctttttcacaacactcacatttctgttttgtttttgtgtgtccactgtatgcatttgtgaacagctctcacaagtgtccaagtgatacacatcatagtgtaataaatatagcatgcacacaaaaccagagatcacagaggcctatcattcaagtttgtttattacttatctttaggtttcactttcaataaaagtcagatgtgctgaggaactatcaaacatgttttagttattgtgttattccatggaaaaattatagctacctgtgataattaaacatctttaaaaaaacatgtattttgggaatgtatatgtgtgcatacacatgtaaatatatgcaagtgtatacccaatttctttaagacttctaaaatataagagttattggtcttcatttccaaattcttgtcatctattttctgaagaaacaaagatgtccatcttgtcccattccaccagtcaatagttagaaggattaaattgaaccattgtttgtgagctcaggaattaggttctgaataattcattaggatagtgaattaaaggactatttctgtgcaaaattcagtttgaggtcacaaaaatttatcagaattgaaaaccattaaaatataaccagtactgattattcatttgttcattcccatattcattaattccacaaagattcatgaagccccactatgtatatcagggactct

SEQ ID NO: 671257 - DNA, 1326 bp, Homo sapiens
cactggtaagtgttcgtccacaagtaatatgtcattcttctcatggagtgtgatttatattttttaacggtgatgatttcagtaatgtctatcatcttacaagaaatttacctttgaatcagaaaagagtaaaattcattttgtgctggtctcatcaagcaactttgttcagttaccttaaatatgaacaccagggaagacagtttatctttgatatgtgaatataatttccaaatggatccttaggctaaaagtaattcatgagtatgaaaaaatgagctcttaatattgcgtcatttaaaactttatttcctttatagaaaggtatgatattgctaatgtcctttcacagaaaagtgaaaaaaaaatccatttcaatagggaaaaaaagtctggttttgttttgaattttaccattttctaaagttgaatattctcttaagtttggaatacttcttagatatgaagaaggagttaatgtgcttacagatgttggaatgtcaactcccactgatttagccagcagactctaagtttcacggtgtggttaagtcattcaaatagcagttaaaaagtgtgtcctggacacggtgggaaaagaggattaaactgagtatgctgccttctttttcacaacactcacatttctgttttgtttttgtgtgtccactgtatgcatttgtgaacagctctcacaagtgtccaagtgatacacatcatagtgtaataaatatagcatgcacacaaaaccagagatcacagaggcctatcattcaagtttgtttattacttatctttaggtttcactttcaataaaagtcagatgtgctgaggaactatcaaacatgttttagttattgtgttattscatggaaaaattatagctacctgtgataattaaacatctttaaaaaaacatgtattttgggaatgtatatgtgtgcatacacatgtaaatatatgcaagtgtatacccaatttctttaagacttctaaaatataagagttattggtcttcatttccaaattcttgtcatctattttctgaagaaacaaagatgtccatcttgtcccattccaccagtcaatagttagaaggattaaattgaaccattgtttgtgagctcaggaattaggttctgaataattcattaggatagtgaattaaaggactatttctgtgcaaaattcagtttgaggtcacaaaaatttatcagaattgaaaaccattaaaatataaccagtactgattattcatttgttcattcccatattcattaattccacaaagattcatgaagccccactatgtatatcagggactct

SEQ ID NO: 671258 - DNA, 1326 bp, Homo sapiens
cactggtaagtgttcgtccacaagtaatatgtcattcttctcatggagtgtgatttatattttttaacggtgatgatttcagtaatgtctatcatcttacaagaaatttacctttgaatcagaaaagagtaaaattcattttgtgctggtctcatcaagcaactttgttcagttaccttaaatatgaacaccagggaagacagtttatctttgatatgtgaatataatttccaaatggatccttaggctaaaagtaattcatgagtatgaaaaaatgagctcttaatattgcgtcatttaaaactttatttcctttatagaaaggtatgatattgctaatgtcctttcacagaaaagtgaaaaaaaaatccatttcaatagggaaaaaaagtctggttttgttttgaattttaccattttctaaagttgaatattctcttaagtttggaatacttcttagatatgaagaaggagttaatgtgcttacagatgttggaatgtcaactcccactgatttagccagcagactctaagtttcacggtgtggttaagtcattcaaatagcagttaaaaagtgtgtcctggacacggtgggaaaagaggattaaactgagtatgctgccttctttttcacaacactcacatttctgttttgtttttgtgtgtccactgtatgcatttgtgaacagctctcacaagtgtccaagtgatacacatcatagtgtaataaatatagcatgcacacaaaaccagagatcacagaggcctatcattcaagtttgtttattacttatctttaggtttcactttcaataaaagtcagatgtgctgaggaactatcaaacatgttttagttattgtgttattccatggaaaaattatagctacctgtgataattaaacatctttaaaaaaacatgtattttgggaatgtatatgtgtgcatacacatgtaamtatatgcaagtgtatacccaatttctttaagacttctaaaatataagagttattggtcttcatttccaaattcttgtcatctattttctgaagaaacaaagatgtccatcttgtcccattccaccagtcaatagttagaaggattaaattgaaccattgtttgtgagctcaggaattaggttctgaataattcattaggatagtgaattaaaggactatttctgtgcaaaattcagtttgaggtcacaaaaatttatcagaattgaaaaccattaaaatataaccagtactgattattcatttgttcattcccatattcattaattccacaaagattcatgaagccccactatgtatatcagggactct

SEQ ID NO: 671259 - DNA, 462 bp, Homo sapiens
ctctgtcacacagacttgagtgcagtggcatgatctcggcttactgcaacttccgcctgcttcagcctccccagtagctaggacaacaggtgtgcgccaccacacccagctgatttttgtgttttttgtacagatggggtttcaccatgttggtgaggctggtctcaaattccygacctcaagtgatccacccaccttggcctcccaaagtgctgggattataggcgtgagccaccatgctcagccccataatgcaacttctaacccaaggacttgagtccaagtcaatacatgataatttcaatttggtgggcacatttaaaataaaaaatttaatactgtaaaatactccaaacatatagaaaagtaaataatagacaccatgtacccattatctactttcatcagacataaatattttacatgatcgcttaaacattttaataacttgatactgaaata

SEQ ID NO: 671260 - DNA, 1430 bp, Homo sapiens
  misc_feature 803, 804, 805, 806, 807, 808, 809, 810, 811, 812, 813, 814,815, 816, 817, 818, 819, 820, 821, 822, 823, 824, 825, 826,827, 828, 829, 830, 831, 832, 833, 834, 835, 836, 837, 838,839, 840, 841, 842, 843, 844, 845, 846, 847, 848, 849: n = A,T,C or G
  misc_feature 850, 851, 852, 853, 854, 855, 856, 857, 858, 859, 860, 861,862, 863, 864, 865, 866, 867, 868, 869, 870, 871, 872, 873,874, 875, 876, 877, 878, 879, 880, 881, 882, 883, 884, 885,886, 887, 888, 889, 890, 891, 892, 893, 894, 895, 896: n = A,T,C or G
  misc_feature 897, 898, 899, 900, 901, 902: n = A,T,C or G
caccatgttggccaggctggtcttgaactcctgagctcagatgatctgcctgccttggcctcccaaagtgctaggattacaggcatgagccaccatgcccggccttctttatatgtttctatattgtttatttagttatataatgagcaagagcctctttcattatttaaacaatttttctaaatgttgtccaaagaatatatatgggtggcaaataaccacttgaaaagatactcaagatcattactcattagggaaatgcacattaaaaccacagtgaaatatcacttcataactattaggatggctaaaatgaaaagattggctctaccagatgttgaccagaaggtagaggaactggatctcttatataccattggttgcaatgtaaaatggtacaactactttcaaaaagatcttagttaaatacacacttaacttataaagttaaatatacacttatcatgttatccggaaacttcactcctaggtccagctttattgtaatagtgaaacgggaaacaaacagttgtttattcagtgtgtgaagagacaaattgtggtatatccatataacagaattctgctaagcaatggaaagtaacgatgtattgatacatgcttccatacgaatggatctcaaaataatttttctgaaagaaagccccaggcaaaaaacactacatagtgcatactgtattatttatttatttatttagagacggattcttgctctgttgcccaggctggagtgcagtggcgtgatcttggctcactgcaacctccgcctcctgggttctagnnnnnnnnnnnnnnnnnnnnnnnnnnnnnnnnnnnnnnnnnnnnnnnnnnnnnnnnnnnnnnnnnnnnnnnnnnnnnnnnnnnnnnnnnnnnnnnnnnnnaaggcggcagccccatgcttagggtgactctagaggatcccaggcaatcatgtgtctgggtcctgggaaatgaattcaaaatgtcaagaattatctattaaaaaawaattttttttgtaagaatcttgctctgttgcccaggctggagtgcagtggtgtgatcttggctcactgcaacctctgcctcccgggttcaagtgattcttctgcctcagcgtatctgagtagctgggactacaggagcccgccaccatgcctggctaatttttgtatttttagtagagacggggtttcatcatgttggccaggctggtctcgaactcctgacatcaggtgatctgcccaccttggcctcccaaagtgctgggattacaggcatgagccaccacctaaaatgtcaagagttatcagagctgttacctgcctttcaatattgttcaggtactgcctacaaatgctaataaacagttcatcttgactctgtttgcagcttaagatgtttttaggcctcttgatgagtaattgtca

SEQ ID NO: 671261 - DNA, 1430 bp, Homo sapiens
  misc_feature 803, 804, 805, 806, 807, 808, 809, 810, 811, 812, 813, 814,815, 816, 817, 818, 819, 820, 821, 822, 823, 824, 825, 826,827, 828, 829, 830, 831, 832, 833, 834, 835, 836, 837, 838,839, 840, 841, 842, 843, 844, 845, 846, 847, 848, 849: n = A,T,C or G
  misc_feature 850, 851, 852, 853, 854, 855, 856, 857, 858, 859, 860, 861,862, 863, 864, 865, 866, 867, 868, 869, 870, 871, 872, 873,874, 875, 876, 877, 878, 879, 880, 881, 882, 883, 884, 885,886, 887, 888, 889, 890, 891, 892, 893, 894, 895, 896: n = A,T,C or G
  misc_feature 897, 898, 899, 900, 901, 902: n = A,T,C or G
caccatgttggccaggctggtcttgaactcctgagctcagatgatctgcctgccttggcctcccaaagtgctaggattacaggcatgagccaccatgcccggccttctttatatgtttctatattgtttatttagttatataatgagcaagagcctctttcattatttaaacaatttttctaaatgttgtccaaagaatatatatgggtggcaaataaccacttgaaaagatactcaagatcattactcattagggaaatgcacattaaaaccacagtgaaatatcacttcataactattaggatggctaaaatgaaaagattggctctaccagatgttgaccagaaggtagaggaactggatctcttatataccattggttgcaatgtaaaatggtacaactactttcaaaaagatcttagttaaatacacacttaacttataaagttaaatatacacttatcatgttatccggaaacttcactcctaggtccagctttattgtaatagtgaaacgggaaacaaacagttgtttattcagtgtgtgaagagacaaattgtggtatatccatataacagaattctgctaagcaatggaaagtaacgatgtattgatacatgcttccatacgaatggatctcaaaataatttttctgaaagaaagccccaggcaaaaaacactacatagtgcatactgtattatttatttatttatttagagacggattcttgctctgttgcccaggctggagtgcagtggcgtgatcttggctcactgcaacctccgcctcctgggttctagnnnnnnnnnnnnnnnnnnnnnnnnnnnnnnnnnnnnnnnnnnnnnnnnnnnnnnnnnnnnnnnnnnnnnnnnnnnnnnnnnnnnnnnnnnnnnnnnnnnnaaggcggcagccccatgcttagggtgactctagaggatcccaggcaatcatgtgtctgggtcctgggaaatgaattcaaaatgtcaagaattatctattaaaaaaawattttttttgtaagaatcttgctctgttgcccaggctggagtgcagtggtgtgatcttggctcactgcaacctctgcctcccgggttcaagtgattcttctgcctcagcgtatctgagtagctgggactacaggagcccgccaccatgcctggctaatttttgtatttttagtagagacggggtttcatcatgttggccaggctggtctcgaactcctgacatcaggtgatctgcccaccttggcctcccaaagtgctgggattacaggcatgagccaccacctaaaatgtcaagagttatcagagctgttacctgcctttcaatattgttcaggtactgcctacaaatgctaataaacagttcatcttgactctgtttgcagcttaagatgtttttaggcctcttgatgagtaattgtca

SEQ ID NO: 671262 - DNA, 1430 bp, Homo sapiens
  misc_feature 803, 804, 805, 806, 807, 808, 809, 810, 811, 812, 813, 814,815, 816, 817, 818, 819, 820, 821, 822, 823, 824, 825, 826,827, 828, 829, 830, 831, 832, 833, 834, 835, 836, 837, 838,839, 840, 841, 842, 843, 844, 845, 846, 847, 848, 849: n = A,T,C or G
  misc_feature 850, 851, 852, 853, 854, 855, 856, 857, 858, 859, 860, 861,862, 863, 864, 865, 866, 867, 868, 869, 870, 871, 872, 873,874, 875, 876, 877, 878, 879, 880, 881, 882, 883, 884, 885,886, 887, 888, 889, 890, 891, 892, 893, 894, 895, 896: n = A,T,C or G
  misc_feature 897, 898, 899, 900, 901, 902: n = A,T,C or G
caccatgttggccaggctggtcttgaactcctgagctcagatgatctgcctgccttggcctcccaaagtgctaggattacaggcatgagccaccatgcccggccttctttatatgtttctatattgtttatttagttatataatgagcaagagcctctttcattatttaaacaatttttctaaatgttgtccaaagaatatatatgggtggcaaataaccacttgaaaagatactcaagatcattactcattagggaaatgcacattaaaaccacagtgaaatatcacttcataactattaggatggctaaaatgaaaagattggctctaccagatgttgaccagaaggtagaggaactggatctcttatataccattggttgcaatgtaaaatggtacaactactttcaaaaagatcttagttaaatacacacttaacttataaagttaaatatacacttatcatgttatccggaaacttcactcctaggtccagctttattgtaatagtgaaacgggaaacaaacagttgtttattcagtgtgtgaagagacaaattgtggtatatccatataacagaattctgctaagcaatggaaagtaacgatgtattgatacatgcttccatacgaatggatctcaaaataatttttctgaaagaaagccccaggcaaaaaacactacatagtgcatactgtattatttatttatttatttagagacggattcttgctctgttgcccaggctggagtgcagtggcgtgatcttggctcactgcaacctccgcctcctgggttctagnnnnnnnnnnnnnnnnnnnnnnnnnnnnnnnnnnnnnnnnnnnnnnnnnnnnnnnnnnnnnnnnnnnnnnnnnnnnnnnnnnnnnnnnnnnnnnnnnnnnaaggcggcagccccatgcttagggtgactctagaggatcccaggcaatcatgtgtctgggtcctgggaaatgaattcaaaatgtcaagaattatctattaaaaaaaawttttttttgtaagaatcttgctctgttgcccaggctggagtgcagtggtgtgatcttggctcactgcaacctctgcctcccgggttcaagtgattcttctgcctcagcgtatctgagtagctgggactacaggagcccgccaccatgcctggctaatttttgtatttttagtagagacggggtttcatcatgttggccaggctggtctcgaactcctgacatcaggtgatctgcccaccttggcctcccaaagtgctgggattacaggcatgagccaccacctaaaatgtcaagagttatcagagctgttacctgcctttcaatattgttcaggtactgcctacaaatgctaataaacagttcatcttgactctgtttgcagcttaagatgtttttaggcctcttgatgagtaattgtca

SEQ ID NO: 671263 - DNA, 937 bp, Homo sapiens
acttctcatcctgtaaaccttaatttgcaacaggtgaccccaagctcataaacattatttctttcattttgataccagcctagaaacattttaagcttttgatctatttattgtaaattatgggatgcaatgccactttgtatttgcacaatgattagggataaaataggttttccaaactataattagacacagagaaagaggtctttttcctcttccatctcgtaaataattagagacccaaacccacattaataggtgttcccacaggatcttattttaatctctggcaaacaacttgctcaaattctaaggaaaaaagttaataatcttccaggtattaatacttcatgatatgcttttgttacgaagaataccaccamcactaacatcaacaaaacaaaacaaaaaccctgtatgactatcattaaaatacacattcaacaaagatggactcagttttatacttcagaattgtgggagacagaaaaatgaaaatcttaaaggctggcctttttcaggtgcagtctagctcagtagcagagacagtacaggacttaacagttctcaaagcatttccttttgttcttgttgtatcacttacacctaatagcatttgaacaagaatcttggtccatggtctgtaatgtgatgcaatgcgagaatgctaaatgtgtgtcatgtggaaagcatctgatgttgtgttgtgcattgcaataaactactaaaggtcagagccatgagaatgaaagaaaccaaaatctataattattggcatttgtgggaattgttctaagaacatttagccatttcaatccaattttctttctttatgggccttaacaaagaggggaatatacacagaggctttcaatccacagccactcttttattctctcttattggagaatagaaaccagacctatggcttatctca

SEQ ID NO: 671264 - DNA, 2312 bp, Homo sapiens
ctttaagggaatatagtatgcagcatttaaaaaaaaacttctaaggctttagggacttttttgtatttttgtttctaagtagcatatgagaggattgtgattacacagaacatattttgcaaaacacttagaatgcaaacattagaaaattcaatattgcccaatgaagaattcataatatgacccaattaaacaartatgttaatgtttatcatttggatattaattcaaaagagttaagtaagacatttctggtatttttaaaggtatatgcaaaacatacgtacacacaaatcatttcagttctttaaatgtcttgtcaaagacttaaatagacaaagaaacactgtgctgaagttaggtgtaaagccatttgggaagacatgtcagaaaaggagaagaaaatataagcacagaattatttccatttgttttaaattcttttgttattattcatcaattacctccaacaaaatggtgattagagcaagaaaaaagttttaaaatattttaaatcaatttttgttgatttcctgatttcatttatggggccataattttaaacatatataatgttttattattttttaatatgcccttatgcatttggaaaataatgattcaataatgtatgaatccaataaaattatacttttatttcaaactacaaatatacatccacagtatgcttccttagtttttccttgttaacagatgaattttgtcaaaggctgattttggcaagctctctgtcaagtggaaggttgtttgagcattatctaaaacaatttcttcaaaggaaacaaaaaatgagatttaagtatttgatacttcatatgcgatttatagcaaatatggcaggtcacatactgaaaaagagtaaaaaaagagaccattgctatttaaaaagacagaacgctccaatattttctgttctaatattttaacttttttcattaaaatttcccctgtctcaattatatgactgtaaccagtaggggctgctcttagcattacaggcaaagtaatttctctggagttgatagtttcaggactggctctcaatataactgaaacaaatttagcttggtgaacattttatggcaaaactattgcccttttctttgtccagttagatattatttttaattccttgcctttatgctttgtttttaagcatccaatatataaaacctatataaatcagtgaaaataatactacctgctactaatctttgtaaaattttttattggtataaatataataaaggaaagacattagaggctgtatattcaaaagataaactgcatttctaatagaaatagcaggaaggagaaagaaaatatactttcattaatagctgtgatttcaaacaggagctggctttccttttgggcagttcagaataatatattcaccaaaaattcaaaaaaagaaaatgttttctctctaggccgttagagaaattagaatataagactggttctgtcaaatagcttttgaaggtgtactttgaaagacacgaaatattctgtatattagtatctggacagaagcctcgttatctgtcaaaggttaactgcaccgtatacattacggctgcaacactgaagcggaggggcagcataaccccttcataattcctaaactgcactgtgatttccccagtcttgctgctcttctgtgttttatttatgttctagtgtgcctggagaagctccaaatagttgaataaatcacatgccttatgatgtgtaagtatcataactaagaaagtctgattacttgtggtaatactgtttcttttattatttccaattaagaaacatactgctagccagatattattaggactatccaagtgctggaatcatgttttggacaagacatccctatcaataactcatgcatagacgcctcaaggttattgctaataacatacttgagatagctgaatttgagactcattattaattaggaagtttggtactttgtcattacacatagggatttaagtatcagcttgtggcactattgtgtgacaggagggttgggaaattgcaaaataatttaggaattttaaaatctaatgaagaaaatatcaggcctaaatgtatgcattgtgaattctatacaactagaaacctttaagtgaaaaaacacaatggctatttaggtattcacattagataaattttgtctctagtgatctacctacacattataaactttttctatactcttgttaaattcatccatgaggtaattaaataaattctgtaattagccctcaattttatgtttattagaa

SEQ ID NO: 671265 - DNA, 2312 bp, Homo sapiens
ctttaagggaatatagtatgcagcatttaaaaaaaaacttctaaggctttagggacttttttgtatttttgtttctaagtagcatatgagaggattgtgattacacagaacatattttgcaaaacacttagaatgcaaacattagaaaattcaatattgcccaatgaagaattcataatatgacccaattaaacaaatatgttaatgtttatcatttggatattaattcaaaagagttaagtaagacatttctggtatttttaaaggtatatgcaaaacatacgtacacacaaatcatttcagttctttaaatgtcttgtcaaagacttaaatagacaaagaaacactgtgctgaagttaggtgtaaagccatttgggaagacatgtcagaaaaggagaagaaaatataagcacagaattatttccatttgttttaaattcttttgttattattcatcaattacctccaacaaaatggtgattagagcaagaaaaaagttttaaaatattttaaatcaatttttgttgatttcctgatttcatttatggggccataattttaaacatatataatgttttattattttttaatatgcccttatgcatttggaaaataatgattcaataatgtatgaatccaataaaattatacttttatttcaaactacaaatatacatccacagtatgcttccttagtttttccttgttaacagatgaattttgtcaaaggctgattttggcaagctctctgtcaagtggaaggttgtttgagcattatctaaaacaatttcttcaaaggaaacaaaaaatgagatttaagtatttgatacttcatatgcgatttatagcaaatatggcaggtcacatactgaaaaagagtaaaaaaagagaccattgctatttaaaaagacagaacgctccaatattttctgttctaatattttaacttttttcattaaaatttcccctgtctcaattatatgactgtaaccagtaggggctgctcttagcattacaggcaaagtaatttctctggagttgatagtttcaggactggctctcaatataactgaaacaaatttagcttggtgaacattttatggcaaaactattgcccttttctttgtccagttagatattatttttaattccttgcctttatgctttgtttttaagcatccaatatataaaacctatataaatcagtgaaaataatactacctgctactaatctttgtaaaattttttattggtataaatataataaaggaaagacattagaggctgtatattcaaaagataaactgcatttctaatagaaatagcaggaaggagaaagaaaatatactttcattaatagctgtgatttcaaacaggagctggctttccttttgggcagttcagaataatatattcaccaaaaattcaaaaaaagaaaatgttttctctctaggccgttagagaaattagaatataagactggttctgtcaaatagcttttgaaggtgtactttgaaagacacgaaatattctgtatattagtatctggacagaagcctcgttatctgtcaaaggttaactgcaccgtatacattacggctgcaacactgaagcggaggggcagcataaccccttcataattcctaaactgcactgtgatttccccagtcttgctgctcttctgtgttttatttatgttctagtgtgcctggagaagctccaaatagttgaataaatcacatgccttatgatgtgtaagtatcataactaagaaagtctgattacttgtggtaatactgtttcttttattatttccaattaagaaacatactgctagccagatattattaggactatccaagtgctggaatcatgttttggacaagacatccctatcaataactcatgcatagacgcctcaaggttattgctaataacatacttgagatagctgaatttgagactcattattaattaggaagtttggtactttgtcattacacatagggatttaagtatcagcttgtggcactattgtgtgacaggagggttgggaaattgcaaaataatttaggaattttaaaatctaatgaagaaaatatcaggcctaaatgtatgcattgtgaattctatacaactagaaacctttaagtgaaaaaacacaatggctatttaggtattcacattagataaattttgtctctagtgatctacytacacattataaactttttctatactcttgttaaattcatccatgaggtaattaaataaattctgtaattagccctcaattttatgtttattagaa

SEQ ID NO: 671266 - DNA, 575 bp, Homo sapiens
gctaaaagaatgaactagtaactgcatgacaagccctttgcaaacacagagctgggctgaagaagctgacaaagacagtacaaattcccatccctttaatcacaaagtcttacaaacagatyccctctgtgagagtttgaatcccagctgtttcagagacaactctgagctgcgaaatactaaacttggaagggccctagacatctttgagactttcccaaatgtcagttggtcagataccccatcaccatctttgctttgtttaggcacaacctgtactattaattactttatgtattaaatcaattttcttttccacttcaatccaattatagcataaggaaaagagactttatatcatgacctttaataggaaagccagactccctcataaataggttaccatacccatagatctactggcctcagaatgtgactgagttcaaagcaatttaataaatctccatgtaccccatattcaagggaggacactgaccagctgagtgggaatgagccctgctcagatgcctgggtggatgctgctttactgggactggctgtgcagacccaggatg

SEQ ID NO: 671267 - DNA, 1100 bp, Homo sapiens
gttcactgttgccttagctcagtaacctcattgatatgtacctcagcccccttatctgtaaaacaagctggaatttgggaagcttgcattggttattagatgagagggtggaatggaaaccagagagataagagcactcaaaaagtggcattctggactgaggccataatgaagagccaagcagtagcctggtggaagcatggccctgaagggcctgggcagtgatgctgaagccaggtcacagtccctccctgtcttctttcctccatttttataaaaaactgctgtgtgccaagcactggcctggaccccaagcatccaaaagatatcaagtttataccttcgtgacacttatattctgaagatcaaaacagacaggaaaggagaaaaccaaggaatacacaagggaggtatggaccgtgaacattactaagaaggaagtaaatgaggtgatgtccaagggagactggaggaaagaggagggaccagagatgtcagaggggcctggaagcacagctagcagctcttgtcgtgagtctgaggtctctgccagaaggggcttagatcaagggctgggctggaggtggcgcctccttcaagagcctctgggaggttgaaagtgcattccttcactcattccaccagaggttcctgaacccctcctatgtgcctggctctgttcctgtgctgggcaatagcaggggagaaaatgaagcctcggcccccatgaggctcacattctggtgagaggagatgggtcatcaacaaacaagccaaatctcttaggtcaagtgcagataagtgcgaggaagcaaaataaagagggatgagagatagggtgaagggggcatagaagaaggggctctgcagatatctagacagagttgcttggctgacttcaagaacagctgggaagccagcccagtgggaccaacaraagcaatggggaggagagacagggaggctctgaggggctggactgctagagatttgcaggctgtggcaagagttgtcattttgtggttgacaccccaagcaagggagtttggtcattgacctagctgtgctgtagagtcctaaaatctgaggccatattggat

SEQ ID NO: 671268 - DNA, 2012 bp, Homo sapiens
gattcacccagtttgaaagtatgcagaatcagacttctgttgttggtcacatatttctcaatcaaaacatctgtctatgtcgaaaccaaagtcggcccagtataatgaacttttaagacccatgttaatatttaaaaatatttggtaaactgtaaagcagtatacaaaagtgaatatttttatccaaggtgtaaattggtcatatggcccaataccagtagcataaagggaagccactatactagtagtgggtgaccaagtttatttctgttaagccaaaatggagatttattgtagaaaattattagtggtactttctggatgaagccattccttcttaaygtaattatgcccaatttcctgggtggagtcacagtctttcttctaaagacagattacttcaagctttagtagggactcttagttctgtcttgaactaacaataccttaaaatattctgcttcttcatgtccccaaaatattgatcagaaggatacttgtggtcaaatggatgctgtagaaattcaaaccagtgattttactccacttgaaatttaaaggattcatatgagttctagttgagtatgtcagttttagaacatagtttatattgagtaaacacagaatattttacctaaaagggtcacacagatgtcattacagtgaatttacttctgattaaactaatcttgttccctatatattttgatatatattgtgccatgataaccagtgtactattagtgttattaaagtctttcttcaaatagtagatttttatagaattttgaagtagacaaaataagtcaatttatgtttagatttaaaaaaaatgtgaaagcttttctatattctcctccccgtgccagataggtgcttggcacagagtacttaataactatttaataaatgacagaatttcttttcctaaaatttttaggacatatgcaaggaaatttctcttgcatctaggtttactgatgtatatgaggaagagttacatctgcttcagtgaaatacaaaattaaaccaggtgatctttctgaaaaattattcttatggtgacatatcagaaatcttatcaacagctatagtttattctgttggaattttcaaaatacactgtgccttaacttagaaacactccaatgaacttgtattcattagtgttttgttgagttaaagaaaaaatatctgtacaaagtggacacattgtttaattttgttttgcattttactagattgcagtgcaaggccaataaattaaacctaggcagttctcttgctaattacacacaacttatcttgagtatcagatattcaaatccattttatgaatatggtagagagaataacaactgtaaaacaaagcagtgtgcatgtaagtgactgttagcgtgcatttcagaaaggataaatgctcaccatatggtacaattactgtgtccaagttttcaaattagcttctctcatcctccttattactgtctttaaaaagagaggaaaaaacccaacatgatttatctactctgcagcagaactcttgacgcaaaacagcagcccagttctgtccagtttttttttcccttagcataatagaggctgtcggacttttttatactaattactgtgtgagcctcagatgaacccccttcaattcacagggctttgttaagggaggagctgtcaatgtgtctgcccgtttgcagctgtgctgtggctttagcttgcttaacattatgctgctttttagacttgacagaagggattttttttttttttttttttttttttttattaaggcaaagcagccttgtagcgaaatggtttaagcagctgcattgtagggaagcacaaagaagttattattgtgtctgtttaggggggtaggatggagggggagatattcggctgctgttgatgccgattgttgacttgccatctgccagatagggagaagaaaaaaatgacagctccagcagggtgttcaagaggttgtttggagagacgca

SEQ ID NO: 671269 - DNA, 656 bp, Homo sapiens
tttaaaaaacttattctgaaggcagtggggaacaggattgtgttttagaaagatgtctacctgttacttcccatgcaaccaaaataggactcatcaccacttctttcactcatcctcccactactctatatatttggcacttaggtgtggaagtggcacaacrttcacctgtttatctaagatagaaaactctaagtggcctgtagctcatccctcactgtaactaatccaacagattccatttctttccttttgtttccccactctcaatgttgctgtcccacttggtaatttggacaattgcagtagcctccagagagtcacaatctgtcccagtctctgtcctctactccagataaaatcagtgaggcaacaccctgtgtctggaggcccctgttccctcctcctcgcaggatgggcagaatatccaactccacctcctggctttataagctcttcacaatctggccttgagttgttttcaagtctcatcttaaaccctaagtacataaaatgtcactctaccccctcattccccattcagtgtttgccttcacccaatgttttctcattgtttgcacttgacagaccattcccatctctctatattggagcatacgtttcccattgcctaaatggccctttctttctatata

SEQ ID NO: 671270 - DNA, 656 bp, Homo sapiens
tttaaaaaacttattctgaaggcagtggggaacaggattgtgttttagaaagatgtctacctgttacttcccatgcaaccaaaataggactcatcaccacttctttcactcatcctcccactactctatatatttggcacttaggtgtggaagtggcacaacgttcacctgyttatctaagatagaaaactctaagtggcctgtagctcatccctcactgtaactaatccaacagattccatttctttccttttgtttccccactctcaatgttgctgtcccacttggtaatttggacaattgcagtagcctccagagagtcacaatctgtcccagtctctgtcctctactccagataaaatcagtgaggcaacaccctgtgtctggaggcccctgttccctcctcctcgcaggatgggcagaatatccaactccacctcctggctttataagctcttcacaatctggccttgagttgttttcaagtctcatcttaaaccctaagtacataaaatgtcactctaccccctcattccccattcagtgtttgccttcacccaatgttttctcattgtttgcacttgacagaccattcccatctctctatattggagcatacgtttcccattgcctaaatggccctttctttctatata

SEQ ID NO: 671271 - DNA, 1979 bp, Homo sapiens
tggacccaaacgtgcttatttaatttattttttttttttttgagacagagtctcagctctgtcgcccaggctggagtgcagtggcacaatctcggctcactgcaagctctgcctccccagttcacgctattctcctgcctcagcctcccgagtagctgggactacaggcgcccgccaccacgcccagctaattttttgtatttttagtagagacggggtttcaccatgttagccaggatggtctctgtctcctgacctcgtgatctgcctgcctcggcctcccaaagtgctgcgattacaggcatgagccactgcacctggccacgtgcttatttaatttttaataaaatacatcaaagtacagaaagcctagaaaacagaaaacatttattctaaaattatttaattccacaaaacttgactacgtttagtgtttttccatatgtatacatacttttacatgtttccaattacaatactcaacattccattttaatattatgtttccatgctgttacataattatgattattttaataatagtataattttccacgaagttaattaccatagtttgtctaatggcttagctattgttgattgttaggttgctaccagttttgttttctattagaagtaatgctataatgcacatcttcataaattaaaaaaaatgaagttaaagagtacaaacctttttgcaactctatgtacagcattaacatttcatgaaacaatataaaatcatatactatttatgtatgaaaatatgactggaataaattcagtccattacataaatttagtccattacacaaaacccccacacatataaaaagagcataaaacaatatgtgcagtctgataaattactacaaaccacacatctatgtatgtgctattgagggcaaatgtgtctttctatataaccttttaaaatgacaacactctcctttttcctcaaaaatcaccactatcttaacattcatgagtcatcatttcctcattttgctttgttcttttatcatttaggtttccctacctaaaatttatagttttgctgtgccaatttttgaaatatacataatggagagttgtagagtacacatttttttcctttgcrtttctaagattcatccatgttgttgcaggcagctgcagttcctccatttcattgttatgtggtttttaaaaattatctaattgtgccatatggcatttgtccattctgcattggtgattttggggattgcttaactactatagctattacggaaaattctgaccagaacattctttttcctacactgaattctgagttgcatcacttggtgcagtgattttgctgacaggtattttgcaaaaaaatctaagagatgaagtggtgggataatagaattttgaagaaaacctgagacttaagtaaaccaaggttaagtttcctcacaattagagaaagtaaaaggaattttaatgaaaaacttcaaaaggtcaatttactctgtgggattctgtaaaaattttccttctattctaaattctaggtgcaaaattttacagtttggagaagaccagaaaagcactagcatttgagaatgacagcattttagagatgaattgtttacaaagaggatgctggccattagatcacactggttggtctacaacttttactccttgtattcaagtgtatatttcactgttcttcggtgttatctgatatgtccagttccttattttatggaaatttctttttaaatttcaaaaactcaccaatgagtataggaaattgtaaaactcttttgctatgtcggttaagttaattcataggcatttcaattattttagatatcaatgattcagagatggaataaggctgataagaatctcttagaaggaaagcagtatttattcccttgaccctcaaattcccagtgaatttgagatagattgcaagcacaatgcatataatgaaatac

SEQ ID NO: 671272 - DNA, 2144 bp, Homo sapiens
gacagatagtagaaggataaagtgcatggactttgaagccagatagctacatgctaagtgtaatttttgaatttatttaaatgttttagcttgttttttattagctctaaaattgagataataatagcacctgcttcctagtgttgttgggagttttgaacatgataatatataaagtgccatgtgcattctactcattattcatacrttcattcataccttcaatgattttattcagcaattgattactcagcacctacaatgtgccagacactctcttagtctttgggaagaatacaaaaataaataattattgtcctggggagatcgaattcttgcatgggaagaggactaataaataatcaaatttgtaatatagaataggtacgtgccatcaagaaaataaatcaggcaagagggtaaggagtgtagggttcagagtgttgcaatattgaataaggtgaacagaaatggcttcatcaagaagatcagaattgagcaaagacttcaaaaagttgagagagtaagccacatgctttctgtaagaagagaatttcagaagaggagagagcaagtgcaaagacccaaggccagagaacacctgctatgcctaaagaagatgtgagagtgagagttatagcagatgaaggcagaggaatcgacagaagactagcacagtagagcttcatggatagggtattgcaaggaactcagcttttaccccagcacagagccacaccatcagtgggtacacatcatccctccaaccccagacaggcagccctctggctcacctttcagtagtagcaacaatgactgtgccaacagcagtatgcagaagggaggaatgtgttctgctctctatgcataagctctagcacagagcctgctctgccagtgggaaaggacctcatgctttgcttgcaaaaccaagcacagtgtgtcactgctttaagtggagtcatttctcataggcccagacagggagctcttgggctctggaaagcacacattttggttgtctttgttccatgggttgccttttttatgttctgcactgctctttccctgggaatagtactccaaggctgcagtactgggggccccatagcatctttgtgtccagccagtgctatgccattgtagcactaaggttactgggttactaatgtcagtgggggcttgtggaatgtgaagatatgggagccataactcccaatgcaggatgtagttctacaacagctgtcacaagggtgcccagctacagccacttaggtcttggagtgagtgactcagtgtgaattttctgtctgatacaatgcctttatggagtctccaaatcactacccatgctaggatcagggtttatctgggtagagttttggatcccaaggtttggattacagcaatcttacctggggatgtaaaccactgatgttctcccacttagcctttcgctaccatactgagtcccttggggctcctggctaatctcagatgatctgccattcatttccttgttctccagtgcctcaggtatttcctgtgacttctctgttgagttctctgttagatttctattcaaaatatgattatttattcataattttggttcttctttctagaggggcatgtgtctgacatctctagtgagccattataaaccagtatctatggacatattttatgtatattgtggtagaaagcaagaaagagcaaatgaagaataattcatctatattcacaaagagaccagatataattattattaacttataatccttactttataaattaaaaaataccaaaatctaagtagattagagattggccaacgtggtgttagtttgtggtgccaccagaatgcctacaactagaattaaggcatctggactacaaatatgtttccttactctatacctacattgcttcctaatataacatttatgctatttaaccttaaattgtgagcaatttgctcaatgcaaatacaaagtcagaatatctggaattcagccaagtaacaatttcctcagccatttactgttccttccacgaggtagtgaaagattatccaagagttcacagatctgataggatgccattcataacttataatgcatttgctctaatactaagactaa

SEQ ID NO: 671273 - DNA, 1084 bp, Homo sapiens
gaaatcatgatatcaagtgagacttgctgctttcaccttgtaaagcataacaagctgaaactgtcccatgagtaccagggatctgtgaatgttgctttagagttgtactgccttacttggtttccatatctattcaaggcgacagaaaataggaggtggttttattgtattatgtgtcctggcctccgtttgtcaggcctgggatttctccctggtgtatcctcccatttatgaaataaataattccctagaaactgaggagcacatagatgtacccagaggggtgatgaaacacacgtatctcacagctcaacttctcagtttgatttccagatctgtcattcatgaggtttatgtggaggggaaagaaagtggtcaaacaccaactgatggcttttactcaaaatttgtttcaccagagcttatgacaggacatgctattccacccagccaattggattctcagattgatgacttcactggtttcagcaaagatgggatgatgcagaaacctggtagcaatgcacctgtgggaggaaaygttaccagcaatttctctggagatgacctagaatgcagaggaatagcctcctctcccaaaagccaacaagaaattaatgctgatataaaatgtcaagtagtgaaggaaatccgatgccttggacgaagtaagtagtgtaagaacgtctgttttataaaactgtaggaagtcactctttctatgattcagaagatatccatgttacctcttgaggctcattctttgccagagttgagactgcacataatttatggtggttcctcttttctttgactaaagcatgtacattttttctttttcttttcttacttggttatggttaaaggagttacattcgtatgtatgtgcaggtgtcttttttattatttaggttttgtatgtgcaggtatcttgatttaagcatttaaaacatttcagcctctgaagcatgattgctgaggtgtagattcacttctattcttctttatatttgataatactgaagtttttttttcaacatcttcagaatatgaaaaaatcttcgaaatgcttgaaggagtgcaa

SEQ ID NO: 671274 - DNA, 1084 bp, Homo sapiens
gaaatcatgatatcaagtgagacttgctgctttcaccttgtaaagcataacaagctgaaactgtcccatgagtaccagggatctgtgaatgttgctttagagttgtactgccttacttggtttccatatctattcaaggcgacagaaaataggaggtggttttattgtattatgtgtcctggcctccgtttgtcaggcctgggatttctccctggtgtatcctcccatttatgaaataaataattccctagaaactgaggagcacatagatgtacccagaggggtgatgaaacacacgtatctcacagctcaacttctcagtttgatttccagatctgtcattcatgaggtttatgtggaggggaaagaaagtggtcaaacaccaactgatggcttttactcaaaatttgtttcaccagagcttatgacaggacatgctattccacccagccaattggattctcagattgatgacttcactggtttcagcaaagatgggatgatgcagaaacctggtagcaatgcacctgtgggaggaaacgttaccagcaatttctctggagatgacctagaatgcagaggaatagcctcctctcccaaaagccaacaagaaattaatgctgatataaaatgtcaagtagtgaaggaaatccgatgccttggacgaagtaagtagtgtaagaacgtctgttttataaaactgtaggaagtcactctttctatgattcagaagatatccatgttacctcttgaggctcattctttgccagagttgagaytgcacataatttatggtggttcctcttttctttgactaaagcatgtacattttttctttttcttttcttacttggttatggttaaaggagttacattcgtatgtatgtgcaggtgtcttttttattatttaggttttgtatgtgcaggtatcttgatttaagcatttaaaacatttcagcctctgaagcatgattgctgaggtgtagattcacttctattcttctttatatttgataatactgaagtttttttttcaacatcttcagaatatgaaaaaatcttcgaaatgcttgaaggagtgcaa

SEQ ID NO: 671275 - DNA, 632 bp, Homo sapiens
tagtgtgaatttgaactgcaaacttctgtgaggtttccataaggcccagtttattattggtacattctcaagtgagacttttttccttttcactcaggccaaaatgtataataggcaactgttactgtttgaatgtgtcccccaaaaagcatgtgttggaaayttaatctcccatactgcagtattgggaggtggacctgatgagaggctattggaccatgagggctgtgttctcacaaatgcgttaatgctcttaccatgggagtgggtttgttattacagcagtgggttcattaaaaaatggtgcatttggtccctttttctctgtctctcttttgccctctctttgcccttccaccgtgggatgatgcaacatgaggttcttcaccagatgctggcccctccagcttagacttcccagccctccagaaccatgaggcaaataaacttcttttaatttgtattataaattacccagtcttgatattctgtcctagctgtgtaaatggactaaggcaacacttttctttacaatcccttgggaggggtcctgtgtgtttcttgttcactaagagtatagccgtcgggttcccagcttcattctcgtggtctcctattagactctataccat

SEQ ID NO: 671276 - DNA, 632 bp, Homo sapiens
tagtgtgaatttgaactgcaaacttctgtgaggtttccataaggcccagtttattattggtacattctcaagtgagacttttttccttttcactcaggccaaaatgtataataggcaactgttactgtttgaatgtgtcccccaaaaagcatgtgttggaaatttaatctcccatactgcagyattgggaggtggacctgatgagaggctattggaccatgagggctgtgttctcacaaatgcgttaatgctcttaccatgggagtgggtttgttattacagcagtgggttcattaaaaaatggtgcatttggtccctttttctctgtctctcttttgccctctctttgcccttccaccgtgggatgatgcaacatgaggttcttcaccagatgctggcccctccagcttagacttcccagccctccagaaccatgaggcaaataaacttcttttaatttgtattataaattacccagtcttgatattctgtcctagctgtgtaaatggactaaggcaacacttttctttacaatcccttgggaggggtcctgtgtgtttcttgttcactaagagtatagccgtcgggttcccagcttcattctcgtggtctcctattagactctataccat

SEQ ID NO: 671277 - DNA, 632 bp, Homo sapiens
tagtgtgaatttgaactgcaaacttctgtgaggtttccataaggcccagtttattattggtacattctcaagtgagacttttttccttttcactcaggccaaaatgtataataggcaactgttactgtttgaatgtgtcccccaaaaagcatgtgttggaaatttaatctcccatactgcagtattgggaggtggacctgatgagaggctattggaccatgagggctgtgttctcacaaatgcgttaatgctcttaccatgggagtgggtttgttattacagcagtgggttcattaaaaaatggtgmatttggtccctttttctctgtctctcttttgccctctctttgcccttccaccgtgggatgatgcaacatgaggttcttcaccagatgctggcccctccagcttagacttcccagccctccagaaccatgaggcaaataaacttcttttaatttgtattataaattacccagtcttgatattctgtcctagctgtgtaaatggactaaggcaacacttttctttacaatcccttgggaggggtcctgtgtgtttcttgttcactaagagtatagccgtcgggttcccagcttcattctcgtggtctcctattagactctataccat

SEQ ID NO: 671278 - DNA, 1417 bp, Homo sapiens
tgggctggataattctttgttgtagcaggctgtcttctgcattaaggatgtttagcaacatccctggcctktacccactagatgtcagaagcacacctctgcccccacccaaaacatctccaaaaatgtctccagagagtgccaaatattccctagactagcagaggtgtccaaccttttggcttccctgggctacattgggagaagaagaattgtcttgggccacacataaaatacactaccactaacaatagctgatgagctaaaaaaatctcaaaaaataacctcataatttaagaaagtttacaaatttattttaagaaagtttatgcatttgtgatgggccactttcaaagctgtcctgggccgtatgcagcccatgggctgtgggttagaaaaacttgccccggagggtgagatcacatctacttgagaacatttactttaggcttcctttgagtcacaatttactccattaagattgaagaatgctggatctaatcgggacctggttttcctataagagagataaaacactataacacagaagttgaaggatagagcttcacctctgtttcatggattattgttttcattttatattttaaaggaaaaaattgacttggattatatctgaataaaatagcaaggaatattacttaacagagcttcattttttttccctccagcccggagaagttaactgtgatgttgtcgttcttccactatggcattgtcctggtgtacagcctcagaagctgtcattgtctatcagtgactacacgccaggtttcttgagctgccattaatgagataaaattattctttgatggcagtggccatatgacaaggattgagaagacaaggatccctggattccagaggattgtcacttagttatttcaacaaatagcgtgtttcaataaattttccacatagatcttatcttctatctcttatttaatattgtaatttcctctaaacttaagttttccaaatccttctcaagtagtgataacctcaagtataacatttgactctaatgcacaccctaataaataataacgtaaacactgttaatatgcactgaaaactgttcgagattccatgtgctcttctacaaatgctctgcttcatgttgattatccgtacacttcactgacttgggtcaggatttaggatgctggataatggaatgtggaggagatggcagagtatagttttgcacggctaaaaggcagtgatacattgccggattaaaataatactttgtaacatttgttctgaaaatagtacttgactatttggtgctcctgacatgactgcatactgttattttggatgcctatggaaagaaacacagcagactcattgcttattcattcattcatatataatgcatttctttctagattta

SEQ ID NO: 671279 - DNA, 632 bp, Homo sapiens
tttagtggatataggcagaagtcaaagcagcagcctctagggttctggtgccacccctgccccacaatgctggactgagaaaccaasggatgaactggaagcttcgggttgtcaaaactttctgtgaacaaatgcaatcaaaacccaaagctccccatttgaaaggcctatgaaaatgggttaattagggtctagaaaatcctgtgtgaagagtactcaaaacatctaagagtttgatagtggatgatttcttctcttaaatcttgccaggttaatagggggtgagtttggggctgaaagtaagaatttggagtgtgcagacttttaaagttctcctggttagtgtcatccctggaaagctttctttgggaacatttttggagactacagcatgggcagcttcacagctgtctaaccagtgcgatgacacagggccttgtgctcagaaaagccctgtctacagtttaatgctcaattgttattgtactgaaattcttgataattttttcttcgcatttgtgttttgtaagtgaagcccgatgggatgggacaatggagcaagagctggggggagcttagagcctggcccaccttggggtcaccttctgctgctccccacctctcccaatggg

SEQ ID NO: 671280 - DNA, 632 bp, Homo sapiens
tttagtggatataggcagaagtcaaagcagcagcctctagggttctggtgccacccctgccccacaatgctggactgagaaaccaagggatgaactggaagcttcgggttgtcaaaactttctrtgaacaaatgcaatcaaaacccaaagctccccatttgaaaggcctatgaaaatgggttaattagggtctagaaaatcctgtgtgaagagtactcaaaacatctaagagtttgatagtggatgatttcttctcttaaatcttgccaggttaatagggggtgagtttggggctgaaagtaagaatttggagtgtgcagacttttaaagttctcctggttagtgtcatccctggaaagctttctttgggaacatttttggagactacagcatgggcagcttcacagctgtctaaccagtgcgatgacacagggccttgtgctcagaaaagccctgtctacagtttaatgctcaattgttattgtactgaaattcttgataattttttcttcgcatttgtgttttgtaagtgaagcccgatgggatgggacaatggagcaagagctggggggagcttagagcctggcccaccttggggtcaccttctgctgctccccacctctcccaatggg

SEQ ID NO: 671281 - DNA, 1774 bp, Homo sapiens
ggatccttggaacacattaaagtacttattaaatagttaaatttgattaagtgcttattagatgaataaatacatggatgaatgaaacaaacccatcccatccaagattatttcataaccccaccaccaaaggtcttttgtcaggacaaccatcctcaagtagatccaggttcactttagatctcaagttaatccttagcgagacattctgagaacttctgaccctcggtgagatttacgcatgttagcagaagccataaggtttttttttaattacagctgaaaatatatatgaatattaatagttattacaagaagctctggagctttgggaaaaaatatgtggatttcaaggaaaagaaatattctatctctggcacaatttcaagtaccaagagcagagtcttcttaatgaagtgttaacgaagtgtcagcatagaccagaatgctgctgatttgcatactccttggttaataatgttaaaataggattgtgtggatgttaaatcctatgtattttatagagctaaaacgcctgttaagattattgattccttgtgacaattcttagtacagaatagtctagtaaattaaaagaggattcatttggttactctggaatggttataattctaattttcaagtaatgtatttctttattgtattcacaaagtaaaagattgtatgcccttgaatttcacagacaaactcgtggtcctgaaaatctaagattttgtgtactagagaaagagttaatgatcactaggctcatagttaataaacccaaccattcactctcctccacaaaagtattggaggtaaggcataagtgtcaatgacaagattgtatcactgatttttggaatatagagcaattactttctgaaatatataccatcagcaaagyagcttaaatatatatacacacacacacaaaatatatatttataaataagtatatgttagtatattttaatatgtctatatatttaatacataatgtatgaaatataaattagtttatataagcataagcaaaatttataattatgtatatgtatataaaaataaatgataaatacattaattttaatagtcataatgcttaatatataaaatatataatataaaaatatattttatattaatgtatatttatgtattaattatatatgtattatatatataaagtcatttcaacttgaccttataaatgttttccagaaaatattttgttctattcctagtatgttcctggttttaaatccttattatttgccttctgggccactcatgcaactccttaaattcagtattttctctcttaaattcatccttctatcagccaccatcatgatttatctaaaatctaaatgtttctttggtttaaagccctttaatgacccacattacttacactacaggcttgagctccttaacaaagtaataaagaagtaactcctgcttatcttttaatctcatctccaataatttcatgccttgctttttaaactgtgaaatacctaagtataatagtttcactcctttacatagaacataatgatgtttgtttgcttgcttggggttttggggattttttaaaacctctatggcttataatcagaattttcttctcaccttaggcttcaagatttcaagactaagcttgggtgtcaccttttccttaaagctttctctcatctcccaagacggtgggagtgcagtagtgcaatcatgactcactgcagctttgaactcctgggctcaaaggatc

SEQ ID NO: 671282 - DNA, 603 bp, Homo sapiens
atgtacataacatttacaatatgattaccataacatttacaatacgtacatgttatagatatatataacatatacagtgtgattgagcctattataaaatagagtagacatatatttttaagaygcgattctggttttttaggagagatctattttaagttataagcagggtctgtcttgtaaggtgaaaaacagcgtttgtcttaggaagacaatccctgtgtctggaagggatgttttggtggccctttggttatactaggtgaagcaaaaaccctctccacaatgcaaagatatgtggcatttaactattctgaataacagtaagtttgtcttcaatgtaggtagagttgcacctctgtagatattgtttcctttttgaaaaatagcctgtgcctcttctccctttccccactgtgggtagcagtagtagaccgggactttcaagaagcttggacttgaactctgtgcaggaaaagcaaggggcaggaagtcccatgctgcagacagctcatgacaactcttaagacacaattgctaaattttcagaaattctgttggatgattgttaaaggcaaacattatttgaaagtaaaatattta

SEQ ID NO: 671283 - DNA, 561 bp, Homo sapiens
cctggggttgtgcatggtggcggcgaaggcacccagcgctgggaccccagcgaggcgacccggggccaccgggcaggcccaagagctccctgtctgcgggccccttgctytccgcagcagccggcctgtcggtcctcggcgggagcctctcgttccccagccacggggccttcccggggtgcggccgagtcaggcggagaccccctggggtgggtggcgggagcggggccgcagcaacagggcggcgtggagggggagaaacaccttacccagccggcggccccctccagcgtgcagctggaacgggaagctgtctgctcagccgtcagaaggatgcgagaaattacctagctccccgcagaggcctccagcagccctcccagcccagccctccgcgcggcgataatatgctcctatcagctgtaacagccccgtgctggattcaggaggtattatggattgtacagcaagcatattgccattaaattaaattttcagaacattccccagctcatcacaaataccacagagagtcatcataatcggttctcaacacatgtg

SEQ ID NO: 671284 - DNA, 586 bp, Homo sapiens
aaatgattaagaatatttagttatttcacttctacactcacctgaaagttagagaatattttttccctgtttcatgttttctcccaggaaattaaacatattttgtgttggacrgagcgcctactgtggcttagattccagcaacctgattgtgaataaacctgatgaatgctaagtttttaaaagttattgtttattacatagttgaatctttcagaatatatttaaaccacattacatttatcaaaaaagttaaataaatttgaaatgtatatgaatctgtggtggcattaaagctaatgagtatttagtgagaaagctttgataccagtacaagaatgctttagcaccatagtagtttaaatattgaaagatttttttaaaaagaaatgtgaacattttaggaacattaagaggtacttatttactaatcgtcctcattgtgtagtctagagaggatgtttattataagtagttatggcttgaccatatgtgtgctttagctataatgattgttcctaaataagagttgctgtatttaaaaataaataaaacataaagcctttgcttgttctgctctggtcat

SEQ ID NO: 671285 - DNA, 1248 bp, Homo sapiens
tctttctataattaggcatccacaaaacactgagccagctgcattttcgtctcttctccacaagctgatggagggtcctcaccctgcacccagccgagcccctgtgttcacttgtcctggttcacaaacacgcacacacaggcacacacatgcaagcacatcagccttcagaccccctttccctgcccagttgctgggtgactgagaagtcgctgaagctgagttcttcctcagggacccggtctggctgtgtggtcattgcatgtgatggcagggtctggactggtccatgagtagctgccccctgacacctgggaggcacctgccagtgacgagggaggctggggctcttcctggatcctccaacgctttgatggtgagtgtgttgtctacgtgcattcaggcacaaaaatgcgaaggagtcatgctggtagcctcgcccacaggcctcctaaatcaatattaaccatgaccagccaagcatcatgctgtttctataattctcctacgataatccagtgccagtacatatgtgaatttgaagttatatcttatatacgtatataatgtgtcatatgggaaatatttgaaaatgcaataattattagaaaaattgacaaaaacttccagaattagtgattgatatgcatttccttacaagagaaacataaaacccctcatttcttcattcaagatgtgttaacttgttaagatgtgtgaatgcatgttaatttgttaagttaagaagttatcaacagtgtaaagagatagcctacagaacgggagaaaatatttacaaactatgtatccaatgaatgtctaatatccagaatcgatgaggaacttaagcagaaaacaaacaactccattamaaaaatgggcaaaggacatgaacatgtacatctcaaagaagacatccacatggccaataagcatatgagaaagatgctcaatctccctaatcattagataaatgcaaatcaaaactacaacaacataccttctcacaccggtcagaatggctattattacaaagccaaaaaatagcatatactggcaagattgcagagaaaagggaacacctatccactgctggtgggaatgcaaattagctcagcgactgtggaaagcagtttggagatttctcaaagaacctaaaatagagctgctgttcgacccagccatttcattactgggcatataaccaaaggaatataaattattctgccacaaagacacgtgcacaca

SEQ ID NO: 671286 - DNA, 1248 bp, Homo sapiens
tctttctataattaggcatccacaaaacactgagccagctgcattttcgtctcttctccacaagctgatggagggtcctcaccctgcacccagccgagcccctgtgttcacttgtcctggttcacaaacacgcacacacaggcacacacatgcaagcacatcagccttcagaccccctttccctgcccagttgctgggtgactgagaagtcgctgaagctgagttcttcctcagggacccggtctggctgtgtggtcattgcatgtgatggcagggtctggactggtccatgagtagctgccccctgacacctgggaggcacctgccagtgacgagggaggctggggctcttcctggatcctccaacgctttgatggtgagtgtgttgtctacgtgcattcaggcacaaaaatgcgaaggagtcatgctggtagcctcgcccacaggcctcctaaatcaatattaaccatgaccagccaagcatcatgctgtttctataattctcctacgataatccagtgccagtacatatgtgaatttgaagttatatcttatatacgtatataatgtgtcatatgggaaatatttgaaaatgcaataattattagaaaaattgacaaaaacttccagaattagtgattgatatgcatttccttacaagagaaacataaaacccctcatttcttcattcaagatgtgttaacttgttaagatgtgtgaatgcatgttaatttgttaagttaagaagttatcaacagtgtaaagagatagcctacagaacgggagaaaatatttacaaactatgtatccaatgaatgtctaatatccagaatcgatgaggaacttaagcagaaaacaaacaactccattacaaaaatgggcaaaggacatgaacatgtacatctcaaagaagacatccacatggccaataagcatatgagaaagatgctcaatctccctaatcattagataaatgcaaatcaaaactacaacaacataccttctcacaccggtcagaatggctattattacaaagccaaaaaatagcatatactggcaagattgcagagaaaagggaacacctatccactgctggtgggaatgcaaattagctcagcgactgtggaaagcagtttggagatttctcaaagaacctaaaatagagctgctgttcgacccagccatttcattactgggcatatamccaaaggaatataaattattctgccacaaagacacgtgcacaca

SEQ ID NO: 671287 - DNA, 1810 bp, Homo sapiens
cacacccatccattcttacctatcttctattctctagggcagtcattgccggcatcattttcttttgtgtttccaccttcattccaggaactcagcagagacaggtgtttgttgcccatgtataaaggctaaatcccacgcaccccaataaaacagaggccacgctctttccctcagggtgactttgcccttcctagacctcatgtcttcaggtgctgatttcattgaaaggcaccctccacctgagtggttattagagtgtggcacaccgggctgccccttggttgtggctagttatgacctgcattggargatggcagtgaggagtaaacatctgtccttaaaacgaggaaatgagggaaaaacaccaggtgaccagcagttggttgtacacggcgtcagcaacacggggcttgatacagctccatgcgtggcacatcgcaagcacctgagaaacggcagcgcccgtgccaggaccgtttctagctctacacaatttcccagattcatcacccagttctcaacacagttcttgtttcacaagatcaacaagtgtgaattttgtcttccatggaaggtaccatttgtgacttgactttcccttatcttgcttctccttggacttgtatcaagagagatttacagaatgattgatttgaattgttgccaaggttggtggaaggtcctttcataactgcctggatgggtggcctcattctgaccttctcctttgccaccctctcaccgccctccacagacacacacacacacacacacacacacacacacacacacacacacacactgcctggggacttgcacagggtttcaggccaggggccctagtgggtgcagctaatgccccagagcccccaagatctgatggctacaaatgaataggtgaggtgtgccctttcaccggaagtcaagggataagtgtctttagctccttgtattagtctgttctcatatggctaacaaggacatacccgagactgggtaatttatagaggaaataggtttaatggactcagttcctcatggctggggagacttcacaatcatggtggaagacgaaggaagagcaaaggcacaccttacgtggaagcaggcaagagagggtgtgcaggggaactcccatttataaaaccatcagatcttatgagacttactcactaccactacaacagcgtgggggaaactgcccccatgagtcaattatctccacctggccctacccatgacacatgggggttattacaactcaaggtgagatttgggaggggacacagccaaaccatatcacttcttcagctgacttgtgggttgctatttatgacaaattatcttaggaattaaataccagtttatgaatattgcaccattagggcattatcttttgccagctttcctgctcaccactcccttgtcctttattccgaatgtggacacatgggtaggaggcctgcaaacccgtgatgacatttctcagtgtgtggggccatcttggatcctggcagtggatgagaaaggcgtgaaatggcaaggaacggcaatggtcaactgaacagtgcatggttgtccgtgggttgaggaaacgtgatgtccgtggatgttgtttgctcttttccaaagatgcaaatgctgctgtgaatacggaaccacaatttgacctaaagacatgtctgcactcacatgccaaaatagtttgtcatttgctgtcctttgataattccatgtaaaagactatctcacaggtagcctagagatgtttgacacaaaaccaaaagatgaggaagggccaccccaa

SEQ ID NO: 671288 - DNA, 1085 bp, Homo sapiens
ggcaggggagaggcctatggggaggggggacaaggagcggaagatgagaagcctatggggccggaaggatggaggagaaggagggcaggtgagagactatgaggcagagggaggtaggaggagaggggactgcatggggcaggggcagcagatctgtttcctgtggatcttgtgggtggggttagggctctctgtgtttcagtttagaggttgggaacttatcacaggtttgtgcacagatgagaagttacttgttttgtgtttggaaaggtccatgtaggggagagagggtggaatacgtcagctatgtattgtcattactgaccgagcgatatggtcagccttcactattcatggattctgacttgtgaattcacctactcactaaaacctacttgttacttcaaagtcaacatgcacagcacttttgtggtcattcacgtgtgtgcacaaagagatgaaaatcacccaaaatgcacattcccagctgagatcaaacaaggcaaagctctgctttcttgtgtcagctracactgtaaacaagtttcttttccaatgtccagttatttagtgctgttaatacattcttgtgcttcttattggagatttttttgtttaaacacccccaggtgtggtgtgggagctttgtctggtgtcccaagtgcaagagactgtgacctgcctcacagagaaaacccatgtgtcggagaagcttcattcaagtgtgagttcagtgttaatgcatcagcaacagatattaactaaagtgtcatcaaacagaaacacacattatacaaggttgtatatggatttatgcataaaaacgcggtgaccataggatcacaggaacctgaccctccacatcccctgggagcaatggctttgtacttgccacctgagtgttcccagtaactttatagaacacacctaccatgcataatgagaatcagttttactctctatttgctcacaggcttgtgagctttcacagagtcagaaaaggttctcattcgtcttcatatccataaagcccagcgttgtcaagggaggctgagtcaagtaaagaggtttttccacacctgtaa

SEQ ID NO: 671289 - DNA, 688 bp, Homo sapiens
tgacagagcaaggaaatgtctaccaaaccctgcagattcacgtacacttatgtatacatacgtttctagacctatatatccatatccatgtgaagctaagcatgagttctgtatctatgtagctgtatctatttgaagctaagcatgagttcatactgatgtctccaaccctaatccagggccacargcaccatgccggcctcctgctgctcctacctcagcagtgagaagctgctgccaggatctgtcatccgcgcatctgattgtccagttccagcgcacctgcatcctgatttcagagctgctaacctgtacacccatgagaaacaacctcatcagctactatgccatgcttggacgcagttacccgtgtctttagtctcacagactaatattccgaaagtcaggtaggtcaacatcatttttcttcactccctttagtgaggttgtttcatttatgtgtaatacacttacacttttttgtcaaatttagcattccttcttagaatggttattttttaatttgcatacattaatgttcacacttgtacttcataattttgtgggttttgacaaatgagcagtgtcatgaatctacagtcacagtctcaagcagactatttttaacaccctaaatatttcatttacatcctatatctgatctctcctccctctgaacctccagaaa

SEQ ID NO: 671290 - DNA, 1470 bp, Homo sapiens
gtatttcagtattttctttcagtaagagaagtcaactttaacttagaatatgcacgtttttgtcagaaagataaaaataaaatcagcaatcttggaaggcattaagatataatgttggggccgggcgcagtggctcactcctgtaatcccagcactttgggaggctgaggcagccagatcacaaggtcaggtgttcgagacaagcctggccaatatgatgaaatcccgtctctactaaaaatacaaaaattagccagtgtggtggtgcgtgcctgtagtcccagctactcgggagactgaggcagaagaattgcttgaacctgggaggcagaggttgcagtgagccaagatcgcgccactgcactccagcctggtcaactgagcaagactccgtctcaaaaaaaaaaaaaaaaacatataatgttggaaaatattttaaccttcttaaatttaaaaaatcagaaacccatataatccaatccaattaaagattcacttcaaagaagtctttgttaaaagtattttgagagtggtacaccaagatgattaaaagccttaaatactttttaaaaattcaatttcaatcatctgtactaatggaagaaagcgtgacatggataattcaaattataatgcattcatgcatcaagtaacaacagggatacattctgagaaatgagaaattaggtgatttcattgttgtgtgaacattataaagtctacttacaaaacctcaatggcagagcctactacacacctagactatatggtatgtcttattgcttccaggttataaacctgtacagtatgctactgtactgaatactgtaagcaactgtaacatagtgtgtgtgataagtatttgtgtatctaaacatatactgacatagaaaaggtaccgtaaaaatatgtggtattataatcttataggaccactgtagcatttgtgttccactgctgatcaaaacactgctattcagtgcatggctgtaccttacttgtgccttctgagttttccaacagcttttttttgtctattatctaacatgacgtcaaattaattggccaagaatttattttctttcttctttttttagatagggtctcactctgtcacccaggtttarcctcccatgtagctgggaccacaggcacatgccgctacacctggataatttttttaaaaattttttgtagagatgtgttctccctatgtttcccaggctgatcttgaactcctagcctcaagcaatcttcccacctcagcctaagaatttctatatgctctaaggattgtgctttttctactaccaagtaaattattctttcaggactctggaatgtgttttctcctacaaaaaaattcccttctgaattaaatttattataggctaatattaaattatattgcattattttgatagcaagtaatgatgagcagagtgagtccaaaatgtatagagcacaaga

SEQ ID NO: 671291 - DNA, 1470 bp, Homo sapiens
gtatttcagtattttctttcagtaagagaagtcaactttaacttagaatatgcacgtttttgtcagaaagataaaaataaaatcagcaatcttggaaggcattaagatataatgttggggccgggcgcagtggctcactcctgtaatcccagcactttgggaggctgaggcagccagatcacaaggtcaggtgttcgagacaagcctggccaatatgatgaaatcccgtctctactaaaaatacaaaaattagccagtgtggtggtgcgtgcctgtagtcccagctactcgggagactgaggcagaagaattgcttgaacctgggaggcagaggttgcagtgagccaagatcgcgccactgcactccagcctggtcaactgagcaagactccgtctcaaaaaaaaaaaaaaaaacatataatgttggaaaatattttaaccttcttaaatttaaaaaatcagaaacccatataatccaatccaattaaagattcacttcaaagaagtctttgttaaaagtattttgagagtggtacaccaagatgattaaaagccttaaatactttttaaaaattcaatttcaatcatctgtactaatggaagaaagcgtgacatggataattcaaattataatgcattcatgcatcaagtaacaacagggatacattctgagaaatgagaaattaggtgatttcattgttgtgtgaacattataaagtctacttacaaaacctcaatggcagagcctactacacacctagactatatggtatgtcttattgcttccaggttataaacctgtacagtatgctactgtactgaatactgtaagcaactgtaacatagtgtgtgtgataagtatttgtgtatctaaacatatactgacatagaaaaggtaccgtaaaaatatgtggtattataatcttataggaccactgtagcatttgtgttccactgctgatcaaaacactgctattcagtgcatggctgtaccttacttgtgccttctgagttttccaacagcttttttttgtctattatctaacatgacgtcaaattaattggccaagaatttattttctttcttctttttttagatagggtctcactctgtcacccaggtttagcctcccatgtagctgggaccacaggcacatgccgctacacctggataatttttttaaaaawtttttgtagagatgtgttctccctatgtttcccaggctgatcttgaactcctagcctcaagcaatcttcccacctcagcctaagaatttctatatgctctaaggattgtgctttttctactaccaagtaaattattctttcaggactctggaatgtgttttctcctacaaaaaaattcccttctgaattaaatttattataggctaatattaaattatattgcattattttgatagcaagtaatgatgagcagagtgagtccaaaatgtatagagcacaaga

SEQ ID NO: 671292 - DNA, 1090 bp, Homo sapiens
  misc_feature 506, 507, 508, 509, 510, 511, 512, 513, 514, 515, 516, 517,518, 519, 520, 521, 522, 523, 524, 525, 526, 527, 528, 529,530, 531, 532, 533, 534, 535, 536, 537, 538, 539, 540, 541,542, 543, 544, 545, 546, 547, 548, 549, 550, 551, 552: n = A,T,C or G
  misc_feature 553, 554, 555, 556, 557, 558, 559, 560, 561, 562, 563, 564,565, 566, 567, 568, 569, 570, 571, 572, 573, 574, 575, 576,577, 578, 579, 580, 581, 582, 583, 584, 585, 586, 587, 588,589, 590, 591, 592, 593, 594, 595, 596, 597, 598, 599: n = A,T,C or G
  misc_feature 600, 601, 602, 603, 604, 605: n = A,T,C or G
tatgaatagatacgaaatattgtccaaacagccactgcattataaatagatgacatggaagaaacaggtgtccctttccattcataagaaatcattttgctggctgcggtggctcacacctgtaaccccagcactttgggaggccaaggcaggtggatcccttgaggtcaggagttccagaccagcctagccaaaatggtgaaaccctgtctctactaaaaatacaaaaattagccaggcgtggtgccacatgtctgtaatcctaactactcaagatgctgaggcaggagaatcacttgaacctgggaggcggaggttgcagtgagccaagaaatcgtgccactgcactccagcatgggggataagagcaagactctgtatcaaaataaataaataaataaaaaagaaaccattttgcaaataacagatcaacaacgttcttcatcaccccattataatttaaacctgggcaactatgaatatactgtttaaccttctttatcaannnnnnnnnnnnnnnnnnnnnnnnnnnnnnnnnnnnnnnnnnnnnnnnnnnnnnnnnnnnnnnnnnnnnnnnnnnnnnnnnnnnnnnnnnnnnnnnnnnntagtaaatattcttgggttcttcggaaatcagtcaactagtaattatttattggtaactaactgccaccaaataaaaattcttgagtagatctataattgggtaaattgtagaatagtaaaagcactgattgagaaattaaagagtaaatattgagggcttttttcccctttatgttaatcacattgcagaaaatggggagcatagagaaaatagagggcacagcaatattcaacagaaaaaattttctagttttttactattttaatatttgattaaataacttcattttattttattttgttttgttttattttwttttattttattttttcagacggagtttcgctcttgttgcccacgctggagtgcaatggcgggatctcagctcaccgcagcctctgcctcccgggttcaagcgattctccccagcctcccgagtagctagggttacaagcatgtgccaccacacccggctaattttgt

SEQ ID NO: 671293 - DNA, 2053 bp, Homo sapiens
gcatcactctttggtcctgtgtgctgctgtaagcagtgatttttttttttttttttgcctacctatagtttttttctttaagttactgccttgtgccaaattaagagatatgaatttgcaaatagcttcattttatgtgccagcagtaattagactcacaaggaaaagtaacctcagctacatttacaaaagttagtattttatatttcattcactggatacatgtgtcactataacttattgaaaattttctgtgacatattttagagatttccttcgtctgagagtgtcgtgatcagtgtctttaatgccagagaagtcataattggctggaaacatggctggaggtcacattttctaagtaggaacatgctattacttctggcctggaaagtagtggcaaacttttatatatctccctaccccactttccccgctcagtattagagtagtcgtattaagagtttgaatttcaaaatgagaaagacctgagttaaaatcccagttcaaccatgtactaattgtaagatcttaggtaagttattgggcttctgagtgtagtttcttcatctgtaaaaaggaatgataagattattacaaggattaaacgggataatatttgcgatatgcttagcaagagcttgacacatagtaagtgttttaaaagtagtaacaataactaaaataatattaatcgtaattttcaaggccaggtctggggaaacaaagttgcatgggccatggtcattattttcaagaaactcaatagactaacggagtatgtgactcaaaaagcatcactgtagaagggtaggagtattatggagatgttgcttaaagggcacaaaatttcagttagacaagaggaatatgttctattttacctcrtggtgattatcatgtgatctgttttacctcatggtgattatcattaataacgatagactggatatttgaaaattgctgagagtagactttaagtgttcttatcaccaaaaaatggtatgtgaagtaaatggcttgatttaatcattacacaatatgtacatacatcaaaacatcatgttgtacaccaaaaatacatacaatgtttatcaatttaaaatggtatcactgtaaatgtatcattatattggaaatgtacttggtactggatagttggttcttggtatttccatgaaatgctgtgttactgtttttaaaaattacctataaaaattttttttcttaactttggattttaagaactttatacttagaacaaagtattgtaaatgactcgttagaactgtaggtattggcattctctgtcctggtcttagttctgtttcagccccacagctgttgggctctttcttaggtaccaagaagacagccaagtgggcatgatatccaaataatgggccatattcaccctagaagatgagttttggtcaagatgggaggttgagaggaaggaccagaatatgagatgcaaactcaggaaatctatccaaaattgaggcaaagaaaaacaggatcaagtcattcagttgatacccaaggccaggattcctccaggcacctgtaccttggaaaagagggaccagagaaacttcaggaactcaagagatctgggtaggagctcaagctgggagcctgacatttgcaagagcagtatctaaccagggggtagggtagagtgagagaggtggagagaacagcactttcagtgttctaagcgggctctaaaccttttttgattgttgatctttatttatttatttatttattcattcatatattatacacatgtacacaattacatcttagttcaatgaataataaagttcattgttactgataattgcaattttttcaaatagtttaaaaaataattttaaattattttgattagcttctttccagacttgattatattgttactgtttttaaataaaaatggggctgatggagattgtgctattttcttgtttggtattgtgtgtgcattgttccattaccttcaatttgccttttctttgccttttaaagccattgtgtgagagtgaat

SEQ ID NO: 671294 - DNA, 1479 bp, Homo sapiens
ccgtgctcggctcttgcattgatcttgtattacttttgtaaagttttcacagaatgggaaaaaaatagcccacatcagtgatgaatctgtaaacagaggatatattattttaacactgggtagatgaagaaggctctgggcatcaggccagtgagacaaaacactgaatacaagttacattaaatgtggctacaagttactgcaatcacatgcaatacctgaatataccatgtattacctggaatagtactacaatgactctcgtgttgacattgaggtcttaagattaaaaatcatattttaaaaaatactcagcaatttgtggtctgcacagtcaatattttctttcttcatttgtaaggaacacttaagaaaaagttttaccccaatcattacatttgaaaatatttaaatttaaaaattggcatagactgggaaccacaagtcagaataattgtcaatcaattccaggcaagcacatcttcaccaagagttgaatataatgtgagaaagctactcaagacagttaccataactcctctggagaaaggcctggaagcctctcccactaaggtgcaagcactccctgtgagacatagtaaagggatgatgagaattcctcacacccagttacaaatagcacatcaatttagctgtgtgatttcagggcaaaatgtgtcctacctaaaccttgacctgagaaatatgatcattcagctatgtaaccatttactgtataattctgtattacaaatgggagtctctggcccatttcacagaaattccaactacaataccaaacacctgaatgtcagtgattcttaatcaccagcttttaataacgattttttttggtaaaaatactggaaatttctgacaaactttaagtgaagtatgagggatatagtccaatatgaaatttgatggtgtgtgtaaacaggaaattcaatgaaaaatggataataattataaaaaatgacaaaagttattgatgtttaagaaaacaaaaatgaggtcaataaatcattatcctacaaaatatttgcaacctataaaaacctgagaaatctattcttgaagaagtataatgtaaattaatcttttcaaataaatttaaatatatcatttgaaactgaagttctacatctagaaatctgtcatgcagaaatccttgcacgtaagcacatgtatgaacaggatgtttcctccagcacttaaatggctataagtcaatatcttcaagatatttctgggatagtatttatttcctctatgtggggcccatttgtgaacatctattttatatttaaacatctataaataaatatatttaaaagttttaaaaaatattagcagttatagaaatctaaattcacaaaattttagtaatttttctgatttctatgtcaatatacaataaatattacartaacttagtgactgctgctgcgtacttcaacaggttttatatatggtgat

SEQ ID NO: 671295 - DNA, 1991 bp, Homo sapiens
  misc_feature 1019, 1020, 1021, 1022, 1023, 1024, 1025, 1026, 1027, 1028,1029, 1030, 1031, 1032, 1033, 1034, 1035, 1036, 1037, 1038,1039, 1040, 1041, 1042, 1043, 1044, 1045, 1046, 1047, 1048,1049, 1050, 1051, 1052, 1053, 1054, 1055, 1056, 1057: n = A,T,C or G
  misc_feature 1058, 1059, 1060, 1061, 1062, 1063, 1064, 1065, 1066, 1067,1068, 1069, 1070, 1071, 1072, 1073, 1074, 1075, 1076, 1077,1078, 1079, 1080, 1081, 1082, 1083, 1084, 1085, 1086, 1087,1088, 1089, 1090, 1091, 1092, 1093, 1094, 1095, 1096: n = A,T,C or G
  misc_feature 1097, 1098, 1099, 1100, 1101, 1102, 1103, 1104, 1105, 1106,1107, 1108, 1109, 1110, 1111, 1112, 1113, 1114, 1115, 1116,1117, 1118: n = A,T,C or G
tcaaattcaaattaaaccatatttgttagaattctaaaaagactgagaaccctactaaatgccttctatatagcagacaaagaaaacagaataggacaggttaattaatgagaactactagaagactgaagtaagcagaacaactatatttcctggacttatttttacattagatcagtttaaatgcaatcataatatttcatacatagtgacttaaacaattgagataataaatgaaaaattcaagtatttaattgttagacagtcataattctggtgtgaagaagagtaacaaattaataatggtccacactttttaaattaatgtttgtactatactcactctcttcttccaaatttattattaagcttttttatttttaaaacaatgaaatgggagacagtttacttatatccacttgttccatagttacagtctgacatcttttgatttacaaacaaagcaaatctatgtaatcctctctgtatgagaaataaattaattctgcttaggaattacatataaagataaaaaatttcaagtggcatttttcatgtatatccataatattattacatttgttagcatggacatttttagatatgagaaagaatgattggcatcttataaataatagtgctgttgaaaaaaattctaaaatgcaatgatgctaaattttattcaaagactgttaaatcttcgatgacatactccaaagcattgacagcagtgtttaatatggttgtctatagctaagccatttggtamatgcctagtaccataatgaggtactgattttggaattaccaggaaatcatcataaactagtgcataatttacaaatttttaaaatttagtttttatgtgagtgttaaaaataacttcaggtttgcagccaaaaatagtataggtaattataaaaagctacgtagaataaaaaaataaagagtatttcataagtattcaaagatcatagttgtgttgtacatattagaaagttagttattattatattttnnnnnnnnnnnnnnnnnnnnnnnnnnnnnnnnnnnnnnnnnnnnnnnnnnnnnnnnnnnnnnnnnnnnnnnnnnnnnnnnnnnnnnnnnnnnnnnnnnnngccataaatattataatgcagtctttcaaagtaacagacaaagaatattggaagcagaaaaagaaaaaatggatcatgacataaaagggaattcacatgatatcaacaagatacaagaggatatctttttaaaccaaaagtaagcgacataatatattcaaagtattgaaagaaaaataagaaaaaatccctaccacacaagacattcatttggcaaacctgtcattcagaatggaaaatggaatattttctcaggttaaaaaaaaaggttgaagaaggtaattattaccacacccgttctacaagaaaagcaaaaaggagtcattcaagttgaaatgagggaggctaggtagcaaaatgaatgaatgtaaaagtataaatctatctggtaaagataaataaataattaaatataaagtcacataagtttttaatgttgatgcacaagttaattttaattctgatatgcaatttaaaagagaaaagcataaaagtaacattacatttatattaattgggacagaagataaaatatataactagtgatattactaacataaagtagaaatgggagatgtaaagaaatacagttttcatatataattaaaggtttttttggtttaaaatggactgttattttaaaatattttaatgttatttattatttatttatgctttattttttataatttataattatttttcattaattatgtaaaataatttaattctatatttttattttatttctattttatttatgtatttattttttaaaatatttttattacacaatgtttattataaaattttttatacaatcctcatggtaagcacaaaatatacctatagaacaagagtgtccaatctttt

SEQ ID NO: 671296 - DNA, 2524 bp, Homo sapiens
tggatctcaaggcccttatgcaactacaaacatgatggaggattcatctctagctcaactagaattgtagcccctaaaacccattagattttctaaggccctcataaaacctaccctgttctctccatgctttatcacaaatcacctattgcctgagagaagataattggaaaacaatgtcaatcttattaagtcttcttgttcatttctctgttggctgtatccactccctagaataatttttatgagagcagtgatttagttttcttattccctatcatatgcccaatgcctgaatcagcatctgacccatagtaggccatcagtaaatacatgttgaacaaataataaacacttacagaggaatattttcatacaagctggttgattgtcacaaagacaaagtatattcatgttaaatgaaactcagaaggttgtaaacagcatttcaaacttgtaactgccctttaactgttaagtgcatttacagttcagtttaacacagcctgtatcttcatttataagcccggtgagggcaaggatttgtggtttttgtaattattttgttaattctctttccccaggagcctcatggttttgtcagctgaaatagtacacccactatagagtagagtgaatttagtgtttatttctgctgatgatgaaggagccattccaaattactctactggaattacattgaacatggacaaaaatcttcaatcaaacaaattcatacaaaaggaattcagggtatttaatcagaagagaaggagacagaggaggcaaagataccattttcaagtgtcgggaagtccataatgtcatttagaagagggcatggtcctgttcagtgttgcgtgtattattgctcctttccatgcctatctcaataaagaaaatagagcagattttagttcaatataatcagtaaacaacactcaggtataacacagaaacaacagttctctagaaatataaggctctccaaaattgtatcaattcaaatagaagctaagttcctatatgacttttcatgaatatagtaagaatgacttcttgcctatgtgaaaaatgggactcaactagatggcccgtaatttgcaactctaaatttctagtgtacatgactgaatgagtatctgtaatatggtttgcattccctaacctcttagggagctcttaaaaagtataaaactggtcacaaatattaattgagaaggttgcaatctattgaggagcccagtgtcagttctaagaaaaagaaatgaaagaatgcaatgcaggagttcaataaagaaatttcagaatagattgatgcttagtactgtaattttccatagctacaacatctaaggcagataagtggtgtgtccagcccaatcaaatatcctttgctatatgagcacaagtctttctaatataggggttgtaggatggcctttaaaaagtcaagaagctgcatttggagagtaaggtatactctgatcaataaaagaccttggtagcaaaaggtccagtaaagtgggttatattaatcctcagaaataagtgaatggatattcgaggactggattaaatattctcaacttggagcatttctaaagttttgtaactttgctcactcatgagcttaaatgtagaggaacaggtgccactgaggtaggtgatcagtgcttaaatccataagcatctgcttctgagttcattgatctgtttcttatctaatatatagttccattcattcctcacacctgccctgtgagagaggtatctttattcccattttacagataaaagcagaaaacatcaacatcctcagaatatagtcctaacacagcccaaaagctggactaacatagctggaatgatgaactggttttgggagtgaaataggagattggggaataacacccacacggaaagatggaggagtacatatttggctcttccaagctgtctgttctcagtcatgtttggagaaacggaggtagttgagtaactcctgtggttgaaagcccctaggatagctcccagtgaccctgcctcctgacattcacccactgtgtaatcccttcccctggagtataggttgaattactttattttctagaataaagatagactagaatagaatacaaaaaaaaagtgataggttatcacttctgagattagattgcaaaagcattgtgacttccgtcttgcttatcctctctggctctctgggagaaccccagtgccatattgtggtggaactctsgaaaggcccaggtagcaagaaactgccatctccaagagtgagtaaggacttgaggcctcccaatagcagtgtgagtgagcatggaaacaggttcttcccatggagccttgaggtgactgctgcccaggctgacaccttgattgcaaccttgtgagaagccctgagtcagaggcactcagctaagccatacctggattcccgacccacataaattatgagatagtaagtttgctgtttgaagctgataaaccttgctatgacttg

SEQ ID NO: 671297 - DNA, 675 bp, Homo sapiens
aatgcacatatatttaattactaagtatccttaccccacaaaattctctgcctttcctctctttaattctttggtttctcctagtccctcccagtgtgtcactcctaactcttcttacctcctttctttggtttaaggtctmttagtgtctgtactgggtagtgttttcacagctttctcctctgacatggccgcctgactcagcggagaaagccaaggagataggataaaatgatccatctgacagaagcctaagtccatattccagaatgtatcccaaacttctcatctaaagtagagtcttcttctctgactctggagttaagttagtatttggtctttctttttctttgtttaaactcatttaaaataagccattattcacctgaagtcaggagttcttgaccagcctgggcaacatggtgaaatcccatctctactaaaaatacaaaaattagccaggtgtggtggtgggcacttgtaatcccagttactcgagaggctgaggcaggagagtcgcttgaactcgggaggcggaggttgcagtgagccgatattgcgccactgcactccagcctgggcaaaagagtgagactgtctcaaaaacaaagaaaaaaacatgcgtacttcttaaaacacctctcaaaccatggaaattatcccatgaatgaaaaa

SEQ ID NO: 671298 - DNA, 675 bp, Homo sapiens
aatgcacatatatttaattactaagtatccttaccccacaaaattctctgcctttcctctctttaattctttggtttctcctagtccctcccagtgtgtcactcctaactcttcttacctcctttctttggtttaaggtctcttagtgtctgtactgggtagtgttttcacagctttctcctctgacatggccgcctgactcagcggagaaagccaaggagataggataaaatgatccatctgacagaagcctaagtccatattccagaatgtatcccaaacttctcatctaaagtagagtcttcttctctgactctggagttaagttagtatttggtctttctttttctttgtttaaactcatttaaaataagccattattcacctgaagtcaggagttcwtgaccagcctgggcaacatggtgaaatcccatctctactaaaaatacaaaaattagccaggtgtggtggtgggcacttgtaatcccagttactcgagaggctgaggcaggagagtcgcttgaactcgggaggcggaggttgcagtgagccgatattgcgccactgcactccagcctgggcaaaagagtgagactgtctcaaaaacaaagaaaaaaacatgcgtacttcttaaaacacctctcaaaccatggaaattatcccatgaatgaaaaa

SEQ ID NO: 671299 - DNA, 675 bp, Homo sapiens
aatgcacatatatttaattactaagtatccttaccccacaaaattctctgcctttcctctctttaattctttggtttctcctagtccctcccagtgtgtcactcctaactcttcttacctcctttctttggtttaaggtctcttagtgtctgtactgggtagtgttttcacagctttctcctctgacatggccgcctgactcagcggagaaagccaaggagataggataaaatgatccatctgacagaagcctaagtccatattccagaatgtatcccaaacttctcatctaaagtagagtcttcttctctgactctggagttaagttagtatttggtctttctttttctttgtttaaactcatttaaaataagccattattcacctgaagtcaggagttcttgaccagcctggscaacatggtgaaatcccatctctactaaaaatacaaaaattagccaggtgtggtggtgggcacttgtaatcccagttactcgagaggctgaggcaggagagtcgcttgaactcgggaggcggaggttgcagtgagccgatattgcgccactgcactccagcctgggcaaaagagtgagactgtctcaaaaacaaagaaaaaaacatgcgtacttcttaaaacacctctcaaaccatggaaattatcccatgaatgaaaaa

SEQ ID NO: 671300 - DNA, 675 bp, Homo sapiens
aatgcacatatatttaattactaagtatccttaccccacaaaattctctgcctttcctctctttaattctttggtttctcctagtccctcccagtgtgtcactcctaactcttcttacctcctttctttggtttaaggtctcttagtgtctgtactgggtagtgttttcacagctttctcctctgacatggccgcctgactcagcggagaaagccaaggagataggataaaatgatccatctgacagaagcctaagtccatattccagaatgtatcccaaacttctcatctaaagtagagtcttcttctctgactctggagttaagttagtatttggtctttctttttctttgtttaaactcatttaaaataagccattattcacctgaagtcaggagttcttgaccagcctgggcaacatggtgaaatcccatctctactraaaatacaaaaattagccaggtgtggtggtgggcacttgtaatcccagttactcgagaggctgaggcaggagagtcgcttgaactcgggaggcggaggttgcagtgagccgatattgcgccactgcactccagcctgggcaaaagagtgagactgtctcaaaaacaaagaaaaaaacatgcgtacttcttaaaacacctctcaaaccatggaaattatcccatgaatgaaaaa

SEQ ID NO: 671301 - DNA, 1146 bp, Homo sapiens
tgtgtgtgctttttacatcagatgaatctcatggtcagttaagtctggaaatcacttgtctaaatgagttgcgtttggtttttcctaagaaatatgctgtcagttcctcaagagaagcaaaatataccagcccttatatttcctttaagaagactcacctaatttaggtcatatatctcaaagtgttatggggcaagatatattcaacactgtattcagtatggtaagcttcattgaataaattttcagatgctttgaatgaagttgcgtaaatgaaaccaaaatatcaatgagaaaatcaattttataaggataactgcataagttttagaaagctgcatgacagtgtagattttttgcctgaagattgtcttcaagataatctagatattttttagatttcaaagaattgtccctatctgtagatttgttgttcttggaaaaaaagtcttaaaagatcattatctggatacaaatttcataattatcatacatatacacactactacagctataaaatataaacctggtagaaaaaaataccaactaaaatggaaggaattatactcttcaaaagtaatttatcctacccagagtcctcctttcctaaggcagctgtactagtccattttcgtgcttctgataaagacatacacgagactggacagtttataaaagacagaagtttaatggacttacagttccacatggctggagagacctcacaatcatggcagaaggcaaggaagagcaagtcacgtcttacatggatgtcaacaggcaaagagagagagcttgtacaggggaactcctctttataaaatcatcagatcacatgagacctattcactatcacataaacagcatgggaaagactaggccccatgattcaatcacctcccaccaggtccctcccacaacacatgtgaattcaagatgagatttcgggggtggggaacacagccaaaccatatcattccacccctggccctgcccaaatcttatgtcctcatatttcaaaaccaatcatgtcttcccaaaagtcccccaaagtcttaactcatttcagcattaattcaaaagtctacagtccaatgtctcayctgagacaaggcaagtcccttccacctatgagcctgtaaaatc

SEQ ID NO: 671302 - DNA, 1397 bp, Homo sapiens
agtaacataaaaatctacatataattatgtaaacattgctttgacatacaacaccaaatatttttattgtatttgtgaatgcatttcttggtaataaaacggcagttatgaataagtgatacttggaaagctataacataatgggaggagaaggtattaacactgtgattttatggggttgaatcagttttagtttcttatacaactcagagctttacgttatttagactgtctaaacactggcgcaaggtagcattttacttatcaaaacactggaggaggcagtctattttatgtgggaataatagctttttaacagtgttcgattaggagacattaggaaccttgccttgaaaaccattagcaaatttatctagaagattttacgttacatcttaaaacaaccagctgctaaggacatcctaaactgcttagtatgccaatttgcctcagatgcttgccatataagctgctttcaggagtcagcaatgagtatcatagatacttgaggataaaaggttgaaggatattggcattcaaagatgaagccagaaaccctgtacagccaaaaaaattaaacttgcattttactttggagtgaaatgtctttgctatttccaaagtttttaacttttgggttctcaactagccctagcaatataagggcctgactaatgactcttcccaacattgtcaaacttaattcaaacttgaaatcaatccccttttttttcctcctaaagcaaagtaactcacaataataatatgagtacatgtgaatggccaatttaraagtttaagtcattcttttgtaatcagtactagaattaactagtgatttttttttttggcaaggaataacaaaataatagaaactccatatatattagaaaaagatctgtaagtttgagccttatatattattacaatgtggcaatcaagaggaaaactcaagacaactgtgcgctgtgcttgtcctgttttgttcaaaccacgataattttaaataaatagtaatgttcaacattcactgatgacattatctatcaaccacatcacacctggaacacagtagataataaatggcagctgttataccttccttcttgaaacaaaatcctgtcatttcattctcattttaactttgtgttaagcttctacaatccataaaaatgataaaacaataaaatggtccaacattatctagtccagtcttatttttacaaaacattgactttaaaagtccctgagattttaattttactggtttaatctgtcttccctacccttgtttaaaaaaaaatagaatcatgtgtcattattggttgagtacccgttatctgaaatccttgggacaagtgttttggatttcaaatattgaaatatttggcttatat

SEQ ID NO: 671303 - DNA, 1514 bp, Homo sapiens
ttcttccaatgtggcccaggaaagccaaaagattggacaccctgctctaaaggatgcagctcatggcacaaggtcatttctccaccataaaagaaagcaatacaaattgctgcccaggcatggtggcacacatctgtattgccagctacttaggaggctgaggcaggaggattgcttgagcccaggagatcgaggccagcctgagcatagcaagaccctattccttaaacaaaaaaaattttttggccgggcgcagtggctcatgcctgtaatcccagcactttgggaggccaaggtaggcggatcacgaggtcaggagattgagaccatcctgtctaacacagtgaaaccccgtctctacgaaaaatacaaaaaaattagccggggccgggcacggtggctcacgcctgtaatcccagcactttgggaggccgaggtgggaggatcatgaggtcaggagatcgaaaccatcctggctaacatggtaaaaccccgtctctactaaaaatacaaaaaaaaattagccgggcgtggtggcgggcgcctgtagtcccagctactcagaaggctgaggcaggagaatggcgtgaacctgggagatggaggttgcagtgagccgagattgcgtcactgcactccagcctgtgcgacagaatgagactctgtctcgaaaaaaaaatttttttaataagcattaaaaaaatagctttcctggcactgcaaaagcttactgggggaggggggggaaataaaggctttcctgactcagcacccagggaactggggagcagaaatgggggaggagagaagagttgtaagagatacagacagaggtgtgcttgttcccaagggggcggtggctctgcctccttagccgacatttcactggcaggggacagagagtacaggggtaagggcagaagggacgtggcccttgtttgctctaaaacccttgcttccagcaccacaagaacatgagaggggagagaagcagagcggaaaggcaggcagggcagacctggactgaaaatgggcctccaagaaccgccccacctgagtctcccctacttccttcctgtgtggggaaatcaggggaagagcccgtagcgcctggtgagggtgaggaaggtggcagagaatgaagccttggccagagcagcactgccactgcagtgacggggcctggccggcagggaacagccacctctccttttgttgcctaagagcagctgacaaactgggtcaatggtgaaggcaacagtgaccaagactgacacscaccaccaaggcaacaagatgtctccaaggccaaggggggccggagaacaggaagcatgggacagacctggggctcatccagaggaggagatgagggagtgtggccctgatggaattaaaatcctggattgactgaggaattaccctaaagaagctttgaaaccagaagggtgtcagttatcctaaagtgccaagatgaagagttttccactacttcataagtaaattgagtacag

SEQ ID NO: 671304 - DNA, 1514 bp, Homo sapiens
ttcttccaatgtggcccaggaaagccaaaagattggacaccctgctctaaaggatgcagctcatggcacaaggtcatttctccaccataaaagaaagcaatacaaattgctgcccaggcatggtggcacacatctgtattgccagctacttaggaggctgaggcaggaggattgcttgagcccaggagatcgaggccagcctgagcatagcaagaccctattccttaaacaaaaaaaattttttggccgggcgcagtggctcatgcctgtaatcccagcactttgggaggccaaggtaggcggatcacgaggtcaggagattgagaccatcctgtctaacacagtgaaaccccgtctctacgaaaaatacaaaaaaattagccggggccgggcacggtggctcacgcctgtaatcccagcactttgggaggccgaggtgggaggatcatgaggtcaggagatcgaaaccatcctggctaacatggtaaaaccccgtctctactaaaaatacaaaaaaaaattagccgggcgtggtggcgggcgcctgtagtcccagctactcagaaggctgaggcaggagaatggcgtgaacctgggagatggaggttgcagtgagccgagattgcgtcactgcactccagcctgtgcgacagaatgagactctgtctcgaaaaaaaaatttttttaataagcattaaaaaaatagctttcctggcactgcaaaagcttactgggggaggggggggaaataaaggctttcctgactcagcacccagggaactggggagcagaaatgggggaggagagaagagttgtaagagatacagacagaggtgtgcttgttcccaagggggcggtggctctgcctccttagccgacatttcactggcaggggacagagagtacaggggtaagggcagaagggacgtggcccttgtttgctctaaaacccttgcttccagcaccacaagaacatgagaggggagagaagcagagcggaaaggcaggcagggcagacctggactgaaaatgggcctccaagaaccgccccacctgagtctcccctacttccttcctgtgtggggaaatcaggggaagagcccgtagcgcctggtgagggtgaggaaggtggcagagaatgaagccttggccagagcagcactgccactgcagtgacggggcctggccggcagggaacagccacctctccttttgttgcctaagagcagctgacaaactgggtcaatggtgaaggcaacagtgaccaagactgacacgcaccaccaaggcaacaagatgtctccaaggccaaggggggccggagaacaggaagcatgggacagacctggggctcatccagaggaggagatgagggagygtggccctgatggaattaaaatcctggattgactgaggaattaccctaaagaagctttgaaaccagaagggtgtcagttatcctaaagtgccaagatgaagagttttccactacttcataagtaaattgagtacag

SEQ ID NO: 671305 - DNA, 647 bp, Homo sapiens
gggtgggatttcggaagcacattgtgagaaggggcggggctaaaccaaccgttagttgaggggtggggtttcgatgtgacaaagaggcggggctctggggaatcgggggaggggcggagctaaataaacaatgaggggcggggcttggaggggcagcggcagagcgaggagtgggatttgagtgrataacattgctgaagggctgcggcctggggcagttcccctgggaactggtttgggatggaagctaggaaggcagtggggccaaaaggaaatattttagaggaaggggcgtggctggaagaaaatgtccctgggattgagtttttccttgaggcgaaatattctgaggtggatgggaggggcctaaggtaattcccctgggagacctttaggtttttttttctgtattgggggaaggggtggggcatcggtcctactttaggacctaaagaaattcccttgggagtgggtggggctcagagatttgggtaaagaaagggcaaatttagaattcggagaggctgaggcttagtgttctaaacggtggttggaagggggagggaggagcctcatggacgtgcctgggggtgtggcttggcttccccttgattttggccggtggatgacgctgtcctgaccacacc

SEQ ID NO: 671306 - DNA, 647 bp, Homo sapiens
gggtgggatttcggaagcacattgtgagaaggggcggggctaaaccaaccgttagttgaggggtggggtttcgatgtgacaaagaggcggggctctggggaatcgggggaggggcggagctaaataaacaatgaggggcggggcttggaggggcagcggcagagcgaggagtgggatttgagtggataacattgctgaagggctgcggcctggggcagttcccctgggaactggtttgggatggaagctaggaaggcagtggggccaaaaggaaatattttagaggaaggggcgtggctggaagaaaatgtccctgggattgagtttttccttgaggcgaaatattctgaggtggatgggaggggcctaaggtaattcccctgggagacctttaggtttttttttctgtattgggkgaaggggtggggcatcggtcctactttaggacctaaagaaattcccttgggagtgggtggggctcagagatttgggtaaagaaagggcaaatttagaattcggagaggctgaggcttagtgttctaaacggtggttggaagggggagggaggagcctcatggacgtgcctgggggtgtggcttggcttccccttgattttggccggtggatgacgctgtcctgaccacacc

SEQ ID NO: 671307 - DNA, 596 bp, Homo sapiens
cggggcgtctccaagcggcgggcctagggagggygcaacagctgctccctgaagactttctgacccaacagtcccccagcgccggacgcgccggccccggcggctctagggacccccgggcctgcacttagccccgcgccggaggaagaaccggaactatggtttgtgccttccttattgcctctgaaatatttttaactgcaaaggaaagcctgtattattttggagaaaggcgaacagataaaacccacagcaaaaaatttcagggagtagaaactccttctcagaatagctatgttggatattttgcacaagtgaaacatctctacaactggaatctccctccaagacggatactctttatgaaaacattcattatttattcaattcctggttatgtacgtgatctaaaagtccaaatagtaatggagaaaaaggttgtcttttccagtacttcatgaggaaattgttcggctggagtgcagtggcgtgatctcggctctctacaacctccacctcccagccacctgccttggcctcccaaagtgtcgagattgcagcctctgccccgctgccaccccgtctgggaagtgagg

SEQ ID NO: 671308 - DNA, 596 bp, Homo sapiens
cggggcgtctccaagcggcgggcctagggagggcgcaacagctgctccctgaagactttctgacccaacagtcccccagcgccggacgcgccggccccggcggctctagggacccccgggcctgcacttagccccgcgcckgaggaagaaccggaactatggtttgtgccttccttattgcctctgaaatatttttaactgcaaaggaaagcctgtattattttggagaaaggcgaacagataaaacccacagcaaaaaatttcagggagtagaaactccttctcagaatagctatgttggatattttgcacaagtgaaacatctctacaactggaatctccctccaagacggatactctttatgaaaacattcattatttattcaattcctggttatgtacgtgatctaaaagtccaaatagtaatggagaaaaaggttgtcttttccagtacttcatgaggaaattgttcggctggagtgcagtggcgtgatctcggctctctacaacctccacctcccagccacctgccttggcctcccaaagtgtcgagattgcagcctctgccccgctgccaccccgtctgggaagtgagg

SEQ ID NO: 671309 - DNA, 596 bp, Homo sapiens
cggggcgtctccaagcggcgggcctagggagggcgcaacagctgctccctgaagactttctgacccaacagtcccccagcgccggacgcgccggccccggcggctctagggacccccgggcctgcacttagccccgcgccggaggaagaaccggaactatggtttgtgccttccttattgcctctgaaatatttttaactgcaaaggaaagcctgtattattttggagaaaggcgaacagataaaacccacagcaaaaaatttcagggagtagaaactccttctcagaatagctatgttggatattttgcacaagtgaaacatctctacaactggaatctccctccaagacggatactctttatgaaaacattcattatttattcrattcctggttatgtacgtgatctaaaagtccaaatagtaatggagaaaaaggttgtcttttccagtacttcatgaggaaattgttcggctggagtgcagtggcgtgatctcggctctctacaacctccacctcccagccacctgccttggcctcccaaagtgtcgagattgcagcctctgccccgctgccaccccgtctgggaagtgagg

SEQ ID NO: 671310 - DNA, 596 bp, Homo sapiens
cggggcgtctccaagcggcgggcctagggagggcgcaacagctgctccctgaagactttctgacccaacagtcccccagcgccggacgcgccggccccggcggctctagggacccccgggcctgcacttagccccgcgccggaggaagaaccggaactatggtttgtgccttccttattgcctctgaaatatttttaactgcaaaggaaagcctgtattattttggagaaaggcgaacagataaaacccacagcaaaaaatttcagggagtagaaactccttctcagaatagctatgttggatattttgcacaagtgaaacatctctacaactggaatctccctccaagacggatactctttatgaaaacattcattatttattcaattcctggttatgtacgtgatctaaaagtccaaatagtaatggagaaaaaggttgtcttttccagtacttcatgaggaaattgttcggctggagtgcagtggcgtgatctcggctctctacaacctccacctcccagccacctgccttggcctcccaaagtgycgagattgcagcctctgccccgctgccaccccgtctgggaagtgagg

SEQ ID NO: 671311 - DNA, 627 bp, Homo sapiens
cttaaagatatttactacttcctttaagtaagagaatttgtcctaattatgttctcaaagactaataacagctgggatatgaatgtaggctatttgagtcatattactttccagcttcccagtactctggcttacttttataaaatacgtgtttttgttcagtttagttttagttttcttactcagtggcaaaaattgaacccaaagcttgcattcttttttgttatttttctcatttatacctctttctaaaatgagagaatcacaaatgcactggtaatygctgttaaaatgattcactgtataaatacattgtaaaacccatgtaaactatatcaccactaaacattaaaagtacattttgtggttctgtttaaatgaatctacttaattaataaatcatagtttcatgttttctgagttagtttaaaaatcacagatttaatttttcatgagataatctaatggtctttagagcaaccattgtctttataataattatattgtttccttcctaccccaagaaggaaaatctgatttatataatgacatatagctatagaaactatatataattatgtatatatttatatgatgaaacatatacagagatgtaaggctttcttt

SEQ ID NO: 671312 - DNA, 741 bp, Homo sapiens
gaacaggaaaaagtatgaggaaatagcacaaattcattcaagtttcgtgtcagatgaaattacagttgaaatacttggcttattcataaaactgtggtgtatcatgtgaggcctttacataatgaatgactaagcaatgttttcagtttatgctattgaactattaacatgtatagtggagtttacaaatgccagaaatttcagtttacccaataagtgtttcctgaaggcccactgtacgcagaacgaaccagggaatacagagaaaattctagtccttaacttagaagtcctagaggactcgaggaggccacaatttaataaagcctttgatttttaaatctttccagcttactttttcgattgttataaagctcacaggttttttgtttgttttcatttgctcactttattttccttaatactgtcttctttacattccaaactttcacaaaatggagtctttgtgaattgcagtattttctttaacatggccccatttccatggatgtatttattacttagtgaaatggttattatcccctaaatctttgtccagagggtaaatttctccttagattattttaatgttccaatccccatgaaatgtaattaacctgcctcttgtcttatcttttgtccaaagtagctagttaccgttacactagatcttgattttgtgattaaatggcaaaagcactttcttaggtaaamggaataatgtctgccatgtaggtgtca

SEQ ID NO: 671313 - DNA, 666 bp, Homo sapiens
atatatataccacagtttctttatctacttgtccaatacaatacaattttattaactatagctctcatgctgcacattagattgctaaacttattcattaatttgtatcmtttgacctatatctttgtatcctttggcctatatctttgtttttgagcattttctctctctctctttgctttatgttgtatttttctattactaaatttcagtgcttttaaatttcagtgattttatacactaaaatctacttagtctacaggatctaaactgctatttatcccatgcggtgatttttttcctccttcaaatgtcatatgttccattttcaaaaatcccatttggctcttctttatataatacatttctcttctcatattagtgatttcctagaatgtttgaacatattaagcatatttctaacagacgctttaaaatcatgttctactagttctatcatatctactgtttcttggtttttgtcgattgacttgattttcttctgtaatgggccatagttgtctactttaaagaattttaggtaatttttaattgaatactgaccagtataaattttgtgtttttttgagtgttggattgtgttggctctctttaaataaggttgcactttgatctcgaaggtagttacttgagtgtcagcttgat

SEQ ID NO: 671314 - DNA, 666 bp, Homo sapiens
atatatataccacagtttctttatctacttgtccaatacaatacaattttattaactatagctctcatgctgcacattagattgctaaacttattcattaatttgtatcctttgacctatatctttgtatcctttggcctatatctttgtttttgagcattttctctctctctctttgctttatgttgtatttttctattactaaatttcagtgcttttaaatttcagtgattttatacactaaaatctacttagtctacaggatctaaactgctatttatcccatgcggtgatttttttcctccttcaaatgtcatatgttccattttcaaaartcccatttggctcttctttatataatacatttctcttctcatattagtgatttcctagaatgtttgaacatattaagcatatttctaacagacgctttaaaatcatgttctactagttctatcatatctactgtttcttggtttttgtcgattgacttgattttcttctgtaatgggccatagttgtctactttaaagaattttaggtaatttttaattgaatactgaccagtataaattttgtgtttttttgagtgttggattgtgttggctctctttaaataaggttgcactttgatctcgaaggtagttacttgagtgtcagcttgat

SEQ ID NO: 671315 - DNA, 626 bp, Homo sapiens
  misc_feature 423: n = A,T,C or G
cgagtagctgggattacaggtgaccgctaccacacccagctaattttttgtatttttagtaaagacggggtttcaccacgttggccaggctggtctcaaaytcctgacctcaggtgatccaccttcctcagcctcccaaagtgctgggattacaggcatgagccactgcgcccggcctgtgtattttatttcttaaaaagagcctccagatcacttgagtccaggagttccaaggaagcagtgagctatgatcgcacctgggtgacagaatgagaccctgtctcaaaaaacaaaaacataaacaaccaagacagcctccaaaattgtataagcttcaaggcctggcaaaacctgaacttgctcctgtctccaacgtatttggcaaaggggtgggagaggggtgggcaggttgtcccatcttcncatttatggtccttagagcagccaatgctcgctgctctttgctggggggattttctttttttctttttcttttctttgagacagaatcttcctttgttccccaggctggagtgcactgggacgatcttggctcactgaaaccttcgcctctcaggtacaaacaattctcatgtctcagcctccctattagctgggattacagg

SEQ ID NO: 671316 - DNA, 973 bp, Homo sapiens
gcgtctctgtatctacatagagagacactctacataatatatatatwttttatatatatatacaatagttttgttttgttttagagacaaggactcactctgtcacccaggcgggagttcagtggtgcaatggtagctcactgtagtcttgaactcctgggctcaagtgatcctcccacctcagcctcctgaacagctgggcctgcaggcacgcaccaccaccccggctaatttgtttttatttttacagagacaaggtcttgctatgttgcccagggtagtcttgaactcctgagctcaagagtccccttgccttggcttctcaaggtgctaggattacaggtatgagccacctcacctagcctaattttttatttttattttaggcatggggtctcactgtgttgcccaggcaggtctggaacttctcacctcaagcgatcctcttgcctcagcctctcagatgttgggattacaggcataagccactgtgcccagccctgatacattattgttgaatgagtgagtgaaagtttcctatcaaaacgggtagaacaagatgtagtgtctggaaaacttaggtgtgggctaatcttagcccctgaaaaacagatgcttgggatcccccatggatctctgtcacccaggctgaagtgtggtagtgtgatcacagctcactgcaaccttgaactctggggctcaaacaaccagtactcccacctcaggcttctgagtgactgggactacaggctcacgccaccactcctggctagttttttatttgtttatttatttttttttggtagagacgggatcttgctatgttgcccaggctggtctccaactcctgggctcaagcgatcctcccacctcagcctcccaaagttttgggattataggtgtcagcccccaagcccagctgttttttatttattttattttatttcagtcggagtctccttcttataaccca

SEQ ID NO: 671317 - DNA, 973 bp, Homo sapiens
gcgtctctgtatctacatagagagacactctacataatatatatattttttatatatatatacaatagttttgttttgttttagagacaaggactcactctgtcacccaggcgggagttcagtggtgcaatggtagctcactgtagtcttgaactcctgggctcaagtgatcctcccacctcagcctcctgaacagctgggcctgcaggcacgcaccaccaccccggctaatttgtttttatttttacagagacaaggtcttgctatgttgcccagggtagtcttgaackcctgagctcaagagtccccttgccttggcttctcaaggtgctaggattacaggtatgagccacctcacctagcctaattttttatttttattttaggcatggggtctcactgtgttgcccaggcaggtctggaacttctcacctcaagcgatcctcttgcctcagcctctcagatgttgggattacaggcataagccactgtgcccagccctgatacattattgttgaatgagtgagtgaaagtttcctatcaaaacgggtagaacaagatgtagtgtctggaaaacttaggtgtgggctaatcttagcccctgaaaaacagatgcttgggatcccccatggatctctgtcacccaggctgaagtgtggtagtgtgatcacagctcactgcaaccttgaactctggggctcaaacaaccagtactcccacctcaggcttctgagtgactgggactacaggctcacgccaccactcctggctagttttttatttgtttatttatttttttttggtagagacgggatcttgctatgttgcccaggctggtctccaactcctgggctcaagcgatcctcccacctcagcctcccaaagttttgggattataggtgtcagcccccaagcccagctgttttttatttattttattttatttcagtcggagtctccttcttataaccca

SEQ ID NO: 671318 - DNA, 973 bp, Homo sapiens
gcgtctctgtatctacatagagagacactctacataatatatatattttttatatatatatacaatagttttgttttgttttagagacaaggactcactctgtcacccaggcgggagttcagtggtgcaatggtagctcactgtagtcttgaactcctgggctcaagtgatcctcccacctcagcctcctgaacagctgggcctgcaggcacgcaccaccaccccggctaatttgtttttatttttacagagacaaggtcttgctatgttgcccagggtagtcttgaactcctgagctcaagagtccccttgccttggcttctcaaggtgctaggattacaggtatgagccacctcacctagcctaattttttatttttattttaggcatggggtctcactgtgttgcccaggcaggtctggaacttctcacctcaagcgatcctcttgcctcagcctctcagatgttgggattacaggcataagccactgtgcccagccctgatacattattgttgaatgagtgagtgaaagtttcctatcaaaacgggtagaacaagatgtagtgtctggaaaacttaggtgtgggctaatcttagcccctgaaaaacagatgcttgggatcccccayggatctctgtcacccaggctgaagtgtggtagtgtgatcacagctcactgcaaccttgaactctggggctcaaacaaccagtactcccacctcaggcttctgagtgactgggactacaggctcacgccaccactcctggctagttttttatttgtttatttatttttttttggtagagacgggatcttgctatgttgcccaggctggtctccaactcctgggctcaagcgatcctcccacctcagcctcccaaagttttgggattataggtgtcagcccccaagcccagctgttttttatttattttattttatttcagtcggagtctccttcttataaccca

SEQ ID NO: 671319 - DNA, 1399 bp, Homo sapiens
cacgaaagaagtcactaccagacaagataggatattagcacatggtccagataaagtaaaatatattatgaatgttgtagagatcagagaagaggatgaccttctcgggatggaaagatcagggaggacagttcacagagggatgggcttaaacaaaaaccagataccccacacatgtgctttatggcctctgctacccccaggaagccaggggtagttgcacacatgttgtagaaatgagcaccagctgtcttcattccaagaaatctgtgttgaacattcacggggtaccaggcatcattctaggtgcttaggatatctcagtgaataaaacataaaagatgaaaaaaaaaatccctgtcctcatggagcttacattctagcaggaaggaaaaggcaataaataagaaacaaaataaacaaggaaagtacatagtattagagggtgataagtacaatggagaaaaatgaagtaggatgcagagtaaggggattatggtttgaatagaagcagggaggccaggtgcagtggctcacgcctgcaatcccagctctttgggaggtcgaggcaagtggatcgcttgagcccaggagttccagcccagcctgggcaacacagtgaagcctcatctctacaaaaaaatacaaaaattagccagatgtggtggcacatacctgtagtcccagctactcaggaggctgaagcgggaggattgattgaggttgatcagtcaacctcaaggttgaggctggagtgagccatgatcatggcactgaactcagcctgggtgacagaacgagacctcgtctcaattttttttttaaataaaaaagcagtgtatacattgccattttaaattcagtggtcaagattgggcttattgagaatgttttagaccagtttcatgcttgtatgaagggaaatgagggagggaggagtctttagaacaatattggaagccttccaggttattatacatgctcaagttygaaagccacagccccagagaatgctgggagcagcattcatcaggagcctggtgcctggacaacctcatggaatagacacttataaaacctggaatctgatttctggagagagagagagagagagagacagagacagagagagacagagagagagagaagctcctctcttaatttacaaccgaacctgaatcctaatacaggtgaggtgggggagaggaatgatgagaaacttaaccttaaaatagcaacaatcaggagaggaaagatataacatccaagtattgtcgataatacaagatgcaagaaataaaatcaagtaaaaaacaaactatgttgggttatctctggatgtatgaagtgaatatagtaaattaaccttctaattttttacccctttgtttttagtgtg

SEQ ID NO: 671320 - DNA, 803 bp, Homo sapiens
  misc_feature 5, 6, 7, 8, 9, 10, 11, 12, 13, 14, 15, 16, 17, 18, 19, 20,21, 22, 23, 24, 25, 26, 27, 28, 29, 30, 31, 32, 33, 34,35, 36, 37, 38, 39, 40, 41, 42, 43, 44, 45, 46, 47, 48,49, 50, 51, 52, 53, 54, 55, 56, 57, 58, 59, 60, 61, 62,63: n = A,T,C or G
  misc_feature 64, 65, 66, 67, 68, 69, 70, 71, 72, 73, 74, 75, 76, 77, 78,79, 80, 81, 82, 83, 84, 85, 86, 87, 88, 89, 90, 91, 92,93, 94, 95, 96, 97, 98, 99, 100, 101, 102, 103, 104: n = A,T,C or G
tgttnnnnnnnnnnnnnnnnnnnnnnnnnnnnnnnnnnnnnnnnnnnnnnnnnnnnnnnnnnnnnnnnnnnnnnnnnnnnnnnnnnnnnnnnnnnnnnnnnnnnttcccccttcttcgaaggtacgtgaaattgaataattattatagagaagaaatccaaaatcttgacatcttggctatttggtgccaatggataaagtaaggcttccagctgggcacagtggctcatgcctgtaatcccagcattttgggaggccaaggtgggaggcttgtttgagccctggagttcaagactaacttgggcaacatagcgagaccccatctctacaaataataaaaataattagccaggtgcagaggcacgcacctgtagtcccagctactcaggaggcygaggtgggaggatcccttgagctctggaggtcaagggtgtggtgagagatgattgtaccactgcactcccgcctgggtgacagagtgagaccctgtttcaaataaatgaatggatgaatgaatgaatgagagagagagagagagagaaagacttcaaagaaacacacctgtcgttttagtaaagtggaagaaagtcatacttctgtttggcatgctaattagtatacttgagaccaactctgtgcttaaaatcttagtctaaggaatcaaaaattttcttccagttttgcctgggtttgtctcttgctacatgaaatagtcttccaaaggctttaaagttctaaactaaaagtgaaattaatatagcttttgtgatatacagatttatttaaaattttttagtgccttc

SEQ ID NO: 671321 - DNA, 2567 bp, Homo sapiens
tcccttgcagttcttcttttttggcatggagaattaattatctgcaaacttcttccttcgccagagcagctctttcacaaaataaggcttacctaaattctattttttttygagacggagtttcactcttgttgcccagtctggagcacaatggtgcgatctcagctcactgcaaccaccgcctcacaggttcaagcgattctcctaccccagcctcccaagtacctgggattacaggtgtgcaccactacacctggctaatttttgtgtttttggtagagatggggttttgccatgttggccaggctggtctcaaactcctgacctcaggtgattcacccacctcaacatcccaaagtgctgggattacaggtgtgagcgactgtgcccagcctaaattcttaagccttctaccaaatataagagaaaatccaggagctggagtgggattgggtgacctgtggatccagttgcatatttaccccgctccatctgtggttcaaatgctcaccaggctacagcagagaagctggacttatgcatgctggtagtaggtatcagtaatatgaaatcaggatccagttttatttttatttttatttatttattttttgagatggagtctcgctgtgtcacccaggctcgagtgcagtggcacgatcttggctcactgcaagctccacctcccgggttcacgccattctcctgccttagcctcccgagtagctgggactacaggggatccagttttatttacaaccttacatatccatgaattggctataattacatgtacaatcagcatagccaaggacaaagtactatgatagttagctcttctcttccttttctttatctgtctgttctcttatcttcttccttggctattcaccaggttggtggaagaggaggttccccagcactggccactgactgtgtgctgtactacttttttttttttttgagatggagtctcactttgttgcccaggctggagtgcagtggcacgatcttggctcactgcaacctctgcctcccgggttccagcgattctcctgcctcagcctcctgagtagctgggactacaggcgtgtgccaccacacccagctaatttttgtatttttttagtacagatggggtttcaccgtgttgtccaggctggtctcgaactcctgacctcatgatccgcctgcctcagccttccaaagtgctgggattacaggcttgagccaccgcgcttggcctgtgtgtcctactttctacttgtccttagcatcactcaggcacactgtttccccactaccctactttacccaactgctacgcacctgtccacatacatgctgtatagattgtttcctggatgatcctttgacctcttactaataacaacccttacatagcaagggtgctatgcagatggttcattaatcaatttattctcattccatctccctcctccccatctccttatgctctgttctctccgtagattaaaatataaaacaaagaggcagcatgttcctaattggattgttttccagatttacagagtctctgggaatattctgaattcgtactcccagtattgtttttatcaggattctaagaagtggcaaagttaagtcagcatctcaaggtggagaagtctgcagaatgtttggtggaaaagccatgagctagggttgaaagagctgtcacctagcatggctgttaacccaggcaagtgacttagccatgctcacccttaatttctggtcagcaaaacaagagaactgggatctttaaggcctcttctagcatcaactgtgtgggtttctgttctttggttactcatctacaaaacatagtcatcaagttttactgtttctgaaactgatgttctttgttagctccttcttgacgtaagtttaaatctgtaactagtatctgctgattttaaaatgtacctttattgtttttattacaaaaaatattatactttctactgatacatttctcattagttattaccaatgactcctctttctcttccttattctatcctgtctcatctcattctttatagttaagtgttaatggttggtagctagtatctcagacttttctaggcttgaaatatatgcatatgtaaacataaaattcctttgactataaagggattatattatacatatggttctgaagcttgtgtttttattaattagcagatgatagagacaaacattaggaaacaatattcagtgaaacatcagtctctcttatacccttaatcctcagttgtccttccttagaggcaatgtttatatatcagaaattttctgtgtgtatatacacacatatatagttaggatttttttttaacaaagtgggagcacactactcactgtttagctccttgctgctgctgtttttttcccctcctttggtttaatgttatattttgtagattattccatgtcaaataattcatgtaaacacttagtaagtgctcaaaaatgttaattatcattatcagccccctaaacagctttcctattctttttttaaggctgcaaaacattcc

SEQ ID NO: 671322 - DNA, 983 bp, Homo sapiens
ttattttccaaattatatcccatttaatcccagtaatcctgtaaggttggtattattattgccattttataaatgaagaaatgaggctcagaactttatctacagtcatacagaggcagagatgctcttttcactcatgactctcattccctgaaatacagagtatttttcccaggccaagtcaccatgagaagaggccatagctcagtctcaccagaatgcaatcttcatccacactttggtatgaagaggaaagcaatcaattccacaagctctggagaacatgactgtgtctcaggcacagcactgggtgctgggatcagaagtgaatagcatggtccctctctcctcaaggcactttctgcctagtcgaggagcagacacatgataaacaccaacaccagtccagaggccattccgataggaagaaggaggttggggaaggtgacccacaggctgcttggatgtkggaggttgagaaggaatctcaaaggtcaggttgagagtagaattccaagcagaagtaacagcctgaacaatatttggagttatgaaagcccagtatttgtctggagttagtgaaatagtttggtgtaagagggaaaggtatgtctagaatgcctggttggaatccaatactgaagagcctttcctgctgtgttaggtaatttgagtttcatttagtaagcaatgcaacactaccaaataaatatgtgctttataacttgggtttcacagcaaagtttaaaaaatttttttaattgtggtaaaatatatgtaacataaaattaatcatcttagccatttttaaatgtacaattcagtggtattaagaaactcctttcccaaaggagttcaataatctgttggaaaagtacattcatattgtacaaccatcaccaccatccatgtccagaacttttcctcatcccaaactgggcgtctgtacgcactaaacactaactccctcttcctttctttcc

SEQ ID NO: 671323 - DNA, 983 bp, Homo sapiens
ttattttccaaattatatcccatttaatcccagtaatcctgtaaggttggtattattattgccattttataaatgaagaaatgaggctcagaactttatctacagtcatacagaggcagagatgctcttttcactcatgactctcattccctgaaatacagagtatttttcccaggccaagtcaccatgagaagaggccatagctcagtctcaccagaatgcaatcttcatccacactttggtatgaagaggaaagcaatcaattccacaagctctggagaacatgactgtgtctcaggcacagcactgggtgctgggatcagaagtgaatagcatggtccctctctcctcaaggcactttctgcctagtcgaggagcagacacatgataaacaccaacaccagtccagaggccattccgataggaagaaggaggttggggaaggtgacccacaggctgcttggatgttggaggttgagaaggaatctcaaaggtcaggttgagagtagaattccaagcagaagtaacagcctgaacaatatttggagttatgaaagcccagtatttgtctggagttagtgaaatagtttggtgtaagagggaaaggtatgtctagaatgcctggttggaatccaatactgaagagcctttcctgctgtgttaggtaatttgagtttcatttagtaagcaatgcaacactaccaaataaatatgtgctttataacttgggtttcacagcaaagtttaaaaaatttttttaattgtggtaaaatatatgtaacataaaattaatcatcttagccatttttaaatgtacaattcagtggtattaagaaactcctttcccaaaggagttcaataatcygttggaaaagtacattcatattgtacaaccatcaccaccatccatgtccagaacttttcctcatcccaaactgggcgtctgtacgcactaaacactaactccctcttcctttctttcc

SEQ ID NO: 671324 - DNA, 1193 bp, Homo sapiens
tgcctcctggaagctggagtacaatctcatgcttctgtctgggactgtgaatcaggagtaatggagaatgaggatgttttctaactaactccagtggggagtacatgaggctgcttagtgacagtgacagcaacagcagtgtcataaccaggtatggccttgattgctgtcattctgacgacctagcctctcttagtttctgtttcttttccaagtctatttctcaagcttgcccattaaaaaaaatttaaaaagaggtatgacatataaagggcacaaatcttaagtatgcaacctgatatgtaaacacctatgaaaccaccacctagaccaaaatataaaagactttcagcaccctcaaagtcttccctttgatacactattttctcaacaaattcaatttctgcctgagttagcaagtccatttcaggctgaggcagaatgcaatcaagaaatctgacttgtggcacttcagtgtttatcacatatgacccttttgcattcagagtgaaaattggtcaggaaaaacagcaaaagagcatttttgtaccaaagtcctcaagtgagtaagcctcaaattaagacttgttattattaatcataatacaactttatcataccaaagtacctaaaaattgatatatttaatttataaaatcttaaccatcaaactcaatctgtggtctggaaactaaattcttttcagggaccctaccagtactcaaccttgtttctttagggtccctaacatgtaaagctacataatctraaattttccagacagttatttatttttcattttttattttttgagacggagtctcgctctgtcgcccaggctggagtgcagtggcgcaatctcggctcactgcaacctctgccgcccgggttcacgccattctcctgcctcagtctcccgagtagctgggactacaggcgcccgccatcacacctggctaattttttgtatttttagtagagacggggtccagacagttattatgtgggactttaaatatatatgaagtcttgctgggcgcggtcgtcacgcctgtaatcccagcacttagggggcccaaggctggcagatcacgaggtcaggagatcgagaccatcctggctaacacagtgaaacccccgtctctactaaaaaacaaaaaaccaaacaaacaaagaaacaaaaaaaaaacaca

SEQ ID NO: 671325 - DNA, 1193 bp, Homo sapiens
tgcctcctggaagctggagtacaatctcatgcttctgtctgggactgtgaatcaggagtaatggagaatgaggatgttttctaactaactccagtggggagtacatgaggctgcttagtgacagtgacagcaacagcagtgtcataaccaggtatggccttgattgctgtcattctgacgacctagcctctcttagtttctgtttcttttccaagtctatttctcaagcttgcccattaaaaaaaatttaaaaagaggtatgacatataaagggcacaaatcttaagtatgcaacctgatatgtaaacacctatgaaaccaccacctagaccaaaatataaaagactttcagcaccctcaaagtcttccctttgatacactattttctcaacaaattcaatttctgcctgagttagcaagtccatttcaggctgaggcagaatgcaatcaagaaatctgacttgtggcacttcagtgtttatcacatatgacccttttgcattcagagtgaaaattggtcaggaaaaacagcaaaagagcatttttgtaccaaagtcctcaagtgagtaagcctcaaattaagacttgttattattaatcataatacaactttatcataccaaagtacctaaaaattgatatatttaatttataaaatcttaaccatcaaactcaatctgtggtctggaaactaaattcttttcagggaccctaccagtactcaaccttgtttctttagggtccctaacatgtaaagctacataatctaraattttccagacagttatttatttttcattttttattttttgagacggagtctcgctctgtcgcccaggctggagtgcagtggcgcaatctcggctcactgcaacctctgccgcccgggttcacgccattctcctgcctcagtctcccgagtagctgggactacaggcgcccgccatcacacctggctaattttttgtatttttagtagagacggggtccagacagttattatgtgggactttaaatatatatgaagtcttgctgggcgcggtcgtcacgcctgtaatcccagcacttagggggcccaaggctggcagatcacgaggtcaggagatcgagaccatcctggctaacacagtgaaacccccgtctctactaaaaaacaaaaaaccaaacaaacaaagaaacaaaaaaaaaacaca

SEQ ID NO: 671326 - DNA, 590 bp, Homo sapiens
tgtgtgaaatggtcttttcattagatttcacttagagcggtctatttaatgttttatcatttgccaacatacataacagatattcaacatttatccacatttcaacacatgtcattgttgggagggaaaaactggcattttaatatgcacattgagcacagaaacatttataagatggttattggatacagaaacgtttttttatgtgcaccttagtgactgcaatatatttaaggttgctaaatgttgacacagttgcctatgttacatgaacaagccrgagaaagtaggcatgagagaccacttttattagtatgaaaagaaggcaattgcactgtaagaaatcgcctgaattcacttggttccctttactttggagtggttcatagcaagggcatattttaaatctggaaattttatacttactttaaggggctggggtgaagagaataaaatgacaattgttagaaaaagattgaaaaatatcttttaaactagtagaattttttacataggaaatatttcagaataattttacatagttccatcaagtcattgattaagtgctcacaatttaaaaatctgaaata

SEQ ID NO: 671327 - DNA, 599 bp, Homo sapiens
atatattattctcttttccttagacttgttctagtaaggaaaatttaaatttttttttcagttttgtaattttacaacataaataaatactgttataagtatttatgtgaattactcttattatgttcagtaatatgctgtgagattctttgtggctagttaatttagtcattttgaattcaccagagcctatcggtttatagtactttttcctgtattttcyatcttatctctcagtattttattttgggtatcttccagttttactaattttctgttcagctgtgattgaactactagtagactcatccaccaagtacttaattttaggtattgtactttaattttctaatttcatttgattcatcttgatagtttccaattctccaccagaattatccatcttatcatttaactcttttagtatataaattgtagtcatttaagaatctgtgttcgagtatgccagtatctggatctctttcttgtattgctttattttcttttagtttttgctcaagactagctttttatttgtctaaccattttttaaaaagtatgaaacattataacaaaaaatatgaaataacatgatatcc

SEQ ID NO: 671328 - DNA, 575 bp, Homo sapiens
ctggagtgcagtggtgcaatcttggctcattgcaacctccgcctccagggtacaagcaattctcctgcctcagccctccaagtagctgggataacaggtatgcaccaccacaccctgctaatttttgtatttttgtagagacggggctttgccatgttggcgaggcgggtctcgaactcctgacctcaggtgatccacccgccttggcctcccaaagtgctgggattacaagcgtgagccaccgtgcccagccaamaactctccttttaaaagcaagctcaattttacatacacatatcactgaaatatttactaaatgagtttaatttttttaacctgctactgttcttttcaggaagaagagcataaatgaaattggggagtcagggaagaaccaagaacatggtatatgtgctaggagcagccctgggcaaaattgtgaaatagttggattttagcattttcaaacttgaaagaatttcagagatcctctaatttctgtatcattcttgtacagaaacaaatagattagggaaataagtaatttgcccaaggtagaaatcaaaattaactct

SEQ ID NO: 671329 - DNA, 165 bp, Homo sapiens
aacaatattgtactctacaagtagaaattsttgggagggtgaattttaggttatgtggttttttgccctaattttctaaaataaaaagcaagttgcagaatcatatgtacagtaaaaagtcaaaggattttaaaacacaaaacaatgtcacatagagtttattta

SEQ ID NO: 671330 - DNA, 656 bp, Homo sapiens
ttcccggatgaggcgatgcctcgccctgcttcggctcatgctccgtgtgctgcacccactgtcctgcacccactgtccgacactccccagtgagatgaacccagtacctcagttggaaatgcagaaatcacctgtcttctgcatcgctcaygctggaagctgtagactggggctgttcctatttggccatcttggctccacctctaaaagttctttttacatttataagttctgtgcctctgggaccccattttgtttgaaaagacgtgttcatactttacattatcatccatttagcaggcaaatgaaaagcagtggaaacatgattgaaagtgatgttattgtttaactgaaatcatggtaaagagagtaatgagaaggttgacagtctttgaaggttaagaaggaataggtcacagttaaagtcttatccctccctctcagaccctgaaacacagagaattactgcatttactcacagagtggtcatcactatccattgtaacatctagttatctgcttcgaagggggaagacagagaagtaggttcagtagggcaaagataaagcagtttgtctccgaatgcttttctcagtgaattaagaaaaggtataattatctgagagtgaggaggtgacaaggatgatgattgagga

SEQ ID NO: 671331 - DNA, 1529 bp, Homo sapiens
agataattttacttcttttcttctcttaattcctttttttccttcttcttacctgtccaggatctccagtacaatactgaatagaagtgatgagagatccttgtattgttttttatcttggcaggggggaaagcattcagtctttattcatgaactatgattttaactgtgatttttcatatatgccttctatcaggttgagaaagttcctttgtggtcttagtttgtgcttttattttgaaagggtgttggattttgtcaaatattttttctgcatctattgacatgaccatatggtttttcttctttagtccattaatatagcgtacaattcagatagacttttagatgttataccaattttgcattcctygaataaatcctaattggttatggtatttgatcatttttatatgttgctgtatttgattttctaatattctgttgaggatttttgcatctatattcgtaaggaatattggtctgtacttttcttgtgatatctttatctggttttggtatcaggttactgctgccacatagaattagttgtaacttatgtccctgagttgcatagtcctctaatatttactaggttgtgttccatagcctttattctgtttatggccccatgctggtcctcattagccctccactgaaagccaggcattccagaagagtgtatcacaagataggactgtggtttctagccctggaagaaccattccaaaactcttgtcttacctggtgatggaaagagcagtaggatcctgtataaggaggcttgcactaatgtttaaagcgacatcatagaaaagaacaggagtttggaagatgcctccaaagtggaaactgctcactctatcagtcagtcctgcacccacaaaatgagtcttttttttttggaacggagtctcactctgttgcccaggctggagtgcagtggtgcaatctcagctcactgcaagctcctcctcccaggttcacgccattctcctgcctcagcctcccaagtagctgggactacaggtgtccgccaccatgcccagctaaatttttcggttttttgggggttttttttggtttttgtttagtagagttggggtttcaccatgttagccaggatggtctcgatctcctgacatcgtgatctacccgccttggcctcccaacacaagatgagtcttatctctccctttcaatgttcattgacctggtctgtgctgggccagaagtggtcagagagatccatcgtcaagaattttgagagttcattgagtcttacctgcactcttgtagcctaatagcattgaggctgctttctacctttagggtatatgtcttacacattggtagtgcctagtgtcagaggccaggagcctcacttctcagagatgtgcttaaactttccttggagcattggcacaccgtctgaattagatattttaaagtaatcataatttgcattgagtattgttaattctaataatgagtaggccagaatttaaatgaggacagaatacatagca

SEQ ID NO: 671332 - DNA, 1529 bp, Homo sapiens
agataattttacttcttttcttctcttaattcctttttttccttcttcttacctgtccaggatctccagtacaatactgaatagaagtgatgagagatccttgtattgttttttatcttggcaggggggaaagcattcagtctttattcatgaactatgattttaactgtgatttttcatatatgccttctatcaggttgagaaagttcctttgtggtcttagtttgtgcttttattttgaaagggtgttggattttgtcaaatattttttctgcatctattgacatgaccatatggtttttcttctttagtccattaatatagcgtacaattcagatagacttttagatgttataccaattttgcattccttgaataaatcctaattggttatggtatttgatcatttttatatgttgctgtatttgattttctaatattctgttgaggatttttgcatctatattcrtaaggaatattggtctgtacttttcttgtgatatctttatctggttttggtatcaggttactgctgccacatagaattagttgtaacttatgtccctgagttgcatagtcctctaatatttactaggttgtgttccatagcctttattctgtttatggccccatgctggtcctcattagccctccactgaaagccaggcattccagaagagtgtatcacaagataggactgtggtttctagccctggaagaaccattccaaaactcttgtcttacctggtgatggaaagagcagtaggatcctgtataaggaggcttgcactaatgtttaaagcgacatcatagaaaagaacaggagtttggaagatgcctccaaagtggaaactgctcactctatcagtcagtcctgcacccacaaaatgagtcttttttttttggaacggagtctcactctgttgcccaggctggagtgcagtggtgcaatctcagctcactgcaagctcctcctcccaggttcacgccattctcctgcctcagcctcccaagtagctgggactacaggtgtccgccaccatgcccagctaaatttttcggttttttgggggttttttttggtttttgtttagtagagttggggtttcaccatgttagccaggatggtctcgatctcctgacatcgtgatctacccgccttggcctcccaacacaagatgagtcttatctctccctttcaatgttcattgacctggtctgtgctgggccagaagtggtcagagagatccatcgtcaagaattttgagagttcattgagtcttacctgcactcttgtagcctaatagcattgaggctgctttctacctttagggtatatgtcttacacattggtagtgcctagtgtcagaggccaggagcctcacttctcagagatgtgcttaaactttccttggagcattggcacaccgtctgaattagatattttaaagtaatcataatttgcattgagtattgttaattctaataatgagtaggccagaatttaaatgaggacagaatacatagca

SEQ ID NO: 671333 - DNA, 1529 bp, Homo sapiens
agataattttacttcttttcttctcttaattcctttttttccttcttcttacctgtccaggatctccagtacaatactgaatagaagtgatgagagatccttgtattgttttttatcttggcaggggggaaagcattcagtctttattcatgaactatgattttaactgtgatttttcatatatgccttctatcaggttgagaaagttcctttgtggtcttagtttgtgcttttattttgaaagggtgttggattttgtcaaatattttttctgcatctattgacatgaccatatggtttttcttctttagtccattaatatagcgtacaattcagatagacttttagatgttataccaattttgcattccttgaataaatcctaattggttatggtatttgatcatttttatatgttgctgtatttgattttctaatattctgttgaggatttttgcatctatattcgtaaggaatattggtctgtacttttcttgtgatatctttatctggttttggtatcaggttactgctgccmcatagaattagttgtaacttatgtccctgagttgcatagtcctctaatatttactaggttgtgttccatagcctttattctgtttatggccccatgctggtcctcattagccctccactgaaagccaggcattccagaagagtgtatcacaagataggactgtggtttctagccctggaagaaccattccaaaactcttgtcttacctggtgatggaaagagcagtaggatcctgtataaggaggcttgcactaatgtttaaagcgacatcatagaaaagaacaggagtttggaagatgcctccaaagtggaaactgctcactctatcagtcagtcctgcacccacaaaatgagtcttttttttttggaacggagtctcactctgttgcccaggctggagtgcagtggtgcaatctcagctcactgcaagctcctcctcccaggttcacgccattctcctgcctcagcctcccaagtagctgggactacaggtgtccgccaccatgcccagctaaatttttcggttttttgggggttttttttggtttttgtttagtagagttggggtttcaccatgttagccaggatggtctcgatctcctgacatcgtgatctacccgccttggcctcccaacacaagatgagtcttatctctccctttcaatgttcattgacctggtctgtgctgggccagaagtggtcagagagatccatcgtcaagaattttgagagttcattgagtcttacctgcactcttgtagcctaatagcattgaggctgctttctacctttagggtatatgtcttacacattggtagtgcctagtgtcagaggccaggagcctcacttctcagagatgtgcttaaactttccttggagcattggcacaccgtctgaattagatattttaaagtaatcataatttgcattgagtattgttaattctaataatgagtaggccagaatttaaatgaggacagaatacatagca

SEQ ID NO: 671334 - DNA, 1290 bp, Homo sapiens
atgccacatttgcatgataatttttcctttttagcatggagcagaaagtgactagcttaatgagggattattgaagacaggaatgaacaaaatgcattcataactaagaacaaagattgtattatgaaacaaaaacaggcaacctcagagaagtaactgggtgattggtttatgcattatgaataaaaaggtagaaaaatatttatattagtattcactaatgactatatatacaagattgttgtaattaaaattataaattaacatattaagagtgcttgtttaatcactctggctcctattcacaaggaaaagacttatgtacccgaatgcaaaacaatgtgtgttttcaacccagcagcaaacagcctatacattttactttgcattcagaaagaaaatttaatgcacaccaattacttgttttatgcgagatgggcacttctaagcttgtagtatggaggtcaatttatgacaggcaagggaaatatcacattgtcccttcaggaatggatctccaaaagtaatttctcataagaagggtttaaactaaactcaatttgcaatgggtggaaatgcacaaatttctcrgattaaaaggagaatcttaaagaaaagtgtaacaaggattttaagagggcccagttcatcaactcattaccttcatacacccagaagcaactccaaagccattaataacactgcttgaagattttgcaatggagagagatgcagctgctcctgagagaacacctctctcaaatcagttctcagactttgtcacaggcattgaaactaaagaagcagcagtgcaatactctggatgaaatgtacccattctaatcatatatttaattgaaaaaatgtttaaaacaagagagagccaattataattctcaagctttttaatgaaacagcaagataaatcttcacaagtatctttctgatttttgagaccgagatttaagggggcaacatatcttttcatgattcaaatgcttccaaaaggctaattactacttctaatttgtggtgctctttttcaaaatttttgaatggtcactcgtttccattgatgtctgataatgagctcatatgagctattagacataagagttaaatttcccacaaatccattggagttcattggaataatatatactctccaaattgcaatgttaatagtagaaaaaacagagcaggatgaacagtaaagttgcaagtcaacttttattactctcctatagcaaaattgttgaccattctaaagaactggctttattataggtc

SEQ ID NO: 671335 - DNA, 1283 bp, Homo sapiens
ggcatccacgtcacgggtttagtgtggcgctcccctacttttcagtgataattaacccttgctgacactgagggggctcagctttgtcctccacccggttgaagagcacggacacccagaacaggactgtgaccttttgtagatttctctgattctcgaaaatccgatcacccccagccgccacatcttagcctctctgattctcaaaccatcgcaagcctggcagcacttggggaggcttaggctcggggagcttggtttccccacgcaggtgtggcagagccgcctccctctgcgtccgtgagggttctgaggagtctgtgctttctgagcaaactcagagtagaggcaccacccctgggggcagccctgcctctgtcctgctccgccccctccaccgcccaggcagccaggcagagctcctgccaggaccagaggccaccctacaccgacagggaaggcctggggagtgtgtcgtcctcctccatgctccctctcctgtctgagttacccaccccgtctggggcacttgggagcgggccatgtccagcacaccgcagcctccgtcctgttgcccttggtgtctcaggggccatctgcatcaccacgggtgccgtcctgggcactggggtgatgaccctgagggatgccagtgtgggcgggtgcgtgtgggcgtccaaggtcgtccgtgtgtgcacgccgtcgcctgccctcccggccctgtgtgggtgcgtgtgggcttcccaagagtcgtccgtgtgtgcacgccgtcgcctgccctcccggccctgtgtgggtgcgtgtgggcttcccaaggtcgtccgtgtgtgcacgccgtcgcctgccctcccggccctgtgtgggtgcgtgtgggcttcccacaggtcgtccgtgtgtgcacgccgtcgcctgccctcccggccctgtgtgggtgcgtgtgggcttcccacaggccgtccgtgtgtgcaygccgtcgcctgccctctcggccctgtgtgggtgcgtgtgggcttcccacaggccgtccacatgtacacaccctcaccgtgcctctcggccctgtctcttgcagtcttcccgaggctgctgtccatgacactgagtccagatcttcacatgaggcatgggtcgattctcgcctgcgcagaagttgcttacgccttgtacaaacttgcagcccaagagaacaggtaggaagagtgggtctcgaggagacacagggctctgtccctgatcccctcaccatgtaatcacagtgctctccagttcgagactctctcatc

SEQ ID NO: 671336 - DNA, 1499 bp, Homo sapiens
tgatgagggtggccagctccagccaggtcctagggaaagctctccgagagcgacggcttaagcagttctgaaaaattgcaaatgatctgtgttcttggagaaagaatgggagagaagcactcactcacaataatgttgcacctactgtgtgcgggtagggtgcaggcagtgtggtccagtgtgagcggggagggtgcgcgttgaggggttagtgctcgggacgcagcctttggacccagtgccctcccaaaactctgctcatcagtgcccctgagctcagcattgacccctggaggaactgggcgccttccctggtctcagactgtaagcctcctcgggaagcagcagttggctcctgatgcagctggcctcagatcctgttgggagagcaggattggtgaggaacctggagaggagtaggaggtgctgcctgatagcagaggtgggtgatgggggcagagagggtagcaggggcccagttcagtcctgtctggttttcacgtggagctttttatagagttgtgcttctcaagcctttcaaatgcctcacagcggcagtccgacgtgcagtcagtgacagctgagtagattaccaccctcaggactaaatgcaaaatcatcttcactgggtgcagcatttacagttttggtgctggaacctcctaaccagtgttcttaggggctgtcttaccagtgaagggagctgcctgctgttgacgctccacaggaggtttgcggcatggctgccatctgtgttgtggcctgggactttcttagagagtgggtaaaagatgagtcatctcttgtgtgatttatcagcttcacttgtgcttccagggctctttgaagcgtctcactttttaatttcatgaagaaacaaatgtagtgcagagaacagaaagctgctgtgtgacctgcgggtgcccagcctgtggggcttcctcatcgcccccatccaggcagatcgagtgccggctctctgtgctctccaggaggtggcctttcacagcagggacgttctgtgctcttattttaacaactgtaagaatctgagcttggtgacagttgggtgacccgggctctgtgtcttcrtgttggccagggtgtgtcatacacctggcctggcctgcgtgcctcacgtgtggtggggatttgtgactgtccccagcaccttgacagagggtccttgactctgcgaccctgcacagtgggtggtggcaggtgggatcttggttcacaggcacaggtggggagagttgctgggccagcgtggctgggtgactttcctgtggaaagagcgggcttggggcttggtgcgtgatcccaccgaggccggggttgtgcttggggcactgggggagagcagagcaggtgatgcatatccgggcgcccaccctagcagcacaggaagggctgggatcaccactccccggggcaccgtggggacagcgggggcctgctcactccccggggcaccgtggggacagcgggggcctgct

SEQ ID NO: 671337 - DNA, 1085 bp, Homo sapiens
gtttcgctcacrtttcccactgaagcgggatttgataatccccgcaattcccgagtgcagaatgtctcggggccccgctcgcatgtggcccgggtctccccgcacgcgcccgcacggcgcagagggcacctcacgtcctggggcccgggtctccccgcacgcgcccacacggcgcagagggcacctcacgtcctgttacgtgttttctaggacttagcagctgtcacagggttgccacataaagcaggtcatgacccaaggtgcaggggccacgagtgacaagatgcagagaggccttcaagttccacagctcagccacagaccaaggctctggagaccctccccacagacatgagaagctgggcctggagccctgaaaagtggagggcggaggccgatctagaacctgatggagcccaggtacccacatgcaggcatcagacacaggtcctggaggattgaaccccgaggggacgctgggagctccaaggctgcggccgcaggaagagagtggcgctggccctgtcccaccttcatcagactcaaccatcccacaggccctaagcctcctgggtcatgaggaagacactgggcccctgaccccctaaccaaatatgcccgagagagatagaaagcaatggaagaaaaggcccagctccatacatgctcccaagagacagggaagcaccaggcactcctggagccacctcctgccccagccagcccgacgcctcctcaccgtcgactccgtcaagccgcccagggacacgactagccccagcaggacgtggtagcggtaggtgggcagcccaaggagctgggtgatgcgtgggaaggcctgggaaggtgcactccagttcacggaggccacatcggacctgcaagagagtgagtgagacaaggccgggctgccaatgatctcgccatggctgcggggccagcacggggggcctacaccccgacagtacctgggaaacagcttttccagttctcctcggtggggcacgtgggggatgggagggctgtcaaagtgcaggagcgtcaggaacacgctggcggcgtgagcacggaaacggtcaatcttc

SEQ ID NO: 671338 - DNA, 1085 bp, Homo sapiens
gtttcgctcacgtttcccactgaagcgggatttgataatccccgcaattcccgagtgcagaatgtctcggggccccgctcgcatgtggcccgggtctccccgcacgcgcccgcacggcgcagagggcacctcacgtcctggggcccgggtctccccgcacgcgcccacacggcgcagagggcacctcacgtcctgttacgtgttttctaggacttagcagctgtcacagggttgccacataaagcaggtcatgacccaaggtgcaggggccacgagtgacaagatgcagagaggccttcaagttccacagctcagccacagaccaaggctctggagaccctccccacagacatgagaagctgggcctggagccctgaaaagtggagggcggaggccgatctagaacctgatggagcccaggtacccacatgcaggcatcagacacaggtcctggaggattgaaccccgaggggacgctgggagctccaaggctgcggccgcaggaagagagtggcgctggccctgtcccaccttcatcagactcaaccatcccacaggccctaagcctcctgggtcatgaggaagacactgggcccctgaccccctaaccaaatatgcccgagagagatagaaagcaatggaagaaaaggcccagctccatacaygctcccaagagacagggaagcaccaggcactcctggagccacctcctgccccagccagcccgacgcctcctcaccgtcgactccgtcaagccgcccagggacacgactagccccagcaggacgtggtagcggtaggtgggcagcccaaggagctgggtgatgcgtgggaaggcctgggaaggtgcactccagttcacggaggccacatcggacctgcaagagagtgagtgagacaaggccgggctgccaatgatctcgccatggctgcggggccagcacggggggcctacaccccgacagtacctgggaaacagcttttccagttctcctcggtggggcacgtgggggatgggagggctgtcaaagtgcaggagcgtcaggaacacgctggcggcgtgagcacggaaacggtcaatcttc

SEQ ID NO: 671339 - DNA, 1085 bp, Homo sapiens
gtttcgctcacgtttcccactgaagcgggatttgataatccccgcaattcccgagtgcagaatgtctcggggccccgctcgcatgtggcccgggtctccccgcacgcgcccgcacggcgcagagggcacctcacgtcctggggcccgggtctccccgcacgcgcccacacggcgcagagggcacctcacgtcctgttacgtgttttctaggacttagcagctgtcacagggttgccacataaagcaggtcatgacccaaggtgcaggggccacgagtgacaagatgcagagaggccttcaagttccacagctcagccacagaccaaggctctggagaccctccccacagacatgagaagctgggcctggagccctgaaaagtggagggcggaggccgatctagaacctgatggagcccaggtacccacatgcaggcatcagacacaggtcctggaggattgaaccccgaggggacgctgggagctccaaggctgcggccgcaggaagagagtggcgctggccctgtcccaccttcatcagactcaaccatcccacaggccctaagcctcctgggtcatgaggaagacactgggcccctgaccccctaaccaaatatgcccgagagagatagaaagcaatggaagaaaaggcccagctccatacatgctcccaagagacagggaagcaccaggcactcctggagccacctcctgccccagccagcccgacgcctcctcaccgtcgactccgtcaagccgcccagggacacgactagccccagcaggacgtggtagcggtaggtgggcagcccaaggagctgggtgatgcgtgggaaggcctgggaaggtgcactccagttcacggaggccacatcggacctgcaagagagtgagtgagacaaggccgggcygccaatgatctcgccatggctgcggggccagcacggggggcctacaccccgacagtacctgggaaacagcttttccagttctcctcggtggggcacgtgggggatgggagggctgtcaaagtgcaggagcgtcaggaacacgctggcggcgtgagcacggaaacggtcaatcttc

SEQ ID NO: 671340 - DNA, 625 bp, Homo sapiens
aatatgatgatgatgatcgatcctgattccacttatcaagggcacattgggttctggtaccatcatacatcacctgaaggccttgcagctcatcagtgaaggaaccatgactggaacccagtacagcatgactttgggtaatactttttttttttttgagaaggagtctcattttgtcatccaggttggagtgcagtggcacgatctcagctcactgcaacctctgcctccggggttcaagccattctcctgcctcagcctcccaagtagctcagattacaggcatctgccaccacgcctggctaatttttgtatttttagtagagtcggggtttcaccatgttggccggsctggtctcgaactcctgacctcaggtgatctgcctgccttggcctcccaaagtgctaggattacaggcatgagccactgcgcccagccttctgtctcctatttctaaggaaggtcgctgagcacaaatatgggtcttgggtatgggcaggtatataacctggctgctgcatggtgccttgtggcttctcagccaagttctctgagccaggaacttccatatataaaccagttaaacatacccctgggcagggtttttctcacctgggtgcccca

SEQ ID NO: 671341 - DNA, 577 bp, Homo sapiens
cataataaatcttgggcagagaggaaaattgaatggactcaccatacacaaccagagagaccacatggctctgcttctcctttgaaatgggattggtaaggatgacagtgtaatttcctgtgtytctttcactcacttccataatcgtcagtacatgccccgctttaattgtgtgattggactcaaggggtattccatttttatacctatgaaaaaaaattctcaggaattagtatagtcaaaggatttgctctcacacgaaatgatgctttgcatttatttccagtagttaccattttatttctgggggtgggtaaccaaggtacttcgcagggattctgacacgctcccccaccgtggcttccaccagagattccatgccacttccaaaagcaacaaaaggtttttctggaagaaaataaaaaaaaaaaaaggtcaacttactgtaaatggtcatttgatttagtttttcatttcaagtgaaacgtcaaagaccttgagggtctgagtagctgcagttccaagatttcctgtactatctttcagtgggtcacttttcagcttctcccacacctcc

SEQ ID NO: 671342 - DNA, 607 bp, Homo sapiens
taagccacccctcaactctcacttggataactgcaattagcctcccaactgacctccttatttctgcccctatttccctgaagtattctggaraacaaaagtaattctataaaaacataagccagagcacatctctctctgtgtattttgacaagtgcatcttggcaagtgaaataatttaaataaatttaggacacttagtgatttctattttgttcattcagaagaaattttcaagttcttgctagggatgccacgtgacctagaggtcaagagcatagctttgtagtcaggaacttgagttccaatctcagcttcaaagatgagatgagctaataaagtaagtgctcactaaatcatacttgttatagttgttgccacttttatgattacaactctaataaatagcattatctaaggtatttttaaaatttcactgtattgatgcattctcataatataaactccaaaatcctttccaaggcttataagtaggatgccacacaaattaccatgtaaactcagacatttatgtaaatgaaagagaataaacaaaaaattaaggtgattttctcaaggccagttcaatttaattccagttcaatta

SEQ ID NO: 671343 - DNA, 607 bp, Homo sapiens
taagccacccctcaactctcacttggataactgcaattagcctcccaactgacctccttatttctgcccctatttccctgaagtattctggaaaacaaaagtaattctataaaaacataagccagagcacatctctctctgtgtattttgacaagtgcwtcttggcaagtgaaataatttaaataaatttaggacacttagtgatttctattttgttcattcagaagaaattttcaagttcttgctagggatgccacgtgacctagaggtcaagagcatagctttgtagtcaggaacttgagttccaatctcagcttcaaagatgagatgagctaataaagtaagtgctcactaaatcatacttgttatagttgttgccacttttatgattacaactctaataaatagcattatctaaggtatttttaaaatttcactgtattgatgcattctcataatataaactccaaaatcctttccaaggcttataagtaggatgccacacaaattaccatgtaaactcagacatttatgtaaatgaaagagaataaacaaaaaattaaggtgattttctcaaggccagttcaatttaattccagttcaatta

SEQ ID NO: 671344 - DNA, 607 bp, Homo sapiens
taagccacccctcaactctcacttggataactgcaattagcctcccaactgacctccttatttctgcccctatttccctgaagtattctggaaaacaaaagtaattctataaaaacataagccagagcacatctctctctgtgtattttgacaagtgcatcttggcaagtgaaataatttaaataaatttaggacacttagtgatttctattttgttcattcagaagaaattttcaagttcttgctagggatgycacgtgacctagaggtcaagagcatagctttgtagtcaggaacttgagttccaatctcagcttcaaagatgagatgagctaataaagtaagtgctcactaaatcatacttgttatagttgttgccacttttatgattacaactctaataaatagcattatctaaggtatttttaaaatttcactgtattgatgcattctcataatataaactccaaaatcctttccaaggcttataagtaggatgccacacaaattaccatgtaaactcagacatttatgtaaatgaaagagaataaacaaaaaattaaggtgattttctcaaggccagttcaatttaattccagttcaatta

SEQ ID NO: 671345 - DNA, 656 bp, Homo sapiens
cactccccacctgatgatttaaaaaaataaaaaggcaaaagcaaatggtatttttaaaaatgagaatggaattggaacaaacctactgccctgaaagaatttccataaatgcaccattccccatccacaattccagctccacatcatatggacctagggattgtactacccagaaaaccaggaagtcaacttctcttgcatgaatataattttggaagtagagagaatacttttgcccactctagccttcagttcctctgcttctagagccattatgagaccaaaactcctaagaaaaggggccggaagtgaaagcagtgggtggaactggccgtgcatatcatgttytgagacatatgctactaaacaaggagggctgaactgggctcaagactggtcctggtgacagcaccccaagggagtatggccaccattctcaccacacacctcccttaactgtttagtataatctggaattggagccacaccatagatggtagtgtcatttgtggggaaaggaagacatgaggaggaatagactggaggatggcataagtcaaaagttccttggacctgttcagttgaagactctcattagacacctgagttgagatgtcaagggaacagctggatttcagcctcaggagctcagagga

SEQ ID NO: 671346 - DNA, 2203 bp, Homo sapiens
tgacgtctcaagatttaattgtctccacttagatcaggccaaggactttacagggtaaacaagaatgtgtcttggatgctgctctgtactactttgtaaaaattacattttccacttggttatttcaagtatatctgaaacattattgacgtttacatctcgtcactaaaatctgatattagttataatcttttgttcagttgatttacttggattttctggtgagacaatcacataaactgtaaatatttttctcttcctttccaatgtttaaaattgaatttccttttttgtcttattacattaactacaaaacactagcaactgggcgtggtggctcatgcctgtaatcccagcactttgggacgccgaggctggtggatcacctgaggtcagaagttcgagaccagcctgaccaacatggcaaaaccccatctctattaaaaatgcaaaaattagccaggcgtggtggcacatgcctgtaatcccagctacttgggagggtgaggcagaagaatcgcttgaacccgggaggcggaggctgcaatgagccgagattgcaccattgcactccagcctgggcaacaagagcaaaactgtctcaaaaataaataaaaaaacaaatcaacaaacaaataaataaacaaaaaacaaaacaaaacaaaaacactagcaacagctgcaggacacttacatgatgtttagtataagccagtgtgttagctataactcttctaaagtatgttagttacaaatttatttaatcctcatgacagatatctatgagataagtattattatcctaattttagaaataatgaaactgaggcacaaaaaasgttaggcaacatatataagaccacacggccactaaggagttgaccaggacaatgaacctcctctttacactgtcattttggcagagtatttacagagtattgagttgggaagaaaaccccaaggtgttaggccacagaagagaagaaattaaaatgtgaacccttatcttattcctgattctaattggatcagtactatattgttgttgctttaagccataaggaagaaggggatgaacttgagtctccgccaggcatcacagagaacgtgttccaaggtggttcctaccacctggacatctcagagcctgtgtcatccaaggtctagcattcttattgggcgagtgaggcactacccagctgccaaacgtgaagacagtggtgtaaggtgactggacattagcaacacttgtggaccacttccctctaaatggccacatgctccacggctgccatatgggaaactcaccagaaccaggataaaaaagagaagattatttcttttttttgagacggagtctcgttctgtcgcccaggctggagtgcagtggcgcgatctcagctcattgcaacctctgcctcccaggttcgagcaattctcctgcctcagcctcccaagtagttgggactacaggcgcatgccaccacacctggctaattttttgtatttttagtagatatggggtttcaccatgttagccaggctggtcttgatcccctgacctcgtgatccacccaccttggcctcccaaaatgctgggattacaggcgtgagccaccgggcctggccagaagattatttcttaatggttcctgcaagaggtcaaatgcatcaaatgattttccttctaccacctcacaaaagactattcacttactggatgaggaaagcaggctttgggatctcagccaagatcccaaagatcacttactatataactgtgtgtgtgtgtgtgtgtgtgtgtgtgtgtgtgtgtgtgtgtgtgcgcgcgggcgctttggaggagggcagggttgaggtgaagtgaagtgataaatgccaggaattctgtagttcagtttaaatctcttcattctttaagttctatagttgtctgttctttcaatctacatattgggtttttgatcaaataaaagaactgcttggcagggcatggtggctcacgcctataatcttagcactttgagcggccaaggcgggtggatcacttgaagtcaggagttcgagaccagccaggccaacctggtgaaatcccatctccattaaaaatacaaaaattaaccaagcatggtggcaggtgcctgtaatcccagctacttgggaggctgaggcacgagaatctcttgaacctgggagggggagg

SEQ ID NO: 671347 - DNA, 538 bp, Homo sapiens
attaaaggttgcgattccagccagtcagcatcatgcatctctatcccgcaggtgggctgtcagctggctcagacattccagtcacccagcacttgctatccacttcccccacaaaggtccccttgagcagttttctttcccttgtccttacctttatgaaggaagctttgccagttttggtcagctgttttaacttctccgaagctactgttttgctgtatttccctgcttgatctacactgctcttttcaagcagttttctccgcttctccttctcttttattttcatacgcttttgatatttctttttccttcgctctcgtttcttgtctgtagctgttttttcagcagctgtttttatatctccagctttatttttctcctattaaaaaaataaccaccaacatattcattcatcaagtttaacaactaggaaactggaatggaagaaactgcagggtagccagcaagcaggctgtgcatctgtggccaaatgcacaaagatgcagagcaatccccacctgcattccaatragcg

SEQ ID NO: 671348 - DNA, 887 bp, Homo sapiens
gttaaagtgtgttctgtattttcatttgtacttgttttaaattttgtgagtcttctgggagtagacaaagattaaacatgggtagcaggttttctttctttcccttctgtcttctgacgtgtttcctatttctttgttgggtagaattagcgtgtttcctttgtttttaatagttccttaaactttcagtcctactcagccctattttaagctactttgtctttttgtttttcgcttttggtcagtggagggactctatagtttgtcaggatgtgcctctgtacgatgaaaactagagagaaaattctgacaagtagagttttttctttgattagctttctcatgtggagtcaagtcctctgcttgcctcaccaggacaggtggtgaagaaagcttttyagatctttttttcttctaggaaagcttgcacatctggagcacagccctcctttcttattttttgctatgttgttcaaagctttttaagaaaaaaaaacataaacagcaaagaaaaaaattggtttttcataccaagttggcttttattggatgccctcaactgcagagacatatttaaagggcagctggccaccttcttttgaggtcagacagctgactcttaatcatattgacaatttctggctgggaagaaacatctaaaaaacgtattatgaaacataaaagtggaggcagctctttaccttgccacttccccctccagtctctacaggagttcctccaaacaaagctcacgttccaagagtggcaggcccacttcttctatctcattctccttcgcagcctttgaacgacctctctcatcctcccatctctcacagcctcacctctctaggtatttggaaccttacgctttgcagatgaggaaa

SEQ ID NO: 671349 - DNA, 646 bp, Homo sapiens
cacttcccagacggggtggcggccggacagagatgcccctcacatcccagatggggcggctgggcagaggcgctcctcacatcccagatggggcagccaggcagaggcactcctcacatcccagacgatgggcggccgggcagagacactcctcacttcccagacggggtggcagccgggcagaggcactcctcacttcctagacggggtggccgggcagaggggctccccacatcccagacgatgggcggccaggcagagacgctccccacttcccagacggggtgccagccgggcagaggctgtaatcttagcactttgggaggccaagggaggcagcgaacaatttcctaatgaagtactggaaaagacaacctttttctccattactatttggaattgtagatcacatacatcacctgttccaacaccacgagtcgaataaataatgaatctttttataaagagtatccgtcttggagggataktcccgttgtagagatgtttcacttgtgcaaaatatccaacatatctattctgacaaggagtttctactccctgaaatttattgctgtgggttttatctgttcgcctttctccaaaataatacaggctttcctctgcagttaaaaatatttcggaggca

SEQ ID NO: 671350 - DNA, 629 bp, Homo sapiens
ccacgtaactaagccaaacttcaatgataacatgcaactgtttgcaattgttttacatgggagtattttattatttcatcatttaaaatgaccttggatcaatgcactcagaaacttgggtaggcagaaagaatttatttttcaagctaccaaacatgataaaaaatatagtttttgtggttttttgttgttgttgttgttgagatggagtctcactctgtcacctaggctggagcgtagtgtgcgatctcgactcactgcaagctctgcctcccgggttcaagccattctcctgcytcagcctcccgagtagctgggactacaggcgcccgccaccacgtccggctaattttttgtgtttttagtagagacgggctttcaccgtgttagccaagatggtctcgatctcctgacctcgtgatccacccaccttggcctcccaagataaaaaaatatagttttaaatgtttttcaatatatctaatagtcaacatataatgtttctgtaggggtttctataaaatctattatttttggatatttcaacatgttggcttatacaactttcacatagtttcttcaaaagagtaaagatattgtttgttccaccataggcctactgctgctaa

SEQ ID NO: 671351 - DNA, 588 bp, Homo sapiens
tcactgatgaaaagcatctagaatgctaaccgcagagaatacagaaaatgttttaaatgaaaagaaaaatgactaagaatcatgttacctatagttcatcattattactactttggaatttgtctcaattcaatgggtataaataaagtctcagttatacaagatgattaagttctagagatctttcgtacaacattgtggctatagttaacaatagtgtattgtatgcaaaaaaattctgttcacagggtagatcttatattaacttcctaccataaatttttttaaaaattggaggaatcattacatacacacatatataaatatgtgcctgtgatatgcatgacatatgacatctttgtgtaccacacatactgtgagcattaactagaatacctctcttgtctctctctctctctctctctctctctctmtatatacatatatatgtgtgtgtgtgtatgcctctgtgtgtgtatgtaataatttcccccatacacaaacacacacacacataatttcctttttaaaagttagcattagcttgttaatttttaagcttcaaaacaagtgatgaaaatttacagg

SEQ ID NO: 671352 - DNA, 588 bp, Homo sapiens
tcactgatgaaaagcatctagaatgctaaccgcagagaatacagaaaatgttttaaatgaaaagaaaaatgactaagaatcatgttacctatagttcatcattattactactttggaatttgtctcaattcaatgggtataaataaagtctcagttatacaagatgattaagttctagagatctttcgtacaacattgtggctatagttaacaatagtgtattgtatgcaaaaaaattctgttcacagggtagatcttatattaacttcctaccataaatttttttaaaaattggaggaatcattacatacacacatatataaatatgtgcctgtgatatgcatgacatatgacatctttgtgtaccacacatactgtgagcattaactagaatacctctcttgtctctctctctctctctctctctctctctctatatayatatatatgtgtgtgtgtgtatgcctctgtgtgtgtatgtaataatttcccccatacacaaacacacacacacataatttcctttttaaaagttagcattagcttgttaatttttaagcttcaaaacaagtgatgaaaatttacagg

SEQ ID NO: 671353 - DNA, 588 bp, Homo sapiens
tcactgatgaaaagcatctagaatgctaaccgcagagaatacagaaaatgttttaaatgaaaagaaaaatgactaagaatcatgttacctatagttcatcattattactactttggaatttgtctcaattcaatgggtataaataaagtctcagttatacaagatgattaagttctagagatctttcgtacaacattgtggctatagttaacaatagtgtattgtatgcaaaaaaattctgttcacagggtagatcttatattaacttcctaccataaatttttttaaaaattggaggaatcattacatacacacatatataaatatgtgcctgtgatatgcatgacatatgacatctttgtgtaccacacatactgtgagcattaactagaatacctctcttgtctctctctctctctctctctctctctctctatatacatatatatrtgtgtgtgtgtatgcctctgtgtgtgtatgtaataatttcccccatacacaaacacacacacacataatttcctttttaaaagttagcattagcttgttaatttttaagcttcaaaacaagtgatgaaaatttacagg

SEQ ID NO: 671354 - DNA, 801 bp, Homo sapiens
agaaaatgtgtgactgcatgaacgtttctgaagcccagtcaaacccaaggttagaagttcttgaattgagctttagaaagagtaataaatatattttcttgcagttatcaatcagaaaataagatatgatcctaaaatcataaattttatttacagttcaaggcatatcaccatgactgccaatcatctactaaatgcatctgccttgaaatttggttgtcatgaataaactaggtccattacaccaattatactcacaaccacgaactgttaatagcacaaatctattctatgaacttttgtcgtctgatattgaaatacccacacccccatccagcaccatattatattcagagacgtaaccaaagaggcttccaaagactgtggccatttcaagcaaatcaagggttaataggtctatctagcatcttccattagtgggtgtcactgtgatgaaattaacaaagccctattctgaagactttccggaccagcttggaagcattttgtgataatggtgctcattgtaaccagatttgacctgtggtttagtatcagcaactaaaaatgcaggcatttaactacactgaatttaattctagcccaaaccaagctttttagtcagcctacgatatcacaagaaatattgtagaattgaatagttagytgcattcaatcagactcaatagattttttgtgtatttttaggtgagaaatgtgaaattaaggtgtatgggatgtctgcatttccttctcttcctggctatctttatttaatatgctcaaatcagttattaggtt

SEQ ID NO: 671355 - DNA, 625 bp, Homo sapiens
tttttagaagagtcagatgtaaaaaaatattcaatttgtaaacacaacaaaactcagttgaattcacaaaggtgacttcaatcgaatagcatgttcagggtaaaggatatgtttttgtacctctataaaggaaacttttttctttttacatatgtaccattcaagtgccaaaaaagaaaaatccctctcagacactgtttattgaaagaaatttcatgagagccaatctcacttttccagcagagcagcaacctacctttctaaaaggagagcagatgatgcttttgaaaacactgcctgcctgttgcaacacacttatttaaaaatactgtgtctattattccygaacacttaagagtaaaacctcattgtaaatggtgttatcaccaggaatggtaagttgttttcatgcaagaagttcaaaatctgctctgatgtggccaattagaggagctttctataactccttaggaccaactaagggtacattttgttgtgatgtttttaatagttgggtcctcatatccttctgacccacatagcatgggggagtcaggcagcagctggtacttctcagagtcactcaaggagaaactggcaatttgtgtgctggcttctgtgtgtg

SEQ ID NO: 671356 - DNA, 657 bp, Homo sapiens
aatcctgggagtcattttcctgtagcccgggagctccgacaagcctacagacagggggaaactcagaatgtgtttgtgtgatcagctaagggggtttgtgcccagatctgtgtctggtgagcaattctgttctgaatatgtgaaacacaatgatcgaaacaatgtcattatatgtcttccttgggccaaacatgctttggtaagaactcaaaatattcacatacaatgttagaataatctcagagataaaaaaaatcaaggtctagaggtaataagacttgttcaaaaaatactcagtgagcgattggcaaagttggtactttccaaggcctcctgcctgtcggtgtagtattcttcatattcaaaagatgtcttttacgttccccagagccatcatctgtgatttagagacccattttatttctaagygttgctcaaaccaaaaagaaaacaaaagattaagtaggtttttgcaactattacctaattccaccgcagcctaccactgcatctggcttttcatctgctcttcaatatttcttactcaaaagcaaactcaaagatagttgatgccagaaataaagcaaaaaatcaagaaaaaaacaccttcctacaaaaagcccataaaatgaatttgaaagaaaacaaatggatgta

SEQ ID NO: 671357 - DNA, 639 bp, Homo sapiens
ataaccacacagaatttcttcaagtccctgagctaactatccagccataatttctttttattttgaatcacactgtaagaaacagtcccttaactccaccaattcccagtctcataagattagatatacagccattttgtataatgtaagtttgaagtttattttgtatatgagttttacatatgtttattaaacaccctctatatacttatatttgcatacatctatcaatctagcaaacagaatccatgaaggcagggtgacggagaactagccattgaacccccractcaattgtgtttatttgctctccttagcttcctccagctttctttttgcttcgatgaatgttttgttgatttcacttttgagaatcatttttaaatttctcttgatctgtttgagctgtatctcagtaaataccagaggagtgtcagaatcaatatacttaagcagtagcactcataggaaaattagatctccatgtaagtgagaaacaatttggaagaaaatacaggaaaataaattaagagggaaaaatgcctcccaaggctacattgtttcctactgtatttatatttatttcaacaggagcaaatatgctttctaaatggcgcaggatcagatgcacccttaata

SEQ ID NO: 671358 - DNA, 654 bp, Homo sapiens
cactccatccagctctacacggctgggggacaaggagggagatattaatacccacccatcccctggcacatagaaggctgctctttggtgcagtcttttcctccctgaggctgccctaatagtaacttcaatctaaatttcctgacgtgggtagatggctctgggagaagtgtactgccctgcaggcctctttctcagctcctggtttggccatattccctctccttacctgaccttattgtgactttaggtgtcaacccctgccctatgctccttgcaatcattttctgagaactgcccctctcagagagggtaaggggtacacccaatgacaaagagccracctgggcactgccaagacttgacaccaggtccttgggctggtgctttctccaccacgaaactgacccaaagcatttcagggatgaatttttaccccatgcttagagtgaaaggtgcactattgatggggttctcgatgcaaatcccagctctaccatttagtaacttgtcactttaggcaagtgaggtaatctctctgaatgtcaatatcttcatcaataaaatgaagctaatgaaactacctaacagggatgttgtgagagtcaagtgaggtaatatgtgaaaagcacctacctgactcaaaatagactc

SEQ ID NO: 671359 - DNA, 654 bp, Homo sapiens
cactccatccagctctacacggctgggggacaaggagggagatattaatacccacccatcccctggcacatagaaggctgctctttggtgcagtcttttcctccctgaggctgccctaatagtaacttcaatctaaatttcctgacgtgggtagatggctctgggagaagtgtactgccctgcaggcctctttctcagctcctggtttggccatattccctctccttacctgaccttattgtgactttaggtgtcaacccctgccctatgctccttgcaatcattttctgagaactgcccctctcagagagggtaaggggtacacccaatgacaaagagccgacctgggcactgccaagacttgacaccaggtccttgggctggtgctttctccaccacgaaactgacccaaagcatttcagggatgaatttttaccccatgcttagagtgaaaggtgcactattgatggggttctcgatgcaaatcccagctctaccatttagtaactkgtcactttaggcaagtgaggtaatctctctgaatgtcaatatcttcatcaataaaatgaagctaatgaaactacctaacagggatgttgtgagagtcaagtgaggtaatatgtgaaaagcacctacctgactcaaaatagactc

SEQ ID NO: 671360 - DNA, 624 bp, Homo sapiens
tgtcctcaggttatgaagtacagctggcaaatttattcacaattattattgtgtcatagtttttttttttttttttttttgagayggagtttcgctcttgttgcccaggctggagtgcaatggcgtgatctcggctcactgcaagctccactttccagattcaagctattctcctgcctcagcctcccgagtagctgggattacaggtgcccaccaccacgcccagctaattttttgtatttttagtagagatgaggtttcactatgttggccaggctggtctcaaactcctgacctcaggcgatccacccgcctcagactcccaaagtgctgggattacaggcatgagccactgcgcctggcctattgtctagattttctgcataaatgtgctgtgctctttgccctgaagacctacctactttcattttttgactttcccctcttttgtggtgagcagggctgatagaggggttgtttttgaacacacagatgggctgtccaagggtttcttcctatgacatctacatatcctaacattctgaaatgacaagctgtattagtctgttctcatactgctaataaagacatacccaagactgggtaatttataaaggaaagagg

SEQ ID NO: 671361 - DNA, 436 bp, Homo sapiens
ttatcttgtaatgtcattaaaaagcagtgttaaaaacttttctagcagcatcatgtaaaaaagaaacaagtgaagttcatttcaataatatcttctgtttaactgagtatatccttactaccatttcaacatrtaatcattttaaaattattaataagatattttacattctttattttgcaatgtttttaaatcttgtaatgttttttaaaacacagtgtcaattttacacttagaacacactttagtttgatttacccacagtttatgtgctcaacaatcacatgtggccggtagctactgtattggataacataaatctgtaatatagatatctgtaatatagatttactcttattaacaaattaaaaaagacaaccataatactaatttagggccattcacagaggagaaaatctgaatgaccaaaaacata

SEQ ID NO: 671362 - DNA, 436 bp, Homo sapiens
ttatcttgtaatgtcattaaaaagcagtgttaaaaacttttctagcagcatcatgtaaaaaagaaacaagtgaagttcatttcaataatatcttctgtttaactgagtatatccttactaccatttcaacatgtaatcattttaaaattattaataagatattttacattctttattttgcaatgtttttaaatcttgtaatgttttttaaaacacagtgtcaatttyacacttagaacacactttagtttgatttacccacagtttatgtgctcaacaatcacatgtggccggtagctactgtattggataacataaatctgtaatatagatatctgtaatatagatttactcttattaacaaattaaaaaagacaaccataatactaatttagggccattcacagaggagaaaatctgaatgaccaaaaacata

SEQ ID NO: 671363 - DNA, 436 bp, Homo sapiens
ttatcttgtaatgtcattaaaaagcagtgttaaaaacttttctagcagcatcatgtaaaaaagaaacaagtgaagttcatttcaataatatcttctgtttaactgagtatatccttactaccatttcaacatgtaatcattttaaaattattaataagatattttacattctttattttgcaatgtttttaaatcttgtaatgttttttaaaacacagtgtcaattttacacttagaacacactttagtttgawttacccacagtttatgtgctcaacaatcacatgtggccggtagctactgtattggataacataaatctgtaatatagatatctgtaatatagatttactcttattaacaaattaaaaaagacaaccataatactaatttagggccattcacagaggagaaaatctgaatgaccaaaaacata

SEQ ID NO: 671364 - DNA, 535 bp, Homo sapiens
atgtataccttagagtgtataatcccataattcagggatcaataaagcccactcaatttttatcctaacatagaggcrtatagggaaaatatttctagttaactttttgtgtgtgtgtgtgtgtgacacaaagtctcactctgttgcccaggctagagtgcaggagtgcagtcacggttcactgcagcctcagcctcctcaggcttagatggtcttcccacctcagctccatgagtagttggggctacagtcgtatgccaccatgcctggctaaatatctttttttttttaactttttgtagagacaaggtctcactatgttgcccaggctagtctcgagctcttaggctcaagtgatcctcctgcctcagcctcccaaagtgctgggattacaggagtgagccaccgtgcccggtttccagttttctttctttctctttctttcttttttttttaaacagagtctcactctgttgcccaggctggagtacagtagcatgatctcggctcactgcaacatctgcctcccgggttc

SEQ ID NO: 671365 - DNA, 656 bp, Homo sapiens
gaattagttcctctaatgataatatgcccctcaaatgtgttcatttatatatatatacacatatatatacatatatatatatatatatatgtatgtatatatgacaaatgtgttcatttgaggagcagattatcaagccagaaggtcaagttgaagaatactcccaaatgtgatataaaagggcaaatatatggaaagaaatattagataatgtgaaagatatattcatcatttcaatgcagataatagaaattccaggtggatagaatggaaagaatagagcgtggctcttgagttctttattgtgggagatttgtctatcactgcagcaatmctgtactgtcttgattacaagagctttagaataattcttgttatctggtaaagcaagtatgcccgctttggtattctctttacatgaacgctttgatgatttcatacaaattttaaaattagcttgacaaattctaaaaaaacttttcagaaatttgattggaatttctttgaatctataaagcaattttgagataacttatatctttattatattgagtcttccagtctataaacatggtatattgctccatttactttcattttctttaaatgtatatcattaaattaaaaaaattttctcattaaaggttctacacatt

SEQ ID NO: 671366 - DNA, 656 bp, Homo sapiens
gaattagttcctctaatgataatatgcccctcaaatgtgttcatttatatatatatacacatatatatacatatatatatatatatatatgtatgtatatatgacaaatgtgttcatttgaggagcagattatcaagccagaaggtcaagttgaagaatactcccaaatgtgatataaaagggcaaatatatggaaagaaatattagataatgtgaaagatatattcatcatttcaatgcagataatagaaattccaggtggatagaatggaaagaatagagcgtggctcttgagttctttattgtgggagatttgtctatcactgcagcaatcctgtactgtcttgattacaagagctttagaataattcttgttatctggtaaagcaagtatgcccrctttggtattctctttacatgaacgctttgatgatttcatacaaattttaaaattagcttgacaaattctaaaaaaacttttcagaaatttgattggaatttctttgaatctataaagcaattttgagataacttatatctttattatattgagtcttccagtctataaacatggtatattgctccatttactttcattttctttaaatgtatatcattaaattaaaaaaattttctcattaaaggttctacacatt

SEQ ID NO: 671367 - DNA, 367 bp, Homo sapiens
gcacgaaagccagacatagattcacaagaaaagaaaataaatagaattctacacrttaaccaagtggagtttatcccagaaatgcaaggtcattgtaataacagacagacatttgctatgtattatatttataaagtaagggacagaaactgtatgtttatctcagtagaatcaggaaaagtattttacagaattcaacatccatttatgttgaaaactcacaacaaacacaaaagtgaggaaaaaatgatctctgatacaaagtgtttatgaaaaacttacagctactataatgactaatggagaatggctgaacgttttctccctaaaatcagttacaaatatgtctgtttctcaccgtttctat

SEQ ID NO: 671368 - DNA, 367 bp, Homo sapiens
gcacgaaagccagacatagattcacaagaaaagaaaataaatagaattctacacgttaaccaagtggagtttatcccagaaatgcaaggtcattgtaataacagacagacatttgctatgtattatatttataaagtaagggacagaaactgtatgtttatctcagtagaatcaggaaaagtattttacagaattcaacatccatttatgttgaaaactcacaacaawcacaaaagtgaggaaaaaatgatctctgatacaaagtgtttatgaaaaacttacagctactataatgactaatggagaatggctgaacgttttctccctaaaatcagttacaaatatgtctgtttctcaccgtttctat

SEQ ID NO: 671369 - DNA, 739 bp, Homo sapiens
ctaggccaatcctcactgtggcatgctatgttgctttttcaatgtcctgctgaagtttarttactacatttcatttgagatcattgcatcaataatcataaggagaaaatatttgtgtatttctcttcctgtccacctccctcctactgtctcataagatggctatccagttatgctagaacacatacaaaataattaagctttccttttaatttaaacagtcaccaaatgtttgctctcaacttatgggcccaggtccatgtagggaaacctggtgcttgctggggcagggcaggtgggggatagggccactttccacctccaaggagaacaggatcctggtggagagccacagtcacgtgccccatccagccggggaacaggacactgtgaacagggccagtgccaaattcagtagctccctgggaccgactcattggctttcattttatctttggataaaatctggagaatctatataaagggtaaaaatctataaagggtgaaatacctcagtctagggtcaaaacgttttaagattctatcctgaccaaatatttttcaagctacagttttgtacccatttaatgaaaggcaagccaaacaagctctccacatgtgcaatcctatggtcctcgggggatcttatccctgcgttcctccccatcccgcgtgcttgtttggagggagtatgagggaggcatggtgatcgctttcatcatttgctcaggaaagcccc

SEQ ID NO: 671370 - DNA, 1186 bp, Homo sapiens
gggtgggttatacagaaaagaagaagctgttcaaaactgggagcaaagggttgaccatgacctggctactgaacaactggggcatccataagtcaacccacttgtcacctgcccaaagcatggaagctggggctctgacacatggcagagggcagagtgcacatgaacctcagacactgtctcacgggggcagacactgtcatgtctgggcctctgcagtaccagatttctacaggggctaagcagtagatgatcccttttggaattcacatcaatgacacacctagtgtcctcagagcatcggtgactttgaagggttgggtagaagcaaggggaatggcacttggcttgtgggcagctatgagtaatccgcttggccctggacatggagaggtggcatacgattgcctacagagcatcacagtgcccactgtgttttctgtttatttttcagttgaatgacaatccaaaggtggttgtgctggatgagataagaagaaccaatacagtgtggagtttatgactcttactttggactcagacaaataatttacagggaagtagagatatacatgtagatatgtaggtatgtaagtgtgtgtatatgcgtatatatgtatatatcaatacctacagtatttatrtaaataccttttatgtatgtatatataaagagaatgtctaggtagatatgctcagcagatatgtgtaagcaggccccagagatttaggtaagtgagaaacattacggtattttgaggcatgatgaaatttgctttttttttttttaacttagaattttgaagtttcttccttaaggaagtctataggcagtggcggatagatcctttgtagcagatgggagatggagctgcctagatggggtgatttcagggatagcgcactcatatctgctcaatttggccagaaagtgctgtttgcagaatggcaccagaaataaaattccaatgagaatattcgcaccaggcctcccgggtataagggagagaccaaacgatgttggagatacttgtctcaagcacttggctgactttgggcaaatcaattaaactttttggcctcaactttctcatctaatgagggggctgaactggggagctattaaaatccctctaggtttcactttctgtgatttgactaacttcaattccattatctgaaacct

SEQ ID NO: 671371 - DNA, 627 bp, Homo sapiens
gcatgtcttattatttatcaaatgcattcactttagttaagtgacttaaaccatacactaaattgccagtttcaagattactgcccccattttatagagaagcaaattaaagctargacaggtacacaaatttgcttgtttcagatcacacatctgagtttcagcaacaaaatttgaatctaggtcttccaaatctcagtcgtacttcaaataaaacagttgttcatggtaagtttatgtccatagataagaaatttatatgtttcactttgtccttcaagaaagatgatgccaaatttgttgtagccttttatcacatgtagtatatattactactgaaatatatttcatgagttatgttcctatttatgcatggaaaataccagatcattctttgttactgtaaaacctttcatgaatcaaagtttctctgactgtaacacagttactttgcacaaatgttatctttctcaagctcactggtcatcttgacctatttcttccataatttgagcccacagtaatgccagatcatggaatttctgttcttttgggtggggggatgactgtgtattttagcttatgcatgaatgttttaaattcatgagaaataaaactttttttcat

SEQ ID NO: 671372 - DNA, 1499 bp, Homo sapiens
agacactaattctgttttaaactgtctcccttgatgaagtagctgggacgcctaaggtcatagcaatgtttaccattctgttttcttattaaaacaaatatataggctggtgkggtggctcacacctgtaatcctagcactttgggaggccaaggtgggcagatcacgaggtctggagatcgagaacagtctggccaacatggtgaaactccgtctcaactaaaaatacaaaaattatccagtgtggtggcagtcgcctctaatcccagctactctggaggctgaggcaggagaatagcttgaacccaggaggcagaggttgcagtgagctgagacagcaccattgcactccagcctgggtaacagagctagactccatcaaaaaaaaaaagaggatatacacacacacacacacacacacacacacacacatacacatatataataataattataagatcagttataatatttggaaaaaacaatatttaaataaaaatgtttattttaaaattaaaatatatatgtgcaatcgccaattatatgaaataattactaggttcattcattcattgaagaatatttgctgagcttgtaaaaagtttcggttcctcttccagcaactgggtatacagtgttaaataagacatccctatgttttcatcatgtcttggagcttacattttagttcaggagatgacatatagaaatgaaaataagatcatagagataattgactctcagaaaattgtaataaagtggtgtggcatgactagttctaattctagttaggtggacatgggggcttttctgagaggaatttctaaaatgagatttcagtgatgagataaaacaaactttaagcatttcagttggatgtgcattctaggcaaaagagaaaaggctgtccagaaaccctaaggcaggcactagcctgaagtaaagaatttccaaaaatcagtgcacagtggacaaggggaaatgcagtgcaatgtgggatatgaaaagtaggcagggctttgatcagagaaggctattactttttaatcattagtttattgagtttatggaaattaaagtaatgcttaaattaataataatcacatcctgtattaatccgttttcatgctgtttataaagatatacccaagactgggcaatttaaaaaaggaagaggtttaatggacttacagttccacgtggctggagaagcctcacaatcatggcagaaggtaaaaggcatgtctcacatggcggcagacaagaaaagagagcttgtacagggaaattccactttttaaaactatcagatctctaaatcatctcgctcaaattcaaagtttaacagatctctagagcagggacacaatgcttccagtctccttgataaaacatagcaaaacatgacatttactttactccccaataagttcctcatctccatctgaaaccacctcagcctggacttcactgtccatatcactatcagcattttggtc

SEQ ID NO: 671373 - DNA, 1499 bp, Homo sapiens
agacactaattctgttttaaactgtctcccttgatgaagtagctgggacgcctaaggtcatagcaatgtttaccattctgttttcttattaaaacaaatatataggctggtgtggtggctcacacctgtaatcctagcactttgggaggccaaggtgggcagatcacgaggtctggagatcgagaacagtctggccaacatggtgaaactccgtctcaactaaaaatacaaaaattatccagtgtggtggcagtcgcctctaatcccagctactctggaggctgaggcaggagaatagcttgaacccaggaggcagaggttgcagtgagctgagacagcaccattgcactccagcctgggtaacagagctagactccatcaaaaaaaaaaagaggatatacacacacacacacacacacacacacacacacayacacatatataataataattataagatcagttataatatttggaaaaaacaatatttaaataaaaatgtttattttaaaattaaaatatatatgtgcaatcgccaattatatgaaataattactaggttcattcattcattgaagaatatttgctgagcttgtaaaaagtttcggttcctcttccagcaactgggtatacagtgttaaataagacatccctatgttttcatcatgtcttggagcttacattttagttcaggagatgacatatagaaatgaaaataagatcatagagataattgactctcagaaaattgtaataaagtggtgtggcatgactagttctaattctagttaggtggacatgggggcttttctgagaggaatttctaaaatgagatttcagtgatgagataaaacaaactttaagcatttcagttggatgtgcattctaggcaaaagagaaaaggctgtccagaaaccctaaggcaggcactagcctgaagtaaagaatttccaaaaatcagtgcacagtggacaaggggaaatgcagtgcaatgtgggatatgaaaagtaggcagggctttgatcagagaaggctattactttttaatcattagtttattgagtttatggaaattaaagtaatgcttaaattaataataatcacatcctgtattaatccgttttcatgctgtttataaagatatacccaagactgggcaatttaaaaaaggaagaggtttaatggacttacagttccacgtggctggagaagcctcacaatcatggcagaaggtaaaaggcatgtctcacatggcggcagacaagaaaagagagcttgtacagggaaattccactttttaaaactatcagatctctaaatcatctcgctcaaattcaaagtttaacagatctctagagcagggacacaatgcttccagtctccttgataaaacatagcaaaacatgacatttactttactccccaataagttcctcatctccatctgaaaccacctcagcctggacttcactgtccatatcactatcagcattttggtc

SEQ ID NO: 671374 - DNA, 984 bp, Homo sapiens
tcccagattgtctgttatttgcttaaacttaacttctttaagcatgagtttcccaccaatcaaataggaataataagacctaatgcagaccattccctagggcagtcggtccttagccttccattgtttcaccagttatcataacaacattctgttgtaggcattattacttttataataataataaacttctgttttcattttaaaatgacagatttaagaaaacactccgcacttaatgcatactttttatgttttaaatgtcaggctagagatttttctaaagatctttctcttttgtaaagaatgaattcagttaagacttttaaagaaatatttgaagagcagccataatttttaagtgcctcttgaactatacgctgttttcttctagttgcagataaagcagtctcccgattaggaatgggatgctggtcatccctgctcycatttgatgccaatggcagaaataagtaataagttacaatgctccttctctcaaaatttagaggtaacttcagaatacttctcaataattcactccaggaagccactagtaaatgatcaaagctggcacttgatatgaaaactctttctcttctctaccacatatccttcccccatattgaacctcttgtttctttcaagtattctttaaattatctctatcacaattctgtctgatatttcagtactaccttcaataatttctaatttatgttctcaatgacaacagaagcactcaataattttgcacttggatgtaccaacttgttaatgactatgataccacaaattgatctgaagcaaattttcctttgtcctaattgcagactatacatgatccctgttggagctttcatcttttccttgggaaacatgcaaaaccaaagctttgtaactgagtttgtcctcctgggactttcacagaatccaaatgttcaggaaatagtatttgttgtatttttgtttgtctacattgca

SEQ ID NO: 671375 - DNA, 619 bp, Homo sapiens
taattgcttcagaataagtaagctaaataactaaaggcgaatgataacagaaatgtaatctgataggatagtgaaattattccttgcttctgtgaaagaatgaaagtcatattctcatgagggatacagcccttttccagctaagcttacttttttactccaaagtttcctcatggcacttttcatttctgcattcctcagggcatagattagtggtttcagcatgggagttatacaagttaaaaccacagtcatggatttatcaatgggaaaggtggagttgggccttgcaaacaggaagatgcaggggacaaagaataaagtgatcacagtgatgtgggatgcacaggtgtaraaagctttgcatttcccttccaaactctgagtcttaagagagggtaatatgaccccataggaaagcaggagagggaagaaggtgacagtacaaatcgctccaccattagctatcatagaaagcccagtgacataggtattggtgcaagcaagtttcaataagggatacaaatcacacaggaagttgtcaatgacattgggtccacagaaagggagctgataaataaagagaaattgaaccaatgagtgaagaaagcctccaatc

SEQ ID NO: 671376 - DNA, 621 bp, Homo sapiens
ctcttggaagtgccctttatggtttggtttttggaggctgaggcttccattgtctgatgattgtcaggagcagtaagttgacactgcatgttttcctcctctgagtttaaatgcattgtgagggaggcaggcaagttcatatgaggaaggtaattaagttcccattgattgtgcctgtcttcatttccccaacttgtttcatggcttcactagttggtgttcaaggtccacaggggcagtaatagacattgctacatggtcaagatttaaataggggcagagggagatggcccttgacctgattctcaggggaaggacttggcattttttgaatattttgcttatttttttccccaattattcacattcaaaaggcccccttttatttgctaagaagcactgagaatgcagtttggagcaggcagaaagaagttgagctaccacactgcttatcctctcaaataacacagagattgtctcttttcaggcaaggggtgatggggcacatttcttaagaagtgctggagggatgccttcacgtccaagctggayggcattcctgtgtgtgatatctcacggtgaggtgaggaactggcatcttctaaagaaaagcctcattta

SEQ ID NO: 671377 - DNA, 1551 bp, Homo sapiens
agaaacaagaatttaaccagatggaaaaagtgggaaaggatattccagacagagaaaaaagtctacaaaagtytctgaagtccacaaaaggatgacagacaagactacagatggctccgtgggtggaaaataggcttctcattgggtgaggggagatggtgggagacgaggcttgagctgataaagaagttagcagtacatcctgtaggtggtggggagccaggaatggcataatcaaatttgtgttctaacaaccctgctggtggcctcatagtggatggattgtacagatacagattagagacagctactgctacgcacctgtgtgtggcaaactctttttatttacatcatcctttttagatctccccaggtcaagaagatcagtatttatttctccagtttgagaagagaaaaactgaagctcaaaggcctcataatttgttcagagttgtccagaggaagcaagcaaattgagatattctgaattgctccattgaatgttctgccttctctcccaacaaatgccatccaacaggatggcaaagaaggaccttggaatgcctctgagatacgttcctgatattgagaaaagatggtttgtttttttcccaaaaatgtgaccccaaagattgcattgttgaaaagtttggataggaaacttgtgaaatatgcaagctctttttacagagctctcccaggtggtaagatcttagccgggcgcagaggctcacgcctgtaatcccagcactttgggaggccgaggcgggcggatcacgaggtcaggagatcgagaccacggtgaaaccccgtctctactaaaaatacaaaaaaaattagccaggggcagtggcggggcgcctgtagtcccagctactcgggaggctgaggcaggagaatggcgtgaacccaggaggcagagcttgtagtgagccgagatcacaccactggacttcagcctgggcgacagagcgagactccgtctcaaaaaaaaaaaaaagatcatgggtgcatggtagaatctgatcctgggcataaagtaatctgatctccctctttaggcaaagggaaaagccaagctcagagggaggaaggaatgaccctcagaggtcacagaaaggaagacgccaagttgtattttactttactcccaagtacaggattccttgccaatcttcttccattgtgaatagaaggaggcttttaggtaaagaaaaaaggttgatgaaacataaacttttattagataaaaaaaaatgacatcagaggaagctgcagaaaaagttattaagaagagcagaaaggaccccttacttcagttaataaattttaaaatcaggagttcataaaagagattatatgtgtgcatgaggacaaacagctctctgagtgtgagtagggcagattcaaacccagcagaagcctgatatgtattcttctgagacttcttgtaaacaaaaataagttggaaaatatatcaccatttaaggattgaaagtatctgagtgaggtatagattacacatcgtgaggatagagtatatgcttttta

SEQ ID NO: 671378 - DNA, 1551 bp, Homo sapiens
agaaacaagaatttaaccagatggaaaaagtgggaaaggatattccagacagagaaaaaagtctacaaaagtttctgaagtccacaaaaggatgacagacaagactacagatggctccgtgggtggaaaataggcttctcattgggtgaggggagatggtgggagacgaggcttgagctgataaagaagttagcagtacatcctgtaggtggtggggagccaggaatggcataatcaaatttgtgttctaacaaccctgctggtggcctcatagtggatggattgtacagatacagattagagacagctactgctacgcacctgtgtgtggcaaactctttttatttacatcatcctttttagatctccccaggtcaagaagatcagtatttatttctccagtttgagaagagaaaaactgaagctcaaaggcctcataatttgttcagagttgtccagaggaagcaagcaaattgagatattctgaattgctccattgaatgttctgccttctctcccaacaaatgccatccaacaggatggcaaagaaggaccttggaatgcctctgagatacgttcctgatattgagaaaagatggtttgtttttttcccaaaaatgtgaccccaaagattgcattgttgaaaagtttggataggaaacttgtgaaatatgcaagctctttttacagagctctcccaggtggtaagatcttagccgggcgcagaggctcacgcctgtaatcccagcactttgggaggccgaggcgggcggatcacgaggtcaggagatcgagaccacggtgaaaccccgtctctactaaaaatacaaaaaaaattagccaggggcagtggcggggcgcctgtagtcccagctactcgggaggctgaggcaggagaatggcgtgaacccaggaggcagagcttgtagtgagccgagatcacaccactggacttcagcctgggcgacagagcgagactccgtctcaaaaaaaaaaaaaagatcatgggtgcatggtagaatctgatcctgggcataaagtaatctgatctccctctttaggcaaagggaaaagccaagctcagagggaggaaggaatgaccctcagaggtcacagaaaggaagacgccaagttgtattttactttactcccaagtacaggattccttgccaatcttcttccaytgtgaatagaaggaggcttttaggtaaagaaaaaaggttgatgaaacataaacttttattagataaaaaaaaatgacatcagaggaagctgcagaaaaagttattaagaagagcagaaaggaccccttacttcagttaataaattttaaaatcaggagttcataaaagagattatatgtgtgcatgaggacaaacagctctctgagtgtgagtagggcagattcaaacccagcagaagcctgatatgtattcttctgagacttcttgtaaacaaaaataagttggaaaatatatcaccatttaaggattgaaagtatctgagtgaggtatagattacacatcgtgaggatagagtatatgcttttta

SEQ ID NO: 671379 - DNA, 1551 bp, Homo sapiens
agaaacaagaatttaaccagatggaaaaagtgggaaaggatattccagacagagaaaaaagtctacaaaagtttctgaagtccacaaaaggatgacagacaagactacagatggctccgtgggtggaaaataggcttctcattgggtgaggggagatggtgggagacgaggcttgagctgataaagaagttagcagtacatcctgtaggtggtggggagccaggaatggcataatcaaatttgtgttctaacaaccctgctggtggcctcatagtggatggattgtacagatacagattagagacagctactgctacgcacctgtgtgtggcaaactctttttatttacatcatcctttttagatctccccaggtcaagaagatcagtatttatttctccagtttgagaagagaaaaactgaagctcaaaggcctcataatttgttcagagttgtccagaggaagcaagcaaattgagatattctgaattgctccattgaatgttctgccttctctcccaacaaatgccatccaacaggatggcaaagaaggaccttggaatgcctctgagatacgttcctgatattgagaaaagatggtttgtttttttcccaaaaatgtgaccccaaagattgcattgttgaaaagtttggataggaaacttgtgaaatatgcaagctctttttacagagctctcccaggtggtaagatcttagccgggcgcagaggctcacgcctgtaatcccagcactttgggaggccgaggcgggcggatcacgaggtcaggagatcgagaccacggtgaaaccccgtctctactaaaaatacaaaaaaaattagccaggggcagtggcggggcgcctgtagtcccagctactcgggaggctgaggcaggagaatggcgtgaacccaggaggcagagcttgtagtgagccgagatcacaccactggacttcagcctgggcgacagagcgagactccgtctcaaaaaaaaaaaaaagatcatgggtgcatggtagaatctgatcctgggcataaagtaatctgatctccctctttaggcaaagggaaaagccaagctcagagggaggaaggaatgaccctcagaggtcacagaaaggaagacgccaagttgtattttactttactcccaagtacaggattccttgccaatcttcttccattgtgaatagaaggaggcttttaggtaaagaaaaaaggttgatgaaacataaacttttattagataaaaaaaaatgacatcagaggaagctgcagaaaaagttattaagaagagcagaaaggaccccttacttcagttaataaattttaaaatcaggagttcataaaagagattatatgtgtgcatgaggacaaacagctctctgagtgtgagtagggcagattcaaacccagcagaagcctgatatgtattcttctgagacttcttgtaaacaaaaataagttggaaaatatatcaccatttaaggattgaaagtatctgagtgaggtatagattacacatcgtgaggataragtatatgcttttta

SEQ ID NO: 671380 - DNA, 1224 bp, Homo sapiens
  misc_feature 450, 451, 452, 453, 454, 455, 456, 457, 458, 459, 460, 461,462, 463, 464, 465, 466, 467, 468, 469, 470, 471, 472, 473,474, 475, 476, 477, 478, 479, 480, 481, 482, 483, 484, 485,486, 487, 488, 489, 490, 491, 492, 493, 494, 495, 496: n = A,T,C or G
  misc_feature 497, 498, 499, 500, 501, 502, 503, 504, 505, 506, 507, 508,509, 510, 511, 512, 513, 514, 515, 516, 517, 518, 519, 520,521, 522, 523, 524, 525, 526, 527, 528, 529, 530, 531, 532,533, 534, 535, 536, 537, 538, 539, 540, 541, 542, 543: n = A,T,C or G
  misc_feature 544, 545, 546, 547, 548, 549: n = A,T,C or G
gatcctgaaaattgaagaagcgtttcccctctgcccaatgacatagatctttctttggaatcttggctaggttgaatccactatgagttcaaatttttattaggttcctatggtatacaataataatttttaaaatgtggcctttgggccaggcacggtggctcatgcctgtaatcccaacactttgggaggccgaggtgggtggatcatgaggtgaggtgtttgagaccagcttggccgacatggcgaaaccacatctctactaaaaaaaaaatacaaaaattagccgggaatggtgacacacgcctgtaatcccagctactcaggaggctgaggcagagaattgcttgaacccggaaagtggaggtttcagtgagccgagatcacactatcacactgcactccagcctgagtgacagaacgagactctgtctcatacaaaaaaaatannnnnnnnnnnnnnnnnnnnnnnnnnnnnnnnnnnnnnnnnnnnnnnnnnnnnnnnnnnnnnnnnnnnnnnnnnnnnnnnnnnnnnnnnnnnnnnnnnnntgatcaacaaacacccgccttggttcaggtcctctgaggccaccaacttggctgttaaattcattatgaactaactgtgaactgtaggttaattcatgttgagcaacaatggagaaacacattaaaaaatgtgtctgtcataaagctagagtctgttcagaacaaacatatccataaaatgttgatctgttagtattttgttgttcaaaagtcaatctaagaaagtagcactggacttgaattcaaaagactttacttaattgtagtcattggctttggggccaattgctttgagtctataaatctcagtttagtcatcattaaatgaagtaataatggcatgtaccctgtctatagcataagtgaagactatacaatttttactatttaaaattgatcatttccataagttaaagctcattggtaggagctagaattttaaatctaatttttcaaggaagaaacagagaagttcaaacttgcacaccagttcagccagtgaaaaatagaaggcaaagtaatcaagtggtaagacatcaaaccaaaaagcttctgcaacgaaaaaaaaaagaaataaccaaataaaaagayagcctatgggttgggagaaaatatttatgaaccatatatctaataagggattaataccataaatatataaggaactcacacaat

SEQ ID NO: 671381 - DNA, 588 bp, Homo sapiens
aggcagctccccagcctgtgctctggcgtccaggatggcgacttctgtgatccttccaaacagctcatttctgttccagtttactcactcagttgggttctattgttaatgaaaaaaatgaccattgtccaatctttccacatgcatgcaccctcttcttggatgtrcccagttataaattagccattttcatgattaatttttcctggatgactcattcttcaggaactcagcatcagcctaggctgtgggagttcgatttctgtggtcatctgctctccagcattctgatgtgagttaacccttaagaaataatgacagcagccttgatggggatcaatgatgcctccgtgcccacaaatcacattgcagagctcctgttagtttttgaagcctcaccagattcctggctcatggttgtaaagcagatggaggggtagggggagctttgatgataattttatctctttctcttcttggtttcagaggccaggtatgcaggtgaggaaatgtcccacattaaaccttcttgacatcaccttgaaaaggctagcagactttttgcttatttattcttgagacaggtta

SEQ ID NO: 671382 - DNA, 645 bp, Homo sapiens
tggaatataaaagttcatgcaagccacaccaatgggacgctggggaggtggaaaagrcaaatgaggggggaaatacggcaagatttcccatggaaagagaccaaacagctgagactgttaatactaaccaaaaacatatattgatgacctttttgaagagaaatttgacaaatttcataatacattgtgaggtagtaaactatttctacaagtaatttctttgcaagacaagtaccctgcaggactataatcctgcaatgtttctgcaaaaggggaattttagaaaaagtaggcagacaaaccactttaggtgcttgttaaaaatgcagatttgtgggttccgcccataggatttcttactcagattacctgaggcaagccagaacctgcatccaggtggtcactggagtacacctctggaaacacccttaaagaatatgaagtcaagtgtcctctctgcacacagatgggaactgaggcttgggaactttgtgtaacttgcctgagttcatatggctaattagcagcacattgctggctccaacataggatttccagctcaaagccgcgttctcctgtaacagcacagtttgctgtgtgatctggttctcgtttctctgtgaagcagatggaggagatgttact

SEQ ID NO: 671383 - DNA, 812 bp, Homo sapiens
ttttacagacaagaaaactaagctagagaaggaaggtggctcacctaacatcatacggccagtaaatatcagaatcagaattccggcccagccctggtagcttacacactgttcaatatttgtgcctattttcttgacctttattaccctgatcccagacagagagatgtggggtatgaaggactcaacaactcttctcatatgattgcaaatataggagaagagacccaccacacaagcctagaacatgaaatgccaccttgtagatggtgaatgcctggacctcaagcaagaataaactctgtgtgtgtgtgtgagtgtgtgtgtgtacatgcaaacatatatgtgtatatattaaatattcatatctgacttgtgaaatatgaaatatatatttwaaaaatctaacaaggaatacacatttcataagttatattttttagagagaaggtattatttcttttgcttgtattatacttccagaatgtagcacaatgtaaacaaacagtatttcctgattgtagtaaatatagtgtagtaactaaagaacaatataatatagcatagtgtatgtctgtgtataaatatcaccttaaaatatgacattaaaatgttacaaaacatttcttttctggctgacaaatgctgaacataataataatgaatgtagatagaatgacttgagtacctgcgataagcaccacagtgaaagctttcaatacgtgttctcatacaatcctcacaacccgccacactgttgctgacacaacccctttcatttgtctcctgacactcagctaaaaaatttccca

SEQ ID NO: 671384 - DNA, 812 bp, Homo sapiens
ttttacagacaagaaaactaagctagagaaggaaggtggctcacctaacatcatacggccagtaaatatcagaatcagaattccggcccagccctggtagcttacacactgttcaatatttgtgcctattttcttgacctttattaccctgatcccagacagagagatgtggggtatgaaggactcaacaactcttctcatatgattgcaaatataggagaagagacccaccacacaagcctagaacatgaaatgccaccttgtagatggtgaatgcctggacctcaagcaagaataaactctgtgtgtgtgtgtgagtgtgtgtgtgtacatgcaaacatatatgtgtatatattaaatattcatatctgacttgtgaaatatgaaatatatattttaaaaatctaacaaggaatacacatttcataagttatattttttagagagaaggtattatttcttttgcttgtattatacttccagaatgtagcacaatgtaaacaaacagtatttcctgattgtagtaaatatagtgtagtaactaaagwacaatataatatagcatagtgtatgtctgtgtataaatatcaccttaaaatatgacattaaaatgttacaaaacatttcttttctggctgacaaatgctgaacataataataatgaatgtagatagaatgacttgagtacctgcgataagcaccacagtgaaagctttcaatacgtgttctcatacaatcctcacaacccgccacactgttgctgacacaacccctttcatttgtctcctgacactcagctaaaaaatttccca

SEQ ID NO: 671385 - DNA, 1386 bp, Homo sapiens
tgagagaggacgcgtaagaatctgcagtttctgtgccaagtcattcttagacgtccaagcagcagagcatgggggagctggaagagccaatcatttcacttctttagcttttacattcaccgacttaatgtgagtgatggtgatacttacctatttcttgtattctggaagacatagggattaacttgagaagtgctgacctgtttcagccaggaagtgcaatcatgtgatgatcagcctgctgctctccatggcagaacacatgtcccgcgttctccaccccaactggaccctttcttgagacttaccccacgctcactgctaacacaggtatctcctgggcttgaggtggattcacttatcagtgttcaccttattttatcactaaaacaaaaatacttcataaactacataatgtatgactgttatcctctattagaaagctatagaggccaggcgcggtggctcacacctgtaatcttagcactttgggaggccaaggcaggcagatcacctgaggaaaggagtttcagaccagcctggccaacatggtgaaaccccgtctctactgaaaatacagaaattagctgggcatggtggcagctgcctgtaatcccagctactcaaaaggctgagagaggagaattgcttgaacccaggaggcagagctttcagggagccaagatcgcgccattgcactccagcctgggcaacaagagtgaaactctgtctcaaaaaaaaaaaataaaaataaaaaaaagaaagctatagagtcaccgtcactcctgccttgatttcatcagggaaagggaactcaccatctcaggaaaatgtgcctagcaaaagaattcacagggctctaggctgcaagtccatgaatgccctttcctaggatatcagggaccagagtggaacatgagctattattacaagggagggatggaaaaattagactttttttatttttggaaaaatacacataaaatttaccatcttaaccatttttaaggtcagtgccattaagtactgttaaaagaaaaactttagacaaattaaatttagccaggtttatttgagcaaagaccaattcatgagtcaggcagycctcagaaacagaagaggttcagagagccacacctacaagtgtgagtggcaggcttttgtaggccaaacagagaagcaaagtagagaaatcacctaattggctacagctaggcatctgccttatttgagcatggtgtgatgagtttggagttggctgcctgattggttgaaacccttcctgttttatgtattccctagcacatggtccaatagaaagaaactatgaaatataaatgcaagccacatgtataatattaaattgtccttaaatctaatagccac

SEQ ID NO: 671386 - DNA, 869 bp, Homo sapiens
tagaaatattagatacaaatgttggaatataacttcagcttttgaaaatgtttccacgcaaatgaactttttcagggtcactgtgtaatctgtcattctccaaaggggacaccatcacagtcactgacctaatactctccaacctcagagcagaagtgaatgatgaagagaagtctctgggcatggtcaatatacttcttggatatgaaggtgaaatatacaatattccattttagcttttgagaacttttgtggagtatgagtatgtgtgtgtaaggagaagagaggaggtaaattttgcttagttttgccaggctcatgaaaataagttacccaaagtacctgttggaacttggcttaattggaaagtgagtcacaaataggcatttcccagggacacaggcccagaaggctgactgctcagtcctaggtgagctccatgaatggtgctctaaactccgcatggcgctgaggcatgagaacgaggacatctcatacacttgtctttcctttattacatcactaaccgtgttcctcctggarattaccatatctgagaaaacctgaaacctttttgatcgcatgatagatgtaatcagtgaatgttcctacatggagaagctggctttggaaatctactggctcactgtggtaaagactgattcaggggctgcactgaccctgcagctcagtggtgggattgttggtggggttttgcttagtttgtttttttgaaatagaaaggaataaaaatattccattagtcatttgtaacttgggaagggtatataaaataaaaaaaaaagattaaatgaatttcatatttatatgatgaccagttaagagtgacagagaagtcttgaggccat

SEQ ID NO: 671387 - DNA, 1268 bp, Homo sapiens
gagagcagcggaaagccgtgggaggatttatgcaggaaaatgacatgtggggtttacagtcttcatagatgagccctggctgagggatagggaacggattcaggggaggccccatgtgggtttggggtgttgtattcatccacttggtaaataggtgagttgtcatggtggctggggtttggagggggacagaaatggagtggaggaaacagggtgtgctgtgctcttgaagtagtcctaccgggtaagcacagacgcttgggggctggctgtgcttgtgaagctgaatttgattctgtatcagtgggaggcccttggattggagtagttaaaggagggaagtgacctgagrtcatgtaccctagaacttaaagtataatttaaaaaaatatatatatatatggaaaaaaattaaaaaaaatgaaaacctagaaagatacaaggttctatgtcattacattaaaattgtaatgcttaaaaaaaaaaaaaacacctttaaagaggtggtttcagtgtggttaatatgggttctctcctgttttcttcttgccgggattgtgaggactgtgtggtacacacctgtctggtagagcccttctgagttgcttccgatgttcaaatgaggcggtatgatgtaatgcagtcagacttctggttcaaaactcagccctatagctcactagctgtgtgaccttagacagcttgtttgacttcccagtgcctcagtctccatcagtaaaatgggggtgagcaataggacctatttcataggatggtgttttctaaatttaatgcaatagtacatgtaaactacttcaaacaggacctgggaaacagtaagtgtttaagggacattaggtattattctgtttatgatggaatgccaatttgtacttatattatctttctttacttcaaaaaactcgaaaatgccactgtgagcttaagggaccttgacttctcagcagctctagttaatgtagaaaacatagtgtatagaaattcaaatgtgaaaagcaggggtacaagtcatcaaggtttgaaaatgatcatttttatagatgtaggggtacaagtgcagttgtgttacgtggatatattgcttagtggtgaagtgtgggcttctagggcacccatcacctgaatattatacattgttgaaacgatgatttttgatatctctcacttcccatgaactagagaactcatcttatacaataaagcccatccttgaatgtctttcattaatgcttttcattgcttgttaa

SEQ ID NO: 671388 - DNA, 577 bp, Homo sapiens
cagtgagactctgtctcaaaaaaaaaaaaaaaaaaaaaaaaaaaaaaaagtccaggcgcagtggctcatgcctgtaatcccagcactttgggaggctgaggcgggcggatcatgagatcaggagctcgagaccagcctggccaacatggtgaaaccccgtctctactaaagatacaaaaaattagctgggtgtggcggtgggtgcctgtagtcccagctactcgggaggctgaggcaggagaattgcttgaacccgggaagcagaggttgcagtgagcygagatcgtgccgttgcactccagcctgcgcaacggggtgagactctgtctcaaaaaaaaaaaaaggcacttttttggcattgtggtgtaatttttcataacgactagccaaatagatttatagaccatagtatttagattaactaaaccagccatcacaaatttcttattgaagatattattaataatataaacaagcaaatcataagaacatgatagagctgatacctcagcatgggaagtctgtcaaaaaaatcagaaattattatgaagaccattggaaatatggatttctattt

SEQ ID NO: 671389 - DNA, 673 bp, Homo sapiens
atcaccaggaaagtttaacaagtactagtcgaaagagcagagttggtgaaggacagtcatgaaagcagaatcttgaaataataggacaagaaatttggccttatttctatagtaaagagacagtaaaaataacattttaagcttcaggaaggctgctctggtagtggaaggaaaagaagagaggggagatgggaaactggtctatagactaccacaycagtccagtctagagataatgaaggctgaacaagggtagtagcaacaataaattaaaaggaaaaaacagatttgagatacatcttggataaaaaattgccaggacagtgcaatgaaaaaatatatgaaaaatcacaatggaatctaaagaccttctttggaagatattgacactagggaatacaaagtcacaaaataagaagtttgagaagaaaaagatagtgagttaagacttccccagggcttgataaactaatgtccaataagcagctggagaaaagaagagtaaaccagcctagagatatagacgtgagagtcagatacaagcatttgatgataacttaattacaaagcaccccctacgaaagagccagatgagaaaactatgatgacacaatactaggataataatattcatttgataatgaacggtatttgggttgtaattttcttggca

SEQ ID NO: 671390 - DNA, 730 bp, Homo sapiens
gatgttttcacatccctatttattctgcacatgaatgcattattagtcccattaacattttttttaatcccaagttaattctttgtctttattattrttattattattttgcattctgatattctatttatctctttgcatgtatttactaggctcattttttaatctagtcctcctggccagtactttgttgcctttctttaacagtttccctgaagctcctggggcacgcagttatcatccatcttcactgtgctggagcacaggctctggtggatgctcctccagatgagagtcggggaagggtactcaagctggagagccttagatgttgtcatttgggctctagaagttccctgcctgttcccctctgcatagctggattgtctactgagggctgctcccagctcctctcttctagaaagtccttgtttcctgtagggactgccctgctctggtgtaaccgccaagctccccagtgtgttagggaaaggagggaagcagtgcttatggtgactggtgccccacccagctgtgctccagcaccacctgacattctccagctggcacagggctggggctaggggatgatagggaaggcaggccatgctggagccatgctggggagaggaaaggcaggaccaagacgccctaccccaggccctctctgtcggcctcacccattcccacctcctgcccctgaggatttctaggtgtgtgtgaggacagg

SEQ ID NO: 671391 - DNA, 667 bp, Homo sapiens
tattaatcagttatttttaattccttgtctgatagtttcaacacctgtgtcatatctgagtcttgttctataaactgctttgtcttttatcaatgtgttgggtttttttttttatctttcctttcgcctcataggttttttgttgtcgttgctgaaagccaggcatcttgagtaggacagtaaagactgcagtaaawcacttttattcctggaaagaagcatgcctttccttttgctaggttttcagagtctaggtttggaccagtctagttatgatagcccaggaaggtcacccccatccccagatccagggatacagtgcctgcctaagacagatgcttaatcagagtaacagaagatgacccttagtgcacccagtgtttgttgccctacactctgcagtttaagcttttattccttggtagaggtaggatggaaatatctatggagacactctcttagaactcctgccagtcttttttgggagaaccaggtaggtcctgtggagaggagcctgcaggtgcatgtgaatttcctttatatcttcagcccccagggttccatattatttcactagctgatactgttcctttaccaatttaaccattttagctgaatgattcttactggggtccagctgaattggcccttcttaagctcatgtctg

SEQ ID NO: 671392 - DNA, 622 bp, Homo sapiens
aatgaggcagacagtggacctgatgtgtcttgggaggtgatccaactggaagtgcacaaccctgcctgcttgtattcttgccaaaacttctcaccctgaatctattcataggaaaataatcaagcaaattcacgagacacattctacaagacaagtggctggatattaaaaaaaaaaagatgtgggaggtgttgctctagattaaggagaccaaagagacatgacaaccaaatgcaatgcagacacactgtccgaatcctgagtttcttagaacaaaaaaaaaatcaaaacataaaaaaatactataaagcaggggtccccaaccctgggctgcagaccagtccatggcctgttagaagccgggccgcacagcaggaggtgaggtgagcagcaagcattactgcctaagctcctcctcctgtcagatcagtggcagcatcagattctcayaggaaggcaaacgctattgtgaactgtgcatgcgagggatctagattgcaggttgcactctccttatatccctaatgccaaaaaggttggggatcactgccgtaaatggcattttggggacaagagaggaaattgcagtatgaactatatgcgagataattttaaatctgta

SEQ ID NO: 671393 - DNA, 622 bp, Homo sapiens
aatgaggcagacagtggacctgatgtgtcttgggaggtgatccaactggaagtgcacaaccctgcctgcttgtattcttgccaaaacttctcaccctgaatctattcataggaaaataatcaagcaaattcacgagacacattctacaagacaagtggctggatattaaaaaaaaaaagatgtgggaggtgttgctctagattaaggagaccaaagagacatgacaaccaaatgcaatgcagacacactgtccgaatcctgagtttcttagaacaaaaaaaaaatcaaaacataaaaaaatactataaagcaggggtccccaaccctgggctgcagaccagtccatggcctgttagaagccgggccgcacagcaggaggtgaggtgagcagcaagcattactgcctaagctcctcctcctgtcagatcagtggcagcatcagattctcataggaaggcaaacgctattgtgaactgtgcatgcgagggatctagattgcaggttgcactctccttatrtccctaatgccaaaaaggttggggatcactgccgtaaatggcattttggggacaagagaggaaattgcagtatgaactatatgcgagataattttaaatctgta

SEQ ID NO: 671394 - DNA, 622 bp, Homo sapiens
aatgaggcagacagtggacctgatgtgtcttgggaggtgatccaactggaagtgcacaaccctgcctgcttgtattcttgccaaaacttctcaccctgaatctattcataggaaaataatcaagcaaattcacgagacacattctacaagacaagtggctggatattaaaaaaaaaaagatgtgggaggtgttgctctagattaaggagaccaaagagacatgacaaccaaatgcaatgcagacacactgtccgaatcctgagtttcttagaacaaaaaaaaaatcaaaacataaaaaaatactataaagcaggggtccccaaccctgggctgcagaccagtccatggcctgttagaagccgggccgcacagcaggaggtgaggtgagcagcaagcattactgcctaagctcctcctcctgtcagatcagtggcagcatcagattctcataggaaggcaaacgctattgtgaactgtgcatgcgagggatctagattgcaggttgcactctccttatatccctaatgccaaaaaggttggggatcactgcygtaaatggcattttggggacaagagaggaaattgcagtatgaactatatgcgagataattttaaatctgta

SEQ ID NO: 671395 - DNA, 1438 bp, Homo sapiens
atgtggcatttgcagaagttatcacattgttacagagccaaattacaccttcccttgccattgtatctaaaatgctggctcctttttattctttgatataaggagaacaaaaggtatttctccttaaagtaacagtcaaattttgccacttggggccctgtgttcatatgccatgccagtgctcagcagctccaggtttcttagatatttttattaatttttattgagtgcttactattgtgtcaggtagtcctacagaactttaatttccacaaaaatcctatgaggttggcactgttttttacatagatgtgaaactgagacacagagataaaatgcagcttttcccaacaacttggttgcctactgttctcaaggggtatctaacgtgtagtactcatggggtgcctataggacttgtttagccttttttctcttattttaccattattttgaaactttaaactgtttttgaagttatgaagtaagtacgtgtataaaaccaggattagaacatacaaagagacaaataaaaagaagtcttccttccctaacaacccaggactactccacagaggtaactatttttaattttatgtattaraaattttctatgcctaaactagatatgcatatgcatacacattcatttttatgtatggatcaattaaggtacatgtgtcgtaccttgacatggttgacgcatctgtgaacatgcttgtctccctgaattcactgtaaattctgaagtcatactatgtgtaccattctggttatctgctgttaagtaacaaatgatcccaacacttagtggctgaaattaacatttattttgcccacagacctgcagtttgaacaggtctttgctggaaaacctcatctttgctacactcaagatcagctggggtggtgcagggattaagggctggaatcatatgaaggctcagttgctcacatgtgtggtgtttgatgctggctttcagttaagtccacaggtgaccctgcggctagaacaccttcacgtggtctttccatggagctgcttggctttctcagagtatggtggctgggttcccatcagacgcccatcagagcagggcctgaacaactggtatcattgatgttggccctctgacgttgaaactaggcctgtaacaccagctgaggtctgctgttgaagaacacatctgagcaagcatagcaaagtaggctgtgcatatgagagatgtggagacagggtggaaggtcatactcatggatttgttttggaactcatccggttatgtcttattttgtctttcttattcctctgtattctcttctgtaatgtccttcttactgtcacactcagtttccaagtcagctctcagcctcctccattccctggatattgatacacttgttctctcctggcatcacatcactttaactgatagcc

SEQ ID NO: 671396 - DNA, 715 bp, Homo sapiens
ttaatgtagatttttggttaacaatttaggaactctctcttttcctttaaaaacctrcttgtggctgggcgcagtggctgacacccgtaatcccagcactttgggaggccaaggcgggcagatcacctgaggtcaggagctcgagatcagcctgaccaacatagagaaaccccatctctactaaaaatacaaaattagccaggtgtgatggtacatgcctgtaatcccagctacttgggaggccgaggcaggagaatcgcttgaacccgggaggccaaggttgcagtgagctgagatcacgccattgcactccagcctaggcaagaagagtgaaactctgtctcaaaaaaaaaaaaaaaaaaaaaacctgcttgtagcacctgctaataggagtacatattcagggcaacttgaatctatgcttgcaatcctcaagcatgacccaaataaactctctacttttattaattttgcttcttcttcttccttttaggtcaacatactatgacattctagaaagcttgataaagttttaaagattgttatttgtattattaaagcgatttctgattattatagagtttacatgcaattatcattgtccatatatcccaggcaaatataagagtttaatttaggaggtttggatgttgcttgaatgcatgattgtagaaacacaaaattattgactaagtggaggtagagagctctaata

SEQ ID NO: 671397 - DNA, 715 bp, Homo sapiens
ttaatgtagatttttggttaacaatttaggaactctctcttttcctttaaaaacctgcttgtggctgggcgcagtggctgacacccgtaatcccagcactttgggaggccaaggcgggcrgatcacctgaggtcaggagctcgagatcagcctgaccaacatagagaaaccccatctctactaaaaatacaaaattagccaggtgtgatggtacatgcctgtaatcccagctacttgggaggccgaggcaggagaatcgcttgaacccgggaggccaaggttgcagtgagctgagatcacgccattgcactccagcctaggcaagaagagtgaaactctgtctcaaaaaaaaaaaaaaaaaaaaaacctgcttgtagcacctgctaataggagtacatattcagggcaacttgaatctatgcttgcaatcctcaagcatgacccaaataaactctctacttttattaattttgcttcttcttcttccttttaggtcaacatactatgacattctagaaagcttgataaagttttaaagattgttatttgtattattaaagcgatttctgattattatagagtttacatgcaattatcattgtccatatatcccaggcaaatataagagtttaatttaggaggtttggatgttgcttgaatgcatgattgtagaaacacaaaattattgactaagtggaggtagagagctctaata

SEQ ID NO: 671398 - DNA, 715 bp, Homo sapiens
ttaatgtagatttttggttaacaatttaggaactctctcttttcctttaaaaacctgcttgtggctgggcgcagtggctgacacccgtaatcccagcactttgggaggccaaggcgggcagatcacctgaggtcaggagctcgagatcagcctgaccaacayagagaaaccccatctctactaaaaatacaaaattagccaggtgtgatggtacatgcctgtaatcccagctacttgggaggccgaggcaggagaatcgcttgaacccgggaggccaaggttgcagtgagctgagatcacgccattgcactccagcctaggcaagaagagtgaaactctgtctcaaaaaaaaaaaaaaaaaaaaaacctgcttgtagcacctgctaataggagtacatattcagggcaacttgaatctatgcttgcaatcctcaagcatgacccaaataaactctctacttttattaattttgcttcttcttcttccttttaggtcaacatactatgacattctagaaagcttgataaagttttaaagattgttatttgtattattaaagcgatttctgattattatagagtttacatgcaattatcattgtccatatatcccaggcaaatataagagtttaatttaggaggtttggatgttgcttgaatgcatgattgtagaaacacaaaattattgactaagtggaggtagagagctctaata

SEQ ID NO: 671399 - DNA, 715 bp, Homo sapiens
ttaatgtagatttttggttaacaatttaggaactctctcttttcctttaaaaacctgcttgtggctgggcgcagtggctgacacccgtaatcccagcactttgggaggccaaggcgggcagatcacctgaggtcaggagctcgagatcagcctgaccaacatagagaaaccccatctctactaaaaatacaaaattagccaggtgtgatggtacatgcctgtaatcccagctacttgggaggccgaggcaggagaatcgcttgaacccgggaggccaaggttgcagtgagctgagatcacgccattgcactccagcctaggcaagaagagtgaaactctgtctcaaaaaaaaaaaamaaaaaaaaacctgcttgtagcacctgctaataggagtacatattcagggcaacttgaatctatgcttgcaatcctcaagcatgacccaaataaactctctacttttattaattttgcttcttcttcttccttttaggtcaacatactatgacattctagaaagcttgataaagttttaaagattgttatttgtattattaaagcgatttctgattattatagagtttacatgcaattatcattgtccatatatcccaggcaaatataagagtttaatttaggaggtttggatgttgcttgaatgcatgattgtagaaacacaaaattattgactaagtggaggtagagagctctaata

SEQ ID NO: 671400 - DNA, 715 bp, Homo sapiens
ttaatgtagatttttggttaacaatttaggaactctctcttttcctttaaaaacctgcttgtggctgggcgcagtggctgacacccgtaatcccagcactttgggaggccaaggcgggcagatcacctgaggtcaggagctcgagatcagcctgaccaacatagagaaaccccatctctactaaaaatacaaaattagccaggtgtgatggtacatgcctgtaatcccagctacttgggaggccgaggcaggagaatcgcttgaacccgggaggccaaggttgcagtgagctgagatcacgccattgcactccagcctaggcaagaagagtgaaactctgtctcaaaaaaaaaaaaaaaaaaaaaacctgcttgtagcacctgctaataggagtacatattcagggcaacttgaatctatgcttgcaatcctcaagcatgacccaaataaactctctacttttattaattttgcttcttcttcttccttttaggtcaacatactatgacattctagaaagcttgataaagttttaaagattgttatttgtattattaaagcgatttctgattattayagagtttacatgcaattatcattgtccatatatcccaggcaaatataagagtttaatttaggaggtttggatgttgcttgaatgcatgattgtagaaacacaaaattattgactaagtggaggtagagagctctaata

SEQ ID NO: 671401 - DNA, 652 bp, Homo sapiens
acttcatttttagactaccttgtttttactttgtttgcttttcagtaataattttgtttcatttctttatactaattcatgacgttttgaagagaaggaagataaaagtgacaaattctttgcttctattgtgttctttttgataatagctttattgagatacaattctctatcatactttaaaaatctttgctcaaagcataacttactgcagtttgaaactcctgtacatttagccagtgatctgttcagctaccagctctgagatgaaaataggcaataaggctctgttccttggagaacttgcttgtattgaaccaaaatctgtctctttgacrttttgataattggaacaccatggaacaaatctaatccctttctcacatgacaaacccttatgtgaaggcagtgattacagcttcctgaaatcctgccttgaggttaagaatttccaatattttttgtttgcttttttttttttttttttttttttttgagacaaggtctgtcacccaggctggagtgcagtggcatgatcacagctcactgcagccttgaccttccaggctcaaccgatccttttacctcagcctctcagcctcctatatagctgggactgcatgtgtgcaccaccacagccagctgattttta

SEQ ID NO: 671402 - DNA, 652 bp, Homo sapiens
acttcatttttagactaccttgtttttactttgtttgcttttcagtaataattttgtttcatttctttatactaattcatgacgttttgaagagaaggaagataaaagtgacaaattctttgcttctattgtgttctttttgataatagctttattgagatacaattctctatcatactttaaaaatctttgctcaaagcataacttactgcagtttgaaactcctgtacatttagccagtgatctgttcagctaccagctctgagatgaaaataggcaataaggctctgttccttggagaacttgcttgtattgaaccaaaatctgtctctttgacattttgataattggaacaccatggaacaaatctaatccctttctcacatgacaaacccttatgtgaaggcagtgattacagcttcctgaaatcctgccttgaggttaagaatttccaatattttttgtttgcttttttttttttttttttttttttttgagacraggtctgtcacccaggctggagtgcagtggcatgatcacagctcactgcagccttgaccttccaggctcaaccgatccttttacctcagcctctcagcctcctatatagctgggactgcatgtgtgcaccaccacagccagctgattttta

SEQ ID NO: 671403 - DNA, 639 bp, Homo sapiens
tatccaacgagtcacagtgagatgaatcaggtacctcagttggaaatgcagaaatcacccagcttctgcatcaatcacactgggagctacagactggagctgtccctattcggccatcttggaacagaacyaaacaactttttctcatatgtttacctatttgttgttcatttcactttgcctcagaagacatcaaatatataaaccttaataggtatcataaaaggcagaatacatgggggacacacaggtcttgacttcaaggaaaaaatgactcttctatgaaatgaagcaacaaaacaaacaaagaagcaagtactttgcttcacacaagggtcacaaagcaagatgcttacaggaattgtgtggggtgtgtcaagaaagttttcaaaggttaccttaaccttaagggggttttaagtcacatatagtgtttgacttaccgaaaaagtcactgtcacttttttctctcaagaataaaggtagaatgtgctgtctaattacgaacaactttgaggaacagattatctttctttctttctgggagttttcaaagtggcatatagaactatgcattgtttcttaagacagcagtaaaatcaatattgccttcactgaaggcataattatttttatgca

SEQ ID NO: 671404 - DNA, 639 bp, Homo sapiens
tatccaacgagtcacagtgagatgaatcaggtacctcagttggaaatgcagaaatcacccagcttctgcatcaatcacactgggagctacagactggagctgtccctattcggccatcttggaacagaaccraacaactttttctcatatgtttacctatttgttgttcatttcactttgcctcagaagacatcaaatatataaaccttaataggtatcataaaaggcagaatacatgggggacacacaggtcttgacttcaaggaaaaaatgactcttctatgaaatgaagcaacaaaacaaacaaagaagcaagtactttgcttcacacaagggtcacaaagcaagatgcttacaggaattgtgtggggtgtgtcaagaaagttttcaaaggttaccttaaccttaagggggttttaagtcacatatagtgtttgacttaccgaaaaagtcactgtcacttttttctctcaagaataaaggtagaatgtgctgtctaattacgaacaactttgaggaacagattatctttctttctttctgggagttttcaaagtggcatatagaactatgcattgtttcttaagacagcagtaaaatcaatattgccttcactgaaggcataattatttttatgca

SEQ ID NO: 671405 - DNA, 639 bp, Homo sapiens
tatccaacgagtcacagtgagatgaatcaggtacctcagttggaaatgcagaaatcacccagcttctgcatcaatcacactgggagctacagactggagctgtccctattcggccatcttggaacagaaccaaacaactttttctcatatgtttacctatttgttgttcatttcactttgcctcagaagacatcaaatatataaaccttaataggtatcataaaaggcagaatacatgggggacacacaggtcttgacttcaaggaaaaaatgactcttctatgaaatgaagcaacaaaacaaacaaagaagcaagtactttgcttcacacaagggtcacaaagcaagatgcttacaggaattgtgtggggtgtgtcaagaaagttttcaaaggttaccttaaccttaagggggttttaagtcacrtatagtgtttgacttaccgaaaaagtcactgtcacttttttctctcaagaataaaggtagaatgtgctgtctaattacgaacaactttgaggaacagattatctttctttctttctgggagttttcaaagtggcatatagaactatgcattgtttcttaagacagcagtaaaatcaatattgccttcactgaaggcataattatttttatgca

SEQ ID NO: 671406 - DNA, 639 bp, Homo sapiens
tatccaacgagtcacagtgagatgaatcaggtacctcagttggaaatgcagaaatcacccagcttctgcatcaatcacactgggagctacagactggagctgtccctattcggccatcttggaacagaaccaaacaactttttctcatatgtttacctatttgttgttcatttcactttgcctcagaagacatcaaatatataaaccttaataggtatcataaaaggcagaatacatgggggacacacaggtcttgacttcaaggaaaaaatgactcttctatgaaatgaagcaacaaaacaaacaaagaagcaagtactttgcttcacacaagggtcacaaagcaagatgcttacaggaattgtgtggggtgtgtcaagaaagttttcaaaggttaccttaaccttaagggggttttaagtcacatatagtgtttgacttaccgaaaaagtcactgtcacttttttctctcaagaataaaggtagaatgtgctgtctaattaygaacaactttgaggaacagattatctttctttctttctgggagttttcaaagtggcatatagaactatgcattgtttcttaagacagcagtaaaatcaatattgccttcactgaaggcataattatttttatgca

SEQ ID NO: 671407 - DNA, 639 bp, Homo sapiens
tatccaacgagtcacagtgagatgaatcaggtacctcagttggaaatgcagaaatcacccagcttctgcatcaatcacactgggagctacagactggagctgtccctattcggccatcttggaacagaaccaaacaactttttctcatatgtttacctatttgttgttcatttcactttgcctcagaagacatcaaatatataaaccttaataggtatcataaaaggcagaatacatgggggacacacaggtcttgacttcaaggaaaaaatgactcttctatgaaatgaagcaacaaaacaaacaaagaagcaagtactttgcttcacacaagggtcacaaagcaagatgcttacaggaattgtgtggggtgtgtcaagaaagttttcaaaggttaccttaaccttaagggggttttaagtcacatatagtgtttgacttaccgaaaaagtcactgtcacttttttctctcaagaataaaggtagaatgtgctgtctaattacgaacaactttgaggaacagattatctttctttctttctgggagttttcaaagtggcatatagaactatgcaytgtttcttaagacagcagtaaaatcaatattgccttcactgaaggcataattatttttatgca

SEQ ID NO: 671408 - DNA, 583 bp, Homo sapiens
taaaatgattaagagagtgaatcaccatttctctcaacaaaactagggagattctagcaatctcgggagctaaaaatgaagaagaaactatctaggaaaatctacagacaagccacttgtctgatagagtgaatacctatgacatacatgggtgacccaataagttctttggaatttttaccagcagaaacactgccatctcagactaaaaccatcagtgagaaggaaattttaaaagtcattggaccataaaatttgaatggtgaaaaaaagattgatagaactaattctctggtaacacattccattgtttatcaataggggaaggataacccagagggcacaatatggtcccagagggccagaaacagcaccatagaggattattcccaggctttagaccctaaaggagtttactcagctagatttcaaaactgcttttggaatagatttcatagcatagtaataatctatttcttaaatatttgaaacaattcccaataaatgcatttgggtttaaaacccctttctgtttcattgacattttaccatcaaattaaaaargcattgatagaattgtttt

SEQ ID NO: 671409 - DNA, 1373 bp, Homo sapiens
tacctggatttcttacctcacatatttagggaaaaaaaaagtctatgacaatgcaatatttaaaaaaaataaaacaagataagggaaaacttatctaaggaaacatacctcttttttaatcctgattaaagatttttaataactaagatttttctgacacaagtcttctgaaacaacatgtttgaaaataaagttctaggaatgttttcaccaatgtaacttcatttattctttatagtaattattgggaagggtcagataatttcctacattacatgtgattaagctttcagaaagtttaccataatccatacaacrtaagataagaattagaagccagtgctaatatgttgcctaattatgtgccgtgcaagcctgccaaaccagtactcaggcaagctccacactaatcccttctcctttttctttaatggtttatgtttttctgttataaaatattttataaatgccaaaatttacaatacttaaagtctttctccctctccttgtatacatatacattagatatatgtatgtatatataaagcacacacaccctaaatcagaaatttatattcccttatatttatgatttatctcattctcacccactcatgtttctgtaacacaagactgtaacagtcttactattgtaagacttcagacatatttaaacagttcacatgtatgtgcaaacatttatatttatagatatgtgtattcattgacagcatattttgtaatagaaaaagatttgaggccgggcgcagtggctcaggcctgtaatcccagaactttgggaggccaaggcaggcagatcacgaggtcaggagatcgagaccatcctgtccaacacggtaaaaccctgtctctagtacaaatagaaaaattagctgggtgtggtagcaagcgcctgtagtcccagctactttggagactgaggcacaagaattgcttgaatccaggagccagaggttgcagtgagccaagatggtgccactgcactccagcctgggcaatagagcaagactctgtctccaaaaaaaaaaagaaaaaaaatgtaaacagacactctgtcaactcagaatggtctttgttatcttgtgaagtgaaaaagtaatacgtaaaaaaagtatgctgtctaaaagatatattctatgtatctccagaacaatcaaagaatgtacattgctgactttaaggagggaaactgggggcctggggtttataaggagaaagaaacgttgttcacctactagtctttcaaaaccttcaaactttgttacatgtgaacgcattacttgtttaaaaataagagtttttttttttttttaaaaacagcccaggtaataagcacaaaatggatatcataa

SEQ ID NO: 671410 - DNA, 1373 bp, Homo sapiens
tacctggatttcttacctcacatatttagggaaaaaaaaagtctatgacaatgcaatatttaaaaaaaataaaacaagataagggaaaacttatctaaggaaacatacctcttttttaatcctgattaaagatttttaataactaagatttttctgacacaagtcttctgaaacaacatgtttgaaaataaagttctaggaatgttttcaccaatgtaacttcatttattctttatagtaattattgggaagggtcagataatttcctacattacatgtgattaagctttcagaaagtttaccataatccatacaacgtaagataagaattagaagccagtgctaatatgttgcctaattatgtgccgtgcaagcctgccaaaccagtactcaggcaagctccacactaatcccttctcctttttctttaatggtttatgtttttctgttataaaatattttataaatgccaaaatttacaatacttaaagtctttctccctctccttgtatacatatacattagatatatgtatgtatatataaagcacacacaccctaaatcagaaatttatattcccttatatttatgatttatctcattctcacccactcatgtttctgtaacacaagactgtaacagtcttactattgtaagacttcagacatatttaaacagttcacatgtatgtgcaaacatttatatttatagatatgtgtattcattgacagcatattttgtaatagaaaaagatttgaggccgggcgcagtggctcaggcctgtaatcccagaactttgggaggccaaggcaggcagatcacgaggtcaggagatcgagaccatcctgtccaacacggtaaaaccctgtctctagtacaaatagaaaaattagctgggtgtggtagcaagcgcctgtagtcccagctactttggagactgaggcacaagaattgcttgaatccaggagccagaggttgcagtgagccaagatggtgccactgcactccagcctgggcaatagagcaagactctgtctccaaaaaaaaaaagaaaaaaaatgtaaacagacactctgtcaactcagaatggtctttgttatcttgtgaagtgaaaaagtaatacgtaaaaaaagtatgctgtctaaaagatatattctatgtatctccagaayaatcaaagaatgtacattgctgactttaaggagggaaactgggggcctggggtttataaggagaaagaaacgttgttcacctactagtctttcaaaaccttcaaactttgttacatgtgaacgcattacttgtttaaaaataagagtttttttttttttttaaaaacagcccaggtaataagcacaaaatggatatcataa

SEQ ID NO: 671411 - DNA, 1373 bp, Homo sapiens
tacctggatttcttacctcacatatttagggaaaaaaaaagtctatgacaatgcaatatttaaaaaaaataaaacaagataagggaaaacttatctaaggaaacatacctcttttttaatcctgattaaagatttttaataactaagatttttctgacacaagtcttctgaaacaacatgtttgaaaataaagttctaggaatgttttcaccaatgtaacttcatttattctttatagtaattattgggaagggtcagataatttcctacattacatgtgattaagctttcagaaagtttaccataatccatacaacgtaagataagaattagaagccagtgctaatatgttgcctaattatgtgccgtgcaagcctgccaaaccagtactcaggcaagctccacactaatcccttctcctttttctttaatggtttatgtttttctgttataaaatattttataaatgccaaaatttacaatacttaaagtctttctccctctccttgtatacatatacattagatatatgtatgtatatataaagcacacacaccctaaatcagaaatttatattcccttatatttatgatttatctcattctcacccactcatgtttctgtaacacaagactgtaacagtcttactattgtaagacttcagacatatttaaacagttcacatgtatgtgcaaacatttatatttatagatatgtgtattcattgacagcatattttgtaatagaaaaagatttgaggccgggcgcagtggctcaggcctgtaatcccagaactttgggaggccaaggcaggcagatcacgaggtcaggagatcgagaccatcctgtccaacacggtaaaaccctgtctctagtacaaatagaaaaattagctgggtgtggtagcaagcgcctgtagtcccagctactttggagactgaggcacaagaattgcttgaatccaggagccagaggttgcagtgagccaagatggtgccactgcactccagcctgggcaatagagcaagactctgtctccaaaaaaaaaaagaaaaaaaatgtaaacagacactctgtcaactcagaatggtctttgttatcttgtgaagtgaaaaagtaatacgtaaaaaaagtatgctgtctaaaagatatattctatgtatctccagaacaatcaaagaatgtacattgctgactttaaggagggaaactgggggcctggggtttataaggagaaagaaacgttgttmacctactagtctttcaaaaccttcaaactttgttacatgtgaacgcattacttgtttaaaaataagagtttttttttttttttaaaaacagcccaggtaataagcacaaaatggatatcataa

SEQ ID NO: 671412 - DNA, 607 bp, Homo sapiens
ttcagtacttcttttgtcctcacatccactttctataggaggggttcaaaatgtcagtcttcttctctgcttcctggttccccaccctcacttccacatcctcatctaaaatcttcacttggacgactttggtggctcaatgtcctgatcattcatagtggttattaagctastaaattggcagaggctggccttacaaaacaaaaacccaggacatccagaattgtccactggggagttaggaggtgttcattaaatcttgacatcttttctgcttttaatgccccactccacccctaggctcactcacaaacacagcaagttttagctcagtggggttggaaatatcttgggttcagtgaaattgctgtgaagtcgaggggtcataggaaagtagcaaggtccccttgtacttggagtaaaatccattactccagagtgtcctcctagatgaactagcccctgctcacctcatgacctcactctttgtgatatggacacatttaccgtcttccagttccccaaacaggctgatcccttactcccctcagggacttttcttactggtcgtgtcccgtggatgtctgtctttgcatggcctgtgtat

SEQ ID NO: 671413 - DNA, 657 bp, Homo sapiens
ctcagagctaatccagggcccaggacaaacatcacttcatttctgccccagcctcagctcccgagagccacagaggtaccatggttcctggtgttgtgaggtctctgttccctaactatgaggtgctgatacacccagggtggggccagggcttctgaaactcacatatcactgagcagcagtgattctaccaagaatgtctaaggactgttctgcttccgggtcagagggaaacctgacaccccagcctagggctctagctcctcatctagtaaccccataccaccattttctccacagaacttctcacattcacccagcttccctttcgtgcctttcctgctccaccttcttttctaccttactctcctcytgtccctcccctgcagccagaatgagacatggcacttaagggacaggtttattcttcctgttccccacaagagtcatttcagagtcaaacatctctctataaccctgtttctgggtgataaattacctagacagacaagaaagtggaatactctctccccggtgctgagcggggcttctatgccagtggtgctgggccgtggggaagaggatgtgtctctgctgagtcatggttggaaaccagttctgcagtttcccagtcacttagagtctcagagatgtcca

SEQ ID NO: 671414 - DNA, 2215 bp, Homo sapiens
taccacccaccagcaccaggaaaaaaggaccaagagacagagcaagagagactggtggtgctgatgtgcagagtaggactggttctggcctcctgttccaggtcttcttaggcttggtcggtggccctggagcctaaatcagtcatgtgggaagagagggaaggaagagagaaagtcagagaagagagagagctgggaataggtatggtcaagagaaactgaaaaaaaaaggacaagaccacacccatgtgtctggacatagtaattctttcataaggttttaccccttgaaaatatgactcaattagatgaccttgaacttgaccaatccaaactctgggggtcggaggtacagttagggcaaggcctgagggatccaatgttattcctggaagcccaaaatctatatccatttaaaggagagatacccataactgcattagtctttatatttggtcatttttacctcccttgacctcctggcacaataaacatatgcgacttaagactgctttagatcttttggtagctgcatctcactgttgggttattctgagtttatatatattcacccaaacccccagttacttttcctatgaagtgctttcaagtcagctccaccccaccctgaaattgtataaatgatcatttgcaccttcatttggaagttcacatttgtctctgcaaaaggttgtcatgctgattttggcctatcattgaaacccaccaaaattattttgaattgtaattttgctgtacaacatatgaactatttctgccttctccactttactgaaattttcaatgcagcgtctcaagagttgctgctcaaactaaaaatgtcctacttagcattcatccagctgcctccttcactgcttccaaaacagagctcaaagctaaactctcccaggaaggcttccaagattaaatgggggcagaaatgaggctccttccttctaggacaagagggaactccacagagctgcatctcagagtggcccggggctacttgtggatttcaaagaggaaactctgttcttagaaatgaagagcacagaatgtgaaactgcataatgtcaaatgtgctgcttctggggagagtcttgtgtcctcagacaccaggtgcctcattggccccaaaagagatactcatccctgccttcatgccataccttctgggctattaaaatacttacctcttcctgagagagaaaggagttstccaagagcctgctctgtaagttctcaaccctcccaaccccagcctgcaatcagaggaaacagtttgaccattctggctcatgaaaggcagtaaagcttggaggtcaagtgctcagatcctggaaccaaatggctctgggttcagatacttgctatgccgcttattaatggtttaaccctgggcaaatgcttctgctttctaagcctccatgtctcctcatctataatacaagacacttcacaagtccgacctctaaaggataaaatgaaatgacaacggtaaagtctggtgcagagggctcatcacatgggagggaggcactcaacaaatgagagtgctcatcattgtgtggtcacactttccttacctcgtctctgattacaaatctgtgacaagtctcagttattggcactgagttcctacttgcccagctggccacagtgtctacttaaaatagatgttttatcaaaagtacaagtgatcaataagcattatgttctgaaactggggaatcagtgaagttaactgagctgcctttcagtgtctctaaacaattgctatttcagttatctgttgctgcctaaggaactagccccagactcagcagcttaaattacaaggatttaataccttttcatgagtccatgggctggcaaggctcagctgggtggttcttctccatatggggttggccagggtcatgtgtgtagctgccttcagctgggagctgagctggatcactctcaatggctttacatgtgccatgtgctttagctggggttgctggaacagcttggcctggctgagccattctctttcgacacagcctctcctaatttagtggtgcctggtgaccactgttacatgttggctggatcctagaagggtgaaaacagaagctgaaaggccccttaaggcctaggactggaaattacactgcatagctgccgctgcattctgttggtcaaagcaagtcatgggattggccta

SEQ ID NO: 671415 - DNA, 910 bp, Homo sapiens
tgcccacacacacattcttagtcactcactcctccttgtmttcacacatacacacacacacaatgtcacacacgctcacatacacacacagttgcatgcacacagacacagagtctctcacagtcaaacaggcaatgccaagcagtgtgtagattgaagaggggacatttgatcatgatgagtggcccatgctttggaaaggagagtgacaggttggtctgggtttgaatttgagggcctgagaaaggttcagtgcctggctgaacttcagcctggtgagcgatgacatcagcctcacagggtcggaggccactcaagtcgacatctcatttttcaggaggcccagagatggagcccatgctcccgtcctgggggcaggtgaggagaggcccatgaccagcgtgcagagcagccgcatttctggacctcaggaatatctgagttgttgccacagaaactgaaagaggtttcctaagaaataagctttcctaaagaagcgtgtttacatggttataacaaacatgtttagagcatcgtatgtctgcggccatggctttggcaaagtcgtttcattccgcaaacaaccgtgcagtgagctgccttgctgtgcacctgccctgctccagaccctggacagagcagccagggcctccccatgaaaccttctagcatgtgtgagatcctccataagtaggaagtccatgcaggagatctcagcagtggctaatctgcaggtgagaacacggaaccaggtggggagagctcaaggagggagctcagagcaggcctgttcataaatgacatcctgactcaaacctcacaacacaacggagagggcaaggaagcttccagggggacggtatgccggggggaggggacagcaagggcaagagctcagaggcggggcatg

SEQ ID NO: 671416 - DNA, 910 bp, Homo sapiens
tgcccacacacacattcttagtcactcactcctccttgtattcacacatacacacacacacaatgtcacacacgctcacatacacacacagttgcatgcacacagacacagagtctctcacagtcaaacaggcaatgccaagcagtgtgtagattgaagaggggacatttgatcatgatgagtggcccatgctttggaaaggagagtgacaggttggtctgggtttgaatttgagggcctgagaaaggttcagtgcctggctgaacttcagcctggtgagcgatgacatcagcctcacagggtcggaggccactcaagtcgacatctcatttttcaggaggcccagagatggagcccatgctcccgtcctgggggcaggtgaggagaggcccrtgaccagcgtgcagagcagccgcatttctggacctcaggaatatctgagttgttgccacagaaactgaaagaggtttcctaagaaataagctttcctaaagaagcgtgtttacatggttataacaaacatgtttagagcatcgtatgtctgcggccatggctttggcaaagtcgtttcattccgcaaacaaccgtgcagtgagctgccttgctgtgcacctgccctgctccagaccctggacagagcagccagggcctccccatgaaaccttctagcatgtgtgagatcctccataagtaggaagtccatgcaggagatctcagcagtggctaatctgcaggtgagaacacggaaccaggtggggagagctcaaggagggagctcagagcaggcctgttcataaatgacatcctgactcaaacctcacaacacaacggagagggcaaggaagcttccagggggacggtatgccggggggaggggacagcaagggcaagagctcagaggcggggcatg

SEQ ID NO: 671417 - DNA, 910 bp, Homo sapiens
tgcccacacacacattcttagtcactcactcctccttgtattcacacatacacacacacacaatgtcacacacgctcacatacacacacagttgcatgcacacagacacagagtctctcacagtcaaacaggcaatgccaagcagtgtgtagattgaagaggggacatttgatcatgatgagtggcccatgctttggaaaggagagtgacaggttggtctgggtttgaatttgagggcctgagaaaggttcagtgcctggctgaacttcagcctggtgagcgatgacatcagcctcacagggtcggaggccactcaagtcgacatctcatttttcaggaggcccagagatggagcccatgctcccgtcctgggggcaggtgaggagaggcccatgaccagcgtgcagagcagccgcatttctggacctcaggaatatctgagttgttgccacagaaactgaaagaggtttcctaagaaataagctttcctaaagaagcgtgtttacatggttataacaaacatgtttagagcatcgtatgtctgcggccatggctttggcaaagtcgtttcattcygcaaacaaccgtgcagtgagctgccttgctgtgcacctgccctgctccagaccctggacagagcagccagggcctccccatgaaaccttctagcatgtgtgagatcctccataagtaggaagtccatgcaggagatctcagcagtggctaatctgcaggtgagaacacggaaccaggtggggagagctcaaggagggagctcagagcaggcctgttcataaatgacatcctgactcaaacctcacaacacaacggagagggcaaggaagcttccagggggacggtatgccggggggaggggacagcaagggcaagagctcagaggcggggcatg

SEQ ID NO: 671418 - DNA, 1768 bp, Homo sapiens
cttttttgtttttctctcaatcagtcttcacctggctcaactgagaaaaattcgattgaagactacgctccctcctctctcttctcctcttggtttttttactttataactgggctgttgcatacggtagcctctagccacatgtggtcgtttaaacttaaattaactaaaattaaacgtaactaaatatttgatttcccagttgcactagctacattgcagtgcttaatagccacatgtagtttgtggctgctgtactggacagcacagatatagaacatgtccatcatggtgagaagttcttttgaactgtgtggcttcggagckttccagagtctctaggattaagtcttcctcttattgcctttatcttaatagctccatggtgtcctgttaacatgctccttgtctccaccctaaatggtaatctcactgagggtgggtaccatgttggttacatgttgcttcctatgctggtacggtgttgggttcactgttggtgatcacttattgagtacagagcagttgaacagatgaaggaatgaactggagggtttgtggacacagagtaatccctttggggccctggagctttgggtgatcttattagggcatagtcatctggttaaagcttcattttatagagctcactttttgtgtgtgtgaaaacaatcacaaatacacacagttcctaaaacagatgaaaatgtgacaccataattgattgaagattgtcaatgaccccatgctatctctgaactttttatttggccttagggaccagtaatttctagacaggaatattttgggtgctcttctgaagctgagaatgatctctgtgtgttgggatgggtggggcctctgaagttctttaacctgtctgtttgcagacagagtgttccccttgttaggaagctggtctctggcacagctgctgtggcctctctctcagtgtagagcaatccattttcaaaccgattttttggcctgtagttcaacttcacggggatgctggcagctctcctgtcctgtgagctgcagcataggcaactaggcaacctcagtgggtttgaaaagaaactttgtcttcctctccctcttttttctgtgtgttctcttaaaccacgccccccttcaattaaattccaaagaaagaagatgaacaagaacttatacgtgacttaggatatgttaataattgaatcttcacaccaccctatgaggcaaggcttgttactactctcattttacggatgagaaaactaaaagcccagagaagctaggcaacgtttccaaggttaaacagcatgtgggtgctgttgctggtactgacacccatggctgggctccagagccaagcttctaatcactaggtcccactgcctttcattataacaaacagaaacaccggcccacctgcaaaaaggacttcacaaagtcaaaaactgttgaccaagcacctactctgtgtgccagacaccagatgctgaacatccaggtgagacagccctgccctccagggaggtcaggcccagctcaagacactcctgatgagagttcttgttctgaggtggagtaaagatggcaggctctgggccacctctgcccacgtgcaatgcagaagtgggatgggagaacatggctgaggacggcaaggctgtaagcacaggggcatgaggagtggccccagcgatccctgggggtggcaggagcccggaaagccaggcctgtgatgtcccactggcaggtgttgagggaatggcaggca

SEQ ID NO: 671419 - DNA, 609 bp, Homo sapiens
tcagattttgtctctgccagcatacacagtattctggtgttttccatctttccctattttacctgcaatattcactgttaagacggcccctgcagtgcataccagctgcaaaggcagaaaattttkttggaattctattggtgcaggtaggggagtgacctgcctgtccctgcctttccccaaacagcagggaggacacaggctgtggagcagagacagaaggcccccaaggaaggaactcagttctctcaagcaatgagggaggcagtcagggaccttcctgctcagcccctcctgccagggagccatgagagttccaaggcaaaggcagctcttcctttaacctttaggctcagtatagcgtaatgtctacctagaggctggaataataaagcctcagtcactgagacgggaagggatgaggtcatcccacccagaggccctgccaggggaggcgcactccctccaacacgtgtttctggggctcccgcctgtccagctttcagccactccattgatagagctctgccaccctcctttgggctattttgcagcaagaagcagttcttcttctgactttacaacctccaagagtttccttccatgcct

SEQ ID NO: 671420 - DNA, 1043 bp, Homo sapiens
tgagttttgtttggagcttgtaaagaaatctatgtattgcagtatttttttcttccattaaaagatacaggagagggcgaggttgggcacggttgctcactcctgtaataccagcactttgggaggccgaggcaggcagaacacgaggtcaggagatcgagactctcctggaaaacatggtgaaaccctgtctctactgaaaatacaaaaattagctgggtgtggtggcacgtgcctgtaattccagcttcttgggaggccgaggcaggagaatcgcttgaaccagggagttggaggttgcagtgagcygagatcatgctactgcactccagtctggcgacagagagagattccgtctcaaaaaaaaaaaaaaaaaaaaaaaaggatataggggagggcgagacagattactccttatcccagggcctggatagacatagatggagactccaagaatccagggttgaagagtcttttaagggagaggttgaaatatgggaactttttccagatactgactgacaagtagtatcatcaatgacataaaccatcagcaacgaggctcagcagaggaaaacagacggctccttgaatttatcaagctgttgtagtggtaggcatttcctaagtgatactgggctggctgaaagaactcagcctcatttcaaatgtgcataatatactccagactcaagggatgcagccctttatctcctataagattttacaaatccgtggagtcaaaggaaaaagagtctaacgttcaaatggcagaagaatttttaatcaagtagaaccttcctattgaggaggtcaccatccgaccccaacagctcatataagggcaagaggcatagcctttgggagaagcgctggcccaagcagcactgagggattcccactcggtgggtgcgaatcctggccaaggggatggtcacattccagctgataaaagaacctgtcctggattacagtgaacacagcaggaccctcatgggaatcactgcggatccctgagccctcagagaaccaaggttctgaga

SEQ ID NO: 671421 - DNA, 1043 bp, Homo sapiens
tgagttttgtttggagcttgtaaagaaatctatgtattgcagtatttttttcttccattaaaagatacaggagagggcgaggttgggcacggttgctcactcctgtaataccagcactttgggaggccgaggcaggcagaacacgaggtcaggagatcgagactctcctggaaaacatggtgaaaccctgtctctactgaaaatacaaaaattagctgggtgtggtggcacgtgcctgtaattccagcttcttgggaggccgaggcaggagaatcgcttgaaccagggagttggaggttgcagtgagctgagatcatgctactgcactccagtctggcgacagagagagattccgtctcaaaaaaaaaaaaaaaaaaaaaaaaggatataggggagggcgagacagattactccttatcccagggcctggatagacatagatggagactccaagaatccagggttgaagagtcttttaagggagargttgaaatatgggaactttttccagatactgactgacaagtagtatcatcaatgacataaaccatcagcaacgaggctcagcagaggaaaacagacggctccttgaatttatcaagctgttgtagtggtaggcatttcctaagtgatactgggctggctgaaagaactcagcctcatttcaaatgtgcataatatactccagactcaagggatgcagccctttatctcctataagattttacaaatccgtggagtcaaaggaaaaagagtctaacgttcaaatggcagaagaatttttaatcaagtagaaccttcctattgaggaggtcaccatccgaccccaacagctcatataagggcaagaggcatagcctttgggagaagcgctggcccaagcagcactgagggattcccactcggtgggtgcgaatcctggccaaggggatggtcacattccagctgataaaagaacctgtcctggattacagtgaacacagcaggaccctcatgggaatcactgcggatccctgagccctcagagaaccaaggttctgaga

SEQ ID NO: 671422 - DNA, 1043 bp, Homo sapiens
tgagttttgtttggagcttgtaaagaaatctatgtattgcagtatttttttcttccattaaaagatacaggagagggcgaggttgggcacggttgctcactcctgtaataccagcactttgggaggccgaggcaggcagaacacgaggtcaggagatcgagactctcctggaaaacatggtgaaaccctgtctctactgaaaatacaaaaattagctgggtgtggtggcacgtgcctgtaattccagcttcttgggaggccgaggcaggagaatcgcttgaaccagggagttggaggttgcagtgagctgagatcatgctactgcactccagtctggcgacagagagagattccgtctcaaaaaaaaaaaaaaaaaaaaaaaaggatataggggagggcgagacagattactccttatcccagggcctggatagacatagatggagactccaagaatccagggttgaagagtcttttaagggagaggttgaaatatgggaacttyttccagatactgactgacaagtagtatcatcaatgacataaaccatcagcaacgaggctcagcagaggaaaacagacggctccttgaatttatcaagctgttgtagtggtaggcatttcctaagtgatactgggctggctgaaagaactcagcctcatttcaaatgtgcataatatactccagactcaagggatgcagccctttatctcctataagattttacaaatccgtggagtcaaaggaaaaagagtctaacgttcaaatggcagaagaatttttaatcaagtagaaccttcctattgaggaggtcaccatccgaccccaacagctcatataagggcaagaggcatagcctttgggagaagcgctggcccaagcagcactgagggattcccactcggtgggtgcgaatcctggccaaggggatggtcacattccagctgataaaagaacctgtcctggattacagtgaacacagcaggaccctcatgggaatcactgcggatccctgagccctcagagaaccaaggttctgaga

SEQ ID NO: 671423 - DNA, 1043 bp, Homo sapiens
tgagttttgtttggagcttgtaaagaaatctatgtattgcagtatttttttcttccattaaaagatacaggagagggcgaggttgggcacggttgctcactcctgtaataccagcactttgggaggccgaggcaggcagaacacgaggtcaggagatcgagactctcctggaaaacatggtgaaaccctgtctctactgaaaatacaaaaattagctgggtgtggtggcacgtgcctgtaattccagcttcttgggaggccgaggcaggagaatcgcttgaaccagggagttggaggttgcagtgagctgagatcatgctactgcactccagtctggcgacagagagagattccgtctcaaaaaaaaaaaaaaaaaaaaaaaaggatataggggagggcgagacagattactccttatcccagggcctggatagacatagatggagactccaagaatccagggttgaagagtcttttaagggagaggttgaaatatgggaactttttccagatastgactgacaagtagtatcatcaatgacataaaccatcagcaacgaggctcagcagaggaaaacagacggctccttgaatttatcaagctgttgtagtggtaggcatttcctaagtgatactgggctggctgaaagaactcagcctcatttcaaatgtgcataatatactccagactcaagggatgcagccctttatctcctataagattttacaaatccgtggagtcaaaggaaaaagagtctaacgttcaaatggcagaagaatttttaatcaagtagaaccttcctattgaggaggtcaccatccgaccccaacagctcatataagggcaagaggcatagcctttgggagaagcgctggcccaagcagcactgagggattcccactcggtgggtgcgaatcctggccaaggggatggtcacattccagctgataaaagaacctgtcctggattacagtgaacacagcaggaccctcatgggaatcactgcggatccctgagccctcagagaaccaaggttctgaga

SEQ ID NO: 671424 - DNA, 1043 bp, Homo sapiens
tgagttttgtttggagcttgtaaagaaatctatgtattgcagtatttttttcttccattaaaagatacaggagagggcgaggttgggcacggttgctcactcctgtaataccagcactttgggaggccgaggcaggcagaacacgaggtcaggagatcgagactctcctggaaaacatggtgaaaccctgtctctactgaaaatacaaaaattagctgggtgtggtggcacgtgcctgtaattccagcttcttgggaggccgaggcaggagaatcgcttgaaccagggagttggaggttgcagtgagctgagatcatgctactgcactccagtctggcgacagagagagattccgtctcaaaaaaaaaaaaaaaaaaaaaaaaggatataggggagggcgagacagattactccttatcccagggcctggatagacatagatggagactccaagaatccagggttgaagagtcttttaagggagaggttgaaatatgggaactttttccagatactgactgacaagtagtatcatcaatgacataaaccatcagcaacgaggctcagcagaggaaaacagayggctccttgaatttatcaagctgttgtagtggtaggcatttcctaagtgatactgggctggctgaaagaactcagcctcatttcaaatgtgcataatatactccagactcaagggatgcagccctttatctcctataagattttacaaatccgtggagtcaaaggaaaaagagtctaacgttcaaatggcagaagaatttttaatcaagtagaaccttcctattgaggaggtcaccatccgaccccaacagctcatataagggcaagaggcatagcctttgggagaagcgctggcccaagcagcactgagggattcccactcggtgggtgcgaatcctggccaaggggatggtcacattccagctgataaaagaacctgtcctggattacagtgaacacagcaggaccctcatgggaatcactgcggatccctgagccctcagagaaccaaggttctgaga

SEQ ID NO: 671425 - DNA, 203 bp, Homo sapiens
attctgccttggggaagtttaaaatgtcactggaggtataggacttatcaggcacatgagagagagagagagcctgygccaggatgtgaagagcccagatttcatgtaagttgctgcggggattcaaagcaaatattgatcatggtggggcagaaataaacatccgtgaggtcagtggaggtgggcttgaggagtgtagcaga

SEQ ID NO: 671426 - DNA, 787 bp, Homo sapiens
aggcaattgtataaagggcatcctcacagggactgacactaaatgatcctctggtgggcagtgatctgaattagggtgatccccagtgacaatccctctagggttttcataactcctctgcctcctcttctcctctcacccgttcactgtgagcagtcctcggaatctcagttattattttccagtgagtcttacctttgatcacgtggctatcactgtttcaatgatttcctatgctgaygcctctgaacgtagcatccccacactaactctcccccaagcactgatctcgtatcttccactattttcagtaaaactcagtattgctgaattcttctagctacccagttacaaaaccacagtcatttttaattcattcctccctcttttccccaccaagtccagttgatcctacgtctctcaaatcttgatccttttcatcttatggctgatttggtgtagtcatttattaacatatcaccctgcctcttgaatctcttttccagatatgctgtggccagaattttcttcttcttcttcttcttctttttttttcctgagatggagtcttgccctgtcacccaggctggagtgcagtggcaccatctcagctgactgcaacctccgtctcatgggttcaagtgattctcctgcctcagcctcgcaagtagctgggactacaggtgcgtgccaccatgcctggctaattttttgtatttttagtagagatggggtttcaccgtgttagccaggatggtctcgaactcctgactttgtgatctgcctg

SEQ ID NO: 671427 - DNA, 598 bp, Homo sapiens
gaaagtaaacataagttattaagttaaactagaaatagatgaaacacttgttagtatgtttttactagtcaaagagaacttctccatggtttgcttcaaccctaaggctctgggccaacccaagccccaggccgcaccctttacccaccaatgctccgtccaacctggcagcgagcagtagccatgaggactgcgctcttacccgcatggcagacacacttcagtcaaactccaggaagtcagctttgatcttaatggcttcaatcacggattgaatttagtattttcctttgrctacagtgacccaccagtgcatgttgttaaaaacagcaatatcaataatactctcataaataaatgtaatctgattttaaatcattgtatcacaattgtatcaaatatcacaagaattattctttgggatagaaatctgcccaacacataaaatctgcaaccattcattctggctttttatgaatcttctatgaaatgtaaattccactattttgtccttctatctccgtgataaatgtccccagaatacccatatttgaatatccaaattacatccctcatattgcctttcatattcagaaag

SEQ ID NO: 671428 - DNA, 610 bp, Homo sapiens
tacagaaatcagtgacgtggccaataataccagtttttctttcctgtgtcactgggtagtctaaaggcatagtgaggtgtttagtaacttcatagtttagtaactgtgaagccaggctgcctcagtttgaatcctacctcctctaactattggctgtatgacattgggcaactatttaacatctctctacctctgtttcctcatctgtaaaatgggggtagctgtgagaactggataagattgcttaggatagtgtctgacagagtaagacctttgtaagtgttagttctactaattattatttttcagattcctgcattatttttataacagcagatgacaagcartgtgaaaaagtaccattataagtacaatgtaagtggaatacaaatgttagccatggttttctacacctttgaggaaataatattgatttttgttccccactcacgtcccatgggtgagagtccgattccttctccaacaagtttctgaagccttggggcttaagttctcatgatcattgcagccctgtgttcctgctcctgcttcccatagctcttttttttttcctcttcgtcccaaactgacttggacaagaaactcagtc

SEQ ID NO: 671429 - DNA, 601 bp, Homo sapiens
ggtaattttataatattagacatttatgccttaatcagttattttctcatgattatttccaagttgtgtataatacaaatgaatacttatgaataacgtgatatgacctgtattacaagaggcaaaatatgattaatattgaatctgtctcgctgaaatattttatgcctataattagtataaaaagtactataatcgtaatttttgaactgttgaattatttcttgtaagaagtattgtttttacagcactgaataacacaaagtatatatctgaagaattagaaaagcagcaacaaagcatgtaagaaaaaaacytctctaatttcccgggcttgattagtgcaagactagaaatattgtttccacttacataagatctttttgtaattcatatttatcaaaataattataattataattcagaaactaatccttagtaaaaattttaattttcactaacattgattttgtgattattttaaaaatgatcagaattataaatagtagcattgtgaattctaattttatctttaaaataccaagaacatcaaaatttaatatttggaatccagtagcaaagcattattatattatatcat

SEQ ID NO: 671430 - DNA, 671 bp, Homo sapiens
atgagaagtcctgctaataacaagttcaagattgtgagaaatcataatgccttatcttttagatctttagcatgaaattgaatgtaaatggaactattatctcattatttcaaataatatattagaagtaattatattattttaaaataaatatattaaattctaatacattattcaataatgtgttgtatcttaataattatattacatgatgatgaacatcatggtccctaaattcakttggtttgaattgcaacaaaagcttcatcaatattaattgctctaaagactttggacaaggagtttaacccctccaaactcctgatctttaattttaaaaaaggtgaccccagtagtaactagtttataaagctggtgtaaaaattaaatattcctagcccttagtaagcagacaagtgttcactatattttttattaaataaaaaaggcaaaatgtctgatgaaatgtaaacttctcattctaaggcttatcaaaactcaccaatttcattttcttctggggtctcagcaaattccattgatatttaccaaactgtcagacaattatctgatatggttaccttgggtacgtttcctagttcaagcacctcggctggctcatttgaagcaattttattctgaagcagatatttcagaagatatgatagcat

SEQ ID NO: 671431 - DNA, 633 bp, Homo sapiens
gaacagtacaagaatcttaagactgcatatcatccaagctaataggagatgaaaagaaatatttaaaaactcaatctaaaagaaggccagatgggagagaaaacccaaaacaggaaggacaaatagaaatggctgagtaagatggcgaagctaaaagatattggtaattacattaaattaaattacattaaacataaaaataactaaatactctgtttcaaagataaaaacagaattaaaaatacaaaactcaactatatactctttataaagccctcatctgaaatatgatacagaaatatgaaaagttaacagatgaagaagttatactttgtactattaaccaaataaggcagatgtgactatgttaatatcaaagacagctctgaggcagaaagcatggctaaaaataaaaaagggcacttcatagtggaaaaaagttaaaatgaacccggaagctacaatattaaatttgtatgcacctaataacatagtttgaagaatataaagccacaatctaaacaactttatgggaaaaataggtaaacccacacatctctcactagctgatcaaataaaaggacaaaakagaatcagaaagatacagcaatataaaatatttgaacaccataa

SEQ ID NO: 671432 - DNA, 2779 bp, Homo sapiens
  misc_feature 1128, 1129, 1130, 1131, 1132, 1133, 1134, 1135, 1136, 1137,1138, 1139, 1140, 1141, 1142, 1143, 1144, 1145, 1146, 1147,1148, 1149, 1150, 1151, 1152, 1153, 1154, 1155, 1156, 1157,1158, 1159, 1160, 1161, 1162, 1163, 1164, 1165, 1166: n = A,T,C or G
  misc_feature 1167, 1168, 1169, 1170, 1171, 1172, 1173, 1174, 1175, 1176,1177, 1178, 1179, 1180, 1181, 1182, 1183, 1184, 1185, 1186,1187, 1188, 1189, 1190, 1191, 1192, 1193, 1194, 1195, 1196,1197, 1198, 1199, 1200, 1201, 1202, 1203, 1204, 1205: n = A,T,C or G
  misc_feature 1206, 1207, 1208, 1209, 1210, 1211, 1212, 1213, 1214, 1215,1216, 1217, 1218, 1219, 1220, 1221, 1222, 1223, 1224, 1225,1226, 1227: n = A,T,C or G
atcttggctcactgcaacctccgcctcctgggttcaagtgattctcctgcctcagcctcctgagtagctgagattacaggcatgcaccaccacgcccagctacttttgtatttttagtagatacagaatttcaccatgttggtcagggttgtctcaaactcctgacctcagatgatcagcctgcctcggcctcctaaagtgttgtgattacagacgttagccaccatgcccagccttaaggcagatcttttgaaccggactattgaaatttaacttaaatgtcagaaatctttaaaaggtggacacgctaaactaagcacttttctggataaatttaacactcaggaaaatagaagagatttagaaaatccacaaaaagaggtccatgctaccaccaccaggtccacattgtaatttaaagaaatcaagagagacatccttttatgtcaaactgtcaatttcttaactatttgagtgtttacttacatggtttgtacagttgcttcttcttatttctacaactaagaataaaaaaaaaaaaactggtcacttctgatacaaataccataaaataaaagtagttgttaacatcttactgattactcctatgaaaaatgagacaaaattccattaaaaaaaaaatttttcaataacatataatttaaattatctggcatgattaatttcataagtcaaatctaaaaacttagattttcatttagtttactttttgtttctattacatacaaatgaaagaatcctcatgtacaaaagaaaagggcaaaaaaattaggccagatgaaaaatttagctaataaaaagtttaactgttgcatatatgagccatgatccattagtattctctcattctgcatttacacatagcttactttaattatcagactctaagagctaacagttctaaaaactacttcctgaccagacacctatctctagatgcaacagaatccctgtaagcatcttgaaccacacttagtggttatctactaatatgtcactaaaaacaaaacaaaattaaaaaatggtctttacacaactggaaagtaacctatcttaaatttgttttcttttttgagatggagtctcactctgtcacctaggctcgannnnnnnnnnnnnnnnnnnnnnnnnnnnnnnnnnnnnnnnnnnnnnnnnnnnnnnnnnnnnnnnnnnnnnnnnnnnnnnnnnnnnnnnnnnnnnnnnnnntctccttttgggcaggacaaattttagataggtttttaaagaattagtaactttaggccgggcgcggtggctcacgcctgtaatcccagcactttgggaggccgaggcrggcagatcacgaggtcaggagatcgagaccatcccggctaaaacggtgaaaccccgtctctactaaaaatacaaaaaattagccgggcgtagtggcgggcgcctgtagtcccagctacttgggaggctgaggcaggagaatggcgtgaacccgggaggcggagcttgcagtgagccgagatcccgccactgcactccagcctgggcgacagagcgagactctgtctcaaaaaaaaaaaaaaaaaaaaaaaaaaaggaattagtaacttttttcctttttccgagacagggtctccctttgttgcccaggctggagtgcagtggtgcaattatagttaactgcagcctcaaactcctgagctcaagcgatcctctgcctcagcctcctgagtaggtaatacgaaaggcgcatgccaccaggcctggctaatttgttatttaacctttttgtagacatgaggtcttgctatgttgaccaggctaaaaataaacaaatcttaattaacttaaatagttctaacactttgggcattcaggaaaacagctccatgtatgttgtgaagtaatgggaagtatatggcagtggataaactttgaatgaaaatattaaacaaggccttaggagaaaagtgtaatatgcttattatagatacattaatttaaaaaattctctggcttaatatcattaattatactcaaattagactttgatttaaacacaggtcctaaatttggattaaatataatagattgaccacaaatttatttcgtctccctccggaagcctcatcagtcataaaataaaggttacacccatgaccagcacagaaggttgacagagataatttttaataaatgctgagacataaaaagtagataaaggagtggtaaataacacagaaacacaactttggtgcctacagaaagtgactggaacagaagcgagccagtttgtcttgcagaactaaaggcaggttgtgaaattacaggcaaatggcactttggaaagtagggtaaaatgtgaaaaaaaaaaaaaagccagcaaggtcagttgcaaatctctaactagagccccaagtccacctgtccttccatctgacaagaaacttagatgtgtgttctccggatatatcaaacctgagaatttctggctcagagataccatggcttaaacctgagatataaagaaaactgtacaccaaaaatggaactccaactttcttcgctaactctgcttttcctttccaggcctgcttttcctttccaggcagaaaattgggagatccttctcagaagaaactgaaatgtcttcaataaagatccccagataatacactgaggtctcccaaatgaaaagctagtcaggcttctaaggcctcacactgagtgctatcagttaacagaaatcctgcttcccaaattagcaggccaggggaccaccaca

SEQ ID NO: 671433 - DNA, 2779 bp, Homo sapiens
  misc_feature 1128, 1129, 1130, 1131, 1132, 1133, 1134, 1135, 1136, 1137,1138, 1139, 1140, 1141, 1142, 1143, 1144, 1145, 1146, 1147,1148, 1149, 1150, 1151, 1152, 1153, 1154, 1155, 1156, 1157,1158, 1159, 1160, 1161, 1162, 1163, 1164, 1165, 1166: n = A,T,C or G
  misc_feature 1167, 1168, 1169, 1170, 1171, 1172, 1173, 1174, 1175, 1176,1177, 1178, 1179, 1180, 1181, 1182, 1183, 1184, 1185, 1186,1187, 1188, 1189, 1190, 1191, 1192, 1193, 1194, 1195, 1196,1197, 1198, 1199, 1200, 1201, 1202, 1203, 1204, 1205: n = A,T,C or G
  misc_feature 1206, 1207, 1208, 1209, 1210, 1211, 1212, 1213, 1214, 1215,1216, 1217, 1218, 1219, 1220, 1221, 1222, 1223, 1224, 1225,1226, 1227: n = A,T,C or G
atcttggctcactgcaacctccgcctcctgggttcaagtgattctcctgcctcagcctcctgagtagctgagattacaggcatgcaccaccacgcccagctacttttgtatttttagtagatacagaatttcaccatgttggtcagggttgtctcaaactcctgacctcagatgatcagcctgcctcggcctcctaaagtgttgtgattacagacgttagccaccatgcccagccttaaggcagatcttttgaaccggactattgaaatttaacttaaatgtcagaaatctttaaaaggtggacacgctaaactaagcacttttctggataaatttaacactcaggaaaatagaagagatttagaaaatccacaaaaagaggtccatgctaccaccaccaggtccacattgtaatttaaagaaatcaagagagacatccttttatgtcaaactgtcaatttcttaactatttgagtgtttacttacatggtttgtacagttgcttcttcttatttctacaactaagaataaaaaaaaaaaaactggtcacttctgatacaaataccataaaataaaagtagttgttaacatcttactgattactcctatgaaaaatgagacaaaattccattaaaaaaaaaatttttcaataacatataatttaaattatctggcatgattaatttcataagtcaaatctaaaaacttagattttcatttagtttactttttgtttctattacatacaaatgaaagaatcctcatgtacaaaagaaaagggcaaaaaaattaggccagatgaaaaatttagctaataaaaagtttaactgttgcatatatgagccatgatccattagtattctctcattctgcatttacacatagcttactttaattatcagactctaagagctaacagttctaaaaactacttcctgaccagacacctatctctagatgcaacagaatccctgtaagcatcttgaaccacacttagtggttatctactaatatgtcactaaaaacaaaacaaaattaaaaaatggtctttacacaactggaaagtaacctatcttaaatttgttttcttttttgagatggagtctcactctgtcacctaggctcgannnnnnnnnnnnnnnnnnnnnnnnnnnnnnnnnnnnnnnnnnnnnnnnnnnnnnnnnnnnnnnnnnnnnnnnnnnnnnnnnnnnnnnnnnnnnnnnnnnntctccttttgggcaggacaaattttagataggtttttaaagaattagtaactttaggccgggcgcggtggctcacgcctgtaatcccagcactttgggaggccgaggcaggcrgatcacgaggtcaggagatcgagaccatcccggctaaaacggtgaaaccccgtctctactaaaaatacaaaaaattagccgggcgtagtggcgggcgcctgtagtcccagctacttgggaggctgaggcaggagaatggcgtgaacccgggaggcggagcttgcagtgagccgagatcccgccactgcactccagcctgggcgacagagcgagactctgtctcaaaaaaaaaaaaaaaaaaaaaaaaaaaggaattagtaacttttttcctttttccgagacagggtctccctttgttgcccaggctggagtgcagtggtgcaattatagttaactgcagcctcaaactcctgagctcaagcgatcctctgcctcagcctcctgagtaggtaatacgaaaggcgcatgccaccaggcctggctaatttgttatttaacctttttgtagacatgaggtcttgctatgttgaccaggctaaaaataaacaaatcttaattaacttaaatagttctaacactttgggcattcaggaaaacagctccatgtatgttgtgaagtaatgggaagtatatggcagtggataaactttgaatgaaaatattaaacaaggccttaggagaaaagtgtaatatgcttattatagatacattaatttaaaaaattctctggcttaatatcattaattatactcaaattagactttgatttaaacacaggtcctaaatttggattaaatataatagattgaccacaaatttatttcgtctccctccggaagcctcatcagtcataaaataaaggttacacccatgaccagcacagaaggttgacagagataatttttaataaatgctgagacataaaaagtagataaaggagtggtaaataacacagaaacacaactttggtgcctacagaaagtgactggaacagaagcgagccagtttgtcttgcagaactaaaggcaggttgtgaaattacaggcaaatggcactttggaaagtagggtaaaatgtgaaaaaaaaaaaaaagccagcaaggtcagttgcaaatctctaactagagccccaagtccacctgtccttccatctgacaagaaacttagatgtgtgttctccggatatatcaaacctgagaatttctggctcagagataccatggcttaaacctgagatataaagaaaactgtacaccaaaaatggaactccaactttcttcgctaactctgcttttcctttccaggcctgcttttcctttccaggcagaaaattgggagatccttctcagaagaaactgaaatgtcttcaataaagatccccagataatacactgaggtctcccaaatgaaaagctagtcaggcttctaaggcctcacactgagtgctatcagttaacagaaatcctgcttcccaaattagcaggccaggggaccaccaca

SEQ ID NO: 671434 - DNA, 2779 bp, Homo sapiens
  misc_feature 1128, 1129, 1130, 1131, 1132, 1133, 1134, 1135, 1136, 1137,1138, 1139, 1140, 1141, 1142, 1143, 1144, 1145, 1146, 1147,1148, 1149, 1150, 1151, 1152, 1153, 1154, 1155, 1156, 1157,1158, 1159, 1160, 1161, 1162, 1163, 1164, 1165, 1166: n = A,T,C or G
  misc_feature 1167, 1168, 1169, 1170, 1171, 1172, 1173, 1174, 1175, 1176,1177, 1178, 1179, 1180, 1181, 1182, 1183, 1184, 1185, 1186,1187, 1188, 1189, 1190, 1191, 1192, 1193, 1194, 1195, 1196,1197, 1198, 1199, 1200, 1201, 1202, 1203, 1204, 1205: n = A,T,C or G
  misc_feature 1206, 1207, 1208, 1209, 1210, 1211, 1212, 1213, 1214, 1215,1216, 1217, 1218, 1219, 1220, 1221, 1222, 1223, 1224, 1225,1226, 1227: n = A,T,C or G
atcttggctcactgcaacctccgcctcctgggttcaagtgattctcctgcctcagcctcctgagtagctgagattacaggcatgcaccaccacgcccagctacttttgtatttttagtagatacagaatttcaccatgttggtcagggttgtctcaaactcctgacctcagatgatcagcctgcctcggcctcctaaagtgttgtgattacagacgttagccaccatgcccagccttaaggcagatcttttgaaccggactattgaaatttaacttaaatgtcagaaatctttaaaaggtggacacgctaaactaagcacttttctggataaatttaacactcaggaaaatagaagagatttagaaaatccacaaaaagaggtccatgctaccaccaccaggtccacattgtaatttaaagaaatcaagagagacatccttttatgtcaaactgtcaatttcttaactatttgagtgtttacttacatggtttgtacagttgcttcttcttatttctacaactaagaataaaaaaaaaaaaactggtcacttctgatacaaataccataaaataaaagtagttgttaacatcttactgattactcctatgaaaaatgagacaaaattccattaaaaaaaaaatttttcaataacatataatttaaattatctggcatgattaatttcataagtcaaatctaaaaacttagattttcatttagtttactttttgtttctattacatacaaatgaaagaatcctcatgtacaaaagaaaagggcaaaaaaattaggccagatgaaaaatttagctaataaaaagtttaactgttgcatatatgagccatgatccattagtattctctcattctgcatttacacatagcttactttaattatcagactctaagagctaacagttctaaaaactacttcctgaccagacacctatctctagatgcaacagaatccctgtaagcatcttgaaccacacttagtggttatctactaatatgtcactaaaaacaaaacaaaattaaaaaatggtctttacacaactggaaagtaacctatcttaaatttgttttcttttttgagatggagtctcactctgtcacctaggctcgannnnnnnnnnnnnnnnnnnnnnnnnnnnnnnnnnnnnnnnnnnnnnnnnnnnnnnnnnnnnnnnnnnnnnnnnnnnnnnnnnnnnnnnnnnnnnnnnnnntctccttttgggcaggacaaattttagataggtttttaaagaattagtaactttaggccgggcgcggtggctcacgcctgtaatcccagcactttgggaggccgaggcaggcagatcacgaggtcaggagatcgagaccatcccggctaaaacggtgaaaccccgtctctactaaaaatacaaaaaattagccgggcgtagtggcgggcgcctgtagtcccagctacttgggaggctgaggcaggagaatggcgtgaacccgggaggcggagcttgcagtgagccgagatcccgccactgcactccagcctgggcgacagagcgagactctgtctcaaaaaaaaaaaaaaaaaaaaaaaaaaaggaattagtaacttttttcctttttccgagacagggtctccctttgttgcccaggctggagtgcagtggtgcaattatagttaactgcagcctcaaactcctgagctcaagcgatcctctgcctcagcctcctgagtaggtaatacgaaaggcgcatgccaccaggcctggctaatttgttatttaacctttttgtagacatgaggtcttgctatgttgaccaggctaaaaataaacaaatcttaattaacttaaatakttctaacactttgggcattcaggaaaacagctccatgtatgttgtgaagtaatgggaagtatatggcagtggataaactttgaatgaaaatattaaacaaggccttaggagaaaagtgtaatatgcttattatagatacattaatttaaaaaattctctggcttaatatcattaattatactcaaattagactttgatttaaacacaggtcctaaatttggattaaatataatagattgaccacaaatttatttcgtctccctccggaagcctcatcagtcataaaataaaggttacacccatgaccagcacagaaggttgacagagataatttttaataaatgctgagacataaaaagtagataaaggagtggtaaataacacagaaacacaactttggtgcctacagaaagtgactggaacagaagcgagccagtttgtcttgcagaactaaaggcaggttgtgaaattacaggcaaatggcactttggaaagtagggtaaaatgtgaaaaaaaaaaaaaagccagcaaggtcagttgcaaatctctaactagagccccaagtccacctgtccttccatctgacaagaaacttagatgtgtgttctccggatatatcaaacctgagaatttctggctcagagataccatggcttaaacctgagatataaagaaaactgtacaccaaaaatggaactccaactttcttcgctaactctgcttttcctttccaggcctgcttttcctttccaggcagaaaattgggagatccttctcagaagaaactgaaatgtcttcaataaagatccccagataatacactgaggtctcccaaatgaaaagctagtcaggcttctaaggcctcacactgagtgctatcagttaacagaaatcctgcttcccaaattagcaggccaggggaccaccaca

SEQ ID NO: 671435 - DNA, 628 bp, Homo sapiens
ttatcattcatttaagtaaaattcaacattgttttcttcaaagaagaaattgcgcatttcactctacctatttaactctggaaaattttacaaactgagcatgccattttttagtatgaattcctttatttcagctgccctgctaactttgcatgatgagcagaaaaaaatgaaacagaatggttagttctggaatatgaaaaagtgtccaagaagaggagtagtcttgagaagtagggaacaggatgaagtcactaggggacagaaggrtaggagggagtgggaccagacaaacactgagctctgcatgcacacgtaacagtctaaaatagtcatccagcacgcagactctaggtcaagataaccaagatgaattgcaacttctccacaagcaacatgactttgggtaaggtatttaacttttctgagtcttagtttcttcaactgataaataaaaatgacggtcatatctacttcataaaattgtgataactgattaatacatgtaatgaatagtgtttggcatttagcttaataataagacatttcattaaaatattagctacttttgttagctagcaactctcaattttgcctaaagctgaccccatatctagggttaggtttt

SEQ ID NO: 671436 - DNA, 628 bp, Homo sapiens
ttatcattcatttaagtaaaattcaacattgttttcttcaaagaagaaattgcgcatttcactctacctatttaactctggaaaattttacaaactgagcatgccattttttagtatgaattcctttatttcagctgccctgctaactttgcatgatgagcagaaaaaaatgaaacagaatggttagttctggaatatgaaaaagtgtccaagaagaggagtagtcttgagaagtagggaacaggatgaagtcactaggggacagaaggataggagggagtgggaccagacaaacactgagctctgcatgcacacgtaacagtctaaaatagtcatccagcacgcagactctaggtcaagataaccaagatgaattgcaacttctccacaagcaacatgactttgggtaaggtatttaacttttctgagtcttagtttcttcaactgataaataaaaatgayggtcatatctacttcataaaattgtgataactgattaatacatgtaatgaatagtgtttggcatttagcttaataataagacatttcattaaaatattagctacttttgttagctagcaactctcaattttgcctaaagctgaccccatatctagggttaggtttt

SEQ ID NO: 671437 - DNA, 630 bp, Homo sapiens
aacagtcttgcctttgcttaacaccatgatgccttctttagaggagactcattcttactggagaaatgcaagttaactcatagcccaggggaatcaagtcttgcagctggtgtcatggtcgtattccctgagaatgttctcccttgtttgttttgaatactgctgtggtggcatctgcgatgtcaccatcaccacgactgacagaaaaattatcctggaataaaagttccttttctttggtctctcaggaaaaagaaaaatcttcagagcgataccacatgtttgttctgtgccttttagcttacagtgtctttcacgtaaattacttttggtctcctaacaaccttgtggtgatgtgtgtgtgcaagaggggatatggcacaaagaaggctcatggaggagaggaattacttcctctggattcatggggtccctgaggctcagagaggtcaagcaacatgatgaagttcacacaggccgtcaaagataaygcaggaactcagatggtggtttcctgcctccagacttcatgcacttctaactttcttgagcgcccagggacaccacatctttaggtcaacagaaatggagggagcctctttgtttggttactataccttctgaagtcca

SEQ ID NO: 671438 - DNA, 929 bp, Homo sapiens
agcaaacttgctgcattagaagaaaaggccatttcttcacatatttgaatacaggcaccaacacataattccacatgaaattatatttctttttttttttttgagatggagtttcgctcttgttgcccaggctggagtgcagtggcgtgatctcggctcactgcaacctctgcctcccaggttcaagtgattcttctgcctcaacctccagagtagctaggattacaggcgcacaccaccacgcccagctaattttctattttttttagtggagatggggtttcgcaacattggtcagggtggtctcaaacacgtgacctcaagtgatccacctgcctcagcctcccaaagtgctgggattaccggcgtgagccaccgtgcccggcctgaaattatatttcaaagaatttttttcacctgtaaaattttaaacatccaaaataaaaggaaaagatttattttcaagggttgactttctgtagaaactctctgagacacgtaatagttgataaatgtcttacattcttatttatatgacgtatggactcaatctacattcaaatcaggttctgctctttggcagcctaaaatgtcagggaatctagctggctccagaatatccagttatttaattgcagaggtacatctagttcacttattaaatcctgtgctcccaagctctaacacagttggcattcataaatagtatttacttagagtaagagtgaaaaatcaggactgaaggacagagatcattactgcaaacattataaggatttcaacagaacagctggaattttaatacagctttattctgcagtcactctgcagtttgtttacttttatttcattaaawttcaacttaacattttaggcaatgaaaaaactgactcctaaaaacatttctctctaattaaagatcagtttgt

SEQ ID NO: 671439 - DNA, 665 bp, Homo sapiens
cacaacacatgggaattatgggagatatgatttaagttgaaatttggggaagggcacagccaaacmatatcaatcccttccttacactttatacaaaaataaactcaagatggattaaagacttaaatgtaaaacccaaaaccataaaaaccctagaagaaaacctaggcaataccactcaggacataggcatgggcaacaatttcacggcaaaaatgctaaaagtaattgaaagaaaagctaaaattgacaaatgggatttaattaaaataaagagctgcacagcaagagaaactatcatcagagtgaagagcaaacctacagaatgggagaaaatttttgcaatctacccatctgacaaagggctaatatccagattctacaagggacttaaataaatttactagaaatttaacatgactaattgagttccaaagtttttgttgccaggcagcacttatcagaacatgcatgcactggtcctattatttaattaattcttagattgtattgccataatgtaaagaatattttcaagttataacaaatgtgaatgccaaataatagcacaggtgttgtaaaatttttctggaaaattccaatgtatgcaaatgaacattgtaacttagaagaagtgctgaaaaaatggaggaaaatggatattt

SEQ ID NO: 671440 - DNA, 665 bp, Homo sapiens
cacaacacatgggaattatgggagatatgatttaagttgaaatttggggaagggcacagccaaaccatatcaatcccttccttacactttatacaaaaataaactcaagatggattaaagacttaaatgtaaaacccaaaaccataaaaaccctagaagaaaacctaggcaataccactcaggacataggcatgggcaacaatttcacggcaaaaatgctaaaagtaattgaaagaaaagctaaaattgacaaatgggatttaattaaaataaagagctgcacagcaagagaaactatcatcagagtgaagagcaaacctacaraatgggagaaaatttttgcaatctacccatctgacaaagggctaatatccagattctacaagggacttaaataaatttactagaaatttaacatgactaattgagttccaaagtttttgttgccaggcagcacttatcagaacatgcatgcactggtcctattatttaattaattcttagattgtattgccataatgtaaagaatattttcaagttataacaaatgtgaatgccaaataatagcacaggtgttgtaaaatttttctggaaaattccaatgtatgcaaatgaacattgtaacttagaagaagtgctgaaaaaatggaggaaaatggatattt

SEQ ID NO: 671441 - DNA, 665 bp, Homo sapiens
cacaacacatgggaattatgggagatatgatttaagttgaaatttggggaagggcacagccaaaccatatcaatcccttccttacactttatacaaaaataaactcaagatggattaaagacttaaatgtaaaacccaaaaccataaaaaccctagaagaaaacctaggcaataccactcaggacataggcatgggcaacaatttcacggcaaaaatgctaaaagtaattgaaagaaaagctaaaattgacaaatgggatttaattaaaataaagagctgcacagcaagagaaactatcatcagagtgaagagcaaacctacagaatgggagaaaatttttgcaatctacccatctgacaaagggctaatatccagattctacaagggacttaaataaatttactagaaatttaacatgactaattgagttccaaagtttttgttgccaggcagcacttatcagaacatgcatgcactggtcctattatttaattaattcttagattgtattgccataatgtaaagaatattttcaagttataacaaatgtgaatgccaaataatagcacaggtgttgtaaaatttttctggaaaattccaatgtrtgcaaatgaacattgtaacttagaagaagtgctgaaaaaatggaggaaaatggatattt

SEQ ID NO: 671442 - DNA, 617 bp, Homo sapiens
tgagatcactatggtttgaatgacttcctccaaaaatttgctttagaarcttaatcccaaatgcaacagtgctgggagtttgggcctcctgggagatgtttaggtcatgagaggtctgccctcatgaatggatcaatgctgctataaaaaggacttgcagaagtgggtgccatctcttcctcttttctgccatgtgaggacaaagagttccttcccgcattgaggatgcagcattcatggtgtcattttggaagctgagactgggccctcaccagacaccaaaccttccagcacactgatcttggacttctcagccccccgaactgtgagaaatacattttatttataaattactcagtctcaagtattctcttatagtagcacaaaatgaacgaagaaaggacgttactacattaaaatgttgccttttctaagtttctcctcttatatgaaactgggtacctctttagttacttttttctatatgtagtatgattctgactagcaaatcagcatgcaactgccacttcagcaattaataatttcctaaatatccttgcaaatttccataatcatcatggttaaaatatagtgaatctactaataaagatatgtca

SEQ ID NO: 671443 - DNA, 617 bp, Homo sapiens
tgagatcactatggtttgaatgacttcctccaaaaatttgctttagaaacttaatcccaaatgcaacagtgctgggagtttgggcctcctgggagatgtttaggtcatgagaggtctgcmctcatgaatggatcaatgctgctataaaaaggacttgcagaagtgggtgccatctcttcctcttttctgccatgtgaggacaaagagttccttcccgcattgaggatgcagcattcatggtgtcattttggaagctgagactgggccctcaccagacaccaaaccttccagcacactgatcttggacttctcagccccccgaactgtgagaaatacattttatttataaattactcagtctcaagtattctcttatagtagcacaaaatgaacgaagaaaggacgttactacattaaaatgttgccttttctaagtttctcctcttatatgaaactgggtacctctttagttacttttttctatatgtagtatgattctgactagcaaatcagcatgcaactgccacttcagcaattaataatttcctaaatatccttgcaaatttccataatcatcatggttaaaatatagtgaatctactaataaagatatgtca

SEQ ID NO: 671444 - DNA, 617 bp, Homo sapiens
tgagatcactatggtttgaatgacttcctccaaaaatttgctttagaaacttaatcccaaatgcaacagtgctgggagtttgggcctcctgggagatgtttaggtcatgagaggtctgccctcatgaatggatcaatgctgctataaaaaggacttgcagaagtgggtgccatctcttcctcttttctgccatgtgaggacaaagagttccttcccgcattgaggatgcagcattcatggtgtcattttggaagctgagactgggccctcaccagacaccaaaccttccagcacactgatcttggacttctcagccccccgaactgtgagaaatacattttatttataaattactcagtctcaagtattctcttatagtagcacaaaatgaacgaagaaaggacgttactacattaaaatgttgccttttctaagtttctcctcttatatgaaactgggtacctctttagttacttttttctatatgtagtatgattctgactagcaaatcagcatgcaactgccacttcagcaattaataatttcctaaayatccttgcaaatttccataatcatcatggttaaaatatagtgaatctactaataaagatatgtca

SEQ ID NO: 671445 - DNA, 650 bp, Homo sapiens
cgcgcatgtatgcacatgtgtttcattgtgactatgcatctggaggggtttgtgaatgtgctcccatgtcaacgtgcatgtaaatgacaacagctcacgttcactgagcttgccacatgctctatgttctcacctgaatccttctatttaatctccaccttattaaaagagaatattgtcgtccccacttacagatgaggaaactgcatgttagattagtttccacagtgggatgtgagctagactcctatgggcagaatgactttttgctcctagaattctaaatcatgcatcaactcttagcaggaaagagattttcacctttcctcaaggtcatgtggcagagataagaacccacttctttcctgtaaagcccttcaaaacattggctctgaaataaaagtgtaacattttctaatgcagtctattatcagacgactgccacaaacattaggaagatgcacgcagtccactccagagaaagaaaagtackctggtgctgcacagcattaaatggcatgtctcctgactcctctgctttctaataaaggaagcgatgactctgatctctgaagacacctgttctaaacccaccatgtgacttacctctttaaaaaacaaacaaataacatttaatttgctcgtaaaga

SEQ ID NO: 671446 - DNA, 615 bp, Homo sapiens
taaatttgtacctagttttgttttattttatttaaagacgacttaatccacccttaaccagttatctgggcttcaggttccatagaacaagatctgctcctgattaggatagaggaatgggacaaatatttttttcccacttttaattttttcttctattaaatcaaaatgataaagtgctacataaatctcagttgtgtgtgtgtgtgtgtgtgtctgtatgtttattttaacttctaaaaaagaaataggattccaagtcactttgttagtctttacatagagtcattcgcttacsttgaatggcgatgatttaaggcatctctagagttcatcatgtagagatagctattatatgaattttacaactggaggaactcaacaccaaagaatgtttctgaagaataaatgtttgtttgctatttctgccttataaaagtcagtcatcgacccaatagttagaatcctgatgtgaattgcacccttgctgatagatggtccagctcccactagaaaatagaaaacaactcttgtttttattaaacggatctcatgaacacctcagatctactatcatgtggctgcccatttttattaatatgtgcttatgttaat

SEQ ID NO: 671447 - DNA, 645 bp, Homo sapiens
ccacttactaaatgttattatttatagtgaagttcctttgcttctattcccataaataacatttatataagagaaattgttataccctgtggaaaaataatatttcaaagctcgtagactaccaaccatttcaactgactttacttacactcctaggtcaatatagcttttttcaattaaaatttttgaaggtaaagagaatgcaatcaagcaggtaacagcaaaagttgaagtgtggaagtgaggaggttactatcggaaatgaagaggagtatgtgaatctatcaccagctggtaaatttaacaatagagtcaccgatgaaagaatgggcaaaaaggatggggcgagaaaaacagaggaaaggaacagagtgtgagattcttagggtggaaacagaaaggggataatgaaggcagtgcccagaaccggtttcctagtgaaaaggttaattaaatctttcgtggcatggaattcttaaagaactacttttctgactgtgtgtgcatatattcatgtgtgttctttgtaaacacacagagatgataaygattctctcctaacgtcctttttacactaatgctttagagcattttttaaaaaggacagtaatttacttttttaagcttcttacatgtcgagcggaa

SEQ ID NO: 671448 - DNA, 1367 bp, Homo sapiens
aagacattgaaagacgtgaataaggatgttgaaagacatccttatttcaccttcagctcatcacttagtactcgtatacaagttatgagtaaatatacatattgggggtgcacagtccaaaaagtttcaatgtcactgctccagagcaatgtatattaaacttctgggaatatgaaccctatacagaatctggtgaaagccaaaggtgcaaccttaaataaatacgcattcatgctaactgtcacgagggcttggtcacctccaggaggcccacccgcatatttatttctttatttttatttatttatgagaaggaatctcactctgttgcccaggctggagtacagtgacgccatcttggctcactgcaacctccccctcccaggttcaagcgattctcctgcctcagcctgccgagtagctgggactacaaggcacccgccacagcgccgccaccacacccggctaattttttgtatttttagtgaagacggggtttcaccgtgttagctagaatggtctcaatctcctgacctcgtgatccacccgcctcggcctcccaagtgctgggattacggctgtgatccaccgcgcccggccacgacccacataccttttaagggtccgtggactccaaaggtaagatagattccgtactcttgttagaaatgttggcttatactttgatttatgttaaatggtggcgagtgctttctgttcattcttctgaagtgaacagaagcaatgaaaacctaagtctcatattttagacaagaaacgaacataatgggaaggttcacaggcggcataggatttccccactcgctgcgcataccctggatgggcagcagggggcagcggagcacaagaggaccgggaccacagcgcccrgaggctgataccccgcagctgatccacaacactgcaagctcaccccaaagaggggcagtgtgtgaacccagaggactctcgtcaagtgaaataagacaggcatgaaggacaaacaccgcaggatctcactcctatctggaaccttaaaaagttgatttcatggaggtatagagtaaaatagtgaccaggcgctggggagagcaggggggaggcagggaaccagagaagttggtcatccgggcaaagtcacagttaggaggaatgatttctgttacacagtagggtgaccataggaaataatgtagtgtatatttcaagataaccagaagatactcaatgttgtcaccacaaagaataaacgtctaaagtaatggatgtggtaattattccaatttgatcattgtgtgcattgaaacatcacactgtaccccatacacttgtacaatgataatgtgtcaattatacatttttttaaa

SEQ ID NO: 671449 - DNA, 1367 bp, Homo sapiens
aagacattgaaagacgtgaataaggatgttgaaagacatccttatttcaccttcagctcatcacttagtactcgtatacaagttatgagtaaatatacatattgggggtgcacagtccaaaaagtttcaatgtcactgctccagagcaatgtatattaaacttctgggaatatgaaccctatacagaatctggtgaaagccaaaggtgcaaccttaaataaatacgcattcatgctaactgtcacgagggcttggtcacctccaggaggcccacccgcatatttatttctttatttttatttatttatgagaaggaatctcactctgttgcccaggctggagtacagtgacgccatcttggctcactgcaacctccccctcccaggttcaagcgattctcctgcctcagcctgccgagtagctgggactacaaggcacccgccacagcgccgccaccacacccggctaattttttgtatttttagtgaagacggggtttcaccgtgttagctagaatggtctcaatctcctgacctcgtgatccacccgcctcggcctcccaagtgctgggattacggctgtgatccaccgcgcccggccacgacccacataccttttaagggtccgtggactccaaaggtaagatagattccgtactcttgttagaaatgttggcttatactttgatttatgttaaatggtggcgagtgctttctgttcattcttctgaagtgaacagaagcaatgaaaacctaagtctcatattttagacaagaaacgaacataatgggaaggttcacaggcggcataggatttccccactcgctgcgcataccctggatgggcagcagggggcagcggagcacaagaggaccgggaccacagcgcccggaggctgataccccgcagctgatccacaacactgcaagctcaccccaaagaggggcagtgtgtgaacccagaggactctcgtcaagtgaaataagacaggcatgaaggacaaacaccgcaggatctcactcctatctggaaccttaaaaagttgatttcatggaggtatagagtaaaatagtgaccaggcgctggggagagcaggggggaggcagggaaccagagaagttggtcatccgggcaaagtcacagttaggaggaatgatttctgttacacagtagggtgaccataggaaataatgtagtgtatatttcaagataaccagaagatactcaatgttgtcaccacaaagaataaacgtctaaagtaatggatgtggtaattattccaatttgatcattgtgtgcattgaaacatcacactgtaccccatacacttgtacaatgataatgtgtcaattatacattttttwaaa

SEQ ID NO: 671450 - DNA, 606 bp, Homo sapiens
tccccaaatctactctgcttccagcagttttcacctttgtaagcatgatcatccctgtagctgtacaaattagaaaaaaggtttctcttccataagacactttactttcatctactggaaaattttcataatacagttgacccttgagaacacaggtttgaactctgttggtcgacttacgcacaaattttcttcaatttttttttcaataagttacaccaaatgtgcctgcgtctcctgcctccccttccatctcctccatctcttctgcctctgccacccctgagccagcaagaccaacccctcccatttctcctcctcctcagtctactyaacgtgaagacaatgaggatgaagacccttatgatgatccacttccacttaatgaatagtaaatgtattttctcttccttttgattttctttataacatgttcttttctctagcttactttattgtaagaatacactacataatacatataacatacaaaatatgtattaattgactgtttatattactggtaaggcttccagtcaatcgtaggctattagtaattaaattttaggggaatcaaaagttctacaagaattttcaactgggcaa

SEQ ID NO: 671451 - DNA, 2072 bp, Homo sapiens
acttgtgattatttacgtgtttatcattgcaacttgatggcgtgctcctttgttacagaaggaaatgtaccgttgactaattctaaaacatttagtgaggcttagtaatgtgttaaacagtgtgccagatgggagaaacacaaagatgaaaacacggacaaatgattaaatgaatgaacaaacacattggcttaacctggtagattctgttcccaaaagggttgacttaacttacaaaactatccctaggatgtagatttggagtgggagcccgactgcttgctgtagctccaactttctgatcttcagttggatcatccaaggcatagggctaataaaacctgccctgcatacctcttagggttattgtgaagtcaaaataatactgcccataaaagaatttagtaaactgtacagagctaagcagatgtcagaggccgtcaccttgactttaaacttgttccaggtggtgcaaggccaaaaaaatatgtgatctgctcatgtgtatgttttgcagcctctttctcagggcagcagagcgggtgcagattgcaaatccaccaatggtgcacaagaaaccagaaggtaggagctgactccagcctggaaaatgttcaacagattctgtgctgctcatgaggggcactgacagtttattctcacatcctggcttctggcctgaatagaatccccacagattggagtactgggtgtaagcatgtgttaggtgcctgtgtgcctgctcttgcacggcagggctgcacagagaaaagccctgatgcaggagatggacagagaagactggacagaggccttaaagtcctttggatgttggggatgagcgttaactttgtcagtatcaggaagctgggaacttctctctcgataagaaagaatagaaaaagaaaatctatctttttattcaattcaattcaataaatgtttattgaacacctactgtatgcctggcattgtattaagtactgtggggaccgtaaagatgaacaagatcctaaccaygtcctctgggagcaggtgtgccctcaataaaccgaggtacgaagggacatgacttgtaaagaagtcaacccactgaaggttgtcctctgagcctcatgggctctcttggttttggctgcatctggatttccacacaaagctcatctccttccttggcctccacttgaaaattaaacactctaagcatgcattgctgagtgtcagtgagcatgtctgatgctttactggagctgtggcatgtgatggtggaggggtaaaattctcaatacttagagtttacccaaaacatgccaattccacagtttctccctaatctcccctcccagccccagccatgaggcctgaacctcttccatcctcccccaggcctctcccttactcctgccattttcctttggcagattcatttccttccatagaaaccctgggatccaaacaggactgggaggttctttctccttccatagacccctcatcaataccaagtgtcttctttaccaagaagctctttccctgcaaaggaacgctaagagaagcacttggaaaatatacacagacataggatttaccagttgctatggctgtgtacccgcaaattcacatgttgaaacctaacccccaatgtgatggtattaggaggtgtggcttttgggaggtattaggtcatgagagcagagccatcatggatggggttagtgcctttataaaacagaccccagaggactcccttgcctcttctgccatgtgaggactcagcaggaaggcatcacctggcaatcaggaaacaggccctccccagacaataaatctgccagcaacttgacgttggacttcccagcctccagaactgtgagaaagaaatttctattgtttatcagccactcaatttatggtattttgtgatagcagcttgaatggactaagacatgaattacttactagttttttttgattgaggtaaaataggcatacataacacaaaattcaacattttacccattttaatgtgtgtaattcagtggcttttagtacattcaaaatgttgtgcatca

SEQ ID NO: 671452 - DNA, 2072 bp, Homo sapiens
acttgtgattatttacgtgtttatcattgcaacttgatggcgtgctcctttgttacagaaggaaatgtaccgttgactaattctaaaacatttagtgaggcttagtaatgtgttaaacagtgtgccagatgggagaaacacaaagatgaaaacacggacaaatgattaaatgaatgaacaaacacattggcttaacctggtagattctgttcccaaaagggttgacttaacttacaaaactatccctaggatgtagatttggagtgggagcccgactgcttgctgtagctccaactttctgatcttcagttggatcatccaaggcatagggctaataaaacctgccctgcatacctcttagggttattgtgaagtcaaaataatactgcccataaaagaatttagtaaactgtacagagctaagcagatgtcagaggccgtcaccttgactttaaacttgttccaggtggtgcaaggccaaaaaaatatgtgatctgctcatgtgtatgttttgcagcctctttctcagggcagcagagcgggtgcagattgcaaatccaccaatggtgcacaagaaaccagaaggtaggagctgactccagcctggaaaatgttcaacagattctgtgctgctcatgaggggcactgacagtttattctcacatcctggcttctggcctgaatagaatccccacagattggagtactgggtgtaagcatgtgttaggtgcctgtgtgcctgctcttgcacggcagggctgcacagagaaaagccctgatgcaggagatggacagagaagactggacagaggccttaaagtcctttggatgttggggatgagcgttaactttgtcagtatcaggaagctgggaacttctctctcgataagaaagaatagaaaaagaaaatctatctttttattcaattcaattcaataaatgtttattgaacacctactgtatgcctggcattgtattaagtactgtggggaccgtaaagatgaacaagatcctaaccatgtcctctgggagcaggtgtgccctcaataaaccgaggtacgaagggacatgacttgtaaagaagtcaacccactgaaggttgtcctctgagcctcatgggctctcttggttttggctgcatctggatttccacacaaagctcatctccttccttggcctccacttgaaaattaaacactctaagcatgcattgctgagtgtcagtgagcatgtctgatgctttactggagctgtggcatgtgatggtggaggggtaaaattctcaatacttagagtttacccaaaacatgccaattccacagtttctccctaatctcccctcccagccccagccatgaggcctgaacctcttccatcctcccccaggcctctcccttactcctgccattttcctttggcagattcatttccttccatagaaaccctgggatccaaacaggactgggaggttctttctccttccatagacccctcatcaataccaagtgtcttctttaccaagaagctctttccctgcaaaggaacgctaagagaagcacttggaaaatatacacagacataggatttaccagttgctatggctgtgtacccgcaaattcacatgttgaaacctaacccccaatgtgatggtattaggaggtgtggcttttgggaggtattaggtcatgagagcagagccatcatggatggggttagtgcctttataaaacagaccccagaggactcccttgcctcttctgccatgtgaggactcagcaggaaggcatcacctggcaatcrggaaacaggccctccccagacaataaatctgccagcaacttgacgttggacttcccagcctccagaactgtgagaaagaaatttctattgtttatcagccactcaatttatggtattttgtgatagcagcttgaatggactaagacatgaattacttactagttttttttgattgaggtaaaataggcatacataacacaaaattcaacattttacccattttaatgtgtgtaattcagtggcttttagtacattcaaaatgttgtgcatca

SEQ ID NO: 671453 - DNA, 2072 bp, Homo sapiens
acttgtgattatttacgtgtttatcattgcaacttgatggcgtgctcctttgttacagaaggaaatgtaccgttgactaattctaaaacatttagtgaggcttagtaatgtgttaaacagtgtgccagatgggagaaacacaaagatgaaaacacggacaaatgattaaatgaatgaacaaacacattggcttaacctggtagattctgttcccaaaagggttgacttaacttacaaaactatccctaggatgtagatttggagtgggagcccgactgcttgctgtagctccaactttctgatcttcagttggatcatccaaggcatagggctaataaaacctgccctgcatacctcttagggttattgtgaagtcaaaataatactgcccataaaagaatttagtaaactgtacagagctaagcagatgtcagaggccgtcaccttgactttaaacttgttccaggtggtgcaaggccaaaaaaatatgtgatctgctcatgtgtatgttttgcagcctctttctcagggcagcagagcgggtgcagattgcaaatccaccaatggtgcacaagaaaccagaaggtaggagctgactccagcctggaaaatgttcaacagattctgtgctgctcatgaggggcactgacagtttattctcacatcctggcttctggcctgaatagaatccccacagattggagtactgggtgtaagcatgtgttaggtgcctgtgtgcctgctcttgcacggcagggctgcacagagaaaagccctgatgcaggagatggacagagaagactggacagaggccttaaagtcctttggatgttggggatgagcgttaactttgtcagtatcaggaagctgggaacttctctctcgataagaaagaatagaaaaagaaaatctatctttttattcaattcaattcaataaatgtttattgaacacctactgtatgcctggcattgtattaagtactgtggggaccgtaaagatgaacaagatcctaaccatgtcctctgggagcaggtgtgccctcaataaaccgaggtacgaagggacatgacttgtaaagaagtcaacccactgaaggttgtcctctgagcctcatgggctctcttggttttggctgcatctggatttccacacaaagctcatctccttccttggcctccacttgaaaattaaacactctaagcatgcattgctgagtgtcagtgagcatgtctgatgctttactggagctgtggcatgtgatggtggaggggtaaaattctcaatacttagagtttacccaaaacatgccaattccacagtttctccctaatctcccctcccagccccagccatgaggcctgaacctcttccatcctcccccaggcctctcccttactcctgccattttcctttggcagattcatttccttccatagaaaccctgggatccaaacaggactgggaggttctttctccttccatagacccctcatcaataccaagtgtcttctttaccaagaagctctttccctgcaaaggaacgctaagagaagcacttggaaaatatacacagacataggatttaccagttgctatggctgtgtacccgcaaattcacatgttgaaacctaacccccaatgtgatggtattaggaggtgtggcttttgggaggtattaggtcatgagagcagagccatcatggatggggttagtgcctttataaaacagaccccagaggactcccttgcctcttctgccatgtgaggactcagcaggaaggcatcacctggcaatcaggaaacaggccctccccagacaataaatctgccagcaacttgacgttggacttcccagcctccagaactgtgagaaagaaatttctattgtttatcagccactcaatttatggtattttgtgatagcagcttgaatggactaagacatgaattasttactagttttttttgattgaggtaaaataggcatacataacacaaaattcaacattttacccattttaatgtgtgtaattcagtggcttttagtacattcaaaatgttgtgcatca

SEQ ID NO: 671454 - DNA, 2072 bp, Homo sapiens
acttgtgattatttacgtgtttatcattgcaacttgatggcgtgctcctttgttacagaaggaaatgtaccgttgactaattctaaaacatttagtgaggcttagtaatgtgttaaacagtgtgccagatgggagaaacacaaagatgaaaacacggacaaatgattaaatgaatgaacaaacacattggcttaacctggtagattctgttcccaaaagggttgacttaacttacaaaactatccctaggatgtagatttggagtgggagcccgactgcttgctgtagctccaactttctgatcttcagttggatcatccaaggcatagggctaataaaacctgccctgcatacctcttagggttattgtgaagtcaaaataatactgcccataaaagaatttagtaaactgtacagagctaagcagatgtcagaggccgtcaccttgactttaaacttgttccaggtggtgcaaggccaaaaaaatatgtgatctgctcatgtgtatgttttgcagcctctttctcagggcagcagagcgggtgcagattgcaaatccaccaatggtgcacaagaaaccagaaggtaggagctgactccagcctggaaaatgttcaacagattctgtgctgctcatgaggggcactgacagtttattctcacatcctggcttctggcctgaatagaatccccacagattggagtactgggtgtaagcatgtgttaggtgcctgtgtgcctgctcttgcacggcagggctgcacagagaaaagccctgatgcaggagatggacagagaagactggacagaggccttaaagtcctttggatgttggggatgagcgttaactttgtcagtatcaggaagctgggaacttctctctcgataagaaagaatagaaaaagaaaatctatctttttattcaattcaattcaataaatgtttattgaacacctactgtatgcctggcattgtattaagtactgtggggaccgtaaagatgaacaagatcctaaccatgtcctctgggagcaggtgtgccctcaataaaccgaggtacgaagggacatgacttgtaaagaagtcaacccactgaaggttgtcctctgagcctcatgggctctcttggttttggctgcatctggatttccacacaaagctcatctccttccttggcctccacttgaaaattaaacactctaagcatgcattgctgagtgtcagtgagcatgtctgatgctttactggagctgtggcatgtgatggtggaggggtaaaattctcaatacttagagtttacccaaaacatgccaattccacagtttctccctaatctcccctcccagccccagccatgaggcctgaacctcttccatcctcccccaggcctctcccttactcctgccattttcctttggcagattcatttccttccatagaaaccctgggatccaaacaggactgggaggttctttctccttccatagacccctcatcaataccaagtgtcttctttaccaagaagctctttccctgcaaaggaacgctaagagaagcacttggaaaatatacacagacataggatttaccagttgctatggctgtgtacccgcaaattcacatgttgaaacctaacccccaatgtgatggtattaggaggtgtggcttttgggaggtattaggtcatgagagcagagccatcatggatggggttagtgcctttataaaacagaccccagaggactcccttgcctcttctgccatgtgaggactcagcaggaaggcatcacctggcaatcaggaaacaggccctccccagacaataaatctgccagcaacttgacgttggacttcccagcctccagaactgtgagaaagaaatttctattgtttatcagccactcaatttatggtattttgtgatagcagcttgaatggactaagacatgaattacttactagttttttttgattgaggtaaaatakgcatacataacacaaaattcaacattttacccattttaatgtgtgtaattcagtggcttttagtacattcaaaatgttgtgcatca

SEQ ID NO: 671455 - DNA, 562 bp, Homo sapiens
aaaagaagaggcttcccttaatcctgctttgagtttagtgcttattactttagaataactaaatacatatgcagttattttgcatcttgcctcacttcagtatgtcttaratatgttgtatttcaagaactatttctattttaaatatttagcatgatttgctattgatactgttgtcttggttgggtgttttttgtttgtttgtttgttttgtttttaagtataacacatacaagaagcaagtgcactgagatggtctcaaagcaatgataccctaatggcaatgagcacacctaccacccagatcttggttggtttctttctttttttcccccgccctgggctgaagtgcagtggtacaaacacggctcactgcagcctcgacctcccaggttcaagtgatcttcccgcctgagctccctaagtagctgggactacaggtgtgtgtcaccacgtctgcttaatttttgtattctttttttagtagagacagagtgtcaccatggtgcccagccagtccttaagctcctgaggcccttgagctcctgagctgaagtgatcc

SEQ ID NO: 671456 - DNA, 563 bp, Homo sapiens
agtcagttataccagatttttttgccattctctgcacctttgcttattcagttagttgccttagcctgaaggcaagttaaccaccttccccattatgctcactgacatcttaccaaggtttttaaacccttttcagtaccataatatttcagtatcattcaaagactagggccacatgccaaagcactatgctgggggttgagattaaaatagttgtaagactgcacccatctgtggtcttgtcaagcataagggacaaacgtataaggacttttacttagccttttcttggaatttggcttattcttctacccctcccctacctgcccactggtcttgaactcctgacctcaagtgatccacccacccgggcctcccaaagtgctaggattacaggtgtgagccaccgcacctttacctstttaccttgttttatagtcatatacatgtcttcagataggatatcagcttgttgaggccagatacctgttttaggcatcttttatttctcttcccacattacttttagttggatttcatcttcttctttttatatctattat

SEQ ID NO: 671457 - DNA, 1115 bp, Homo sapiens
  misc_feature 5, 6, 7, 8, 9, 10, 11, 12, 13, 14, 15, 16, 17, 18, 19, 20,21, 22, 23, 24, 25, 26, 27, 28, 29, 30, 31, 32, 33, 34,35, 36, 37, 38, 39, 40, 41, 42, 43, 44, 45, 46, 47, 48,49, 50, 51, 52, 53, 54, 55, 56, 57, 58, 59, 60, 61, 62,63: n = A,T,C or G
  misc_feature 64, 65, 66, 67, 68, 69, 70, 71, 72, 73, 74, 75, 76, 77, 78,79, 80, 81, 82, 83, 84, 85, 86, 87, 88, 89, 90, 91, 92,93, 94, 95, 96, 97, 98, 99, 100, 101, 102, 103, 104: n = A,T,C or G
taaannnnnnnnnnnnnnnnnnnnnnnnnnnnnnnnnnnnnnnnnnnnnnnnnnnnnnnnnnnnnnnnnnnnnnnnnnnnnnnnnnnnnnnnnnnnnnnnnnnncaatcagaattttcaatgtgtaagttgcatataacaaattcaacaattttaaatgtacaattgtatgagtttgaaagcatgatatgaaatatttctaccactgcaaaatgtttcttcatgacctattgcagtcaacccctcccctccactgctcctggtaaccattgctctgctttctgataatatagttaccttttccagaatgtcacataaataaatcatagaatttttagtcttgtatctggcctcttagcattttgagttctatctttgttgttgagtgtattagtagttaatcagcggttaattgcttttaaagctgtgcaaaattctgttgcaaggatataccacaatttgtcaactctcaagttgataaaggcttatttttcagtatttggatgttataaataaagctgttatgaatatccagatatgagccttcatgtgaacacatcttttcattgaccttgagtaaatccttaaggaaggatttctgtgtcttataaggaactgctaaagtgttttgcaaagtgtctatatcattttgctttcataccagccacatgtgagacttcttgaattttatcttcaatatttgtgggtgttagctattttgatttatatttagtggtatctcattgtggttttactttgcatttctctaatgaatagtaagcatcctttttgaaatctgcttatttcttaatcttacattcttttctaagtttttgcagatttttcttttaaattgagttgtttatattctccttgttgagttcaatgtctcatatattctggacaggagtccttytgaagaatatattcataagagttatatctgatagtctgatgcttgtcttttgtattgtagtttgttatttttttaaatgctatctgatccagttttgaggttgtggctagaagcagatctgttccacttctagagcagctgattaagtccacatgacaatcacttgctttattggactctcgttttctggagttactatg

SEQ ID NO: 671458 - DNA, 659 bp, Homo sapiens
cttcatttgaagttcaaaggtgtattcaggatcctcaaagcattttaaccttgccgcttaaaacccaatttaccgtgaaatgggaattttgctgcattgttaaactgtagtggaaaccatgctatagtaataaaggttatataagagagaaattgaaattaaatgtgtttttaaatttcaaaaaaaaatcaatctttaggatgacttaaaaattgatttgccatgtaaaatgtatctgcattttttacacaaaacttgttttaagcataaaattttaaaactgtactacttgatgtattatacattttgaaccatatgtattaaaccataaacagtataatgttgttataataaaacaggcaataaatttataaataaaagctgaactactctctatattaatagttattaagaaatatgattataaaacagcagtccccaacccttctggcaccaggaatcacttttgtggaagacaatttttccacagacggcggcagggatggtttcaggatgaaaccgttctacctcagatcatcaggcattagattatcrtaaggagcaggcaacctagatcccgcatatgcgcagttcgcaatagggttcacgctcctgtgagaaactaatgccactgctgatcagacaggaggcggagctca

SEQ ID NO: 671459 - DNA, 1628 bp, Homo sapiens
tatactcatgagattttcactggaattaagtggtcagccacttatcagacctttagcaaagaactgtccatttttaaaataatatttaatgctaggatgtgttggcagtaaggagcagtgttagtagaaaagagatatattaattttcattgatctttctgaaaccctttaaagtatttttggttttagatcatattaaaggggtgattttaatgagctaatcacttgaagattattcttatctgtgtawgtgtgtgaagcaaagtattctggaaaacataaattcaggtagatattttgaatatatctagatgttaaaggtaattattatccacacaaaatatgttttgaactaatccattctaaatgtcttaagaaaagtacatttaccgtaatgttcaactaacttgggggaggaaaacatgaaagttaaaattttcacatcctgttaagacttcaatttattttaaacaaatccttagtcctttgttggtaatggctacatttatttttgtgcacagagatgtatgaaacagatttactctaaccccagcataaagaagttaggagccagagagttagctgtgaaacatctgattctcaagaagttccttcacctctctgagtcataagttttagaatttttaaagtagaactaattcaggagtgacatgctatggcactggatgacatattggcaccttctctcaaagtcctggggaaaatgtcttatagaaggaatactaccttgaaactaactttgatagccttcaggggaggttgaataatacaacagaaataaagtttgcattggctatttctcattctggaagctatgattatcttcattgctgaatagaaaccaaagacttaataatgaggcataaatacttctctataggactcaattgcaagggcacaaatttaaggcaggactgacacatagtttcctacaatgatttctgcaagtgatttggtaaagcctcacttcttaaatcaggagtgctcccagcatgatggcaaacgagaagtatccccaaggtgtgctaatacccacatctagctcaagagaaaggagtggaaattaagacatatttcctccagattcaatgatgtaaaaaagtttactgagagtatcccatagtacagagcacagtttggggcacttctgagcacattaatgagctaagtcctcaactaattcagccaccgtcacttaagtaactgcatgagaaaatccactcagcagctaagccccaaacatatggagaatgtgcttctctcagctcaaataggcagtggtccttggggaactgagaagaaagagtgtaatgaggaggtggtgactgtactggatcttgaagattggcacttgggagagaagggtgagagatgctaccagagggagaagggggcattttggaccacagaaggaactctactatttgagccaaatttaataccaaacctctctttctagtctccaaataaccctttatgcttatataggtgtggaaaaaaagttagatattacatttgaactcaattgaacatggacacaaacaacggtcaccaagtcccagaacaggtcatgtgagccccttgaggaattcatccagcactgtttc

SEQ ID NO: 671460 - DNA, 1628 bp, Homo sapiens
tatactcatgagattttcactggaattaagtggtcagccacttatcagacctttagcaaagaactgtccatttttaaaataatatttaatgctaggatgtgttggcagtaaggagcagtgttagtagaaaagagatatattaattttcattgatctttctgaaaccctttaaagtatttttggttttagatcatattaaaggggtgattttaatgagctaatcacttgaagattattcttatctgtgtatgtgtgtgaagcaaagtattctggaaaacataaattcaggtagatattttgaatatatctagatgttaaaggtaattattatccacacaaaatatgttttgaactaatccattctaaatgtcttaagaaaagtacatttaccrtaatgttcaactaacttgggggaggaaaacatgaaagttaaaattttcacatcctgttaagacttcaatttattttaaacaaatccttagtcctttgttggtaatggctacatttatttttgtgcacagagatgtatgaaacagatttactctaaccccagcataaagaagttaggagccagagagttagctgtgaaacatctgattctcaagaagttccttcacctctctgagtcataagttttagaatttttaaagtagaactaattcaggagtgacatgctatggcactggatgacatattggcaccttctctcaaagtcctggggaaaatgtcttatagaaggaatactaccttgaaactaactttgatagccttcaggggaggttgaataatacaacagaaataaagtttgcattggctatttctcattctggaagctatgattatcttcattgctgaatagaaaccaaagacttaataatgaggcataaatacttctctataggactcaattgcaagggcacaaatttaaggcaggactgacacatagtttcctacaatgatttctgcaagtgatttggtaaagcctcacttcttaaatcaggagtgctcccagcatgatggcaaacgagaagtatccccaaggtgtgctaatacccacatctagctcaagagaaaggagtggaaattaagacatatttcctccagattcaatgatgtaaaaaagtttactgagagtatcccatagtacagagcacagtttggggcacttctgagcacattaatgagctaagtcctcaactaattcagccaccgtcacttaagtaactgcatgagaaaatccactcagcagctaagccccaaacatatggagaatgtgcttctctcagctcaaataggcagtggtccttggggaactgagaagaaagagtgtaatgaggaggtggtgactgtactggatcttgaagattggcacttgggagagaagggtgagagatgctaccagagggagaagggggcattttggaccacagaaggaactctactatttgagccaaatttaataccaaacctctctttctagtctccaaataaccctttatgcttatataggtgtggaaaaaaagttagatattacatttgaactcaattgaacatggacacaaacaacggtcaccaagtcccagaacaggtcatgtgagccccttgaggaattcatccagcactgtttc

SEQ ID NO: 671461 - DNA, 597 bp, Homo sapiens
cataaattgaataatccggaagtggaagacagatttgatttcaaggagagtagcactctactgtggactgctgtatcctagtgcaatgtgaaatgggtcttaaaaatccagaaattgtaaaaaaaaaagttggaatttatgaaataggcatgggaaaatgtggcaaatacttttaaaagtttgctttgggtcttaaatgtctttccaaaatagtcatggccatttatgctaaagattataaygcctttcaactccagcaaaagttaaagggtgtcatatattttgtaccatgacaatcaaacattggtataaattcagaaataaattgccagataactaaaaacatctacttactagagtaaaaaatgtaatttttgaagacatataattaaaattttgtcagaacattttcttgaataaaaattatgatgctaaaaactttatacacaaatgtagaacagatgtctagatgaagatatataaataaccctaaatatgtactttttcttttaatttttcagtgcaaatgcaattacatcagacaacatgcttagaagtaaataatatgtagcagatatatctgtaattcagtgtcaa

SEQ ID NO: 671462 - DNA, 1766 bp, Homo sapiens
aaaaaagaattatgaaatatggtcatctatgctatgttaattttctgttgctttttataaaagcatatttcaatgtgaacatatattaaatatgaatatactaaatataaaatgagtcattttcattaaatatgtaacattccacatttgaaagaaaactgatttttttaatattatgaaacagatatgtcatgggacgtaacgatggtggatacctaatgattgattcaaaaactgctgaaatcaaatttgtcaaaaatatgaaccgagattctactttcatagttaacaaaacaatcacagctgaggttctggccatagatggtaagaaaaatatttgaatcatttcagaggaatgttatcgtaattgatgtttctttatgcatagatgattatgattattcaacatattatctttaccactggagagagagaattatcttaggagtgttgggcctcaagtttgaggcagctgaatccgggagagaaaactaagagtttcaacttctcagtggagattgaaccagtgaattctgtgttaggtccctgtggtttgctgtggttgaagcagaaattttttgactgacagaaatccctgggtttgagggaatggataaggattcatagacaaagcgcatcagggaatctcaacttgaacgtcaggtgcttttgtgaggtacctatagagacctcatgtacttttatcattgaacaatgcaatttcctcttctggaatgttttaaaataatattcattgagtgtatgtgtttccccaagtataaaattaatttatgttgaaggtaataaaaaagataacaccccccaaaagaaataagtatcaaaaagattgccatttgggaaaacaagaaaagaagtagtaagggtaacaacagaaatgacacataatgcccccacagagagagttttatttcattattttttattttcagcatttaaaatttttctttaataaactttaacattttgagtaataaaaatatacaattttttattccaaataaaaaatgtgtgctttagaagcagaaacytttcacacattgattacaagtgaaatcaacacatttaagaaagttactatttttgtgctgattttatttgaaattggtgaattcatcatcttactggtcttgggttcgagcatattaaattaattctcaattaattatagttagagacatcagcctatttggtaaatttcaatttgctttttacaagatgcagaaataggatgactatttttacttctgaggataatatagtatttcatgagaagacacactgagttggctacagaaaagagaaatgtaaaagattctccttttttgtacaactttgttctatacatttctttaactctaaaacattgttcttacagaatacacgggtaaaacttctacaggcacggtatatgttagagtacccgatttcaatgacaattgtccaacagctgtcctcgaaaaagatgcagtttgcagttcttcaccttccgtggttgtctccgctagaacactgaataatagatacactggcccctatacatttgcactggaagatcaacctgtaaagttgcctgccgtatggagtatcacaaccctcaatggtgagtaacagtaaagttgcttctataaatgcaaactgctcctttgtatttccagaagaataaggaagatcatttaagagcaggtccttccaaaagtaactggaaaaattctttgcaatgaagatgtggctgtagcattgtgaat

SEQ ID NO: 671463 - DNA, 1766 bp, Homo sapiens
aaaaaagaattatgaaatatggtcatctatgctatgttaattttctgttgctttttataaaagcatatttcaatgtgaacatatattaaatatgaatatactaaatataaaatgagtcattttcattaaatatgtaacattccacatttgaaagaaaactgatttttttaatattatgaaacagatatgtcatgggacgtaacgatggtggatacctaatgattgattcaaaaactgctgaaatcaaatttgtcaaaaatatgaaccgagattctactttcatagttaacaaaacaatcacagctgaggttctggccatagatggtaagaaaaatatttgaatcatttcagaggaatgttatcgtaattgatgtttctttatgcatagatgattatgattattcaacatattatctttaccactggagagagagaattatcttaggagtgttgggcctcaagtttgaggcagctgaatccgggagagaaaactaagagtttcaacttctcagtggagattgaaccagtgaattctgtgttaggtccctgtggtttgctgtggttgaagcagaaattttttgactgacagaaatccctgggtttgagggaatggataaggattcatagacaaagcgcatcagggaatctcaacttgaacgtcaggtgcttttgtgaggtacctatagagacctcatgtacttttatcattgaacaatgcaatttcctcttctggaatgttttaaaataatattcattgagtgtatgtgtttccccaagtataaaattaatttatgttgaaggtaataaaaaagataacaccccccaaaagaaataagtatcaaaaagattgccatttgggaaaacaagaaaagaagtagtaagggtaacaacagaaatgacacataatgcccccacagagagagttttatttcattattttttattttcagcatttaaaatttttctttaataaactttaacattttgagtaataaaaatatacaattttttattccaaataaaaaatgtgtgctttagaagcagaaacttttcacacattgattacaagtgaaatcaacacatttaagaaagttaytatttttgtgctgattttatttgaaattggtgaattcatcatcttactggtcttgggttcgagcatattaaattaattctcaattaattatagttagagacatcagcctatttggtaaatttcaatttgctttttacaagatgcagaaataggatgactatttttacttctgaggataatatagtatttcatgagaagacacactgagttggctacagaaaagagaaatgtaaaagattctccttttttgtacaactttgttctatacatttctttaactctaaaacattgttcttacagaatacacgggtaaaacttctacaggcacggtatatgttagagtacccgatttcaatgacaattgtccaacagctgtcctcgaaaaagatgcagtttgcagttcttcaccttccgtggttgtctccgctagaacactgaataatagatacactggcccctatacatttgcactggaagatcaacctgtaaagttgcctgccgtatggagtatcacaaccctcaatggtgagtaacagtaaagttgcttctataaatgcaaactgctcctttgtatttccagaagaataaggaagatcatttaagagcaggtccttccaaaagtaactggaaaaattctttgcaatgaagatgtggctgtagcattgtgaat

SEQ ID NO: 671464 - DNA, 1766 bp, Homo sapiens
aaaaaagaattatgaaatatggtcatctatgctatgttaattttctgttgctttttataaaagcatatttcaatgtgaacatatattaaatatgaatatactaaatataaaatgagtcattttcattaaatatgtaacattccacatttgaaagaaaactgatttttttaatattatgaaacagatatgtcatgggacgtaacgatggtggatacctaatgattgattcaaaaactgctgaaatcaaatttgtcaaaaatatgaaccgagattctactttcatagttaacaaaacaatcacagctgaggttctggccatagatggtaagaaaaatatttgaatcatttcagaggaatgttatcgtaattgatgtttctttatgcatagatgattatgattattcaacatattatctttaccactggagagagagaattatcttaggagtgttgggcctcaagtttgaggcagctgaatccgggagagaaaactaagagtttcaacttctcagtggagattgaaccagtgaattctgtgttaggtccctgtggtttgctgtggttgaagcagaaattttttgactgacagaaatccctgggtttgagggaatggataaggattcatagacaaagcgcatcagggaatctcaacttgaacgtcaggtgcttttgtgaggtacctatagagacctcatgtacttttatcattgaacaatgcaatttcctcttctggaatgttttaaaataatattcattgagtgtatgtgtttccccaagtataaaattaatttatgttgaaggtaataaaaaagataacaccccccaaaagaaataagtatcaaaaagattgccatttgggaaaacaagaaaagaagtagtaagggtaacaacagaaatgacacataatgcccccacagagagagttttatttcattattttttattttcagcatttaaaatttttctttaataaactttaacattttgagtaataaaaatatacaattttttattccaaataaaaaatgtgtgctttagaagcagaaacttttcacacattgattacaagtgaaatcaacacatttaagaaagttactatttttgtgctgattttatttgaaattggtgaattcatcatcttactggtcttgggttcgagcatattaaattaattctcaattaattatagttagagacatcagcctatttggtaaatttcaatttgctttttacaagatgcagaaataggatgactatttttacttctgaggataatatagtatttcatgagaagacacactragttggctacagaaaagagaaatgtaaaagattctccttttttgtacaactttgttctatacatttctttaactctaaaacattgttcttacagaatacacgggtaaaacttctacaggcacggtatatgttagagtacccgatttcaatgacaattgtccaacagctgtcctcgaaaaagatgcagtttgcagttcttcaccttccgtggttgtctccgctagaacactgaataatagatacactggcccctatacatttgcactggaagatcaacctgtaaagttgcctgccgtatggagtatcacaaccctcaatggtgagtaacagtaaagttgcttctataaatgcaaactgctcctttgtatttccagaagaataaggaagatcatttaagagcaggtccttccaaaagtaactggaaaaattctttgcaatgaagatgtggctgtagcattgtgaat

SEQ ID NO: 671465 - DNA, 442 bp, Homo sapiens
gcgccactgcactccagcctgggtgacagagcgagactccgcttcaagaaacaaaacaaaacaaaaaaacccaaagttatacatatatcttgaaatggcttgcaaaaataatgatctatcactttttgttactcaaagtaatggaaatcgtacacctcttcccttaggatcatcatatgaaaatatccagaaatgtaacaaaatgcaataattgtgcatccgtagagaacagtctgcacttgaataattggtaaaaggagctgttaacccaatttccttttagatggtatgtaatgtggttcaycatgcttctgtgatccctggaatgatttatttaaaaagatttgcaaaatttttatcatatgctgatttaaacccagacttcagaagggtaaatgtagatgaacataactttctaaaagttttacttatgctgtggacc

SEQ ID NO: 671466 - DNA, 642 bp, Homo sapiens
tgagctacgtttaaaatatttctgacacctcattagggtcactatgtatcatggtgacaaccatatttaaattaaagacagtattaatggagagaaaatatagggggaggataaagataaaagcatragacaactacagtttggagatacagatataaatacacacatacaaaaacattaaataaatgtcattaaattttattaaatgcatagattggtatgtctggttaaagaacaaacaggggaatgctggctaaaatatacatcgttttaaaaataaagcttcaggctgagaagaaggaaaactaggaaaatatgagtaaatgcaagtggttacacccatagcctaaatccataacatcccaaagaaataaagagcactaatgattaagctcaaataaagacaggagctttgcacaaaaagagatacagaaaatcacaagaaagccgaatgaaaaaatcagacacaatcaattaccgagaaaagttgccccctctctgcagcagtagattggttaaaactatcaaacaaaatgttaatttctttccatatataatgtggcaggctaaataacaatctcccaaagatgtccacaccctgttctccaaaacctgtgaatatgtggactttacatggtaaga

SEQ ID NO: 671467 - DNA, 478 bp, Homo sapiens
tttttgacattaaaagtaatggcattactttttgacattaaaaattgcaatgacaatttctagcccctattttattgtgtgtgtgtgcgtgcacatgtgtgtgtgtgtgtgtgcatctgtgtgtgtgtgtatctgagaatgcattaagggaccaaattatgtccttcatttctgtttcttttataaccattactatactacacacatacatggtactgaataaaagtttgttgaatcaataattgttaaatggaatctaacaatgacaattctagcccctattttattttgtgtgtgtgtgtgtgtgtgtgtgtgtgtgtgtttgcatgtgtgggtgtgtacctgtgaatccattaagggaccaaattatgtctttcatttctgtttcttctataacaatcactgtacsgcacacatacatggtactgaataaaagtttgttgaatcaataattgttaaatggaatctgtaaaaatat

SEQ ID NO: 671468 - DNA, 644 bp, Homo sapiens
gtgtgcaactggatcttaaaataaagatttcacttaggcactttctaaaatgctatgctgacacaagtttcaaaaattttcagattactatgcaaaaagacagttagaataatgagcaagaagattgaaagagagaaacagcaaggcaaatgaagagaacatgtaaacaatgcaggaagcaagcattgaggaaataaagctcatttctatctttgactcccctctgctcctgtctactgaacattctgtgaacatrttctgtacattcatcatttctaatgcagcatttcatttcttcacccaaatgatcgctgctccaatttttcctacctgaaatatcattcggagtatttaaggcttaactcagttgccatggcttctctaagtagtttctaatcccaccagcatataaccccaaaatatagcatttacttcattttagaccttggaaaatattattgaattcatatctgcttcctctactcaattttaaggtctttcattataggtaactactttattgatcttagcaactcagtgcaagagaggacaacttgtatgtaatttcctataaataatgaaatgtaatgtactcaagtggaaatactatggacttggaaaccacagaaaagggtttttgtctg

SEQ ID NO: 671469 - DNA, 1505 bp, Homo sapiens
ttaaataggatggaatagaattgagtggcaagattatttaagaacagaaagaaaaagaaagcttgtaataaacagctatgctaaaattatacataataactaacaaggctaaatttaagggaaaatgttccaattgtaaagatggttgtatctcaataccgtatatttaactaactgattttttttattgtcatttttgccccaccataatgtaagctccacagggcagacattattgccattttttcttcactgttgtgtccctcgtgctaagaataatgcctttcacatagtaggtgctcagatctatatttgttagatgaatgaataaataaacgaatttaggaaagtgactttttaaaaaggtaatgcttcatcttgtattccctttgtcatcaggataaagttattcaaagcacatttcactcacatcccttagcttttctgcctcacaagaactctctggatgcaaaagacctataagaaaagcctatctcagttgggccgggtgagtggctcacacctgtaatgccagcactttgggaggctgaggtgggtggatcacgaggtcaggagttcaagaccagcctcaccaayatagtgaaaccccatctctactaaaaatacaaaaattagccgggcgtggtggcacatgcctgtaatctcagctacccaggaggctgaggcaggagaatctcttgaacgcgggaagtggaagttgcagtgagctgagatcacaccactgcactccagcctgggtgagagagcaagactccatctcaaaaaaaaaaaaaaaaaaaaaaaagcctagcaaacagaaaaggacataagttttcactgaacagattttgggaggaaaaatgacagaaagtagttacgaggttggttttcatatttctcaatttcttatttctcaatcaaaagatatttcaaaaatctttttaatttcatttttcttacacagcttaattcaaagtagcttagcaaggcaaagttaggaacactggatatgccctgcaatgccatttctagtcacacttaagactagtgccactctaacaggaactcagtggagaaaatcatcactcttttagcggcaagtaaaaccatacacaaaagattgaagagaaaatacagtagcttacctctttgggtaacaaagctagttaatgatcagcttattcagagaatataaagcaatgttcagactcctagggacccattccctgtattagtcagggttctgcagagaaacagacccaacagaaagtatgcatagacagaagaagtttattataagggattagtttgtgaggttatggatactgacaagtctcaagaactgcagtcagtaaactagagaccctggatggtgatggtataaatccattcagagtccacaggcttacgcaccaggagagctgttggtgtggctctagtccaaaggctgacaggctcaagacctaagaagtgctgtgtttcaggttgagtccaaaggcagaaaa

SEQ ID NO: 671470 - DNA, 596 bp, Homo sapiens
tacaaacaacatcactagcacaatatctatacatatcttagaattgttttttaactaaatgtgatattctcaaacacatttcttaattcttttgattgaatgattgggttttgaatataatttctaataaattctctgtattaatatatatccaagaaaacacacacttccttccccatgtctcacaaaaactttgatcatttcacattagtttctaacatgttccagctctgttgccctttctccattcttagaactaaatatctactctgagcagatggcataatatattattgctagacacccaccaaagcctccctgcttttgttttgatgtgaccttcattatatttatatctgtctgttgtataaaatgaaaggtgatttattatatttgcctcctagaatctttacctcaactatgccctctgcccacaattccattctccacagtgtttctctctaatgctctctatatactctttatatctgtgtatcaaactggtttagaaagaacacaacccccacttacayttaactttaattttcatgtaattattaaatctcaatcaatcttatacaccaggatattttgtt

SEQ ID NO: 671471 - DNA, 639 bp, Homo sapiens
taaatatttttcagtcactacttatttagaatagagtgtatgattttattttttatattttgttaagattttatggattctaagggaaaatatttctataaaaccactttgatcattgatatggaattattatactgctcacggattatttagaatgtggtatgctaaatttatgattaaatatttttaattatacagatttaaaataaataataaccaacctgaattttatgggatgtatgcatcaaatattgcacttatgtgtgcacatatttctttgtgactgtgtacattggattagaaaatgttgaacttttaatattcatgttttattaactcatctatattagtataaacatttacattttatagataaaaaataaataatgactatcaattagatggttccctacacctcagaaaatctttacagttgaaagctcagtttcatrattactttaaaatttatattttatgacttaatcataaataccacagtcaataaagaagtatataataagtttttgcattcctttcaactatgattactgtgcttgttaaatatatttgtctataacatcctattacattatgattagcttctagctaagaaaaataaatccttgtcaaaatttaaat

SEQ ID NO: 671472 - DNA, 1095 bp, Homo sapiens
tgaatcattgaactcctaggtatattgggatagttcagttattaaagagaagagaaattggaaaagcctccttaaagccacataatagcatcttttgaaaaatcgatggctataaggctgagtaaggtcaggtaagtcaacttttaattatgtttaaccyttttctggtcttagaataggcattctgtggcattcaggagcaacaatgaagatatagaaagcaatcataaggaataaatatgttgttgtataagatacagtgatattgtattggaatgagtcttcattagacttgtgaaagtcttcttgaattttcactctttttcaacaataaccatttaaaataaaaatactattgagttgaactaaaagcgaagacattaccgtgtcactgagccaccatttcatccccacactgtccatgtctagcaatgtttattatgtgagacaaataagcaatttaattgtttaagccactgttgatcttttgttgtttccagctgaacacctaactcgctgttttgtgtacgtcgaatgaatatgtcaaatgaataaacttaggaaatgcagtattacttagtaaataaaatttatttgtcaaatatacaatttcatttcatgacttcatggaaaaaaggaaataaaggtcattttgctaagaactgagaaaacggattcgctatttctaaagttgagctagctttcttacaaattacttgccatctgaggtccaaatatgcctcctgctctttagaagtcattaatctggcgacctgagcacaaaagttctaactgaaatgtttaattcagtgacatgctatcagcgtgacagaggtagacaactttgtacaaattaagttttaaagtgtaggaccaccaacttttctctaaccagagatgtttttgattgggggcaaattatcgttttgtgaatgtatgacagctcaaattttgggaaaatgcaccaggcccacttaatttaaacttttataaatagcatgctcttagttacaaatccatgggagctagaataaaatgatacgatacaaagttagaaaattgacagtggtttcaaatttggaaaattaaaaataa

SEQ ID NO: 671473 - DNA, 1409 bp, Homo sapiens
ggggaaatgtatgaggacttgtcctcagtaaacaagcgagaccacagcaagacttatgggaggcatgaagaagagtggacaaggagccttttctaagccatatggggaagagctgtagtttacaatgagccatttcccagcacaaaagtgtgggaagattttgggaaaaatagattggtgggttttataacttttattgttctctgaaagaacagaactcaagtaaacttcagcattgtcacagcttataaatatttgcagtgagatagtttctgagagttgtacataatgttgttaattatttattactctatcttattttattttttacaaaattaatgaattatttaaatatattagcaatttttttccaaaacattttttcatagaaattccttctttggtcctaatctgttgggttcctttgatttcttgcctcagcatgcttttaaattatagtaatatatcattactcccaacagatgtgagctcatttttagggttagaaatgtgacttcaaaatgtgctaatatcatgaaaaatagacttgatgcttttgtttaatttcattagtaagcaagattcttttccttattatacatygaaatgaggttaactgatcagtttaaaatgtcttataaaataaatgaccataagtctgatttatagaagcaacacagaagccatgtacttttaaactgaaggaaatgaatggacttgaattttgtgctagaatctatgcttcgtgtaattttttagatatgattaaaattaatgaaatattttattgatattttcccatcagaatttataagtatgctgtaattttacatagtttactgttcttgaatctatattaaaataagaaagattcagtgctgtgatgcacggtgctataatattgattgtttataggcttttttaacattatataaccccagggatacctgcttcattggaatgtattaattttcccaactgggccacaggaattaatataaaacaatagcaaatttctgctagagatccctgttcaacaaagtataacattttaaaattaggttcaattgttccatagaagaaactgtcatctttttctttataaaaaatttgcagaaacaaaatacattgcaatcaatgcaggatattttgatttatttgagatacacacctattaaggaagaatgaacaaatgtttatctaaaatgttgacattttgtggataaagcgctgttctcatttagatatcttttcagcattattataaaccagccatagcacagactgatctgtgctaaaaaatcaatcaaaattttcttctcgctgtagaaatacagttaggaagtatggcaaacaaagcaaaagatacgttttaggcattttagcccatctaattcaaaaacagtcca

SEQ ID NO: 671474 - DNA, 630 bp, Homo sapiens
gcaaatgtccttttcatttgatctttgttttacatatgtatgtgtatgtatgtgtgcctatgtgcatgtatatatgtatgtatgtgtatgtatatattctatcctgaatgcaatggggatgcttctagatgtttaaacaggttatcagttttatcttatctgtgttttagaaagttaatttggtagcagcgtagcaaattaattgttggcctgagttagtgagatgtgagcatttgtgattggtttttatttaaatagcaaaattctgttttgcgctgcataatgaagtttcagtcaactacaaagcacatatacaaagacaatcctgtgagattataatgtgatgaaaaattcctatcacctaatgaattttggctatcatataatgctgwggcacaatgcatgactcgtgtgtttgctgcggtgctggtgtaaaggaacctactgagccatcatttgtataaaagtgtagcacatacaatcacggaccatacataataattgaaaatgataatataccaccatgttacttgtttatgaatttactatactatactatttgtcattgtcttagaatatattccttctacttatgtaatcttctacttatattaaaaatagtaaactata

SEQ ID NO: 671475 - DNA, 600 bp, Homo sapiens
ttaataaaagttcacattttttccattgacaaaaataagttgttacagttttttaaaacaaccatttaactttaagaaactatacttgattccttttcctttgtttttctttttttctttatttgtttatccctctgagtatttgatgagctgtataaatatagatgatttcaatagaaaactacaggtttgtactttatggatcaaaagaggatatgccggtatcatgttcaacactgatttaacctgatctaataaagaattttaaaaagaattaaatttgaatatataagtaaaattttgcatttggacctcttgccttattcatacacactaaatctttgtaattgaagatcttactttaattctttgtagctcactgaaaaaagaggttaacataatctacagaaggtcagggaatcaaaagaaaactgacaatttagtgagctccagcctaagtaaaaacaaacagaatccaaaggctttcaataacatacaccagtgtgtagaagttcatcaatttgggctttrtaatttcatgcttttagtcatgttcatatcctgcttcttcaattatttttattaattacatcaaaataa

SEQ ID NO: 671476 - DNA, 1012 bp, Homo sapiens
gttctgctatggatctttaagtgccacgtttacaattacctgagactatttcaactcttccattcatgaattagcagctggtacccttttaacataggtataatctgtgtggcatcttctttgtccgtttagtaaacacttattaattgattggtgttagaatacgtgctatatgctggaggttcaatggtaatgatggatgcataatcccggcaatctcacagaagactgaaaaaagtaacagagaaatctctgtgataatagatattgatagatactaggaaaaagtataagataacaaggtggaacaactaactaaacctctcttggatgtgggaagatcaagaaagtatttttttaagttcaagagcgtctagttgtttttggtcctgatgaggtaggggatggccatggcagcatctccataaaaaagataatccaaacagtacctctctggctattattagaaaratcagtcatgttaaaggggaatttttttttgagagggtgaagtcgtgactttattttcttttttgaggaaataaacaacatttttgaatggagtgtttatttagtaacagcaacacatagtttcttaagaagaggatgaaccgaaactcctccaaggcagaatgaaacaactttccatttttctcagtttagaccataatttataattttatattatcctttaataaatgtcaaaatacacaaaatacttggagggaaatattcacattattctaaaaccaaaataatttaaggtaaagagtggtttaagattagtattctctacatatcacagtataccatgataccttcctgcagcttataattattactcaaaaatattaatatgtttatgcaaaatgattgggagagtttaaatacctacagcctttgccagtttttgacttcaggcacaggtggaaaccaccatctccttcacagatcttctgttacagcatccgttaaaaaccactagtccagatctcaaatactgatgacagtg

SEQ ID NO: 671477 - DNA, 609 bp, Homo sapiens
ttttttagtatttctctcttttttttttttttaacggagtctggctctgtcgcccaggctggagtgcagtggcgtgattacttttttagtatttcttaaaatgtgcgaataaagggtaaattcacagtcccatcttccaaagataatcattgttaatrttttggtggattgtcattgtgttttttctatgtacctagccatttttaaaaaaatgaaatgtaatttctgcctttcttttctaaagaactgtatatagttagtattttctcgaaagcttgttaatacatgtttgacagtcaaagcatggacccaaataagtaaatagagtattaaagtcttttttctcagccaactgtgctttctttttccttttcctgtctgtaaacagagtttatagctcttataaacagctcttataggaagctttccatttctaaagtagacatgtatagaaggcaacagtaggtttgcctttttatattaaactatgtgagccaactttttatttttattttttattttagattcgggcgtacatgtgcaggtttgttacgtggatgtattacatatactgaggtttgggcttcaactgaacccgtcacccaaata

SEQ ID NO: 671478 - DNA, 654 bp, Homo sapiens
aataggcaatttgttatgcttgagacgaggaaaatattttactcagtaaacacctttgttgaatagaatgctcaaaagtttgccagatcctactctattttattttattttattttttgagactggatcttgctcccaggctggagtgcagaggcatgatcttggcacactgcaacttctgcctcccaggttcaagtgattctcctgcctcagcctcccgagtagctgggattataggcacctaccaccaggcctggttaatatttgtatttttagtagaggtaaagtttcaccatgttggccaggctggtctcgaactcccaaccttaaatgatcctcctgccttggcctcccgaagtgctgagattacaggtgtgagccattgygcctggcctaatttttgtatttttagcaggggaggggtttcaccatgttggccaaaactggtctcaaactcctgacctcaagtgatctgcccacctcagcctccgagagtgctgggattataggcatgagccaccgcacctggccaccaaatcctgctcttataggaagctttccatccctgcttccttgcttgccccactctcccattttttagggccctaaacatagaaacatttattacattatattcaaagtaaaatcaactta

SEQ ID NO: 671479 - DNA, 573 bp, Homo sapiens
gtgaaggatgcttcttgccacctaatcataacagtaacaagcactctgtatcaagaatcgtctttatgtgcatttccctatttctttctcacacatctgttatcttcttagtattcttattttttaggtgaggaaacaaggtaacctacctatggtcatttccttaaatttggaatattccataactaaataaacttatgtgaccatagacctcagtgcatacaactctggctaataagccaagtttctgttttttgtttttttgagatggagtctctgtcacccatgctggagtatggtggcacgatctcrgttcattgcaacctccacctcctgggttcaagcgattctcctgcttcagcctcccaagtagctgggactataggcgcccgccaccatgcctggctaatttttttagtagagacggggtttggggtttcaccatgttagccaggatgatctcgatctcctgacctcttgatccgcccgcctcggcctcccagagtgctgggattacaggcgtgagccaccgcgcccagccaagtttctgtttttatcctttgttattatcca

SEQ ID NO: 671480 - DNA, 664 bp, Homo sapiens
ggagtctcgctctgtcgcccaggccggactgcggactgcagtggcgcaatctcggctcactgcaagctccgcctcccgggttcacgccattctcctgcctcagcctcccgagtagctgggactacaggcgcccgccaccgcgcccggctaattttttgtatttttagtagagacggggtttcaccttgttagccaggatggtctcgatctcctgacctcatgatccacccgcctcggcctcccaaagtgctgggattacaggcgtgagccaccgcgcccggccccttctcttattttcaaagagcaaaatttaaattcttttttttttttttttggctttcctttaaaagtgttggatatttktttccccaccgcagccccctggattgaaggagttactctttgaaggcaacaagcctgtaggctgagttaatgattagacccacatccttgcccaaaaggaaactaaatcagaacaagatcaaccagagaaggctgaagaaaattaataggtggccaaaaaccttataaaaagaaaacatgggaagtttgctgcagaaaggcagcctctggcagccactgtcagagtgggaagaaacacaaaatatcctgtccctcccctttctttgtcgaagtgctcatttgtcctttctccgctatttca

SEQ ID NO: 671481 - DNA, 978 bp, Homo sapiens
ttgaactgtattttacatttggaaagacccagcaagaaaacgacccctctgcttttctgtctggaggcatagccagctcatgggcttcacttcgctctgactagattctacccagaatgctcaattccagtcctgcgccaagtacaaggtgcccgtgctccctgaccctccctgaacctagaaagccaggtccacattaggactcagccccttatgttgaggccaccttccttcttggatgcctgatgtattcctcattatgcaaatggaaaataagcaccagcatatccaggtcagacacataatgtgtataaataattgctgggggaaatacgtagctcagtgaactcatctaaagccaaaagcttaagaaatttgtgtccagcacagacacccacttgctgggagcccatgggcaagtcacttaaactctctgtgtttcatcttaaaatagagacgataagaatgttggcctagaccccagggaatagcaaaagattgtgaagcacttcaaaaattctgtatcaaagtaataggtgctatttagggaaaaggtcatgaaatcatcaaaaacatcctgaaacctcagggaaaaaaaacccactgtgatttcacaaactgtgatctaaaaggcataactaaattcgcagaagcccaaatttacagacatacctaaagcacttgccacagttcatttcagacgactttttctgcagaagtctcattattctccttaagcaaaacatacccatcagatgtttgtgagaattctctggcttcacgtggtttagacaaaaatcctgccttaagatgagttgctgagaaagttctcgaaagcatcgcttattgcaaaccaaattgtattcagcaggtagaaattagcacgtgggctagatacagcctargatcacaaaaacacacatggaagccacaagactgctgctctataattatgtggcttttctgcaatagtcactg

SEQ ID NO: 671482 - DNA, 1363 bp, Homo sapiens
  misc_feature 1126, 1127, 1128, 1129, 1130, 1131, 1132, 1133, 1134, 1135,1136, 1137, 1138, 1139, 1140, 1141, 1142, 1143, 1144, 1145,1146, 1147, 1148, 1149, 1150, 1151, 1152, 1153, 1154, 1155,1156, 1157, 1158, 1159, 1160, 1161, 1162, 1163, 1164: n = A,T,C or G
  misc_feature 1165, 1166, 1167, 1168, 1169, 1170, 1171, 1172, 1173, 1174,1175, 1176, 1177, 1178, 1179, 1180, 1181, 1182, 1183, 1184,1185, 1186, 1187, 1188, 1189, 1190, 1191, 1192, 1193, 1194,1195, 1196, 1197, 1198, 1199, 1200, 1201, 1202, 1203: n = A,T,C or G
  misc_feature 1204, 1205, 1206, 1207, 1208, 1209, 1210, 1211, 1212, 1213,1214, 1215, 1216, 1217, 1218, 1219, 1220, 1221, 1222, 1223,1224, 1225: n = A,T,C or G
cactattctctggagaggatgagcaagctactgacacattcatcatgcactgggatgaaagcactagttcggccaagtatgagattggttgattgtagagacaaaagctacagacaatgttataatgtacaaaatacaataaaaattacttgtgggagaagatggagaaatatctcgattctggtgtgcttgctataaatgaggttcctaaatgtagaaacttgtctggtgcctgtaattgcttcattcagtaatactgtacctgtctgacacctgctcgccttcctttccatttgttttctctattctttttttcccttcttccattttttaattgaataattatattttaggtactaagcacacaccaggracaatttgatgctgtgaataaataggtaaaacatattctccattcttaaggaacctacattctattggggtgaaaattaagacaaacagatatctaagatgagacaaataacattactaaatagcaaggtagtgctggattatttcagaggccaattttagtttatgtttagggtcttggcaaagcagagggaaccctcccaccccatcccccagaaaaataaaatttgcttttgataaacttttctagaatttagcaattgaaaaaaagttaaacagaaccttgattttttaaaaaaacgttcaatatagataccacatttaacattcaaaataagattgtactttgagttagatatatggtgtggtctccaaagttcccagcctagcactgcttacgggcagactgaacagcagatacactatcaggacagcatatatgccttcagagaggaatgcagctcttcctctcgagatgtcttcctctgactcagtgtcctgtcttaaaatgtcatggtgcattgatgaagaagagtgagagtcagagagagagatgtcacccacagaaaaacttcatatcaaattccgttcatgctctttattcattgacacagggatatacatttctgaaaactctatagagcacaataaaaaagagcaggtgagtttattttagaacccaccgtgaactgctgttgataaactggatgagtagcaaaatcccaggcaaaactcagctaggagggcttctccnnnnnnnnnnnnnnnnnnnnnnnnnnnnnnnnnnnnnnnnnnnnnnnnnnnnnnnnnnnnnnnnnnnnnnnnnnnnnnnnnnnnnnnnnnnnnnnnnnnntgttagcttatcttctgttgaaaaataagtgtgatcagagcaagcgttttggtatttccgagaatacttacaaaaaccccaatttttataagcctttaaaaaaagatgttctaagtcctgagtgacctacaaagagac

SEQ ID NO: 671483 - DNA, 616 bp, Homo sapiens
tataattttgatagatcagtaaataacagttcacatcacagaagataaatacatattgactgcaaacctcaaattaaaaatagcaatggaatgttgtccacaaaatcattctgatttttatttagaattacttataaagagaagtagaattatttatatgtatagtcatgtttaatattaaacatttttaaaagaaagtttattccaattatcatcacactgattcaatgaataattctataaatatttaacagtatctattctgagtgaggcactatactgaggactttgtgaacaaaaataaacaactcaaaaataaaaggccaaaattagtgcctttaagaaattcccattagattaaaatattgtacatatatataggcttattatttatttatttattttgagayggagtctcacgctgtcacctaggctggagtgcagtggcgccatctcagctcactgtaacctctgcctcctcagcctcccgagtggctgggactacaggcgcccgccaccacgcccgcctaattttttctatttttagtagagacagggtttcactgtgttagccaggatggtgatccgcacgccttggcctcccaaagtgctggga

SEQ ID NO: 671484 - DNA, 616 bp, Homo sapiens
tataattttgatagatcagtaaataacagttcacatcacagaagataaatacatattgactgcaaacctcaaattaaaaatagcaatggaatgttgtccacaaaatcattctgatttttatttagaattacttataaagagaagtagaattatttatatgtatagtcatgtttaatattaaacatttttaaaagaaagtttattccaattatcatcacactgattcaatgaataattctataaatatttaacagtatctattctgagtgaggcactatactgaggactttgtgaacaaaaataaacaactcaaaaataaaaggccaaaattagtgcctttaagaaattcccattagattaaaatattgtacatatatataggcttattatttatttatttattttgagacggagtctcackctgtcacctaggctggagtgcagtggcgccatctcagctcactgtaacctctgcctcctcagcctcccgagtggctgggactacaggcgcccgccaccacgcccgcctaattttttctatttttagtagagacagggtttcactgtgttagccaggatggtgatccgcacgccttggcctcccaaagtgctggga

SEQ ID NO: 671485 - DNA, 674 bp, Homo sapiens
tcagcctataaggctgattcagttagtggggctatttaaagatttgtctaatgcatgctgagaagttaaacagaagtatcatgtctcttcttgttcttgggtggtgtgaaattcatttgccttggaaggtttttttaactctgtgaatgtttgcactttgaaagaccatattcttaatttggaatggcaactgtgccagatatcttggcaactttacaaaaaataactttaatgttaaaggaaaattatacacaatgaaggctgtcatagtatgttgcattgataggggaaagaatggaattaatataacattttcttgttaacttcaaatttcaaaattaaaacacattttaatacaagcaagaaataaaataataaaattctggaacatataacttttctgctctttatattcgcagtaactagaaacaagaaaatattttctatttaagcaacaactataaccaataatggtgataatttgttattgtgaattcatatgagagaaattagcaatgagagatttttgcagctaaagagaattttaatgcctctctatttagctgaatggacctttggaaatgattccttagttggaatgtgtttgggttacaatgatgttatcaataayaatatagtctaccactattttttcagcacatattgtgtgccaa

SEQ ID NO: 671486 - DNA, 650 bp, Homo sapiens
taaaaatttaatatacatccatacacaccccttagaaaacaaaagaaatctcttaacattgtattgataaagagatgtattctaattaatattttgagcactgggaagtcaagtagaccattagttcagtcaatgacaagaggggctgaatagaatcacagctgcaggtcgccacactagagaacccagaagttagttcagatgttgcttcccaaagatgcttctggataaaacttcaaagaaaatcaatttgtcrtaactttttttttactcattacaggaataagctgtaactgccacacacacacatgcacatacacacaaattcctcctgaattgactctgagtttaaaaagtcagttttactattcctagacaaatgccccatccctcattccaacacacatggaatgaaaacatactaaaatatggttatcttagatccagaggtttgaggtcaattatctatattttattttctgtgttttctagtcttcatcaggtatttatattgaataattctttgttttcagaaaagatatataaaattattatctgtagtgctaatttctagattttgtcccctagtgattaaacatctttgaaatattcatatgaaaacaggaacccagttttttattctattgata

SEQ ID NO: 671487 - DNA, 667 bp, Homo sapiens
gatatcagtctcaggcctgctacattaacttctttctgcacacctgttcatttatttgtgtatacatgtagtcatataattagaagaatrgccattgaatttgtattatagtttcaatttatgttaaagaatactggatcttccctataatatataaaacaaatttaatacctatttttagtggtatgctggagctattctgtaactgcatgttagagccaattattaaatctccaggaattttgtgagctactcacttgcaatcacctataacaggaatattcacaccaaagaaattggcaagttctgcagatcaggacttccccgtctccatgaagagctggttattaaacattgaacagcatacctttgctgttgaaaggaaagagtgagaaagtaaaaagaataaactttcacacctaataaataaaatccctattcagatttatttattcattcatttaaatttatttaataaatgtgaaatacagaagaagttctgcagctaaattcactgactatatggagcttacaatctagtaggagagccagatgatacacacaaacatagtggagcaaaatattctcatcttagtctgtcatttccttcactaccatagaagactcagaaggaagagtagtgttttttcttctcctactctgagaa

SEQ ID NO: 671488 - DNA, 667 bp, Homo sapiens
gatatcagtctcaggcctgctacattaacttctttctgcacacctgttcatttatttgtgtatacatgtagtcatataattagaagaatagccattgaatttgtattatagtttcaatttatgttaaagaatactggatcttccctataatatataaaacaaatttaatacctatttttagtggtatrctggagctattctgtaactgcatgttagagccaattattaaatctccaggaattttgtgagctactcacttgcaatcacctataacaggaatattcacaccaaagaaattggcaagttctgcagatcaggacttccccgtctccatgaagagctggttattaaacattgaacagcatacctttgctgttgaaaggaaagagtgagaaagtaaaaagaataaactttcacacctaataaataaaatccctattcagatttatttattcattcatttaaatttatttaataaatgtgaaatacagaagaagttctgcagctaaattcactgactatatggagcttacaatctagtaggagagccagatgatacacacaaacatagtggagcaaaatattctcatcttagtctgtcatttccttcactaccatagaagactcagaaggaagagtagtgttttttcttctcctactctgagaa

SEQ ID NO: 671489 - DNA, 667 bp, Homo sapiens
gatatcagtctcaggcctgctacattaacttctttctgcacacctgttcatttatttgtgtatacatgtagtcatataattagaagaatagccattgaatttgtattatagtttcaatttatgttaaagaatactggatcttccctataatatataaaacaaatttaatacctatttttagtggtatgctggagctattctgtaactgcatgttagagccaattattaaatctccaggaattttgtgagctactcacttgcaatcacctataacaggaatattcacaccaaagaaattggcaagttctgcagatcaggacttccccgtctccatgaagagctggttattaaacattgaacagcatacctttgctgttgaaaggaaagagtgagaaagtaaaaagaataaactttcacacctaataaataaaatccctattcagatttatttattcattcatttaaatttatttaataaatgtgaaatrcagaagaagttctgcagctaaattcactgactatatggagcttacaatctagtaggagagccagatgatacacacaaacatagtggagcaaaatattctcatcttagtctgtcatttccttcactaccatagaagactcagaaggaagagtagtgttttttcttctcctactctgagaa

SEQ ID NO: 671490 - DNA, 946 bp, Homo sapiens
ttatggaatgatccaaatgccagtccaaagagtttaggaattaatgagtggaccctgaagaacatgtgctcaaatgctatcaagaaaaatcagattggcttctctgtccatacatgtatccccaccaacataggcacgtgcatgcacacacacacacacacacacacacacacacaygcacacatcatgcaaaataaataaatacatgtgatggttatgtatgcctgagaagaggggaattgagctagaatacccacgtttgatctgctccaattacagaaatagctgcacataaatagtctgccctaaatgtgactgacctgccaaggctcagtttacctttgcagttgaagtcctcaaagggcactgtgctttggcaagtttgctttgcatttagagtccctggactttgggcaatattagggtccttctgttccagggatatttccagggcgtggctcttctcacagcatttcgacctccttgtgttgcttacctcctagctcctttttttttagcaccattccagaatcctggactgagaaacatgtgctctactcaggaacacatatgctctactcaggctacccatttgttcatagcctcactgggaagcaatctctatgaattccactttagcatgaacgtgaggaagagcacgagtgtgtgttttcagtcttttccaaattacttggttccttttcccgaggaagatttaagaaacagacagactatgcagttcatgacttcaatttgacattttgatttggtgtaaacaggagagaaaggtgaacaagagagtaacaagctgcagttagcttggagatcctcccctctttggttttcactggtcaagcaccttgtctaatagctggggctatcagcctctgtgttgcctttcccttccaaacagataatattccaaacttcactgagtttttgtctc

SEQ ID NO: 671491 - DNA, 946 bp, Homo sapiens
ttatggaatgatccaaatgccagtccaaagagtttaggaattaatgagtggaccctgaagaacatgtgctcaaatgctatcaagaaaaatcagattggcttctctgtccatacatgtatccccaccaacataggcacgtgcatgcacacacacacacacacacacacacacacacacgcacacatcatgcaaaataaataaatacatgtgatggttatgtatgcctgagaagaggggaattgagctagaatacmcacgtttgatctgctccaattacagaaatagctgcacataaatagtctgccctaaatgtgactgacctgccaaggctcagtttacctttgcagttgaagtcctcaaagggcactgtgctttggcaagtttgctttgcatttagagtccctggactttgggcaatattagggtccttctgttccagggatatttccagggcgtggctcttctcacagcatttcgacctccttgtgttgcttacctcctagctcctttttttttagcaccattccagaatcctggactgagaaacatgtgctctactcaggaacacatatgctctactcaggctacccatttgttcatagcctcactgggaagcaatctctatgaattccactttagcatgaacgtgaggaagagcacgagtgtgtgttttcagtcttttccaaattacttggttccttttcccgaggaagatttaagaaacagacagactatgcagttcatgacttcaatttgacattttgatttggtgtaaacaggagagaaaggtgaacaagagagtaacaagctgcagttagcttggagatcctcccctctttggttttcactggtcaagcaccttgtctaatagctggggctatcagcctctgtgttgcctttcccttccaaacagataatattccaaacttcactgagtttttgtctc

SEQ ID NO: 671492 - DNA, 946 bp, Homo sapiens
ttatggaatgatccaaatgccagtccaaagagtttaggaattaatgagtggaccctgaagaacatgtgctcaaatgctatcaagaaaaatcagattggcttctctgtccatacatgtatccccaccaacataggcacgtgcatgcacacacacacacacacacacacacacacacacgcacacatcatgcaaaataaataaatacatgtgatggttatgtatgcctgagaagaggggaattgagctagaatacccacgtttgatctgctccaattacagaaatagctgcacataaatagtctrccctaaatgtgactgacctgccaaggctcagtttacctttgcagttgaagtcctcaaagggcactgtgctttggcaagtttgctttgcatttagagtccctggactttgggcaatattagggtccttctgttccagggatatttccagggcgtggctcttctcacagcatttcgacctccttgtgttgcttacctcctagctcctttttttttagcaccattccagaatcctggactgagaaacatgtgctctactcaggaacacatatgctctactcaggctacccatttgttcatagcctcactgggaagcaatctctatgaattccactttagcatgaacgtgaggaagagcacgagtgtgtgttttcagtcttttccaaattacttggttccttttcccgaggaagatttaagaaacagacagactatgcagttcatgacttcaatttgacattttgatttggtgtaaacaggagagaaaggtgaacaagagagtaacaagctgcagttagcttggagatcctcccctctttggttttcactggtcaagcaccttgtctaatagctggggctatcagcctctgtgttgcctttcccttccaaacagataatattccaaacttcactgagtttttgtctc

SEQ ID NO: 671493 - DNA, 946 bp, Homo sapiens
ttatggaatgatccaaatgccagtccaaagagtttaggaattaatgagtggaccctgaagaacatgtgctcaaatgctatcaagaaaaatcagattggcttctctgtccatacatgtatccccaccaacataggcacgtgcatgcacacacacacacacacacacacacacacacacgcacacatcatgcaaaataaataaatacatgtgatggttatgtatgcctgagaagaggggaattgagctagaatacccacgtttgatctgctccaattacagaaatagctgcacataaatagtctgccctaaatgtgactgacctgccaaggctcagtttacctttgcagttgaagtcctcaaagggcactgtgctttggcaagtttgctttgcatttagagtccctggactttgggcaatattagggtccttctgttccagggatatttccagggcgtggctcttctcacagcatttcgacctccttgtgttgcttacctcctagctcctttttttttagcaccattccagaatcctggactgagaaacatgtgctctactcaggaacacatatgctctactcaggctacccatttgttcatagcctcactgggaagcaatctctatgaattccactttagcatgaacrtgaggaagagcacgagtgtgtgttttcagtcttttccaaattacttggttccttttcccgaggaagatttaagaaacagacagactatgcagttcatgacttcaatttgacattttgatttggtgtaaacaggagagaaaggtgaacaagagagtaacaagctgcagttagcttggagatcctcccctctttggttttcactggtcaagcaccttgtctaatagctggggctatcagcctctgtgttgcctttcccttccaaacagataatattccaaacttcactgagtttttgtctc

SEQ ID NO: 671494 - DNA, 611 bp, Homo sapiens
tgtgcaagcttaacacaacatgtctgtgaattggttatagttcacaagccaccagtgcataaactttctttgttatacttaggtctacaactttatgttaagaatagaagaaaaactagaaaaataaatattcagcacccaacaaagatatatattgtctttcacaaacaattctatagcaatcctcacttaaatcacctgttaagaatgattaggaattttctactggcaaagaccggcccagactgggtaggrcttgggggttgagaagctttcatatgcctgtctgtacactgtcaccatctctgacagactgatatctttattcaagaatttactttgctaggtttagtcgggtaagcactaatcctttcatgaagtgcacacttctttgaaatagaacagatatgagtaataattattggtatattcatattgctatttatatcctgacatagattctgcaagttataagttcacttatccccattctacctgtccccaggcaagggtgtgctcagagtaactggcaacatcaaatcattccagaagacagagaacctgattacacaggagtgttggagagaatcacttagaggtaagctaagcag

SEQ ID NO: 671495 - DNA, 1132 bp, Homo sapiens
agtcagtggggaaaggatcagtttacccaacatgataaaagattgatttcttcactaatagtcagaaaggtaaatacaatccctagctagcagggagaaagggatatctctagatattctttggataggtatccctgtaatttacaccataatcctaaagagaggtctccagatacactaaccaaggggaactcaactttagcttttgggtttcactgaatgcctagggctttccagtctgcagttttgttttctctataagtatagtcttctttaggcttacacatacaagtaactttataatgtataaaaataaaaacaaatggaaaaatcacaggtatttaaaaatttaaatcaggaaatattttattaatctattctgtagggagtggttttaaacggtcattagattgagggtgaakaggttggccaggcgtggtggctcacacctgtaatcccagcactttgggaggctaaggtgggtggatcacctgaggtcaggagttcgagaccagcctggcaaacatggtgaaactctgtctctactaaaaatacaaaaattagctgggcatggtggcaggtgcctgtaatcccagctacttgggaggctgagacacgagaatcacttgaaccctggaggcggaggttggagtgagccaagatcacatcattgcactccagcctgggtgacagagcgagactccgtctcaagaaaaaagaaaaaaaaaattgagggtgaataggtcaaagcagcatgcctctaagagagacaaattgtaaaaggcagggatagttctcaactaaagacaaacgcatttcagcagagtgatacggtttgatgaaccaggagaaggcagtgaggggtgtgaccatgctgagggcagtatgaatgtctagttagtggttaggacaaggaattaagacacttaaatatgcaacaaagcatgaagaagcatttgtataggattcaattattaggtgattggttgggcttcacaaacattgaagctttttcaaccaacctgagactctgattctgtttgtagattcattctcaacactgccactgaattggccttcctgaaaacgccatttatgaagagaccaccaacttctattcaccaaggcacca

SEQ ID NO: 671496 - DNA, 3435 bp, Homo sapiens
ctcagaaataaactagatgcaaaggctgatggagaactctgtcatccataaatctgattcccatgatcacaaccaccaacgtggtctcattattctcactgattgagctcaatcatgagcaaatgttatatttgaacctataaaattgatatacattaacaaatgytttctatattagggctccaactaagatttccctggaagaaaaagatgtcctgctgcctaaggtttgcaaaccactggcctattcctcccaccgttgctgcgcatgtggcatggctctgcccctctccatggggccttgttccctacctgggctctccagcccagtagacacaacctcctccacgttgctgccgttgaggttggcacggaggatccggtccagggtgacatctgaccagaagacaagctcgcggcggtggtggaaatcaagggcaatggcattctccaggttgttaagcagcagtgtgtactcagagcggtgtggcagcacctgccggatgtcgatgcgattggcgaacagcagcacaggctctggccctgggaaacagtataaacatgggatacccactgggtttcagagccgcccctggtacccatcagcaggtcttcagctgaccgatggagccacttgctcacaaggacatgccccaagctgtcagcatcagtaccagaagagtggcaacctttaaactatattcctccacccctccccaccccactccaccccagcagcatttttcttggggctcagaatgcaactgttgctgcattttactgtgacagaaatctctctacctctctgcaaatccctgagcaccagagtacctggccttcctccatgctcggccctctgcccacccagccaagtgccaacagcccttacccagagccttgcagctgcgccggtcgggccgtagttcatagcctgtttcacaccagcattggaaagccccttcgctgttggtgcagccctggctgcaatacccctcctcggcacattcattcacatctgggaacaccaggcaggtcaagagatctcccttctgtcgtcctcccactcccgctcccaggctgccgagctgcttttctgcccacatccccatctactttccaggcctagtgggaaggctgtctaagaaatggttaagggcggccgggcgtggtggcgcacacctgtagtcccagctactcaagaggctgaggcaggagaatggcttgaacccaggaggcggaggctgcagtgagccgagatcgcaccactgcactccagcctgggcgacagagcgaggctccatctcaaaaaaataaaaataaaaaataaaaaagaagaaatggttaagggctttaaggtcatgcagacctgggctggaatcccaactctgctactcgccagctgtgtggcctttggtaagctacttatcctctctgtgcttcagtctccccatctgtgaaatgggaaggatgatccccacctcctagggttattgtgaggacgaaatgaggtcacaccgttcaaatgcctgacccataggaaacacagctgcctgtctgctgcccctgctcagaaccccgactctgctgcaaaccaggccccagctcaccttggcacgtgtgcccatcctctgtgagccggtagcctgtgtggcaggtacactgcactgccccccgcaccatctggcacttctgggcacagccaccgttgttaacattgcagttctcctcacccgtccggggccctgtgccagccaagccagagttgggagttgagcccagaatcctcccccagagagccaacttggcattccacctggaccacaaagaacagctcccaaagctgcaagagtcctgagggaggattccctttgaaccctatgggtggggttcggccacaaaccatgggccaggtccgcccactggggacactcacggcaattctgctgtgggctttcgtcgctgttgtcaccacagtcgttgaccccgttgcacagcttcctctgcccaatgcagcgcccattccaacacaggaactggtccaaggcacattgggggcttcctagagagatggagggtcaggtcatagcaaggcagggcttgggccaacaaagagatgggagcctgtcattttctagggtaagctggagacagatgagactcaaggtgggagggtgagggtcctgggcaggaagcagctcagacagggctggctgaatgtctgcatttgctttctccccaggactccacagtgggatggtgaggaatatggaacagaatgaaaaagtgcaaccacatgctcaatactgggtgtggccaggggagcacacatgggggctgccagatggagggtagtccttcctcactagaccagagctaaaggcactggctgtgtgtgagttagaataggagtggcaattgaaactcgcagctctgatactgtgctccaggccataaggccgcaggtcaatgatgcacctggattttacactggtaaaacctcaacccaactggaaagataccaaagcaccctcttttccacccttccaccccaactataggctaagggttctggggcaccccgggagacaccacctgtattctcacagttctcttcatcgctgttgtctgcacagtcgtcctccccatcacagcgccaggacaggcggacacagcggcctgagtgacagcggaactgttctgccgtacacatggaggtggctgggcaaagcaaaggcttaatgaaaggtgggccccatttcagcctgaaattctccctgccacccaaatctgcagcttatatcagtacccatgccactcttgacaccgggatcacagctggtctatatagtgtctttgtgtgaatcagaaaaaagtatcctttcctcaagacactttactgccatctgctggaaaactgccatgatgagtatataaatctattatgtgactggcttccctttggacatattgcctctgcacagtgcacaacctacacaactgtacatggtggtggtcttacccagtgtcttcaagatttatgggtagtggcctgtttgtctttttttttttttctttttatttttttatttttatttttttttattttttaatttttttattatcattcttgggtgtttctcgcagagggggatttggcagggtcataggacaatagtggagggaaggtcagcagataaacaagtgaacaaaggtctctggttttcctaggcagaggaccctgcggccttccgcagtgtttgtgtccctgggtacttgagattagggagtggtgatgactcttaacgagcatgcggccttcaagcatctgtttaacaaagcacatcttgcaccgcccttaatccatttaaccctgagtggacacagcacatgtttcagagagcacagggttgggggtaaggtcacagatcaacagga

SEQ ID NO: 671497 - DNA, 763 bp, Homo sapiens
tgaaaaagaaaaattggaaacaatttaaatgtccaatggtagggttggtaattatggtacatttgtaaaatggagtgctatgtagactttaaacatcatattctcaaatctgggaaaatgtttgtgatcatataacaaaaatgttgtaaggggattatgcctgtctttttcatatgatttatattactacaygtgtattgaaaaaaaactggatacgtactttagtgttcatcatggttattaggtggtggtaaaattgtattttaatacttagatttttttctgtagttactaaattttctgcagtttacacacattacttttataagaaaaaggtgttgtctagatagatagcataggggtgggtgcggtggctcacgatcagtgggatcacttgagcccaggagttcgagaccagtctgggcaatataacgagaccttgtctctacaaaaaatttcaaaattagccgagcatggtggtgcacacctgcagtcccaccaaatcctagctactcaggaggcagaggtggaaggatcgcttgagcccaggaggcagaggttgcagcgagccaagatcgtgttcattccactccagcctggacgacagagcaagacgctgtctcaaaaaaaagaagataggtagcataaagttattaaaaggatgttgactttaaacctcacttaaaaacatggtttacataaagaatatgtataaaggttcattcagggatttaattttgtacttgtttatataaacattgac

SEQ ID NO: 671498 - DNA, 1039 bp, Homo sapiens
gtttacttagaattaattcatttccacctcctccttactaacgaaatctcaaacttgttcagaacataaactctctgccatattcttcagagaaagataatcctaatccagagattacattaggttgtctaagctcatagctctttccagagactggctcaaaaattggcacgtgaaccaattctggtggaaaagatgtgaggagtgctgtgctgggggatttggggaaggttctcccttgctcttctgggtccacgtgacatgctatcatctctcttcctcagagaaggggccctgagtgggtgtgaggcctgggggtgctatggcatctgcccgcctatgcagaagggtctggcacagaagaggcaccactgagagactctctgggagtggaggcagagccatcagaaaccctgttctgaaggcctgcatctctacggttccatcctccttaaaactgaggaacagccttcctttatgtctaaatgtgtctcgttaaattcattttcatttacttgatagcttttattgttattatacattggcagtttttcatttaatttctatctattgatgttatctttaaaggtattaattttatgttttattttgtgtacaaaatatcttttgaatgcaacagtttttaaaatctggcctattgtattttccaagcctgtaatcctattgcctacaaataaagttaattttgatctttctatcctaaccttggtatgayttacttgttttatattttattacattagctagactctcaaaaataatgttgtttaataatggcgattggggcattgcagtcatgttccacatttcagttgtttaatatttcaaaatatgtagttttttacgaaccaccttcattatctctcagtagcttcctcctagttctattttatttacagcttttgcaataaataactaaaaattagtcaaatgtgatttttaaatctgttgatttaattatatgtttgtttactgtgttcatataatgagtacgctaagcatgttaaacctctttttc

SEQ ID NO: 671499 - DNA, 1804 bp, Homo sapiens
ggacggagtctgtcccacatggccaacagcagatgggcccaggtccccctgcccatcacaagagacgaggcataaaaccgtaatgctaatgtatttgtttacggtgaggtacaggctccaaaatgacaggttctacctgttttctgtcctgagcaaagacaggtgtggacgggagagaaagaatacatattctatttttctttttactcagaaactaattcctcaggatagtctcctgatactgttgcccccactatcctcactatcccctgaaacccctgtttcagagcagggctgccttctgccctcccctcctgggggctgggcgcsagttgttagagcaatgcaggaggtgggcagttcagggcagctttggatgcctcaggtcccacaggagcaaataaaccctggacttcttgatgccgtcacagcctggcagcacctgcttgtccagcagaccagccaccgctccccgattcaccatgcctcagccacgtgggccaacattcccttccactgaaggcacctgtgagactacagggaccaccagccacaatatcaagccctcctcctcctgccccatcacccctagccacccaggctcaggaagatgcccttcagagcaccatgctcagccgcccgctcatgagagtgcaggccagccccctcgcccatctcactcacaccatttccagaaatgccagcacggccttctgaataagagtgaggcaaaattcaaaccacgtttaaattgtttgaggatcacatccaccaccagttagcatgggtgaagagtccgtggagagggtactgcagggcttccgtggaagcaactgtatttttacacagccgtagtgctcggctcaccaggttcggctcacagcccccgatacctggctgtgtccagcagaggggaagtctcctgggaagaggcctttgagaggtttatacacatgtgcgatgtgggccagcgggcggccccgggagccagcaaaggtcagacatttgtccttccagacacagctcccgcgaggtagaacacggcaccaagatgcagcgtggaccccacgaccaccattggggtacccaggcgcccagagaacacatgccacgcggcagcgtttgtaccacggagggcaatgcaaacagctgacacctggcagcgctccagaactgccgctggggcgttttgcttctgaaaaaaccaccctcctgtatcctctgttcacacaattccctccgccccagggctcccctcccgctgcaacggctgcatcctgcacacccctttgcactcctctctcataccaggacactggggggcagtcatccgacacaccacacaactccgtcctctgctccagcttccgctcagcggagaatggctcccttatctgatggttccaggatgctctgtggcaacactgagtgtaaagcaaacaaggccatcgggtgctgcagcctgcacaccagcgtggtcctgggccacacaccgggcagccggagagaatctctgcagctcccaggcggcagggtgcacaaatcacagcctttccttgaccccgcgagctgagagagcaaagtcacagacagactgttttaagtggattcagggaaacaccccccactgctgtcccccctcccgccccaacgcacacatacatgcacacacagctttgtttccttgtcattcctctcattccctcaataacccctgataggcttctaggaatacttcctctctcagcaaaggaaaagtgtatggttctgtgttacaagatgattgggctttaagcaaatgaaa

SEQ ID NO: 671500 - DNA, 1104 bp, Homo sapiens
gattggcatattttcaaagttttttggtgtactaattttaaacagtgtttgttgacactgagaattcaggactttggagttttagaccaccatcaccttctactccttctcacaccatcccaggataattattctctcatttgagattaagaagttatttggtttattttattatggttatataaatatagtttactgctaaagcaaggtatatcattccattttctatctcgtacccctttttgctcttcctggggtaaacccttgctttgtttttgtgttttcttagtttgcactgtgcctattatcatttccttcccaactttctgacataaagatgaaagccctattgacacaattttctacagtgtcagatataccaagtaatctcacggttccatttttctttctttttttctagaaccctccatcttcttcttgtctaacagttgctcttcagtcttgctatacatacagtaatacctgaagaatgtttggaggatatttggtgtgggayttttcttttttttttttctttttcttttttgtagagatgggctctcactatattgcccaggctagtctcaaactcctgggcccaagcaatcctcttgcctcagcctcccaaagtgctgggattataggcatgatccactgtgcccagccctatggggaatatttgttgactaaatatgttttatgtaaattgcttatcatactctttgttgtaacatctgtggcattaatatgcctcttgttaacactcacctacattttacctgttgtaaatccactgtcataattattgaaaatatttctccagagctttttaattctatggttatttatttattgtagtatagaacttttatgatttcttccatcagggtgcattctgaatcatgcttagtgagagatggtttttaactccactttaacagttagcatctatgttttacatcagtgtcaatgtcacttttgtattatatacgacaccaacattttattatctgagtgatgagaatgtttatttttgtggaaatggagatctcatgagactttaagcagattgctggccttctcctcgatttccttgattgattc

SEQ ID NO: 671501 - DNA, 661 bp, Homo sapiens
cttctttatttgtaagctcttcttttgtaaatggagcagtcacagggggcttcactctgatacctaatggagaccgtgcctgcagtgctcggtacctggtatgtggttaaaactgacataactgtcagagcctctcccaggcgggctgactctgggaatctgccctgcagtcttggagggaaggcacgtccagataggtttgatgagcaactacaattgccaaagttagtttctctgacctccaagatgggagaactttctaatattttcttttaggaaagttgtccattgcataactgatacacgagtacatatcctttagtacaggattcagatacagcgagcaacagaaaagcccttcttaacctccaccctcagtcccagccctgcccccagtcccactgttggggagcagttggagctctaacctctcttctttcgtcctgtgcattcatgtgtgcatgtgtgcaygtcttcagaagatataatggtgggctgtgtatgtcttcttaatacctttatcactctggaactttctttttattaatatgttggggtgcggggaggtctccatattcagtgattattgtaatttttatgacagtccagaataggcatgtcgattttttttaatttttgatattataaacagtgctgcaat

SEQ ID NO: 671502 - DNA, 1431 bp, Homo sapiens
taggacagactcccacagtgaatcaggagctgacgcactcacactgagagggcagccacaggatctggtgatggtttacaagagttccctggagccttttagctctatttcccatgaaagaaacacacaaacaaacacttctaaagatgaaagaatctggaccaacgtctaggcaacctggacttgggagacgttgtattcagggatgcagaccctgccccgtgctggaagcatggtagacttggactgtatccagtatgctggcaaactctccctgctctccacaagcatacacaaccatattcaaacactcacagtataacacgcccactacactgcaacaaggaaggtttacacacccagcaacagccaagaaccccagccaggttctgtaggagatgaaaggttgtcaagaggtgaaattgccaggtggcaaacccctccaaggtgtttcctcacactttctctgttaaaaacaccataagataccctgacaaggagactttcctggtgctcatgatggagaaagagcactgaagagagaagaaaagctacatcagtgatgaccacatgtgctgtgcggtgtacgtggtgtgtattttcattgaatcctcaagacagtcacagacccagaggagcagagcctggggaaagtttcccttagtctaaggttctacaaccatcatgggaacatgggttctgaagctgggtcttgctgcccaggcttagctctgctcttccctctcactaataccctgcctgatgccaggcctgggcatggggtgctatgcaccatcagtccacaggtgagccctgcaggtgtggagggagcacgggaaggtgtgggactgagctgtggacaacacaagggagaaagccttggaagctattatctgggaggttggcaattatggggtgataactggacaactgcaatataaagtggaataagaacccaggagaataagaacccaggaataagaacccaggagaagaagacaactaaggagagggtgctcgatgaaaacacagaagcccaggcccctctctcacaggcccatgcctggttagctctgacaccagctgaataggaagcacggcaagtttgagactctcttgcataaaccataagcctcagtgtcagggacatgtgctgtgaggacacatgagatgtcagtctgtacagggcagatagggaacaaggcatgttcatcaaacaagagctgcacctcccagccttctgcayggggtttatatacatctcccagaaaggaaggagagagcaaaagtcatggccatgaaggatgcaactgctgttttcgggaatagacaactccgaaaaaagaaacagcttcgtggccaaagaggctatgagcaggcttcttaaccagcagaagttggccagcctcatcgtgtggattatgctatttt

SEQ ID NO: 671503 - DNA, 610 bp, Homo sapiens
ttcacaaactgactctttgctagggcagtccatgactacttcactggttgtgctctgagcctaaggattagcctgaattgaaagctcaaggtcttctcatatctttttctgaacatgctttgtacacgggcgtatgtcttgctttctcagttccccagtatttatggcttttgaaaatcttaatatcccaaaaagtcttatcctagcttcttttaattctaaagaagataaacagttgagtttcaaaccaaaattataataaaactgatatttatgttttccccrggtacttaacttaccagaaatatttatatcttcataagatcttaaatggtctattgtatatctctactattatctcccaccccaggcatttggtgcctgtagtctttctgaagctttcataagcagttctggctgccttcctcatctgagatcgaagttaaacagtacagagaccagttatttcgacagcccccagacagtttagaacatggcaagtgaggtctgctctgctgtctctggtttgagtgatggaattgggaactgggtcctacctcctccagaccaagaccactctgtgctaaaaggggaaatgggaaaagggtat

SEQ ID NO: 671504 - DNA, 597 bp, Homo sapiens
aatgaaacatatcattttaattagtaaaatatattaatttccattaaagatgtcaaatatgcaagactataaaaatagaatgtaaaaaaagaatttgccattttccaaagtcaaatgtaaattattatatttccttctttctgttcttcaacactaaagataaatagtaatgttttatctttgcaggaataatacttttattctcatttctcttttgtatctgggatatatggtggttcttgggaaattttgcttctgtctctrgcattcttaaaaagttattgaactcatttctctctcttcagtagattaacacccagaatatttcatggacgtacactgtgctctggtattgaatgagatggtaccaacatcctcagaaaaaccttaaacatgaaactgcacctgccccccattgccccccacaacacagtctgcacttttggaccaagttgtattgtcaagttcaccggagtgttatgactactgttcttaaagaattaaggttggaaacatttcagaaggtttacaatacatcacatcacatcctaaagtatttgtaattatttgaatcatagatgttcttattttaatgta

SEQ ID NO: 671505 - DNA, 597 bp, Homo sapiens
aatgaaacatatcattttaattagtaaaatatattaatttccattaaagatgtcaaatatgcaagactataaaaatagaatgtaaaaaaagaatttgccattttccaaagtcaaatgtaaattattatatttccttctttctgttcttcaacactaaagataaatagtaatgttttatctttgcaggaataatacttttattctcatttctcttttgtatctgggatatatggtggttcttgggaaattttgcttctgtctctggcattcttaaaaagttattgaactcatttctctctcttcagtagattaacacccagaatatttcatggacgtacactgtgctctggtattgaatgagatggtaccaacatcctcagaaaaaccttaaacatgaaactgcacctgccccccattgccccccacaacacagtctgcacttttggaccaagttgtattgtcaagttcaccggagtgttatgactactgttcttaaagaattaaggttggaaacatttcagaaggtttacaatacatcacatcacatcctaaagtatttktaattatttgaatcatagatgttcttattttaatgta

SEQ ID NO: 671506 - DNA, 657 bp, Homo sapiens
tgtttgcaagccaagaagagatagaactactggataatagaaatggctgggtaacctagattttgaaaagaacttgaatttctctgaatatcatgaaaaccatgtgcttatctatttttttaattttgccagatttacatataatgctttgtgcctctcttttttgttcttccattctttaaatgctagtttaaattcctccacatacataatagtttcaagatgcagaaataaatcaagttgttgtaacaaatatttaaacataaaaaaygaagaggtaaatatgggagaatttttagtggtttcagagtaggggaggactttttaaggatgaactcaaactgaaatactaaaaaggaaaagtttgttaaattggatatacagaaattttaaatttctgtccagaagacaattaaaaatagataacatcaaaggaaagatatttgcaacatatttcagatgaggcctaattttttaaaatacagtggttctcaaattttgtaagcatcagaatcacctgatggccttgctaagcctgagactgctgacttcaaacccatgcgactctgattcagctgatctgactcaacggggaacaggctttctaacaaggtcccagtgaaggggacagtgctgatctttcaagcacagccggag

SEQ ID NO: 671507 - DNA, 657 bp, Homo sapiens
tgtttgcaagccaagaagagatagaactactggataatagaaatggctgggtaacctagattttgaaaagaacttgaatttctctgaatatcatgaaaaccatgtgcttatctatttttttaattttgccagatttacatataatgctttgtgcctctcttttttgttcttccattctttaaatgctagtttaaattcctccacatacataatagtttcaagatgcagaaataaatcaagttgttgtaacaaatatttaaacataaaaaacgaagaggtaaatatgggagaatttttagtggtttcagagtaggggaggactttttaaggatgaactcaaactgaaatactaaaaaggaaaagtttgttaaattggatatacagaaattttaaatttctgtccagaagacaattaaaawtagataacatcaaaggaaagatatttgcaacatatttcagatgaggcctaattttttaaaatacagtggttctcaaattttgtaagcatcagaatcacctgatggccttgctaagcctgagactgctgacttcaaacccatgcgactctgattcagctgatctgactcaacggggaacaggctttctaacaaggtcccagtgaaggggacagtgctgatctttcaagcacagccggag

SEQ ID NO: 671508 - DNA, 1120 bp, Homo sapiens
cccattttcctgtcttctaagaatataatccttttgaagataatctgcaaggacaaaattactatttgacaaaatttcttaattctgtgtctaataagcctaataataaagctgtttgtgaaggaaaatagtcatgaaaatttatgctcctttttataccaacatctgaaacaaagtggacttcgagatacagaaaagttactgctccacctgcccataattccatatcctaaatgttgcccgggagtcaaatagcctctaagtaaggcaccttttgattcttttctttacaaaggcccctttcaggctttactcagatgtagaacatgccacaaatctccccattcctcattacttatcccttccagagtctgaggctctgtctctggagatctcaatcctgggaccagtgggggcaattaacgtgcattatgcaggcttgagtatgtttcatcttcagagataatcatattggagacaaaaactacataatatgcatacacgctcatgtgcagtcacacacacacttacacacacacagatcaggctgttaacatagcagtattccttccagagtttcctctcctaatcttaataaattatctttgcgctaacaaactttttctgccatgagrggcaccattaccttcaaattttgttaatctcagaaactgagaagaaaaaaaaaattctgggtctaaacagtttaataacaaataaacaaaggtaccacacttggcagataaaaaatgactttttgtctatgtgtctgtgcagttaaaacagatttagattccccattgggacaaaaggaaaaacacacaaaaaaaggaaggaggttcttttgaaaaacatactcccttgctccaaatatgtaacaattttttttctctttttaaattcactacacaaactctgtgatgaggtaagaaaagcgacgagggctcttcctgctttttttcttaaaccattaaagtaaaacccgtaattttctacagagtacaacacaagttcacacaaaaaagacattttcttttgcaaatcaaaacaggaaagaaaggaaaagctcaaacaaggtgaaggaaaagcatttctacagctgaatcacgactgagttgat

SEQ ID NO: 671509 - DNA, 1123 bp, Homo sapiens
agatagtgaagttttatgcacattggcatatgttttgagtaaattataggtgggaatagctattttgtgctgtggacattgtagagtttaagataagtacctttcctgtgaggttagtgaaaggaagtttttggctttatcatttgaggcatttgctctgctcctcctactctgccttttgggtagggcttatgaggttctccatgggcaggcagggctctaagtgcagtgacttgattggctgttgtatttgcttaggaacagcagcacttcagaaagagtgatggcactgcggaggcgcacttagcatcccactgcaggaaacactgaggtgtgctcttagcaagagaaacacccctcctaggcgcccaccctcaattttggaaacctattgttacatatgtgtaatcaggaatagcttttgaagtaaatccaagatatgtgcgtgttagaagtgtaatatctgagtacttattatacatcaagtttgaaacttggccattgctgattgacgtttagctctagacttaaagttgctttcaagtgataattgccttcattttaggcttgggaagatacacatgcaaaatgggaacaagcaacaaaactaatctttaactatccaaaagccaaaatggatgacagccaggtaagtctgtaaagttgacttttgtctattaactgatctgctaaatatatgtccttctctttggtaatctctcacgagtcactcagtaaagtaagcatatagttgtctgaagactgatatttagttgtggtttatctagacctgtacttcgtaatatggtagccactagctacgtgtgactatttaaattttaacataatgaaaattaaatacaatttagttcctcaatcatatagtagccacattgcaagtacccagtagccacatatgacagtctggacagcagagagagaaaatgtttccatcatcacagaaatactgggcagcactgctagagactgttgcagagaccttttcttgctctttatcccttcatcagggtgtttcacagaattttcagaaraggagcaacagaggtagagaaaaaaaacatggaaacaattcattttgctattttgttaagtattctaatta

SEQ ID NO: 671510 - DNA, 1123 bp, Homo sapiens
agatagtgaagttttatgcacattggcatatgttttgagtaaattataggtgggaatagctattttgtgctgtggacattgtagagtttaagataagtacctttcctgtgaggttagtgaaaggaagtttttggctttatcatttgaggcatttgctctgctcctcctactctgccttttgggtagggcttatgaggttctccatgggcaggcagggctctaagtgcagtgacttgattggctgttgtatttgcttaggaacagcagcacttcagaaagagtgatggcactgcggaggcgcacttagcatcccactgcaggaaacactgaggtgtgctcttagcaagagaaacacccctcctaggcgcccaccctcaattttggaaacctattgttacatatgtgtaatcaggaatagcttttgaagtaaatccaagatatgtgcgtgttagaagtgtaatatctgagtacttattatacatcaagtttgaaacttggccattgctgattgacgtttagctctagacttaaagttgctttcaagtgataattgccttcattttaggcttgggaagatacacatgcaaaatgggaacaagcaacaaaactaatctttaactatccaaaagccaaaatggatgacagccaggtaagtctgtaaagttgacttttgtctattaactgatctgctaaatatatgtccttctctttggtaatctctcacgagtcactcagtaaagtaagcatatagttgtctgaagactgatatttagttgtggtttatctagacctgtacttcgtaatatggtagccactagctacgtgtgactatttaaattttaacataatgaaaattaaatacaatttagttcctcaatcatatagtagccacattgcaagtacccagtagccacatatgacagtctggacagcagagagagaaaatgtttccatcatcacagaaatactgggcagcactgctagagactgttgcagagaccttttcttgctctttatcccttcatcagggtgtttcacagaattttcagaaaaggagcaacagaggtagagaaaaaaaacayggaaacaattcattttgctattttgttaagtattctaatta

SEQ ID NO: 671511 - DNA, 1535 bp, Homo sapiens
tatatggaagaacagcaaaggaaacaaaacaaagcccatttacttttacattcttttttgcctaatgcttctatttaacacacatcatgcacaaagatttgcttacacatttgctgaagtccacatcataggctgagctagtatggaacagtgaggatacaaaggacttaatacggccagttgcaatggcagcttcaaccaggctttccaagctcagagttgttgttcatccaataatcacacatatgagtgtctactgagtagagcattatcttaggcactactgcttaaactatcacatatttaaataaaaaatgaagtggcaagataatttgtattgctrtaacattgtcacagttttctagagtagccttcatctcttgaataatattcaatctgctgatttttttcatattggcttatacatatgctcatatgtctcccatttagagtacccttcatttgacactgctatcctctttgtgtttctttccagttattatatgcagcaggattttattagtttcctactgtacctgacacttgataatcttgcacttttctttcccctggcttctataacattttcccttccatctttcatctcttcacttctaaatcattagcaagtctcaaggatggttccagtatttgcacctttcggagatctccagtgctactgttctagtggcaatagcgcagttggcctcttgggctctattctagtccctgtcttgcccagatttatctttctagataaaaactacaaatcatggcattcccttcctcagaacttttaaaagcttcctattaagcccaaaaccaagcccaaacacataagcttggaattcaaggccattcagtttgcttctttggatttatagcccatcacttctggacacaccatatactagattagctgtactacttgatggcttccagagtaactggatgctttcctgtctgtctttgctcttgatgttccttcaagaatgaacaacccttggcctttttccacctccataccctttatcttatcatatttctgcttgtggaaatccttctcataccttatggtatagtatattggcattagggattagaaattttttttttttttgagatagtgtcttgctctgttgcccaggctggagtgcaatggtgcgatcttggctcactgcaacctccacctcccagcttcaagtgattctcctgcctcagcctcccaagtagctgggattacaggcgcacaataccacgcccggctaatttttgtatttttagtagagacggggtttcaccgtgttggccaggctggtcttgaactcctgacctcaggtgatccacctgctttggcctcccaaagtgctaggattacaggtgtgagccaccgtgtccggcctagggtttttttttttttttgagacggagttttgctcttgttgcccaggctggagtgcgatggcacaatttcagctcactgcaacctctgcctcctgggttcaagtgattctcctgcctcagcctccctagta

SEQ ID NO: 671512 - DNA, 1535 bp, Homo sapiens
tatatggaagaacagcaaaggaaacaaaacaaagcccatttacttttacattcttttttgcctaatgcttctatttaacacacatcatgcacaaagatttgcttacacatttgctgaagtccacatcataggctgagctagtatggaacagtgaggatacaaaggacttaatacggccagttgcaatggcagcttcaaccaggctttccaagctcagagttgttgttcatccaataatcacacatatgagtgtctactgagtagagcattatcttaggcactactgcttaaactatcacatatttaaataaaaaatgaagtggcaagataatttgtattgctataacattgtcacagttttctagagtagccttcatctcttgaataatattcaatctgctgatttttttcatattggcttatacatatgctcatatgtctcccatttagagtacccttcatttgacactgctatcctctttgtgtttctttccagttattatatgcagcaggattttattagtttcctactgtacctgacacttgataatcttgcacttttctttcccctggcttctataacattttcccttccatctttcatctcttcacttctaaatcattagcaagtctcaaggatggttccagtatttgcacctttcggagatctccagtgctactgttctagtggcaatagcgcagttggcctcttgggctctattctagtccctgtcttgcccagatttatctttctagataaaaactacaaatcatggcattcccttcctcagaacttttaaaagcttcctattaagcccaaaaccaagcccaaacacataagcttggaattcaaggccattcagtttgcttctttggatttatagcccatcacttctggacacaccatatactagattagctgtactacttgatggcttccagagtaactggatgctttcctgtctgtctttgctcttgatgttccttcaagaatgaacaacccttggcctttttccacctccataccctttatcttatcatatttctgcttgtggaaatccttctcataccttatggtatagtatattggcattagggattagaaattttttttttttttgagatagtgtcttgctctgttgcccaggctggagtgcaatggtgcgatcttggctcactgcaacctccacctcccagcttcaagtgattctcctgcctcagcctcccaagtagctgggattacaggcgcacaataccacgcccggctaatttttgtatttttagtagagacggggtttcaccgtgttggccaggctggtcttgaactcctgacctcaggtgatccacctgctttggcctcccaaagtgctaggattacaggtgtgagccaccgtgtccggcctagggtttttttttttttttgagacggagttttgctcttgttgcccaggctggagtgcgatggcacaatttcrgctcactgcaacctctgcctcctgggttcaagtgattctcctgcctcagcctccctagta

SEQ ID NO: 671513 - DNA, 617 bp, Homo sapiens
ttttctgcccgtagatgcccttgatcaagttggatttcctgttttctgtgwgttgttatcaccagtgggtgttgaattttttaggagtttgttgattgatatgatggtgtgtgtggtttttcttcttttgcctgtcagtatgtggtggtcacattgactgatttttggacatgaaaacaaccttgcaccccagaaacaattcccgttggttgtggtgtatagtaaccttgatgcgcttctgtgaagtgtctttatgttgacgttgaggggcctgtggggctgcacttgtcacgttgtgtgccgtctgcccccaggtttgctgtggctcccgtgatgaggtgggaagcgccccaccctccagcatcactggtgagactgcggacttgccccttcctttcacatattcgggagaattctccagtgagaccgtctggtcctggagattttatttttgcaaggtttaaaatttcatattcattttccttaacagttacagggcttttcacaggacctgctgcgtttgggtgagttgtggttgtgtttttgaaggaattgctccgcttaccttctctattttttttttgtttgtttttcagcctccttatttcgtactttcc

SEQ ID NO: 671514 - DNA, 617 bp, Homo sapiens
ttttctgcccgtagatgcccttgatcaagttggatttcctgttttctgtgtgttgttatcaccagtgggtgttgaattttttaggagtttgttgattgatatgatggtgtgtgtggtttttcttcttttgcctgtcagtatgtggtggtcacattgactgatttttggacatgaaaacaaccttgcaccccagaaacaattcccgttggttgtggtrtatagtaaccttgatgcgcttctgtgaagtgtctttatgttgacgttgaggggcctgtggggctgcacttgtcacgttgtgtgccgtctgcccccaggtttgctgtggctcccgtgatgaggtgggaagcgccccaccctccagcatcactggtgagactgcggacttgccccttcctttcacatattcgggagaattctccagtgagaccgtctggtcctggagattttatttttgcaaggtttaaaatttcatattcattttccttaacagttacagggcttttcacaggacctgctgcgtttgggtgagttgtggttgtgtttttgaaggaattgctccgcttaccttctctattttttttttgtttgtttttcagcctccttatttcgtactttcc

SEQ ID NO: 671515 - DNA, 617 bp, Homo sapiens
ttttctgcccgtagatgcccttgatcaagttggatttcctgttttctgtgtgttgttatcaccagtgggtgttgaattttttaggagtttgttgattgatatgatggtgtgtgtggtttttcttcttttgcctgtcagtatgtggtggtcacattgactgatttttggacatgaaaacaaccttgcaccccagaaacaattcccgttggttgtggtgtatagtaaccttgatgcgcttctgtgaagtgtctttatgttgacgttgaggggcctgtggggctgcacttgtcacgttgtgtgccgtctgcccccaggtttgctgtggctccygtgatgaggtgggaagcgccccaccctccagcatcactggtgagactgcggacttgccccttcctttcacatattcgggagaattctccagtgagaccgtctggtcctggagattttatttttgcaaggtttaaaatttcatattcattttccttaacagttacagggcttttcacaggacctgctgcgtttgggtgagttgtggttgtgtttttgaaggaattgctccgcttaccttctctattttttttttgtttgtttttcagcctccttatttcgtactttcc

SEQ ID NO: 671516 - DNA, 1859 bp, Homo sapiens
ctgcgtgctggtgggtggggctgggaggttcagggccttgcctcccagaaaatgccttcacggcttcctcagtgggcactggccgtacctgggaggattgtggaggcagatcccaatgctggtgtattccctggacagaaaaccccaggatggaagatccctactgaggtttcattctgttcctctgattgtacagaaagggctgctttggcctagacaggtgagtaacttggttatgtggcaagttagtattgaaattccatgttcagtcagtctagtgaataaaaccaacccagtgcatcagtcagtcagccagccaggtcatgagcttgatgacgggttcccagcagtcagtagtgtttacagggaggtgctgtttgagatcttggggtacctcacagggccctttgagacactgatgtgatatcatttctcctcagatggagcgtctgtgtggcaccaggtgtccctctggttccaggaggctcatctctctgcctccagtccatgggcggcaggtaaatccttgccttagagaaagccacagacggtgctgcctggaatttgaggtggcttcttccccgtttctgtgtactcctgtgggtttgtgtacatgggttttatgagcgttctggggagtgtggtggtggtggtgtgacgtcagcatttccggaggtgttcctgcccgtgcagtgggcgtgggtgccatagatccaggaaggagcgactggaagggctttagtctaaagccctgtgtgcatgtgccctggcagttctggtcgtctgtttggaatcaggttcctgcctcgcagttgcattagccagctgaattcgggaggtgcatttgcagcaggagtccatgctgctgacggtcggctccgtgtggtccagatgacactgccctggctctggggggctgccgttgggagccggtatgtgttggcctccccaaaatgcctgctgcacctttgtggaacacagttgaaaattactagattcagtcacttgttgacagattttgtgaacagggtgggttacaagtgcgtttctctggcagcacccctgtgatgggagtagcgccctgcagtgtggacttgtggtggctttgctgacgtctctccatagagagttgcaggtagaaatctccgcagcttttgcttaaagccaacagtgatggatttctccaggacgttgagttccagctcagcagctctttatacacaatttacagctaaccctcgaacaacttgctttggtctgcgagggccacctttatgtagatgttkttcagtaaatcgtctgctgttcgcatccatgggttccacgcccaacactgtttgctgggtgtggagcccagcctgtttatacagagcgctgactttctggatcagtgggttctccaggttgactgcgggacctgagtatctgtggatgtggaatttggtatctgaaggagtcctgcagcccgtcccccgtgagaatgagggactgattaaatatggaagtctttccataatagattgtgccgctttgtgatgaagtagagaatattgggcataattccatcctgatgttggaaggtgataggtgtgagtttagttctcatccctgcgacgcctctgggacgtcggttggtgaagagcatctgccttcctctagagagcctgagtcactttcacttaaaaggtttttcctctgtttttctttttttctctgattgctggtgtggtcatttccagcaacagctccgcggttctcttgtgcggtgtcccaccacttggaggctggaaggtgaagacatcagggaagaggaactgccttcaaccgtcattgactctgctcaccagcccaggtgtttg

SEQ ID NO: 671517 - DNA, 1859 bp, Homo sapiens
ctgcgtgctggtgggtggggctgggaggttcagggccttgcctcccagaaaatgccttcacggcttcctcagtgggcactggccgtacctgggaggattgtggaggcagatcccaatgctggtgtattccctggacagaaaaccccaggatggaagatccctactgaggtttcattctgttcctctgattgtacagaaagggctgctttggcctagacaggtgagtaacttggttatgtggcaagttagtattgaaattccatgttcagtcagtctagtgaataaaaccaacccagtgcatcagtcagtcagccagccaggtcatgagcttgatgacgggttcccagcagtcagtagtgtttacagggaggtgctgtttgagatcttggggtacctcacagggccctttgagacactgatgtgatatcatttctcctcagatggagcgtctgtgtggcaccaggtgtccctctggttccaggaggctcatctctctgcctccagtccatgggcggcaggtaaatccttgccttagagaaagccacagacggtgctgcctggaatttgaggtggcttcttccccgtttctgtgtactcctgtgggtttgtgtacatgggttttatgagcgttctggggagtgtggtggtggtggtgtgacgtcagcatttccggaggtgttcctgcccgtgcagtgggcgtgggtgccatagatccaggaaggagcgactggaagggctttagtctaaagccctgtgtgcatgtgccctggcagttctggtcgtctgtttggaatcaggttcctgcctcgcagttgcattagccagctgaattcgggaggtgcatttgcagcaggagtccatgctgctgacggtcggctccgtgtggtccagatgacactgccctggctctggggggctgccgttgggagccggtatgtgttggcctccccaaaatgcctgctgcacctttgtggaacacagttgaaaattactagattcagtcacttgttgacagattttgtgaacagggtgggttacaagtgcgtttctctggcagcacccctgtgatgggagtagcgccctgcagtgtggacttgtggtggctttgctgacgtctctccatagagagttgcaggtagaaatctccgcagcttttgcttaaagccaacagtgatggatttctccaggacgttgagttccagctcagcagctctttatacacaatttacagctaaccctcgaacaacttgctttggtctgcgagggccacctttatgtagatgtttttcagtaaatcgtctgctgttcgcatccatgggttccamgcccaacactgtttgctgggtgtggagcccagcctgtttatacagagcgctgactttctggatcagtgggttctccaggttgactgcgggacctgagtatctgtggatgtggaatttggtatctgaaggagtcctgcagcccgtcccccgtgagaatgagggactgattaaatatggaagtctttccataatagattgtgccgctttgtgatgaagtagagaatattgggcataattccatcctgatgttggaaggtgataggtgtgagtttagttctcatccctgcgacgcctctgggacgtcggttggtgaagagcatctgccttcctctagagagcctgagtcactttcacttaaaaggtttttcctctgtttttctttttttctctgattgctggtgtggtcatttccagcaacagctccgcggttctcttgtgcggtgtcccaccacttggaggctggaaggtgaagacatcagggaagaggaactgccttcaaccgtcattgactctgctcaccagcccaggtgtttg

SEQ ID NO: 671518 - DNA, 684 bp, Homo sapiens
gtcaggagatcgagaccatcctggctaacaaggtgaaaccccgtctctactaaaaatacaaaaaattagccgggggcggtggcgggcgcctgtagtcccagctactcgggaggctgaggcaggagaatggcgtgaacccgggaagcggagcttgcagtgagccgagattgcgccactgcagtacgcagtccggcctgggcgacagagcgagactccgtctcaaaaaacaaaaacaaaacaaaaaaaaaacaattcatctagctatgttattatacaagagagtttacaggcatgctttttcctcttttcgtccctttacagatttataaaaagcaaatatattatatatatatttatttatataatatatataaaaagcaaatatataataaaatatatgtattaaataayatgtatataatgtattgttgatactataacatatagaaaagttacatgtgtaatatatttagcaataataacacagagaagatagatgaggaaatgctatattaggcaaaggaaatggctgcatgtggtaaaataatataacaacctattactggaattgtaacattaatagatgtaatatgtataaaatgatgcaacacaataggggaaaatgaataaagctctataggagtaacatctctatatatcactggatctaggttagtatacatc

SEQ ID NO: 671519 - DNA, 1096 bp, Homo sapiens
ccacaagattgattctctagtacaggggtccccaaccccctggccacagactggtaccggtctatgtcccgttaggaaccaggctggagagcaggaggtgagcggcgggtgaagcttcatctgtatttgcagccaccccrcatcgtttgtattcctgcctgagctctacctcctgtcagatcagcagtggcattaaattctcacagaagcacaaaccctattatgaactgcacatgtgatggatctaggctgcgtgctccttatgagaatctaatgccttatgatctgtcactgtctcccatcatccccagatgggaccatctagtctagctgcaggaaaacaggctcaaggctcccactgatactacattatggtgagttatataattatttcattatatattacagtgtaataatagtagaaataaagtgcacgataaatgtaacaggcttgaatcatcctgaaagcatcccccaccactgtccatggaaaaatggccttccaagaaaccagtccctgatgccaaaaaggttggggaccacctgctctagcatttatcatcattccttggaagcccctgggacagggacaatctcatcagtgcacagaggcggcatatggaagacagtagtatttcagagacaactatagataaattccactgatgagcacagggcaaaaattctaaatgaagcattagcaaatcaaacccagcagtgcatcgaaagaatcatccaccagcaccaagtatgattaatccaaggagagctcacaccaagaaatctaccatccaggccgggcgcagtggctcacatctgtaatcccaatactttgggaagccgagatgggtggatcatgaggtcaggagatcaagaccatcctggctaacacagtgaaaccccatctctactaaaaatacaaaaaattagccgggcatggtggcgtgcgcctatagtcccagctacttgggaggctgaggcaggagaatcaccccgggaggcagaggttgcagtgagccaagattgtgccactgcactccagcctgggcgacagagtaagactctgtctcaaaaaaaaaaaaaaaaaaaaaaaaga

SEQ ID NO: 671520 - DNA, 1096 bp, Homo sapiens
ccacaagattgattctctagtacaggggtccccaaccccctggccacagactggtaccggtctatgtcccgttaggaaccaggctggagagcaggaggtgagcggcgggtgaagcttcatctgtatttgcagccaccccacatcgtttgtattcctgcctgagctctacctcctgtcagatcagcagtggcattaaattctcacagaagcacaaaccctattrtgaactgcacatgtgatggatctaggctgcgtgctccttatgagaatctaatgccttatgatctgtcactgtctcccatcatccccagatgggaccatctagtctagctgcaggaaaacaggctcaaggctcccactgatactacattatggtgagttatataattatttcattatatattacagtgtaataatagtagaaataaagtgcacgataaatgtaacaggcttgaatcatcctgaaagcatcccccaccactgtccatggaaaaatggccttccaagaaaccagtccctgatgccaaaaaggttggggaccacctgctctagcatttatcatcattccttggaagcccctgggacagggacaatctcatcagtgcacagaggcggcatatggaagacagtagtatttcagagacaactatagataaattccactgatgagcacagggcaaaaattctaaatgaagcattagcaaatcaaacccagcagtgcatcgaaagaatcatccaccagcaccaagtatgattaatccaaggagagctcacaccaagaaatctaccatccaggccgggcgcagtggctcacatctgtaatcccaatactttgggaagccgagatgggtggatcatgaggtcaggagatcaagaccatcctggctaacacagtgaaaccccatctctactaaaaatacaaaaaattagccgggcatggtggcgtgcgcctatagtcccagctacttgggaggctgaggcaggagaatcaccccgggaggcagaggttgcagtgagccaagattgtgccactgcactccagcctgggcgacagagtaagactctgtctcaaaaaaaaaaaaaaaaaaaaaaaaga

SEQ ID NO: 671521 - DNA, 2642 bp, Homo sapiens
tgaacagaggggtgtgaatcactggtgcctggctcccacacccaggagagctgagaaaggagttgtgggttaatccaggccatgcacttgcagcggctccagctcagctccgccttcagcacgctcaaagcgattggtaggacagcgggtgagtcggggtgggctgtgcacagagagctgagcctgaacacaggccaggtcgtcctagcaggggcaggacatgggctgctgaaggaaaccagtcctccttcaggcccagcaggctctgggatttgctgccctggctggagcctcccttggggacaaacagagcaggacagggaggcaaaggggaagccagggcctctggatggagcgggcagttgggggaccagggactgggctcgccgccttgctactatgtgccttttggccaagacttcacctctctgagctcaaatgtacaaatctatagcacatgggtaaactgagtcggtgggcagcagcccgcctccacgtgcccatggcgagcacgctggcactgcttcactgaacattctcagtgacattccgagaggcatcgtcctgctcacttgatggacaagcctgttttggtttaaagagacagagtcagcacttcaacccaggtctccctggcaccaaggccagtgtgcaccttcactccacggctctgtgatcagggtggcatctgctgccatccacagtgccccttgccctctgtgctgggctcctgcaatcgccgccggtggcacctcagctctgtgtctcaaggccctgcacatctgccccctccgtgaggcagttccctgctctctcatggaatactcgacctcgagaaggttctggttgcagaggctgtctgggaagccatcgcgtttcctcctgggcacagactgcagcccctctccaagggagtgagttggaaacacaagatcaagtccagaccaaggggacttagagggaaaggacaaacctggaccgtaaacacatccatcctatagtcccccatctccaggctgagaggagaaactgaagaaactgagggctggaggagggaggagctgcaagataggcgggctatgggaccaacaggtccacggggtaggggagcccctaggggtggggccccaggtgggtagagcctcagggtaggcagggacatacaggggacgaagacacgaggtggtcagagccagaacactgtggagcctgggtccccaggtgagcgccaaaaagctgcctgcaccaagaacaccatgagatataaacawaatgaggctgatgtgttaggtccctggaatttggggctgtttgttacagcatttagctgtgacatttacaggccaccagagctcatttaaccaagccctccctttcaggaggaagcaccagggcccccatgcgctgctgtgcccacggccacattgggcatccatggcagacaggcactgggcctctagtcccttctctctcaacacaggcaagctgtgttttgcaccaggaacgccttggctcatggagacaatgactatattaagtgcttccccttcaaccttctctttttggacaagcactttagacaactgaagataaaccagaagaaaaagaaacggggaaaaaaatggaaaatatgcctgctggctggaagcattatgcaaagacagctttctgagaagagcagagaatttaaaatgactcctctgtccccaagcaatgtctctaccttttcaatctctcatttttcatcttctctcaagcctgtctaaataaagcaaagactctcgccacccaggcaggccccccgcccccaccgctctgtgtggctctgtgttgagtccttgtcctcatcacacaatgccaacccagtctcagactttctcatctgccaatcagatcatacacgtgggcacggtcagcacccagggggtttggaggaatcatgagaccctttcctagaggaggaagctgaggcctggaagggaaggagtacaggagggtcagagcagatgtgagggttgtgcaggtgtcagagtgggtgtggaggtgtccaggggtcagagcaggtgtgggggctgtgcaggggtcagagcaggtgggaggtgtgcaggatcagagaagatgcagggggtacacacagcaggagtcagagcaggtagggggggcgtacaggggtcagagtgggtgtgggggtgtcccggggtcagagcaggtggggaggtgtgcagggatcagagaagatgcagggggtatacacagcaggtgtcacagcaggttgggggggcatacaggggtcagagtgggtgtggggggtgtcccggggtcagagcaggtgggaggtgtgcagggatcagagaagatgcagggggtatacacagcaggtgtcagagcaggtaggggggcgtacaggggtcagagtgggtgtgggggtgtcccggggtcagagcaggtggggaggtgtgcagggatcagagaagatgcaggggttacacacagcaggtgtcagagcaggtagggggggcatacaggggtcagagtgggtgtgagggtgtcccggggtcagagcaggtgggaggtgtgcagggatcagagaagatgcagggggtatacacagcaagtgtcacagcaggttgggggggcgtaca

SEQ ID NO: 671522 - DNA, 2642 bp, Homo sapiens
tgaacagaggggtgtgaatcactggtgcctggctcccacacccaggagagctgagaaaggagttgtgggttaatccaggccatgcacttgcagcggctccagctcagctccgccttcagcacgctcaaagcgattggtaggacagcgggtgagtcggggtgggctgtgcacagagagctgagcctgaacacaggccaggtcgtcctagcaggggcaggacatgggctgctgaaggaaaccagtcctccttcaggcccagcaggctctgggatttgctgccctggctggagcctcccttggggacaaacagagcaggacagggaggcaaaggggaagccagggcctctggatggagcgggcagttgggggaccagggactgggctcgccgccttgctactatgtgccttttggccaagacttcacctctctgagctcaaatgtacaaatctatagcacatgggtaaactgagtcggtgggcagcagcccgcctccacgtgcccatggcgagcacgctggcactgcttcactgaacattctcagtgacattccgagaggcatcgtcctgctcacttgatggacaagcctgttttggtttaaagagacagagtcagcacttcaacccaggtctccctggcaccaaggccagtgtgcaccttcactccacggctctgtgatcagggtggcatctgctgccatccacagtgccccttgccctctgtgctgggctcctgcaatcgccgccggtggcacctcagctctgtgtctcaaggccctgcacatctgccccctccgtgaggcagttccctgctctctcatggaatactcgacctcgagaaggttctggttgcagaggctgtctgggaagccatcgcgtttcctcctgggcacagactgcagcccctctccaagggagtgagttggaaacacaagatcaagtccagaccaaggggacttagagggaaaggacaaacctggaccgtaaacacatccatcctatagtcccccatctccaggctgagaggagaaactgaagaaactgagggctggaggagggaggagctgcaagataggcgggctatgggaccaacaggtccacggggtaggggagcccctaggggtggggccccaggtgggtagagcctcagggtaggcagggacatacaggggacgaagacacgaggtggtcagagccagaacactgtggagcctgggtccccaggtgagcgccaaaaagctgcctgcaccaagaacaccatgagatataaacataatgaggctgatgtgttaggtccctggaatttggggctgtttgttacagcatttagctgtgacatttacaggccaccagagctcatttaaccaagccctccctttcaggaggaagcaccagggcccccatgcgctgctgtgcccacggccacattgggcatccatggcagacaggcactgggcctctagtcccttctctctcaacacaggcaagctgtgttttgcaccaggaacgccttggctcatggagacaatgactatattaagtgcttccccttcaaccttctctttttggacaagcactttagacaactgaagataaaccagaagaaaaagaaacggggaaaaaaatggaaaatatgcctgctggctggaagcattatgcaaagacagctttctgagaagagcagagaatttaaaatgactcctctgtccccaagcaatgtctctaccttttcaatctctcatttttcatcttctctcaagcctgtctaaataaagcaaagactctcgccacccaggcaggccccccgcccccaccgctctgtgtggctctgtgttgagtccttgtcctcatcacacaatgccaacccagtctcagactttctcatctgccaatcagatcatacacgtgggcacggtcagcacccagggggtttggaggaatcatgagaccctttcctagaggaggaagctgaggcctggaagggaaggagtacaggagggtcagagcagatgtgagggttgtgcaggtgtcagagtgggtgtggaggtgtccaggggtcagagcaggtgtgggggctgtgcaggggtcagagcaggtgggaggtgtgcaggatcagagaagatgcagggggtacacacagcaggagtcagagcaggtagggggggcgtacaggggtcagagtgggtgtgggggtgtcccggggtcagagcaggtggggaggtgtgcagggatcagagaagatgcagggggtatacacagcaggtgtcacagcaggttgggggggcatacaggggtcagagtgggtgtggggggtgtcccggggtcagagcaggtgggaggtgtgcagggatcagagaagatgcagggggtatacacagcaggtgtcagagcaggtaggggggcgtacaggggtcagagtgggtgtgggggtgtcccggggtcagagcaggtggggaggtgtgcagggatcagagaagatgcaggggttacacacagcaggtgtcagagcaggtagggggggcatacaggggtcagagtgggtgtgagggtgtcccggggtcagagcaggtgggaggtgtgcagggatcagagaagatgcaggggktatacacagcaagtgtcacagcaggttgggggggcgtaca

SEQ ID NO: 671523 - DNA, 2642 bp, Homo sapiens
tgaacagaggggtgtgaatcactggtgcctggctcccacacccaggagagctgagaaaggagttgtgggttaatccaggccatgcacttgcagcggctccagctcagctccgccttcagcacgctcaaagcgattggtaggacagcgggtgagtcggggtgggctgtgcacagagagctgagcctgaacacaggccaggtcgtcctagcaggggcaggacatgggctgctgaaggaaaccagtcctccttcaggcccagcaggctctgggatttgctgccctggctggagcctcccttggggacaaacagagcaggacagggaggcaaaggggaagccagggcctctggatggagcgggcagttgggggaccagggactgggctcgccgccttgctactatgtgccttttggccaagacttcacctctctgagctcaaatgtacaaatctatagcacatgggtaaactgagtcggtgggcagcagcccgcctccacgtgcccatggcgagcacgctggcactgcttcactgaacattctcagtgacattccgagaggcatcgtcctgctcacttgatggacaagcctgttttggtttaaagagacagagtcagcacttcaacccaggtctccctggcaccaaggccagtgtgcaccttcactccacggctctgtgatcagggtggcatctgctgccatccacagtgccccttgccctctgtgctgggctcctgcaatcgccgccggtggcacctcagctctgtgtctcaaggccctgcacatctgccccctccgtgaggcagttccctgctctctcatggaatactcgacctcgagaaggttctggttgcagaggctgtctgggaagccatcgcgtttcctcctgggcacagactgcagcccctctccaagggagtgagttggaaacacaagatcaagtccagaccaaggggacttagagggaaaggacaaacctggaccgtaaacacatccatcctatagtcccccatctccaggctgagaggagaaactgaagaaactgagggctggaggagggaggagctgcaagataggcgggctatgggaccaacaggtccacggggtaggggagcccctaggggtggggccccaggtgggtagagcctcagggtaggcagggacatacaggggacgaagacacgaggtggtcagagccagaacactgtggagcctgggtccccaggtgagcgccaaaaagctgcctgcaccaagaacaccatgagatataaacataatgaggctgatgtgttaggtccctggaatttggggctgtttgttacagcatttagctgtgacatttacaggccaccagagctcatttaaccaagccctccctttcaggaggaagcaccagggcccccatgcgctgctgtgcccacggccacattgggcatccatggcagacaggcactgggcctctagtcccttctctctcaacacaggcaagctgtgttttgcaccaggaacgccttggctcatggagacaatgactatattaagtgcttccccttcaaccttctctttttggacaagcactttagacaactgaagataaaccagaagaaaaagaaacggggaaaaaaatggaaaatatgcctgctggctggaagcattatgcaaagacagctttctgagaagagcagagaatttaaaatgactcctctgtccccaagcaatgtctctaccttttcaatctctcatttttcatcttctctcaagcctgtctaaataaagcaaagactctcgccacccaggcaggccccccgcccccaccgctctgtgtggctctgtgttgagtccttgtcctcatcacacaatgccaacccagtctcagactttctcatctgccaatcagatcatacacgtgggcacggtcagcacccagggggtttggaggaatcatgagaccctttcctagaggaggaagctgaggcctggaagggaaggagtacaggagggtcagagcagatgtgagggttgtgcaggtgtcagagtgggtgtggaggtgtccaggggtcagagcaggtgtgggggctgtgcaggggtcagagcaggtgggaggtgtgcaggatcagagaagatgcagggggtacacacagcaggagtcagagcaggtagggggggcgtacaggggtcagagtgggtgtgggggtgtcccggggtcagagcaggtggggaggtgtgcagggatcagagaagatgcagggggtatacacagcaggtgtcacagcaggttgggggggcatacaggggtcagagtgggtgtggggggtgtcccggggtcagagcaggtgggaggtgtgcagggatcagagaagatgcagggggtatacacagcaggtgtcagagcaggtaggggggcgtacaggggtcagagtgggtgtgggggtgtcccggggtcagagcaggtggggaggtgtgcagggatcagagaagatgcaggggttacacacagcaggtgtcagagcaggtagggggggcatacaggggtcagagtgggtgtgagggtgtcccggggtcagagcaggtgggaggtgtgcagggatcagagaagatgcagggggtayacacagcaagtgtcacagcaggttgggggggcgtaca

SEQ ID NO: 671524 - DNA, 2642 bp, Homo sapiens
tgaacagaggggtgtgaatcactggtgcctggctcccacacccaggagagctgagaaaggagttgtgggttaatccaggccatgcacttgcagcggctccagctcagctccgccttcagcacgctcaaagcgattggtaggacagcgggtgagtcggggtgggctgtgcacagagagctgagcctgaacacaggccaggtcgtcctagcaggggcaggacatgggctgctgaaggaaaccagtcctccttcaggcccagcaggctctgggatttgctgccctggctggagcctcccttggggacaaacagagcaggacagggaggcaaaggggaagccagggcctctggatggagcgggcagttgggggaccagggactgggctcgccgccttgctactatgtgccttttggccaagacttcacctctctgagctcaaatgtacaaatctatagcacatgggtaaactgagtcggtgggcagcagcccgcctccacgtgcccatggcgagcacgctggcactgcttcactgaacattctcagtgacattccgagaggcatcgtcctgctcacttgatggacaagcctgttttggtttaaagagacagagtcagcacttcaacccaggtctccctggcaccaaggccagtgtgcaccttcactccacggctctgtgatcagggtggcatctgctgccatccacagtgccccttgccctctgtgctgggctcctgcaatcgccgccggtggcacctcagctctgtgtctcaaggccctgcacatctgccccctccgtgaggcagttccctgctctctcatggaatactcgacctcgagaaggttctggttgcagaggctgtctgggaagccatcgcgtttcctcctgggcacagactgcagcccctctccaagggagtgagttggaaacacaagatcaagtccagaccaaggggacttagagggaaaggacaaacctggaccgtaaacacatccatcctatagtcccccatctccaggctgagaggagaaactgaagaaactgagggctggaggagggaggagctgcaagataggcgggctatgggaccaacaggtccacggggtaggggagcccctaggggtggggccccaggtgggtagagcctcagggtaggcagggacatacaggggacgaagacacgaggtggtcagagccagaacactgtggagcctgggtccccaggtgagcgccaaaaagctgcctgcaccaagaacaccatgagatataaacataatgaggctgatgtgttaggtccctggaatttggggctgtttgttacagcatttagctgtgacatttacaggccaccagagctcatttaaccaagccctccctttcaggaggaagcaccagggcccccatgcgctgctgtgcccacggccacattgggcatccatggcagacaggcactgggcctctagtcccttctctctcaacacaggcaagctgtgttttgcaccaggaacgccttggctcatggagacaatgactatattaagtgcttccccttcaaccttctctttttggacaagcactttagacaactgaagataaaccagaagaaaaagaaacggggaaaaaaatggaaaatatgcctgctggctggaagcattatgcaaagacagctttctgagaagagcagagaatttaaaatgactcctctgtccccaagcaatgtctctaccttttcaatctctcatttttcatcttctctcaagcctgtctaaataaagcaaagactctcgccacccaggcaggccccccgcccccaccgctctgtgtggctctgtgttgagtccttgtcctcatcacacaatgccaacccagtctcagactttctcatctgccaatcagatcatacacgtgggcacggtcagcacccagggggtttggaggaatcatgagaccctttcctagaggaggaagctgaggcctggaagggaaggagtacaggagggtcagagcagatgtgagggttgtgcaggtgtcagagtgggtgtggaggtgtccaggggtcagagcaggtgtgggggctgtgcaggggtcagagcaggtgggaggtgtgcaggatcagagaagatgcagggggtacacacagcaggagtcagagcaggtagggggggcgtacaggggtcagagtgggtgtgggggtgtcccggggtcagagcaggtggggaggtgtgcagggatcagagaagatgcagggggtatacacagcaggtgtcacagcaggttgggggggcatacaggggtcagagtgggtgtggggggtgtcccggggtcagagcaggtgggaggtgtgcagggatcagagaagatgcagggggtatacacagcaggtgtcagagcaggtaggggggcgtacaggggtcagagtgggtgtgggggtgtcccggggtcagagcaggtggggaggtgtgcagggatcagagaagatgcaggggttacacacagcaggtgtcagagcaggtagggggggcatacaggggtcagagtgggtgtgagggtgtcccggggtcagagcaggtgggaggtgtgcagggatcagagaagatgcagggggtatacacagcargtgtcacagcaggttgggggggcgtaca

SEQ ID NO: 671525 - DNA, 2642 bp, Homo sapiens
tgaacagaggggtgtgaatcactggtgcctggctcccacacccaggagagctgagaaaggagttgtgggttaatccaggccatgcacttgcagcggctccagctcagctccgccttcagcacgctcaaagcgattggtaggacagcgggtgagtcggggtgggctgtgcacagagagctgagcctgaacacaggccaggtcgtcctagcaggggcaggacatgggctgctgaaggaaaccagtcctccttcaggcccagcaggctctgggatttgctgccctggctggagcctcccttggggacaaacagagcaggacagggaggcaaaggggaagccagggcctctggatggagcgggcagttgggggaccagggactgggctcgccgccttgctactatgtgccttttggccaagacttcacctctctgagctcaaatgtacaaatctatagcacatgggtaaactgagtcggtgggcagcagcccgcctccacgtgcccatggcgagcacgctggcactgcttcactgaacattctcagtgacattccgagaggcatcgtcctgctcacttgatggacaagcctgttttggtttaaagagacagagtcagcacttcaacccaggtctccctggcaccaaggccagtgtgcaccttcactccacggctctgtgatcagggtggcatctgctgccatccacagtgccccttgccctctgtgctgggctcctgcaatcgccgccggtggcacctcagctctgtgtctcaaggccctgcacatctgccccctccgtgaggcagttccctgctctctcatggaatactcgacctcgagaaggttctggttgcagaggctgtctgggaagccatcgcgtttcctcctgggcacagactgcagcccctctccaagggagtgagttggaaacacaagatcaagtccagaccaaggggacttagagggaaaggacaaacctggaccgtaaacacatccatcctatagtcccccatctccaggctgagaggagaaactgaagaaactgagggctggaggagggaggagctgcaagataggcgggctatgggaccaacaggtccacggggtaggggagcccctaggggtggggccccaggtgggtagagcctcagggtaggcagggacatacaggggacgaagacacgaggtggtcagagccagaacactgtggagcctgggtccccaggtgagcgccaaaaagctgcctgcaccaagaacaccatgagatataaacataatgaggctgatgtgttaggtccctggaatttggggctgtttgttacagcatttagctgtgacatttacaggccaccagagctcatttaaccaagccctccctttcaggaggaagcaccagggcccccatgcgctgctgtgcccacggccacattgggcatccatggcagacaggcactgggcctctagtcccttctctctcaacacaggcaagctgtgttttgcaccaggaacgccttggctcatggagacaatgactatattaagtgcttccccttcaaccttctctttttggacaagcactttagacaactgaagataaaccagaagaaaaagaaacggggaaaaaaatggaaaatatgcctgctggctggaagcattatgcaaagacagctttctgagaagagcagagaatttaaaatgactcctctgtccccaagcaatgtctctaccttttcaatctctcatttttcatcttctctcaagcctgtctaaataaagcaaagactctcgccacccaggcaggccccccgcccccaccgctctgtgtggctctgtgttgagtccttgtcctcatcacacaatgccaacccagtctcagactttctcatctgccaatcagatcatacacgtgggcacggtcagcacccagggggtttggaggaatcatgagaccctttcctagaggaggaagctgaggcctggaagggaaggagtacaggagggtcagagcagatgtgagggttgtgcaggtgtcagagtgggtgtggaggtgtccaggggtcagagcaggtgtgggggctgtgcaggggtcagagcaggtgggaggtgtgcaggatcagagaagatgcagggggtacacacagcaggagtcagagcaggtagggggggcgtacaggggtcagagtgggtgtgggggtgtcccggggtcagagcaggtggggaggtgtgcagggatcagagaagatgcagggggtatacacagcaggtgtcacagcaggttgggggggcatacaggggtcagagtgggtgtggggggtgtcccggggtcagagcaggtgggaggtgtgcagggatcagagaagatgcagggggtatacacagcaggtgtcagagcaggtaggggggcgtacaggggtcagagtgggtgtgggggtgtcccggggtcagagcaggtggggaggtgtgcagggatcagagaagatgcaggggttacacacagcaggtgtcagagcaggtagggggggcatacaggggtcagagtgggtgtgagggtgtcccggggtcagagcaggtgggaggtgtgcagggatcagagaagatgcagggggtatacacagcaagtgtcasagcaggttgggggggcgtaca

SEQ ID NO: 671526 - DNA, 2642 bp, Homo sapiens
tgaacagaggggtgtgaatcactggtgcctggctcccacacccaggagagctgagaaaggagttgtgggttaatccaggccatgcacttgcagcggctccagctcagctccgccttcagcacgctcaaagcgattggtaggacagcgggtgagtcggggtgggctgtgcacagagagctgagcctgaacacaggccaggtcgtcctagcaggggcaggacatgggctgctgaaggaaaccagtcctccttcaggcccagcaggctctgggatttgctgccctggctggagcctcccttggggacaaacagagcaggacagggaggcaaaggggaagccagggcctctggatggagcgggcagttgggggaccagggactgggctcgccgccttgctactatgtgccttttggccaagacttcacctctctgagctcaaatgtacaaatctatagcacatgggtaaactgagtcggtgggcagcagcccgcctccacgtgcccatggcgagcacgctggcactgcttcactgaacattctcagtgacattccgagaggcatcgtcctgctcacttgatggacaagcctgttttggtttaaagagacagagtcagcacttcaacccaggtctccctggcaccaaggccagtgtgcaccttcactccacggctctgtgatcagggtggcatctgctgccatccacagtgccccttgccctctgtgctgggctcctgcaatcgccgccggtggcacctcagctctgtgtctcaaggccctgcacatctgccccctccgtgaggcagttccctgctctctcatggaatactcgacctcgagaaggttctggttgcagaggctgtctgggaagccatcgcgtttcctcctgggcacagactgcagcccctctccaagggagtgagttggaaacacaagatcaagtccagaccaaggggacttagagggaaaggacaaacctggaccgtaaacacatccatcctatagtcccccatctccaggctgagaggagaaactgaagaaactgagggctggaggagggaggagctgcaagataggcgggctatgggaccaacaggtccacggggtaggggagcccctaggggtggggccccaggtgggtagagcctcagggtaggcagggacatacaggggacgaagacacgaggtggtcagagccagaacactgtggagcctgggtccccaggtgagcgccaaaaagctgcctgcaccaagaacaccatgagatataaacataatgaggctgatgtgttaggtccctggaatttggggctgtttgttacagcatttagctgtgacatttacaggccaccagagctcatttaaccaagccctccctttcaggaggaagcaccagggcccccatgcgctgctgtgcccacggccacattgggcatccatggcagacaggcactgggcctctagtcccttctctctcaacacaggcaagctgtgttttgcaccaggaacgccttggctcatggagacaatgactatattaagtgcttccccttcaaccttctctttttggacaagcactttagacaactgaagataaaccagaagaaaaagaaacggggaaaaaaatggaaaatatgcctgctggctggaagcattatgcaaagacagctttctgagaagagcagagaatttaaaatgactcctctgtccccaagcaatgtctctaccttttcaatctctcatttttcatcttctctcaagcctgtctaaataaagcaaagactctcgccacccaggcaggccccccgcccccaccgctctgtgtggctctgtgttgagtccttgtcctcatcacacaatgccaacccagtctcagactttctcatctgccaatcagatcatacacgtgggcacggtcagcacccagggggtttggaggaatcatgagaccctttcctagaggaggaagctgaggcctggaagggaaggagtacaggagggtcagagcagatgtgagggttgtgcaggtgtcagagtgggtgtggaggtgtccaggggtcagagcaggtgtgggggctgtgcaggggtcagagcaggtgggaggtgtgcaggatcagagaagatgcagggggtacacacagcaggagtcagagcaggtagggggggcgtacaggggtcagagtgggtgtgggggtgtcccggggtcagagcaggtggggaggtgtgcagggatcagagaagatgcagggggtatacacagcaggtgtcacagcaggttgggggggcatacaggggtcagagtgggtgtggggggtgtcccggggtcagagcaggtgggaggtgtgcagggatcagagaagatgcagggggtatacacagcaggtgtcagagcaggtaggggggcgtacaggggtcagagtgggtgtgggggtgtcccggggtcagagcaggtggggaggtgtgcagggatcagagaagatgcaggggttacacacagcaggtgtcagagcaggtagggggggcatacaggggtcagagtgggtgtgagggtgtcccggggtcagagcaggtgggaggtgtgcagggatcagagaagatgcagggggtatacacagcaagtgtcacagcaggttgggggggcrtaca

SEQ ID NO: 671527 - DNA, 2007 bp, Homo sapiens
gcatatggccatctacccactcatcagyggtccacccatttatcctttcaccatccaattgtctactaatccagtcttcatcccttcacccaattatacactgacccatctgaccattgacccatctagctatcaactcatcttcccatatactcagcccccatccaccttcccaaaaatcacttaatgaagtcctaccacacaccaagaagcattcctgatatggcaggatcaagatgagtaagatatcctccatgctcaaaagaactctgtctaaaagagatcatcgtgtaaaaagaaaactgcagaagctctccatccacagattttcaccttaggaactttcacaagcatcagtaatggagaaaatgcacatcagctcagctcccaagcagcagatgatgtcatgggttccttacacactgttactgtcagagcctaacctgtcagtgaatagaggaacttctgtataacaatgtgatcagacagcgatatgaaccactgcagagaggtatgaacaacgtacaatgggagccgaggagagcagtatatcagggtcagggaacagcatactttcttgaacttgaccggattcaaacctaagtcaatgtccttccagaacacacactctccccgtgtcaccatgctactttcaactggaattcaggagctcagacccacagcaactcaaaagatagatgctgaccacagatgtcaccaactgctcctccatcttgactccgggagctgtatgcgagtgacaacaggatggtggttagacggtggtgcatcccggaaggcatgggaccgggcctgctttccacctggtacctatttcaaacggggatgaacggtcaaatcatccatcagagcaggtccctgaactctggtctccagaggaagcagagcaagtgggatagcactaacacgagaacacagcctgggaatcctggagagtgccggaaaaccgaacccaacgttcaaaagggaaatgagtcgggaaggggaaaggtcccgcggactcacggcaaatgtttacatttgatgatctttggaacatatgcatggctgcatacagtacttgctgttaacattatagagaagcctgagctggcaccagcaggagatctccaaagtcattcagtcacgcacagtctccccgaaggatctgggtgggctctgtgaggggcaggtggagaaggacactggatttggtgaacggactggctgtgcatcccacagatgctcctggagggtctgccaggggaatgaaggacgtctctgatatggtttggctgtgtccccacccaaatctcatcttgaattcccatgtgctgtgggagagtccccgtgggaggtaattgaatcatgggggcaggtctttcctgcgctgttctcgtgatagtgagtacgtctcatgagatctgatgattataaggagctttcctacataagctctttctttgcctgctgccttccacagatgatgagacttgctcctccttgccttccaccacaattgtgaggcctccccaaccacgtggaactgtgagtccaattaaacctctttctttttaaagacatgcccagtctcaggtatgtctttatcagcagcatgaaaatggactaatacagtctctgagatctaacctctccctccttcacactccagaacactagtgtgcgcccatgttatttctggtaccggatcatgaattcatgggttgatgcccgccttccccactggacaggaggctcctcaccgagtgccagatacacagtgcgtgctctgacaatatctgttctcctccctggtcctggttctgccactgatgaacttccttcttgtgggcagtttccaaatgtataaaatgacagagaacagtcagactgatgatttctacctgggctcccaaaggcactaatggtgttaatggtaatgattctcaatatttcagacaatcagttggaaatcatgtgtttatcttccatcgggcagcacaaacc

SEQ ID NO: 671528 - DNA, 2007 bp, Homo sapiens
gcatatggccatctacccactcatcagtggtccacccatttatcctttcaccatccaattgtctactaatccagtcttcatcccttcacccaattatacactgacccatctgaccattgacccatctagctatcaactcatcttcccatataytcagcccccatccaccttcccaaaaatcacttaatgaagtcctaccacacaccaagaagcattcctgatatggcaggatcaagatgagtaagatatcctccatgctcaaaagaactctgtctaaaagagatcatcgtgtaaaaagaaaactgcagaagctctccatccacagattttcaccttaggaactttcacaagcatcagtaatggagaaaatgcacatcagctcagctcccaagcagcagatgatgtcatgggttccttacacactgttactgtcagagcctaacctgtcagtgaatagaggaacttctgtataacaatgtgatcagacagcgatatgaaccactgcagagaggtatgaacaacgtacaatgggagccgaggagagcagtatatcagggtcagggaacagcatactttcttgaacttgaccggattcaaacctaagtcaatgtccttccagaacacacactctccccgtgtcaccatgctactttcaactggaattcaggagctcagacccacagcaactcaaaagatagatgctgaccacagatgtcaccaactgctcctccatcttgactccgggagctgtatgcgagtgacaacaggatggtggttagacggtggtgcatcccggaaggcatgggaccgggcctgctttccacctggtacctatttcaaacggggatgaacggtcaaatcatccatcagagcaggtccctgaactctggtctccagaggaagcagagcaagtgggatagcactaacacgagaacacagcctgggaatcctggagagtgccggaaaaccgaacccaacgttcaaaagggaaatgagtcgggaaggggaaaggtcccgcggactcacggcaaatgtttacatttgatgatctttggaacatatgcatggctgcatacagtacttgctgttaacattatagagaagcctgagctggcaccagcaggagatctccaaagtcattcagtcacgcacagtctccccgaaggatctgggtgggctctgtgaggggcaggtggagaaggacactggatttggtgaacggactggctgtgcatcccacagatgctcctggagggtctgccaggggaatgaaggacgtctctgatatggtttggctgtgtccccacccaaatctcatcttgaattcccatgtgctgtgggagagtccccgtgggaggtaattgaatcatgggggcaggtctttcctgcgctgttctcgtgatagtgagtacgtctcatgagatctgatgattataaggagctttcctacataagctctttctttgcctgctgccttccacagatgatgagacttgctcctccttgccttccaccacaattgtgaggcctccccaaccacgtggaactgtgagtccaattaaacctctttctttttaaagacatgcccagtctcaggtatgtctttatcagcagcatgaaaatggactaatacagtctctgagatctaacctctccctccttcacactccagaacactagtgtgcgcccatgttatttctggtaccggatcatgaattcatgggttgatgcccgccttccccactggacaggaggctcctcaccgagtgccagatacacagtgcgtgctctgacaatatctgttctcctccctggtcctggttctgccactgatgaacttccttcttgtgggcagtttccaaatgtataaaatgacagagaacagtcagactgatgatttctacctgggctcccaaaggcactaatggtgttaatggtaatgattctcaatatttcagacaatcagttggaaatcatgtgtttatcttccatcgggcagcacaaacc

SEQ ID NO: 671529 - DNA, 2007 bp, Homo sapiens
gcatatggccatctacccactcatcagtggtccacccatttatcctttcaccatccaattgtctactaatccagtcttcatcccttcacccaattatacactgacccatctgaccattgacccatctagctatcaactcatcttcccatatacycagcccccatccaccttcccaaaaatcacttaatgaagtcctaccacacaccaagaagcattcctgatatggcaggatcaagatgagtaagatatcctccatgctcaaaagaactctgtctaaaagagatcatcgtgtaaaaagaaaactgcagaagctctccatccacagattttcaccttaggaactttcacaagcatcagtaatggagaaaatgcacatcagctcagctcccaagcagcagatgatgtcatgggttccttacacactgttactgtcagagcctaacctgtcagtgaatagaggaacttctgtataacaatgtgatcagacagcgatatgaaccactgcagagaggtatgaacaacgtacaatgggagccgaggagagcagtatatcagggtcagggaacagcatactttcttgaacttgaccggattcaaacctaagtcaatgtccttccagaacacacactctccccgtgtcaccatgctactttcaactggaattcaggagctcagacccacagcaactcaaaagatagatgctgaccacagatgtcaccaactgctcctccatcttgactccgggagctgtatgcgagtgacaacaggatggtggttagacggtggtgcatcccggaaggcatgggaccgggcctgctttccacctggtacctatttcaaacggggatgaacggtcaaatcatccatcagagcaggtccctgaactctggtctccagaggaagcagagcaagtgggatagcactaacacgagaacacagcctgggaatcctggagagtgccggaaaaccgaacccaacgttcaaaagggaaatgagtcgggaaggggaaaggtcccgcggactcacggcaaatgtttacatttgatgatctttggaacatatgcatggctgcatacagtacttgctgttaacattatagagaagcctgagctggcaccagcaggagatctccaaagtcattcagtcacgcacagtctccccgaaggatctgggtgggctctgtgaggggcaggtggagaaggacactggatttggtgaacggactggctgtgcatcccacagatgctcctggagggtctgccaggggaatgaaggacgtctctgatatggtttggctgtgtccccacccaaatctcatcttgaattcccatgtgctgtgggagagtccccgtgggaggtaattgaatcatgggggcaggtctttcctgcgctgttctcgtgatagtgagtacgtctcatgagatctgatgattataaggagctttcctacataagctctttctttgcctgctgccttccacagatgatgagacttgctcctccttgccttccaccacaattgtgaggcctccccaaccacgtggaactgtgagtccaattaaacctctttctttttaaagacatgcccagtctcaggtatgtctttatcagcagcatgaaaatggactaatacagtctctgagatctaacctctccctccttcacactccagaacactagtgtgcgcccatgttatttctggtaccggatcatgaattcatgggttgatgcccgccttccccactggacaggaggctcctcaccgagtgccagatacacagtgcgtgctctgacaatatctgttctcctccctggtcctggttctgccactgatgaacttccttcttgtgggcagtttccaaatgtataaaatgacagagaacagtcagactgatgatttctacctgggctcccaaaggcactaatggtgttaatggtaatgattctcaatatttcagacaatcagttggaaatcatgtgtttatcttccatcgggcagcacaaacc

SEQ ID NO: 671530 - DNA, 2007 bp, Homo sapiens
gcatatggccatctacccactcatcagtggtccacccatttatcctttcaccatccaattgtctactaatccagtcttcatcccttcacccaattatacactgacccatctgaccattgacccatctagctatcaactcatcttcccatatactcagcccccatccaccttcccaaaaatcacttaatgaagtcctaccacacaccaagaagcattcctgatatggsaggatcaagatgagtaagatatcctccatgctcaaaagaactctgtctaaaagagatcatcgtgtaaaaagaaaactgcagaagctctccatccacagattttcaccttaggaactttcacaagcatcagtaatggagaaaatgcacatcagctcagctcccaagcagcagatgatgtcatgggttccttacacactgttactgtcagagcctaacctgtcagtgaatagaggaacttctgtataacaatgtgatcagacagcgatatgaaccactgcagagaggtatgaacaacgtacaatgggagccgaggagagcagtatatcagggtcagggaacagcatactttcttgaacttgaccggattcaaacctaagtcaatgtccttccagaacacacactctccccgtgtcaccatgctactttcaactggaattcaggagctcagacccacagcaactcaaaagatagatgctgaccacagatgtcaccaactgctcctccatcttgactccgggagctgtatgcgagtgacaacaggatggtggttagacggtggtgcatcccggaaggcatgggaccgggcctgctttccacctggtacctatttcaaacggggatgaacggtcaaatcatccatcagagcaggtccctgaactctggtctccagaggaagcagagcaagtgggatagcactaacacgagaacacagcctgggaatcctggagagtgccggaaaaccgaacccaacgttcaaaagggaaatgagtcgggaaggggaaaggtcccgcggactcacggcaaatgtttacatttgatgatctttggaacatatgcatggctgcatacagtacttgctgttaacattatagagaagcctgagctggcaccagcaggagatctccaaagtcattcagtcacgcacagtctccccgaaggatctgggtgggctctgtgaggggcaggtggagaaggacactggatttggtgaacggactggctgtgcatcccacagatgctcctggagggtctgccaggggaatgaaggacgtctctgatatggtttggctgtgtccccacccaaatctcatcttgaattcccatgtgctgtgggagagtccccgtgggaggtaattgaatcatgggggcaggtctttcctgcgctgttctcgtgatagtgagtacgtctcatgagatctgatgattataaggagctttcctacataagctctttctttgcctgctgccttccacagatgatgagacttgctcctccttgccttccaccacaattgtgaggcctccccaaccacgtggaactgtgagtccaattaaacctctttctttttaaagacatgcccagtctcaggtatgtctttatcagcagcatgaaaatggactaatacagtctctgagatctaacctctccctccttcacactccagaacactagtgtgcgcccatgttatttctggtaccggatcatgaattcatgggttgatgcccgccttccccactggacaggaggctcctcaccgagtgccagatacacagtgcgtgctctgacaatatctgttctcctccctggtcctggttctgccactgatgaacttccttcttgtgggcagtttccaaatgtataaaatgacagagaacagtcagactgatgatttctacctgggctcccaaaggcactaatggtgttaatggtaatgattctcaatatttcagacaatcagttggaaatcatgtgtttatcttccatcgggcagcacaaacc

SEQ ID NO: 671531 - DNA, 874 bp, Homo sapiens
aatcagatctaatgtcgaaatgccatgtcctcattcatacacatcttcttttacaaattccacaggtttagttactttgggattaatatgggcctattttaaagtgcatttattaatttagcatgaaatgtccaaatgcattctggatcctgagctgacatccagcaatgctgagtgtgygcctgtgtgagtcaccagccctgatgagcctcaggttattgtattcataaaatgaaggggcttaggcttgctccgatttttttaaaaccatttttaacagtaaaaacttgtttcttgttacataaaaatgtacaagaaaaacccaaacattacaaatgataaattataattttattaatataaatattttgtgagctcaatttataggacttagttattataaaagaaataagcaacatgaggtggccatactttcctattttgttcacatgctattgataaatcttgatgtacacagaaaattagtttcaaagaataataattttaaaaatcttgacttgtaatttcaagggactttaaaaaaattcctgcaatttctctttaaaggttctagaacagttttctatgtcttaaagctaaataatcacaaagaactaactgttctcacattctgtattataaatatgtaagtcagaaaaggaacagacaaaagaataaaaacacatgcgtgaacaaatgggccttggtttacattgaattggatctggcaatgaacatgggttatagtagtatttttgtgtgtaattttacacgagtggactgttgacaaaataaaaattgtctgcaatcactatttggtggtatatttgcacaaatggtaaacatatacatagaggtcgtgggagaaatttat

SEQ ID NO: 671532 - DNA, 614 bp, Homo sapiens
ggcatgttaataccttccccataggattgttatgaagattaaatgtgttaacatttgtaaaaaaacattagaataaaacttggtacataataagtatttgttagctaaacttataaaataaaccttgtgtatggggtaaaatcatagacaaaataacaaaactagcaaagtaccgtgggagtatgagcacaacaaaaatgacaaaggatsactactcatgtttgtaaagagcttctacaagtcaaaatgcaaacaacaacaaatatgtgaaaggtgtaaacaggtaaatcaaagatcactgaaatccaagaggcagtctgactgtagtctctgaccatcgggaaaacacaaatttaaatagcggtgaaataactgcagctttaagaagaaagcacttgatgcctgaggaagccatctctttctcccagatgagatgggagccatcctcacaatctgacttcacgacctgcacagttgggtccaactaactttcaccattttcacttgggccacgttgacctgtcaatcagtccttaaacactctacatacttgctgaaaatcaactgatgtctcctctgcttgagatggcctgctcccctttcttcatctggga

SEQ ID NO: 671533 - DNA, 614 bp, Homo sapiens
ggcatgttaataccttccccataggattgttatgaagattaaatgtgttaacatttgtaaaaaaacattagaataaaacttggtacataataagtatttgttagctaaacttataaaataaaccttgtgtatggggtaaaatcatagacaaaataacaaaactagcaaagtaccgtgggagtatgagcacaacaaaaatgacaaaggatgactactcatgtttgtaaagagcttctacaagtcaaaatgcaaacaacaacaaatatgtgaaaggtgtaaacaggtaaatcaaagatcactgaaatccaagaggcagtctgactgtagtctctgaccatygggaaaacacaaatttaaatagcggtgaaataactgcagctttaagaagaaagcacttgatgcctgaggaagccatctctttctcccagatgagatgggagccatcctcacaatctgacttcacgacctgcacagttgggtccaactaactttcaccattttcacttgggccacgttgacctgtcaatcagtccttaaacactctacatacttgctgaaaatcaactgatgtctcctctgcttgagatggcctgctcccctttcttcatctggga

SEQ ID NO: 671534 - DNA, 672 bp, Homo sapiens
tctgaagccactgatttttttttttgtatttaaaatgtttttattatagaaaatttcaaaataataaccactgactttaaaatacccccacacccaagatatctgtcatcagttgatttaggaggctccacttccagtctgtcctgccttgaatatttgtcaaacagtccttgatccttagccactaggactttgcagacatgtaaactaatagctatagcatgtaagtgataattagtgtgagagaaagctaaaccagaactgtaggaacacaaattaaggagtgactaacaaaggtaagggggaggtcgtgaaaattttgtcaagggattaaaattgggccaggaagagaaataaaygagtaaaaatgttttcatgttaataaatctacatataattccataggccttctaggacttgaaagtacgagaaggaaaatgagaatagagcaatttacagtgtctggagaatagtgggcctgatcaataaaggtaggaaaaatcagtgattctaggctaagaaatgtaggctttggcctgcagcatttatgaatccacagaaggatgttgggcagcggagtgacctgatcagatttgagtttaacaatttgccaaacatccctaagcaactcacacctgctgactgcaatgaggaataaattacaatggatcc

SEQ ID NO: 671535 - DNA, 634 bp, Homo sapiens
acattgcttttgatgagctccaggtgttagcacagcaacactgggagggaaccagagttactgctctttaaccagtgataaaacaggctcagggtgattccttacctgcctagggtcatagaggtgctactgaaactcaatcccttaggatataagatttaaattctaatacagcacttaaggaaacatttaaggaaatgatttcttaaggaaaaaaactcattctatgagggagttactctaaataaaattgttttctgtttcttcttctttttaactttctctacaaaagtatgttcacgtggagaaaaatgccctggatgaagaaccaggtgatcaggattttagtcttggttctgcccctaattacctctgtggtcttagagaaacctttgaacatttctatacctctttttcttgtgacatctstctgagtttgtaccattgttataggaccaagcttgtatgcctgctgcatagtaacagaccaattacactgagacagcagggtttacagtggagaaaaagtttaatgattgcagatcaccaagtgagaaaatgggagaagaccctcaaatctatctccttgaggagttctggactggggttttaaggggattatggagggtaaagg

SEQ ID NO: 671536 - DNA, 432 bp, Homo sapiens
ctgctaataaagacataactgagactgggtaatttataaaggaaagaggtttaattgactcacagttccacatggctggggaggcctcacaatcatggcataagagcaagaaacatcttacattgcaacaggcaagggagagcttgtgcaggggaactcccctttataaaaccatsagatctcatgagacttattcactatcataagaatagcatgggaaaaaacccacccccatgattcaattacctcccaactagtccctcccacgacatgtgggaattgtgggagctacatttaagatgagatttgggtggggacacagccaaaccatatcacttggtaagagaagaaccacttctgcttgctagaccagtgctctttttccaccaccaccacatcagatggaacctgttctcttgctctagaagggta

SEQ ID NO: 671537 - DNA, 1837 bp, Homo sapiens
  misc_feature 982, 983, 984, 985, 986, 987, 988, 989, 990, 991, 992, 993,994, 995, 996, 997, 998, 999, 1000, 1001, 1002, 1003, 1004,1005, 1006, 1007, 1008, 1009, 1010, 1011, 1012, 1013, 1014,1015, 1016, 1017, 1018, 1019, 1020, 1021, 1022, 1023: n = A,T,C or G
  misc_feature 1024, 1025, 1026, 1027, 1028, 1029, 1030, 1031, 1032, 1033,1034, 1035, 1036, 1037, 1038, 1039, 1040, 1041, 1042, 1043,1044, 1045, 1046, 1047, 1048, 1049, 1050, 1051, 1052, 1053,1054, 1055, 1056, 1057, 1058, 1059, 1060, 1061, 1062: n = A,T,C or G
  misc_feature 1063, 1064, 1065, 1066, 1067, 1068, 1069, 1070, 1071, 1072,1073, 1074, 1075, 1076, 1077, 1078, 1079, 1080, 1081: n = A,T,C or G
gattcatgatgatattctcctattaatcttggactcatagagaagcaaagaagagacagtcttattggcactgtttcccattttaaaccacacagagtatatataaggttacttccattgctcaataaggtaaatagagacccagttcataaaggtgtcagaatgtgtcagagaatgtggttactgtgacatttaacagaaggcatttattagcttttaagcacagaaagaaaaggagaaatctctgtgagtattattatcatgtgaaatccttccagaattgcttgcctgcttagtggctgcaatgtactgcctcctttttatgttgctgttatacacacacagattaatttctgtctagtgctttggagctccattagattgtttttgatgactaaactaacataccttgaaagacctttttattgaattttccaggccgtcagaagacttgccaaagggatttttgtataagagccaaggctttttattatatagtgatttcacacatggtctagtgagaaaagacctttaatttttgccttgtagaggccactacacaacaaaatggggagatgagacattgacaaatttctgttgacatttcgcaaggatgttctggtctggggatagttcttagttgaactttctacaaggggaagtggactctgagatttcctgtaccttcatctggcacgtcattcagtctcttgatatttctgttgtagagactattgggatgtctgatggtatatatcaaatacccactatgaactaggtactgtgctgtaactatccatttgttatttcattgtatcctcataccaaccataaaacagtaagtaacattactataattttacagaaaagtaaagcaacccaattaagtgatttggataacatggaacagattacaatgtgcatatttttgagttacaggtgagtttttctagaaaagatcttttactgttctaatggtaannnnnnnnnnnnnnnnnnnnnnnnnnnnnnnnnnnnnnnnnnnnnnnnnnnnnnnnnnnnnnnnnnnnnnnnnnnnnnnnnnnnnnnnnnnnnnnnnnnntttccgtttctgtgtcattgtacactgagttggaatctgtcttttctgaatctctgtgccaggataattatatggccatatgtaaattaccacatctcatctttctgctttttgaatgaaaacctggaatggaattgctataaatctataaccatttaatacacatcataaaagattttttagaatttaatatgaagtataaggtgaaaattaatttgaaagagcaactttaggacatgttatcagaaattaactttaatgacaagtttggagggttctaaacttaagtgaaagctgcagggtaatgcatttattctctttactaacttcttattaatgtacctgtgacttgtcctttattttatgacaagttacttgaaaggttgatttgagtgagtcatagtcataattattaagcagtataaaaagataatagattttggaacttcttttttattttttttaacatcttaaaatactatcatgaactcttgcactattgaatctaaaataggatcttttaagtgtatgactttaggcatcaacccaaactcaaaagttaaaaagtgaaactccatattgataaacttaattcatttctcataatgtatggatttttgcccatrtgtataatgtagaaatttgggcatatacattccattccttgagaatcaaaacatgattttgattttcagggatgattatcacccactgtgatgctaaaacaaaaaatatgtatttcaagtaatagctaaa

SEQ ID NO: 671538 - DNA, 1143 bp, Homo sapiens
aatgggtgcagcacaccaacgcggcacatgtatacatatgtaacaaacctgcatgttgtgcacatgtaccctagaacttaaagcgtaataaaaaaaataaaaaataaaaataggccaggcgcagtggctcacgcctgtaatcccagcactttgggaggccgaggcgggcggatcacctgaggtcaagagtttgagaccagcctggccaagatggtgaaaccccatctctactaaaaatacaaaaattagccaggcatggtggcaagcacctataatcttagctgcttgggaggctgaggtgggagaattgcttgaacctggaaggtggtggttagtgagccgagatcaagccactgcactccagcctgggtgacagagcgagactccatctcaaataataataataataataataataataataataataataataataataataaataaaataaaaagatgatctacttcccttmtccactccattttactatgaggtcactgaggcccagaagtaataatagcctgtccaaggtcagaaacaagagcagtgtctccaggatcatcttgtccttacttctttatgtttactgcttactccaacacccttccccacctatggctactgtgcatagcacatctatattcaatagtgcttctgttatacccacttgcctcatcaaaactcattcatccagtgtcctaataccacaagtttttgctagttgatcctgttatgtcaaaaaactaaaagaatcctagaatgtcagagtaggaaagtctcaaacatataatcttacccatttccttcattttaaaaatcagaacagtggcccagaaaagacaagacatttgatagtgcctaagaacctcaatggatgtgcagtattagagtacaggaagaaaataaaccagaacctcttttatattgattttatattaaagttgagaaagaaattaaggtttacttctacataacatgcaggctggcactggttctatcagcctgcagttaggagatcacttattacctattgtacatgatgggcctgaaagaagaatggctttaaacacagtttagagatgacagtggaccctcttgtttgcttggttttagaatattacaatatattgaaacttata

SEQ ID NO: 671539 - DNA, 1799 bp, Homo sapiens
actgtctgggcttctgctctactgtggctcccctgccccagttagggatgtgctacatttcagtagcctagtttagtccaatcctctcaagcagatagaatgaagtgttttcaattagcagaatctcattgcgagggcacgaagagacagttcttctggagcagagaaactaattgaacatacattgtgtgtttaccagaggaggaagctcctcagcaggggtttagtgttcccatgctcgctggcctgggactgctctagccatgagctcattgtttaaagacacctagtccaatctcaatacacataaatcccttctgcaatagccctggtggtggccatacagcttattctgcacatcctacgggactgactcacttacaaggcagcccatatcttggttggacatccctggttgttagaaatttacaacttcctttcttatgttgagtacaactttgagggctgattactgctccctgacatgttttcctaaactctcaccatcatggtcatcactcttcaatatcctttatcttttccatttccacccttcccttccctgtcccccatacaagtattaaaaggcatgaaatgagagtcgcattcatcccttcactcattcattggttcatgtattactcattcaaaaaacgtttaagtgtctgctattggccagatattcttcaaaacactgggaatagagtgacagaccaggttcttgctcttatggaactttttctagtggagcagagagatgccaaacaaataaaccaacaagataattacaggttggctagtactttgatagaaataaacmcagagaaatgatcatgatcatgtgtttgtgtgcgtgcatgtgtatatggcgtgtgcatacatgcatgtatgtgaggtagggaggaagagagagagatggggattggttgatttttctttagatacagtggtcaggagaagcttctgaggtgattgtttagcagcatacacctaaaagagaaggcaagatgccatgccaaggattggggaaagagcattctcagtaaaggaaacaggatgtacaaagagattagaataagagaactaggtgtgtgggatggatgggaagagcccagggagggtggcgcatagggaacaagggagggaaaggtataagatgctaacagagaaggaggcagggctagtttggaaaggacttgtaagctaaggaagggagtttggattctattttggctgctgtaggaagtcactagaggattctcaggtggttgaggggcatgatttaagctttaaaaggatcagtctggctatatgtagagagtgcattgcaggctggaaaggggatagtgagaagaccattgaggaggtagcacagtacttgggttaaagagccaagataatgagtttcttttttttttgaggttgagtcttgctctgtcacccactgtggagtgcagtggctctatcttggctcactgcaacttccgcctcctgggttcaagcaattctcctgcctcagcctcctgagtagctgggattatagatgcgtaccaccatgccagctaatttttgtattttcagtagagacagggtttcaccatgttggtcaggctggtctggaactcctgaccttgttatccacctgccttggcatcccaaagtgctgggattacaggcatgaaccaccgcgcccagccaaggatgaatttcagttatgtgtttagaggcagaaacatcaggacttagtaataaattgtatattgtgggtgttaaaaaacatgttctgtgtccttgaggct

SEQ ID NO: 671540 - DNA, 1455 bp, Homo sapiens
caattgaccagactagtttactcaagattattttatctgacattgattaaagataatgaggataaaaatgtatacttgggataaatgaaagaaatgatgattcaaaattatatgtaccctttttttattaaatgcacatatatatgagatggcttttcttctattataataataattatataactaacaccaacaaagcacttaccttgtattaaataatgttccaaagtactttacctagattaactcccctaatcttcctaataacccattatgacatasaactgtattatcttaaacaactgaggagcagaatggttaaatgacttgtctatggaagaaatgctatgaacctgagtagtgagaacactgattgaatgtaggcagtctggctcctgaatccatgctccaaaacagctcttatactgtagctagcacaggatatatttcaatatagttttcaatgtattcacagcctattaatagacaatacccatgacactagaaaataattctgctgcttttagattattttgtaggtgcttacagcatgcacacacacacacatacacacacactgtaccctacctcactgggcaaatcacctcacttattcgtgcttcagcttcctctggtagtcaatgaggacagagtagttgcaaggattaaatacgtgcatacatgaaaatatttagaggagtggttgggatatactaggacctattatggtttttgttgttacctgaaataaaaagtcagagtatgttatacgatagatgctccttttatattttgcatttttatggtttgtaacaataattagtatatttatttccattgcttccttacaaattttaataagctgcttcaaatagctcactactgttacgtttgccaacccattcttcaaattcattccaataattttatactagtggtaagatgagtgatcggagtagggtctgaaagccctgtttattctaagcttcttttctatccatagatgtgaattaaaatcttctttataagtgattctgaatgactttaatagtaggatagagaataggtgtgaaaagcccgacagcaatagagatgttctcatggagaaatagaggtcagatagcagctttataaattacaagcacagatatcacagataaacgaagtgtatgatgatggggtaggggacaggtataatggagatagcagggaagtagtaaggtattagggaaaattagacacaagaagctggagcatatggggagaaagatttggataagatgcttgtgctagggcatgaggaaggaaatggttctttcttactagaaaatgtccaaaagaagtgggaactccagagacaaacttaatctactttataattaaactttgccttgccttctttcacacagtctacggtttattcttctatatacgaatgattgttgtattagtttc

SEQ ID NO: 671541 - DNA, 1455 bp, Homo sapiens
caattgaccagactagtttactcaagattattttatctgacattgattaaagataatgaggataaaaatgtatacttgggataaatgaaagaaatgatgattcaaaattatatgtaccctttttttattaaatgcacatatatatgagatggcttttcttctattataataataattatataactaacaccaacaaagcacttaccttgtattaaataatgttccaaagtactttacctagattaactcccctaatcttcctaataacccattatgacatagaactgtattatcttaaacaactgaggagcagaatggttaaatgacttgtctatggaagaaatgctatgaacctgagtagtgaraacactgattgaatgtaggcagtctggctcctgaatccatgctccaaaacagctcttatactgtagctagcacaggatatatttcaatatagttttcaatgtattcacagcctattaatagacaatacccatgacactagaaaataattctgctgcttttagattattttgtaggtgcttacagcatgcacacacacacacatacacacacactgtaccctacctcactgggcaaatcacctcacttattcgtgcttcagcttcctctggtagtcaatgaggacagagtagttgcaaggattaaatacgtgcatacatgaaaatatttagaggagtggttgggatatactaggacctattatggtttttgttgttacctgaaataaaaagtcagagtatgttatacgatagatgctccttttatattttgcatttttatggtttgtaacaataattagtatatttatttccattgcttccttacaaattttaataagctgcttcaaatagctcactactgttacgtttgccaacccattcttcaaattcattccaataattttatactagtggtaagatgagtgatcggagtagggtctgaaagccctgtttattctaagcttcttttctatccatagatgtgaattaaaatcttctttataagtgattctgaatgactttaatagtaggatagagaataggtgtgaaaagcccgacagcaatagagatgttctcatggagaaatagaggtcagatagcagctttataaattacaagcacagatatcacagataaacgaagtgtatgatgatggggtaggggacaggtataatggagatagcagggaagtagtaaggtattagggaaaattagacacaagaagctggagcatatggggagaaagatttggataagatgcttgtgctagggcatgaggaaggaaatggttctttcttactagaaaatgtccaaaagaagtgggaactccagagacaaacttaatctactttataattaaactttgccttgccttctttcacacagtctacggtttattcttctatatacgaatgattgttgtattagtttc

SEQ ID NO: 671542 - DNA, 1455 bp, Homo sapiens
caattgaccagactagtttactcaagattattttatctgacattgattaaagataatgaggataaaaatgtatacttgggataaatgaaagaaatgatgattcaaaattatatgtaccctttttttattaaatgcacatatatatgagatggcttttcttctattataataataattatataactaacaccaacaaagcacttaccttgtattaaataatgttccaaagtactttacctagattaactcccctaatcttcctaataacccattatgacatagaactgtattatcttaaacaactgaggagcagaatggttaaatgacttgtctatggaagaaatgctatgaacctgagtagtgagaacactgattgaatgtaggcartctggctcctgaatccatgctccaaaacagctcttatactgtagctagcacaggatatatttcaatatagttttcaatgtattcacagcctattaatagacaatacccatgacactagaaaataattctgctgcttttagattattttgtaggtgcttacagcatgcacacacacacacatacacacacactgtaccctacctcactgggcaaatcacctcacttattcgtgcttcagcttcctctggtagtcaatgaggacagagtagttgcaaggattaaatacgtgcatacatgaaaatatttagaggagtggttgggatatactaggacctattatggtttttgttgttacctgaaataaaaagtcagagtatgttatacgatagatgctccttttatattttgcatttttatggtttgtaacaataattagtatatttatttccattgcttccttacaaattttaataagctgcttcaaatagctcactactgttacgtttgccaacccattcttcaaattcattccaataattttatactagtggtaagatgagtgatcggagtagggtctgaaagccctgtttattctaagcttcttttctatccatagatgtgaattaaaatcttctttataagtgattctgaatgactttaatagtaggatagagaataggtgtgaaaagcccgacagcaatagagatgttctcatggagaaatagaggtcagatagcagctttataaattacaagcacagatatcacagataaacgaagtgtatgatgatggggtaggggacaggtataatggagatagcagggaagtagtaaggtattagggaaaattagacacaagaagctggagcatatggggagaaagatttggataagatgcttgtgctagggcatgaggaaggaaatggttctttcttactagaaaatgtccaaaagaagtgggaactccagagacaaacttaatctactttataattaaactttgccttgccttctttcacacagtctacggtttattcttctatatacgaatgattgttgtattagtttc

SEQ ID NO: 671543 - DNA, 1455 bp, Homo sapiens
caattgaccagactagtttactcaagattattttatctgacattgattaaagataatgaggataaaaatgtatacttgggataaatgaaagaaatgatgattcaaaattatatgtaccctttttttattaaatgcacatatatatgagatggcttttcttctattataataataattatataactaacaccaacaaagcacttaccttgtattaaataatgttccaaagtactttacctagattaactcccctaatcttcctaataacccattatgacatagaactgtattatcttaaacaactgaggagcagaatggttaaatgacttgtctatggaagaaatgctatgaacctgagtagtgagaacactgattgaatgtaggcagtctggctcctgaatccatgctccaaaacagctcttatactgtagctagcacaggatatatttcaatatagttttyaatgtattcacagcctattaatagacaatacccatgacactagaaaataattctgctgcttttagattattttgtaggtgcttacagcatgcacacacacacacatacacacacactgtaccctacctcactgggcaaatcacctcacttattcgtgcttcagcttcctctggtagtcaatgaggacagagtagttgcaaggattaaatacgtgcatacatgaaaatatttagaggagtggttgggatatactaggacctattatggtttttgttgttacctgaaataaaaagtcagagtatgttatacgatagatgctccttttatattttgcatttttatggtttgtaacaataattagtatatttatttccattgcttccttacaaattttaataagctgcttcaaatagctcactactgttacgtttgccaacccattcttcaaattcattccaataattttatactagtggtaagatgagtgatcggagtagggtctgaaagccctgtttattctaagcttcttttctatccatagatgtgaattaaaatcttctttataagtgattctgaatgactttaatagtaggatagagaataggtgtgaaaagcccgacagcaatagagatgttctcatggagaaatagaggtcagatagcagctttataaattacaagcacagatatcacagataaacgaagtgtatgatgatggggtaggggacaggtataatggagatagcagggaagtagtaaggtattagggaaaattagacacaagaagctggagcatatggggagaaagatttggataagatgcttgtgctagggcatgaggaaggaaatggttctttcttactagaaaatgtccaaaagaagtgggaactccagagacaaacttaatctactttataattaaactttgccttgccttctttcacacagtctacggtttattcttctatatacgaatgattgttgtattagtttc

SEQ ID NO: 671544 - DNA, 1648 bp, Homo sapiens
tgtcctgtctcagctttagtgtacatgttttcccagccttctttctcctcttacactgcaatgatgtctccttcatcattggctccttcagaaaccagaagcactggcccctcagatactctgccttactatctcaccttatcttccctctctacaccctaaggagtaggttcacaatggttaccaaactaaaagagttgctttttcagtcacataaagcttttgcccatattcccattccttctccccgtaacacttgaactttgggtctgcatataatttacattagtcttctgtgtcaaggttctgcttctgatatttaatatgatgccataatgagcttctccaggcttattcttaacatttttctctagaactgatattctgtctggttcctaaaattctgctctcagaacaacttccaatttttctggtgctttctacttaaatacatacttattttattgatctcggatttcttatcaagacacctggctatctctgacattagttttatctatcctccagttactattcacaggatctttcaggatcacctgctctgttctgaaaggtagtattatcttcatgatctgcactttatttctatgggcctcttgttacaatttgactttaggttttgaaatcaacatctttcttttgactgattttttttcctcggtaatttttaatcactttatttgactaacttggtggtgtttattaaaaatcttcataagccagcaaaaaatcctactataagctttatagtgttggttatttacacacgcttactctacaaatctgtgtttatgtttttgtgtgcatatcattttttgaaagaagcctagggatattaacaaaggaaatacaaggatatttttattaccgtatgaagaaatatatgccctcattcatcttcccaacacaatgaattatcacttttcttggcacgtatattaaatgattttgaaataaacccctcacaggtaattatgatgctctattagaattcttcacattaaccgagaattaactcattcctcccagtggagaaatctgtactctagaacacttacagcgattttaagcataaacgtttaaactgttgagagatattatttttgaacaaaacattatttgcagtagtagcagacaggagccatctatttgttaataaagagctatagacaacataaggaaactattactctatatctccgataataaaagtaaaaaagggcaaaacttactcatcaattaatgtaggatgttatgttttcactctatgtggatatatttgataycttataatttgaactataatatgtttgtataattgttgctttagttaaattgatttatgctttattattctgataaaatttaaaggcattttaaaaaatcagttatcttggagccaagacaaagaaggtagacaggtattcatggtctcacttagagtggcagtggtgggagaatgtttaagaaaagtgatgatagtcttgaattttaagttattccctgctcagtatcatcatactttatctcccttacttattgttccaccctcacccttagtcttcaaaagagctttattaactattaaaaatggagacagcatctatactctgctgtattttttact

SEQ ID NO: 671545 - DNA, 600 bp, Homo sapiens
tggatgtctggccctttaaaattgtcattataaggataaaaaagtatataagaataatgaaaaaactagctaatattgactaatatcttagtatattacagaaagtactaggtagtgatgyatattactgcatttataaaaaaaagcaatagagtttttggattttttgtgtaatttaattatgcacaaatggataattaatcaagatatatattcatctgtaatttcactgcacacaaaattggcttctacaggaaagggggttgatatgtactgtggatttagacaacagcccaacctccatgtttcagagggatttccttgatttctagttgtcttgtagtacacagtaactttttgttattattgcttctggtagaaatgaccctaagtagaaagtcaaatgctttcattgaattttataaaattaatttccatactagagtgctattctgcagtttgggattttgtgagggtctcggtatctgttttactatgtgtcaggttgtcactgagagaaatgtgagtacattgtgacgaattaatgtttgtctaaaagtttaaatatttaaagcactctcccaaaaaataaactgttat

SEQ ID NO: 671546 - DNA, 1529 bp, Homo sapiens
  misc_feature 1006, 1007, 1008, 1009, 1010, 1011, 1012, 1013, 1014, 1015,1016, 1017, 1018, 1019, 1020, 1021, 1022, 1023, 1024, 1025,1026, 1027, 1028, 1029, 1030, 1031, 1032, 1033, 1034, 1035,1036, 1037, 1038, 1039, 1040, 1041, 1042, 1043, 1044: n = A,T,C or G
  misc_feature 1045, 1046, 1047, 1048, 1049, 1050, 1051, 1052, 1053, 1054,1055, 1056, 1057, 1058, 1059, 1060, 1061, 1062, 1063, 1064,1065, 1066, 1067, 1068, 1069, 1070, 1071, 1072, 1073, 1074,1075, 1076, 1077, 1078, 1079, 1080, 1081, 1082, 1083: n = A,T,C or G
  misc_feature 1084, 1085, 1086, 1087, 1088, 1089, 1090, 1091, 1092, 1093,1094, 1095, 1096, 1097, 1098, 1099, 1100, 1101, 1102, 1103,1104, 1105: n = A,T,C or G
tttggaatggacttttaagtgtattatgttgatgttgatagaaggatcagaactaatagaagatttagttagcattaatatcactcttctctgcaatgccatagtgctgtattagtgggtttttttgttttgttttgttttatttgtttgtttttctttggagagagtctcactctgttgacaaagctggtatgcaatagttccatcctagctcactgcagcctccgactcccaggctcaagtgatcatcccacctcagtgtcccaagtaggtgggaccacagatgcataccaggacatcaggctawtttattttttaatgttttgtagacagaggttgtcgctatgttgccctggctagtcctgtgcttaagcgatcctccctccttagcatcctaaagttctgggatcacaggcatgagctaccacaagggccgtcagttcttaatttaagaaactaattcattccactttgttttgtgtttatgtttcatgtgatagggtcctgtctcattcatctttcaatattccacaacatctattaatattgttcatatattgagcagtcatatctcaaaagaataaagtattctcctttttaaaaaagttttcttttcaaatttatttcagaaatttggtacaactatataaaaatgaagatgacatggaaatttcaaagaagattaagactcagtggacctctttgggcctagaagatgtacagtttgtaaattactctgtgctgcttgatctgccaggcccttctcccagcactgtgactctgagcagcagtggtcaatgctttcatcctaatggccagccttgcagtgaagaagccagaaaagatagcagccaagacctgctctattcatatgcagcctattctgccaaaggaactctcaaggtaatatgaccatttgtctctgtcatttacagtgagatggaattagaaaataacagctttcatctaaattgaactaactgtcaagatgcaacatacaaaagtnnnnnnnnnnnnnnnnnnnnnnnnnnnnnnnnnnnnnnnnnnnnnnnnnnnnnnnnnnnnnnnnnnnnnnnnnnnnnnnnnnnnnnnnnnnnnnnnnnnntattcctgaaatgaaaattactatcagcaatcattatcttttctgcattcatgattaccacagaagtaccactctgtcaattctgagaacacactgagtgttatcaaatcctctggcccaacttcttccctctttggccataagttgtcaaaagggcaactgaaaaggctacagcagaatgccttcccaaaaccctgtccctatacatacgaagggctgaaattgcagtataaattgatgttaggaaaattgatgttaacatctttgtttaatttccatgtctgtaaatgaatttttctcactaatatggcctgtattttttaaaagttaacatacaccactggtcatcatatcataattgtatataattagcaaagttcaactaatttaaatgattgcaactgattaaaatgaaatgaagaaa

SEQ ID NO: 671547 - DNA, 1529 bp, Homo sapiens
  misc_feature 1006, 1007, 1008, 1009, 1010, 1011, 1012, 1013, 1014, 1015,1016, 1017, 1018, 1019, 1020, 1021, 1022, 1023, 1024, 1025,1026, 1027, 1028, 1029, 1030, 1031, 1032, 1033, 1034, 1035,1036, 1037, 1038, 1039, 1040, 1041, 1042, 1043, 1044: n = A,T,C or G
  misc_feature 1045, 1046, 1047, 1048, 1049, 1050, 1051, 1052, 1053, 1054,1055, 1056, 1057, 1058, 1059, 1060, 1061, 1062, 1063, 1064,1065, 1066, 1067, 1068, 1069, 1070, 1071, 1072, 1073, 1074,1075, 1076, 1077, 1078, 1079, 1080, 1081, 1082, 1083: n = A,T,C or G
  misc_feature 1084, 1085, 1086, 1087, 1088, 1089, 1090, 1091, 1092, 1093,1094, 1095, 1096, 1097, 1098, 1099, 1100, 1101, 1102, 1103,1104, 1105: n = A,T,C or G
tttggaatggacttttaagtgtattatgttgatgttgatagaaggatcagaactaatagaagatttagttagcattaatatcactcttctctgcaatgccatagtgctgtattagtgggtttttttgttttgttttgttttatttgtttgtttttctttggagagagtctcactctgttgacaaagctggtatgcaatagttccatcctagctcactgcagcctccgactcccaggctcaagtgatcatcccacctcagtgtcccaagtaggtgggaccacagatgcataccaggacatcaggctaatttattttttaatgttttgtagacagaggttgtcgctatgttgccctggctagtcctgtgcttaagcgatcctccctccttagcatcctaaagttctgggatcacaggcatgagctaccacaagggccgtcagttcttaatttaagaaaytaattcattccactttgttttgtgtttatgtttcatgtgatagggtcctgtctcattcatctttcaatattccacaacatctattaatattgttcatatattgagcagtcatatctcaaaagaataaagtattctcctttttaaaaaagttttcttttcaaatttatttcagaaatttggtacaactatataaaaatgaagatgacatggaaatttcaaagaagattaagactcagtggacctctttgggcctagaagatgtacagtttgtaaattactctgtgctgcttgatctgccaggcccttctcccagcactgtgactctgagcagcagtggtcaatgctttcatcctaatggccagccttgcagtgaagaagccagaaaagatagcagccaagacctgctctattcatatgcagcctattctgccaaaggaactctcaaggtaatatgaccatttgtctctgtcatttacagtgagatggaattagaaaataacagctttcatctaaattgaactaactgtcaagatgcaacatacaaaagtnnnnnnnnnnnnnnnnnnnnnnnnnnnnnnnnnnnnnnnnnnnnnnnnnnnnnnnnnnnnnnnnnnnnnnnnnnnnnnnnnnnnnnnnnnnnnnnnnnnntattcctgaaatgaaaattactatcagcaatcattatcttttctgcattcatgattaccacagaagtaccactctgtcaattctgagaacacactgagtgttatcaaatcctctggcccaacttcttccctctttggccataagttgtcaaaagggcaactgaaaaggctacagcagaatgccttcccaaaaccctgtccctatacatacgaagggctgaaattgcagtataaattgatgttaggaaaattgatgttaacatctttgtttaatttccatgtctgtaaatgaatttttctcactaatatggcctgtattttttaaaagttaacatacaccactggtcatcatatcataattgtatataattagcaaagttcaactaatttaaatgattgcaactgattaaaatgaaatgaagaaa

SEQ ID NO: 671548 - DNA, 1529 bp, Homo sapiens
  misc_feature 1006, 1007, 1008, 1009, 1010, 1011, 1012, 1013, 1014, 1015,1016, 1017, 1018, 1019, 1020, 1021, 1022, 1023, 1024, 1025,1026, 1027, 1028, 1029, 1030, 1031, 1032, 1033, 1034, 1035,1036, 1037, 1038, 1039, 1040, 1041, 1042, 1043, 1044: n = A,T,C or G
  misc_feature 1045, 1046, 1047, 1048, 1049, 1050, 1051, 1052, 1053, 1054,1055, 1056, 1057, 1058, 1059, 1060, 1061, 1062, 1063, 1064,1065, 1066, 1067, 1068, 1069, 1070, 1071, 1072, 1073, 1074,1075, 1076, 1077, 1078, 1079, 1080, 1081, 1082, 1083: n = A,T,C or G
  misc_feature 1084, 1085, 1086, 1087, 1088, 1089, 1090, 1091, 1092, 1093,1094, 1095, 1096, 1097, 1098, 1099, 1100, 1101, 1102, 1103,1104, 1105: n = A,T,C or G
tttggaatggacttttaagtgtattatgttgatgttgatagaaggatcagaactaatagaagatttagttagcattaatatcactcttctctgcaatgccatagtgctgtattagtgggtttttttgttttgttttgttttatttgtttgtttttctttggagagagtctcactctgttgacaaagctggtatgcaatagttccatcctagctcactgcagcctccgactcccaggctcaagtgatcatcccacctcagtgtcccaagtaggtgggaccacagatgcataccaggacatcaggctaatttattttttaatgttttgtagacagaggttgtcgctatgttgccctggctagtcctgtgcttaagcgatcctccctccttagcatcctaaagttctgggatcacaggcatgagctaccacaagggccgtcagttcttaatttaagaaactaattcattccactttgttttgtgtttatgtttcatgtgatagggtcctgtctcattcatctttcaatattccacaacatctattaatattgttcatatattgagcagtcatatctcaaaagaataaagtattctcctttttaaaaaagttttcttttcaaatttatttcagaaatttggtacaactatataaaaatgaagatgacayggaaatttcaaagaagattaagactcagtggacctctttgggcctagaagatgtacagtttgtaaattactctgtgctgcttgatctgccaggcccttctcccagcactgtgactctgagcagcagtggtcaatgctttcatcctaatggccagccttgcagtgaagaagccagaaaagatagcagccaagacctgctctattcatatgcagcctattctgccaaaggaactctcaaggtaatatgaccatttgtctctgtcatttacagtgagatggaattagaaaataacagctttcatctaaattgaactaactgtcaagatgcaacatacaaaagtnnnnnnnnnnnnnnnnnnnnnnnnnnnnnnnnnnnnnnnnnnnnnnnnnnnnnnnnnnnnnnnnnnnnnnnnnnnnnnnnnnnnnnnnnnnnnnnnnnnntattcctgaaatgaaaattactatcagcaatcattatcttttctgcattcatgattaccacagaagtaccactctgtcaattctgagaacacactgagtgttatcaaatcctctggcccaacttcttccctctttggccataagttgtcaaaagggcaactgaaaaggctacagcagaatgccttcccaaaaccctgtccctatacatacgaagggctgaaattgcagtataaattgatgttaggaaaattgatgttaacatctttgtttaatttccatgtctgtaaatgaatttttctcactaatatggcctgtattttttaaaagttaacatacaccactggtcatcatatcataattgtatataattagcaaagttcaactaatttaaatgattgcaactgattaaaatgaaatgaagaaa

SEQ ID NO: 671549 - DNA, 1529 bp, Homo sapiens
  misc_feature 1006, 1007, 1008, 1009, 1010, 1011, 1012, 1013, 1014, 1015,1016, 1017, 1018, 1019, 1020, 1021, 1022, 1023, 1024, 1025,1026, 1027, 1028, 1029, 1030, 1031, 1032, 1033, 1034, 1035,1036, 1037, 1038, 1039, 1040, 1041, 1042, 1043, 1044: n = A,T,C or G
  misc_feature 1045, 1046, 1047, 1048, 1049, 1050, 1051, 1052, 1053, 1054,1055, 1056, 1057, 1058, 1059, 1060, 1061, 1062, 1063, 1064,1065, 1066, 1067, 1068, 1069, 1070, 1071, 1072, 1073, 1074,1075, 1076, 1077, 1078, 1079, 1080, 1081, 1082, 1083: n = A,T,C or G
  misc_feature 1084, 1085, 1086, 1087, 1088, 1089, 1090, 1091, 1092, 1093,1094, 1095, 1096, 1097, 1098, 1099, 1100, 1101, 1102, 1103,1104, 1105: n = A,T,C or G
tttggaatggacttttaagtgtattatgttgatgttgatagaaggatcagaactaatagaagatttagttagcattaatatcactcttctctgcaatgccatagtgctgtattagtgggtttttttgttttgttttgttttatttgtttgtttttctttggagagagtctcactctgttgacaaagctggtatgcaatagttccatcctagctcactgcagcctccgactcccaggctcaagtgatcatcccacctcagtgtcccaagtaggtgggaccacagatgcataccaggacatcaggctaatttattttttaatgttttgtagacagaggttgtcgctatgttgccctggctagtcctgtgcttaagcgatcctccctccttagcatcctaaagttctgggatcacaggcatgagctaccacaagggccgtcagttcttaatttaagaaactaattcattccactttgttttgtgtttatgtttcatgtgatagggtcctgtctcattcatctttcaatattccacaacatctattaatattgttcatatattgagcagtcatatctcaaaagaataaagtattctcctttttaaaaaagttttcttttcaaatttatttcagaaatttggtacaactatataaaaatgaagatgacatggaaatttcaaagaagattaagactcagtggacctctttgggcctagaagatgtacagtttgtaaattactctgtgctgcttgatctgccaggcccttctcccagcactgtgactctgagcagcagtggtcaatgctttcatcctaatggccagccttgcagtgaagaagccagaaaagatagcagccaagacctgctctattcatatgcagcctattctgccaaaggaactctcaaggtaatatgaccatttgtctctgtcatttacagtgagatggaattagaaaataacagctttcatctaaattgaactaactgtcaagatgcaacatacaaaagtnnnnnnnnnnnnnnnnnnnnnnnnnnnnnnnnnnnnnnnnnnnnnnnnnnnnnnnnnnnnnnnnnnnnnnnnnnnnnnnnnnnnnnnnnnnnnnnnnnnntattcctgaaatgaaaattactatcagcaatcattatcttttctgcattcatgattaccacagaagtaccactctgtcaattctgagaacacactgagtgttatcaaatcctctggcccaacttcttccytctttggccataagttgtcaaaagggcaactgaaaaggctacagcagaatgccttcccaaaaccctgtccctatacatacgaagggctgaaattgcagtataaattgatgttaggaaaattgatgttaacatctttgtttaatttccatgtctgtaaatgaatttttctcactaatatggcctgtattttttaaaagttaacatacaccactggtcatcatatcataattgtatataattagcaaagttcaactaatttaaatgattgcaactgattaaaatgaaatgaagaaa

SEQ ID NO: 671550 - DNA, 579 bp, Homo sapiens
agaagcagtgtatactggacactgaaagactaggcaagtttgagactgcagggtagagaggaaagtaagcaattggccaagtaactccttataaagtcacattttgccatcctaacgatggagatggcccatgacacataacaatcgaatagcagatttaagtctcctgtcatttkatatgactgccttctaaacggagttgtgtgtataatatattcctgtacttcagtcatcttatcagacaaaatgtataattagaaacataataccaatgggtatatgaacattggtagtatgaaaagttagatatttgttcattatttattcattcttctaagaaacatgtattgaaactcctctgtctagctactgtgttgcaggctaaaaagcagagttgttatttcttctgattacattactatatctatataatctattataacagaagaacaggtgaaatgtagtacatgcacacaatggaatactatttggctataaaaaatatgaaatcgtgtcatttacagcaacatggatgaactttagttcattttatgtgaaacaagccagacttagaaagac

SEQ ID NO: 671551 - DNA, 592 bp, Homo sapiens
ggaagcctcatcactaatcagaacctacacatgatttagtactgtagcaagcaaaacaaaaaaggaaggggaaaataaagtttttttatttgaagttttttttttttttgaatttgctgaagcagaaggaaagggctctcaaatactatcagggaattgtgacaaccaccaccgaaaatttaatttactcaaacaccatgtctgtgatacaaggccatatgcctaagtgggcttttcccataacatggtagagccagaattactggacaattattcccaatagaacttaaacgggcatccattggtcagcatcccaatgaagctaaaagtaaaatttgccctctcactggcataatttttgacagcaatgcaacctggattctaagaataatttcatcagagaaaactggtctacaggcttagaaatgacttattttctaaattatgggcctagtgatgtaaaagccttatgtgccccattactaytttgtgtgctttaaaagagagcctggttttaaaaacttaacactgaactaatacatatgctgaagtcctgaagaagtttcactcattctaggctgcaactgtgaga

SEQ ID NO: 671552 - DNA, 594 bp, Homo sapiens
aacccagaaatggggaatgagggacaagttgatcttacgggccccgcaggacagttagggagaaactatgagctcaggattccaatccctacttatcagaactaagtagcagtcctgtttaaagttagaataaatttagtggtgatgttcacccagcatcaagtatctactacacatgmtttggcaggtctgatttgttggattagacaacagggacatagggtgaactttagggacctagagacgacctatggagagtgaaatgccttcaaataatactaacagggaacactaatgaaagtgtttacaggctggcccagtaagcaggtagtcatctaaagatgtggttcaatgaccgatgaaaggatcatctgcttcaaaatggctctttgactggcttgctgtctgattcagtatcttcagaccttccccactccctgccacttgctttctctctctttctcctagattttatttactctttgaattattgtttctgaaatatagatacggtgcttgggtaaaaagtcttaatgatttgaggttgacatgttttagactgaggcacagagagaataagacacagaacagatt

SEQ ID NO: 671553 - DNA, 594 bp, Homo sapiens
aacccagaaatggggaatgagggacaagttgatcttacgggccccgcaggacagttagggagaaactatgagctcaggattccaatccctacttatcagaactaagtagcagtcctgtttaaagttagaataaatttagtggtgatgttcacccagcatcaagtatctactacacatgctttggcaggtctgatttgttggattagacaacagggacatagggtgaactttagggacctagagacgacctatggagagtgaaatgccttcaaataatactaacagggaacactaatgaaagtgtttacaggctggcccagtaagcaggtagtcatctaaagatgtggttcaatgaccgatgaaaggatcatctgcttcaaaatggctctttgactggcttgctgtctgattcagtatcttcagaccttccccactccctgccacttgctttctctctctttctcctagattttatttactctttgaattattgtttctgaaatatagatacggtgcttgggtaaaaagtcttaatgatytgaggttgacatgttttagactgaggcacagagagaataagacacagaacagatt

SEQ ID NO: 671554 - DNA, 585 bp, Homo sapiens
catttctgtagtgcatatgtgtggaggggaggcaggaaactatgccaaggtacctgccctcaaaaaaaatcttatgacaaataggtggagagctaggggcaaagatggagcttgttgtaggtggggttctccggatgaagactgcaaattcatgtgaaagttatttatttagtagatattcccaagtagrgaatgggaagtgggactgggatgggaaggaggccaagcaagggtgcagcatccagcaaatccccatggagggtaacttaggctccatgctgagggagttctggggacatgtggaggtcacatctcagagttgtttccatcatgagtaaagggactgcagcgtttatactcctaggctgtcagtcatcagtcaagggctacccctagaggcacttcgaactctcttattgcacaggcaaagcaggtgctagtagcctagggcagcccgccagcaaggatcggcaggtgttgctgttgagagcgaatgcatgtcatgcaggaagcaggtgtgagcaaaaatactaaagggatccagggggataatggcagagttctaacagcatctgcaatgggctg

SEQ ID NO: 671555 - DNA, 631 bp, Homo sapiens
tgcaaggtctgtcttaataactccaaagactgctgacttgtaaccctgagactgaatgtttattacaggaagctgcatgttagaatgtttgaggtagaaaattgtgcttgtttgcttcaacttgtaaactacgtttttcataaaaggttgatttgactcaccaactctttgataattgtcctaccatttttgacctcactgatccagctctaattaactcaacaaataaaagagaatgtgcagattagtttggaattaaggacatagctgaaggcattccttgggaaaagtgattttgccaacaaaataaatactctaacaaaagaatgttaaaacaccaatacagatcacatcactcttcataaaacccccaaactggaagctatccaaatactgcctgacaatagtaggttggataaatatactgtggtatatttatagaatggaatattataaagaaatgagaatgctctgcaatcaggcacaatgacatrgatggctctcataaacaaaatgttgagcgaaagaagccagacacaaatgagaacataccatatgctttcattcattaaaagttcaaaaacagacaaaagtaatttatggtattgtgttgggataatgcttatcttgg

SEQ ID NO: 671556 - DNA, 1437 bp, Homo sapiens
gctggatacctcaatggaaagacactgttcttctggaggaggccttctctgtagactctttccttccagtttcagcaaccttgatctgctccttctgactccttcacatctaggggtggtaacagctctgttgtcactagccaagtgtcactgcactattctytgtgattcccccacatcccacccatgcttttgtaaatagtctctttatacataaacgctcctcgaattattctgagaatactgtttcctgctgagtcatcggaccaaattatttctcctttgagacaatggagaaattttgaacatgaagtaaacattataagctattaaggagttattgttgattttatcgggtgcgataatggtgtaattgttatataaaaataatccttaccagttagagatacacacttaagtatttattggaatgacatgtctaggaattatttaaaaaaaatagtgcatttaagagctgggtgccaggtgagaaataacagaaaagtaggggaatagattatcaaatattaccaagattatcaaatattatcaagattatagaaacgttgatagttaaagcagagtgatgggtataggagggttcattacactattttctcaattgtgtgcaagatggaaaatttctataataaaatgttagaacaaccaatctcttatttttttttcttagatgagatttagtttgcaatttttcatgagagagataggtacacaagatctgaatttaccgcaaataaaaattttaagggtgtgtttaaagtgtggcaatgtatatatctttctacatgctattctttcttgcagagaaaaattgatgaggaaagtgcataagtaaactggatgtaacttttttctctttagatattcaggtggtcactcaattaactcaatcaatctgcctgtgggcacctgctgagggagggtggagacagtctggggcgaggaagagaggggccatgaaaggttaaatgtgctaggcctagagtttctgtcgtctgcatcttttgcgctattcagagtcagtctgcaccctcaatgagtgaactgttattgcttagagctttctttttgtatttttttttttagtttttggtaataaatcctaataatggagcaaattatgcatgaaattgtccattatttataattacttcaggagatttagttgctcctggggcagtttaggaagcaaacattacaattccttctgcaataaattttgcctaaccaaaggaagtatggtactggattggttctgcttcagtagcatttttgcttctcaaacaccatagataagagaattttgtagatattcgagaagaatgaaagaatacaaattgaaagacatacatatcttgccaccaaaatagtcttccttttatttgaagcaagtagcttacaaaaataaggaaaatc

SEQ ID NO: 671557 - DNA, 633 bp, Homo sapiens
aagccatttcatgccattgcatgaactccagccagagaagtcagggctgcagcaagccatgattacacaactgcactccagccttggtgatcgaatgagactctgccaaaaaaaaaaagaaagaaagaaaaagagagagagatcttgttctttttgcttcttttaggagttttatggttctaggtcttggctaaatagatatatgagaaggtacttaacatcactaatcatcaaatgcaaatcaaaaccacaatgagatatcacctcacacttgttaggatggctgttatcaaaaagtcataagataacaggtatacagtcattatggaaaacattatagcagtwcctcaaaaaattaaaaagaaaactattttcatcatatgatccagcaatctcacttctgggtatatatccaaaggaaatgaaatcagtaagtcaaagagatactaatatctgcattcccatgttggttgtagcactattcacaataaccaagacatggaaacaacaaagtgctgatagatgagtggataaagaaattgacatgcacactctcacacacatacacacacacagacacacacagagacacatacatacacactgggatattatttagccttaaaaaaaaaa

SEQ ID NO: 671558 - DNA, 639 bp, Homo sapiens
aaagactcacttctttaagtttaaagtgtacttcacccaataaatacagaagccagaaaaaggagtgatcatagcaggcaaatctgacacagcactgttagagaagtgccacttggtaagtcaggaactgtggttgcataaactatgtataaaccgaggccccacatgaccyagcctctacataatgctccatgaaaaagcacagtcaagaaaccagtcattacaactgaaacctgctctttactttgatctcttaaagattgtgatagtagatccatttataatccatggtaaaacacctttcaaaacttttttttttttttttttagagacagggtctcactctgttgcccaggctggagtgcagtggcatgatcatagctcactgcaactgcaaactcttggcttcaagcaatcctcccacctcagcctctgaaagtgctgagattacaggcatgtgccaccatgccctggctcccaaactgcctttgcttcctttcttgtttctcagactccaaagctgctccagagactctcacatgccaaatcctaaaacactttctcacagaacatgtggcccatgtgggcttttgttcttcacccaacttcttcagtttgcaggtctactctacctggctg

SEQ ID NO: 671559 - DNA, 639 bp, Homo sapiens
aaagactcacttctttaagtttaaagtgtacttcacccaataaatacagaagccagaaaaaggagtgatcatagcaggcaaatctgacacagcactgttagagaagtgccacttggtaagtcaggaactgtggttgcataaactatgtataaaccgaggccccacatgacctagcctctacataatgctccatgaaaaagcacagtcaagaaaccagtcattacaactgaaacctgctctttactttgatctcttaaagattgtgatagtagatccatttataatccatggtaaaayacctttcaaaacttttttttttttttttttagagacagggtctcactctgttgcccaggctggagtgcagtggcatgatcatagctcactgcaactgcaaactcttggcttcaagcaatcctcccacctcagcctctgaaagtgctgagattacaggcatgtgccaccatgccctggctcccaaactgcctttgcttcctttcttgtttctcagactccaaagctgctccagagactctcacatgccaaatcctaaaacactttctcacagaacatgtggcccatgtgggcttttgttcttcacccaacttcttcagtttgcaggtctactctacctggctg

SEQ ID NO: 671560 - DNA, 637 bp, Homo sapiens
aaataaagtaaataaataagtgaagccttgactctcccttttgcttaagagaaggatggcagctacaagtccccaagagcacaaaaaaagggaaccatttatgccaagaaatctctttctaaagaggtttttgataatgaactcaatttyttatataaatatatagctatgtggattatttcttcttatgtcagttttgttaagttatgactatcaagaatttttttctattatatttcgttagtggattttttagaatttattggcataaactggcattccctgtactttttatctctttagatctgtaatgaaattccatctttaattcttgacattggtaatttgtgttttctctctttgcttcttaaccaatatttctagaaacttctagtcttattaatgttctcaaataatcaacatgtggatttattttctctattgtttttctttttccttttccttttttatttctgctcttatttgctttattatttcctccttcctacttacttttgattcgatttgttcttttcccaaccccttacaataaaaacagagcaatgatttgcaacttttttcttttctaatataagcatctaaaatataaacttaccctaagcactgttttgtcaca

SEQ ID NO: 671561 - DNA, 531 bp, Homo sapiens
agagttgcaatgatctcatgttaaaactgtaaactgagggcccagttgggagacaatgactycctgggcactgaaaggcttaggaggtggcagcctggcccatcgtctttccattaagatgagacttgggaaaaggggaacattacggtggactggaggcaagactagattgcagctcatttgcagacagagcagtgtgtagagactcacattgtgacgttttgctctagaacctcggcaggaataaaccagaagagccgagataacccacagactctccgaaggaagtggattgctcctgtaggacccgggagacaccccaaataatgtgggtgcccaaactgtggaagtagaaaggggaattgtctgcccctgaacacacaccctgactggggaacctgaaggtctagatcatggaagaagattttgaccttccctagagctgaaacaaattagagaaccaagtgaaatgcagaagtagaggaagaagcaggaaaagccctgtgggcttgctgggtcccctagcaggcc

SEQ ID NO: 671562 - DNA, 376 bp, Homo sapiens
tatttcaatctatttttattttcttcttcatgacaggtccactaatacttgcaaataggtggaaagccttcagaaataataaataaatggaagtattatctatttacctattaatggggtagctgtcttaggaagtcaatttataaaatgtatagcccagcaaatttattaagataccataaaatggtcccaacaaattctcaatagaagcttgtgaaacagaaagttaaagattgccytattaaaataccattcattatagagatttatatctaatgcctacctttctacgacacacatctacaacaagatttggcatgtattaacaggaaattttatattagtgcatgtgctcatcagtgattcaaacagtata

SEQ ID NO: 671563 - DNA, 640 bp, Homo sapiens
cccagaagtgacatataatacttctactcatatttcattgatcaaaacatagcaagtcacatgatcacaggtaactcactccagggagcaaggaggagcaaatcaacatatgcctacaagtggggaaatgaagtttaaccagcaaacagcactaatgcctactattttatctgtttttccatggattaatctggtcttaatgaaaatatggaaagtatcatttggtaaatatgctatgttactgacacgaaatatcttggattccatcatgtttttcagaaaaatgtaattaaattttttaacctgtaattgaatatttctccttaatatatcacatgtacataaagctatctcamtttttaacatatgacataaacattatttacaccatattctccagctatgtttcagcagctcaactagatttttcaaatatttcaacattttaaaaaatatttctacttgcaatcaatgcattatctactgaattgcctggaacttgttgatattaccacagtcctattccagcttattttaactattaaaacagtcatacttgctgatatataatctaagcattattatacttgtcagaattaattcacaatgacagtgttatttcaacaacactttttagtca

SEQ ID NO: 671564 - DNA, 1221 bp, Homo sapiens
cttcaagtaacttgtatgtgactgttctgtctcaccagactctgaccgcttggtaaccagtgcacagtgaatgtgcttcacagtaataactggrctcgatcttaacttataaataggaatttgtttgttttttaaatattcctttcttacactgaagaggcgtgactgaatctggtagaaatattagaatggagcaaattggtgccacaaaacatatttgagatttaattttgaggttttactcatgatttcatatgctgggcactaaaataagtcacttaaacataacttttaaaagccaggcagtggttgtttattttgaggaaatcgcaatatatacctgtaaatatggacagataccaatggtcctaacattatcagaattgttactgttggcttggaagaaaatatttcagaaaagagtaaacattgaaatgatataatgaataactttttctcccaactaaatataaccacaatgaatcacatagcaattcaaatatttttttacttcagaatatttggacaggtctgaacatgaggcaacttggaaaatcccttgataattcaaaaattgactcgtcatgttgaggggatgagattacaaatgcatgaaaccctgacctagattagaccagtcagattcactctctcaagaattttaaattccaacagattccaagtgctggactctaaataacttgtaaaataggactggaacaaccatggttacctatcagctttgttgttaggcaagcagtgaaagctcaactgcagaagagtcaagtgctgaggaaagtaggattaaaagtcatgtggaaccaagagaggcagggagagatcgcgataatttgattgtgttggtttctgggttgccttgattgccttgtttgggtgctctcaatttcagtccctcacagggcctggctgcccttcttgtccttggattttatgggatccaccaagattgctccgggcactgactagataattgtgaatgagttttgttacatccaagcaaatgataaacacacttgtactaaaaaaaaaaaaagagagagagagaaggcagcctaagaccaagtaagaaaaggctaaatgttgtgcagcacaatatatacatgtttatcacagtgcttacttacttcttgactccattgaatgaaaacaatagaatataaatcaattcatatgctgccttcatattcccctggggtacac

SEQ ID NO: 671565 - DNA, 638 bp, Homo sapiens
catacgagttcagatatcttttgatataattacttcttttcatttgagtatttgctgggtcaaatgataattctccttttagttctttgagaaatctccatactattttccacaaaggttgcacaaatttacattcccaaatagtataagcattctcttttctccacatgttaaccaacatgttatttttgtccttttaataatagccattctgactgagatgatatctcattatggttttaatttgcatttatctgatgattagcgatgagcattttttmatatgcttgtccattttttgtcttcttttgaaaagtgtctatttatgtccttagtccactttttaatgggattattcattttttgtttgttttcttatttcgttaagttccttgcacattctggatattagttcctgtaagatatagcttggaaatattgcactgtctcaattttaatatgatttaattacatgtagcttaaaaatatgagaacttacacaaggagaggtaaatctctactttctgaaatatgagttgaaaaatcattgtgctaaaattatttgaaaaagtcaatatttggaaaatatttaattgccaaagcataaatttctatgctttatggcaggcaatgttcta

SEQ ID NO: 671566 - DNA, 1296 bp, Homo sapiens
caatgaaagaaatgttgcaaatggaaatgacaagtggtggyaggaattgggcactctatgagacaacagacacatcccggattggagagtcagggacaggctcttagaagaaatggcctttaagctgagtcaagttaaccaggcaggatgaagggaagaggctcccaacagagggaccagtccgtgctcagagctcccagcatctgcccaaggcctccacagaacagactgttttgttttgttttttgttgttgtttttttgagatacagagtctcattctgtagcccaggctggaatgcagtggcattatctcagctcactgcaatctctgcctcccggttcacctgaggcaattctcctgcctcagcctatctagtagctgggattacagacgtccaccaccatgcccagctaatttttgtatttttagtagagacggattcactacctgttgaccaggctggtctcaaactcctaacctcaggtgatccacccacctcagcctcccaaactgctgggattacaggcgtgagccactgcatccggcctagactgttgttgaatctggttttcttcttctttcctcagttcttttcttttacatcttccccccatcattgctctgcccatccgaaggctgtggctggcacaggacagaacagaacctcctagcctcaagttccaaacccatactctccaacagccaggccctcagatgggaagcttcagagccttgtgacagcctggctgaacctctccagcctgggcgctccctccatttcctgccccggaaacaggcatctcctctggccacctcccaaagaagcctgtctggaagcctcaggcacccgttcctggaagcctgtactattcacaacaaagggcctgtccacccagtcgtgctgagcacacccctattcccccgagctctgaattgtcctttgcccaggctgggacaacatctcagagccttctgcctgctgcagactcggctcagcccaaagcactccatgaaattggggtgtggcatctgcctcaaggagcatttctacaacctctgctgcctctaccgcaaatgaaaactccacctctgaatgccgagttagaactgcacaattgtaaggaagaaaagttgggcaggactggtggctcacaactgtaatcccagcactttgggaggatgaggcaggcagatcaccggaggccaggagtcaaggccagcctggccaacatggtaaaaccccgtctctactaaaaatacaaaaataagccgggcagagtggctcacgcctatc

SEQ ID NO: 671567 - DNA, 1296 bp, Homo sapiens
caatgaaagaaatgttgcaaatggaaatgacaagtggtggtaggaattgggcactctatgagacaacagacacatcccggattggagagtcagggacaggctcttagaagaaatggcctttamgctgagtcaagttaaccaggcaggatgaagggaagaggctcccaacagagggaccagtccgtgctcagagctcccagcatctgcccaaggcctccacagaacagactgttttgttttgttttttgttgttgtttttttgagatacagagtctcattctgtagcccaggctggaatgcagtggcattatctcagctcactgcaatctctgcctcccggttcacctgaggcaattctcctgcctcagcctatctagtagctgggattacagacgtccaccaccatgcccagctaatttttgtatttttagtagagacggattcactacctgttgaccaggctggtctcaaactcctaacctcaggtgatccacccacctcagcctcccaaactgctgggattacaggcgtgagccactgcatccggcctagactgttgttgaatctggttttcttcttctttcctcagttcttttcttttacatcttccccccatcattgctctgcccatccgaaggctgtggctggcacaggacagaacagaacctcctagcctcaagttccaaacccatactctccaacagccaggccctcagatgggaagcttcagagccttgtgacagcctggctgaacctctccagcctgggcgctccctccatttcctgccccggaaacaggcatctcctctggccacctcccaaagaagcctgtctggaagcctcaggcacccgttcctggaagcctgtactattcacaacaaagggcctgtccacccagtcgtgctgagcacacccctattcccccgagctctgaattgtcctttgcccaggctgggacaacatctcagagccttctgcctgctgcagactcggctcagcccaaagcactccatgaaattggggtgtggcatctgcctcaaggagcatttctacaacctctgctgcctctaccgcaaatgaaaactccacctctgaatgccgagttagaactgcacaattgtaaggaagaaaagttgggcaggactggtggctcacaactgtaatcccagcactttgggaggatgaggcaggcagatcaccggaggccaggagtcaaggccagcctggccaacatggtaaaaccccgtctctactaaaaatacaaaaataagccgggcagagtggctcacgcctatc

SEQ ID NO: 671568 - DNA, 1296 bp, Homo sapiens
caatgaaagaaatgttgcaaatggaaatgacaagtggtggtaggaattgggcactctatgagacaacagacacatcccggattggagagtcagggacaggctcttagaagaaatggcctttaagctgagtcaagttaaccaggcaggatgaagggaagaggctcccaacagagggaccagtccrtgctcagagctcccagcatctgcccaaggcctccacagaacagactgttttgttttgttttttgttgttgtttttttgagatacagagtctcattctgtagcccaggctggaatgcagtggcattatctcagctcactgcaatctctgcctcccggttcacctgaggcaattctcctgcctcagcctatctagtagctgggattacagacgtccaccaccatgcccagctaatttttgtatttttagtagagacggattcactacctgttgaccaggctggtctcaaactcctaacctcaggtgatccacccacctcagcctcccaaactgctgggattacaggcgtgagccactgcatccggcctagactgttgttgaatctggttttcttcttctttcctcagttcttttcttttacatcttccccccatcattgctctgcccatccgaaggctgtggctggcacaggacagaacagaacctcctagcctcaagttccaaacccatactctccaacagccaggccctcagatgggaagcttcagagccttgtgacagcctggctgaacctctccagcctgggcgctccctccatttcctgccccggaaacaggcatctcctctggccacctcccaaagaagcctgtctggaagcctcaggcacccgttcctggaagcctgtactattcacaacaaagggcctgtccacccagtcgtgctgagcacacccctattcccccgagctctgaattgtcctttgcccaggctgggacaacatctcagagccttctgcctgctgcagactcggctcagcccaaagcactccatgaaattggggtgtggcatctgcctcaaggagcatttctacaacctctgctgcctctaccgcaaatgaaaactccacctctgaatgccgagttagaactgcacaattgtaaggaagaaaagttgggcaggactggtggctcacaactgtaatcccagcactttgggaggatgaggcaggcagatcaccggaggccaggagtcaaggccagcctggccaacatggtaaaaccccgtctctactaaaaatacaaaaataagccgggcagagtggctcacgcctatc

SEQ ID NO: 671569 - DNA, 1296 bp, Homo sapiens
caatgaaagaaatgttgcaaatggaaatgacaagtggtggtaggaattgggcactctatgagacaacagacacatcccggattggagagtcagggacaggctcttagaagaaatggcctttaagctgagtcaagttaaccaggcaggatgaagggaagaggctcccaacagagggaccagtccgtgctcagagctcccagcatctgcccaaggcctccacagaacagactgttttgttttgttttttgttgttgtttttttgagatacagagtctcattctgtagcccaggctggaatgcagtggcattatctcagctcactgcaatctctgcctcccggttcacctgaggcaattctcctgcctcagcctayctagtagctgggattacagacgtccaccaccatgcccagctaatttttgtatttttagtagagacggattcactacctgttgaccaggctggtctcaaactcctaacctcaggtgatccacccacctcagcctcccaaactgctgggattacaggcgtgagccactgcatccggcctagactgttgttgaatctggttttcttcttctttcctcagttcttttcttttacatcttccccccatcattgctctgcccatccgaaggctgtggctggcacaggacagaacagaacctcctagcctcaagttccaaacccatactctccaacagccaggccctcagatgggaagcttcagagccttgtgacagcctggctgaacctctccagcctgggcgctccctccatttcctgccccggaaacaggcatctcctctggccacctcccaaagaagcctgtctggaagcctcaggcacccgttcctggaagcctgtactattcacaacaaagggcctgtccacccagtcgtgctgagcacacccctattcccccgagctctgaattgtcctttgcccaggctgggacaacatctcagagccttctgcctgctgcagactcggctcagcccaaagcactccatgaaattggggtgtggcatctgcctcaaggagcatttctacaacctctgctgcctctaccgcaaatgaaaactccacctctgaatgccgagttagaactgcacaattgtaaggaagaaaagttgggcaggactggtggctcacaactgtaatcccagcactttgggaggatgaggcaggcagatcaccggaggccaggagtcaaggccagcctggccaacatggtaaaaccccgtctctactaaaaatacaaaaataagccgggcagagtggctcacgcctatc

SEQ ID NO: 671570 - DNA, 649 bp, Homo sapiens
gataaatgattgaggtgatagataacccatttatcctgttgtgattattatgcattgcatgcctgtgtcaaaatatctcaggtaacccatagatctatatacctactgtgtacccacacaaattaaaaaatttttaaataataaaattaaaaatacatatgtaggaggatatggggtcagaatgtgaaaggatttctgtttaattccacagccctaaaatttgtaccgttacttgatatttatctataatctcattatctaaggactatactttaaaaaaaatctttttatatgccacagaacctataagacttttcactgtaaaatgagaatgtaaacrtgcacatgtgtgttcactgcagcagtattcacaatagcaaagacatggaatcaacctaaatgcccatcaattgtagattggataaagactatgtggtacatatacactatggaacactacacagccataaaaatgagatcatgtcctttgcaggaacatgaatggagctggataccattatccttaggaaactaactcgggaacagacaaccaaataccgcatgttctcacttaaaggtgggagctaaatgatgagaacacatgcacacagagaggagaaccaaagacaatggggcctatctgagggtg

SEQ ID NO: 671571 - DNA, 1621 bp, Homo sapiens
ccttaattttgatgggttatttttaaattgtgataacatttctctttattttatttcctctccttaattttgatgggttatttttaaattgtgataacatttctctttattttatttcctctccgttattttgatgggttattttgatgggttattttaaaattgtgataacatttctctttattttatttcccctccttttttcaccaaagagaaaaatatacactttcagctccaactaagtacaaaatttaaatcattagctcacattgtctagttattgaaactttttagttcagatttagtgcatttatttccttaaaaatatagtagacaaagggtaaaaaaaagttcaatgcagatcttaattaaggtcatagggaaaaaaaacttttgaggatttcactgtatattgttttgtacctaaaggcaattatcttctaaaaaagaataggccattaactctgagttcaaagaaatcaagatattttattttttaaggaattagtctattttagtaatcattttcttaactatcattgattcacccaatcgagattacttcttaacctatcatttacaagtttaattttaggtgtttttgtgatccactcccactatagatactcaataaatatttgttaagtgaatgaataaaaaaaatctttagttatcgattcaccctaatcagcctattcatataagtctcatggcacctcatctcttcctatgctcaccctctctacacaatayccttccaaatattacctgaaaaagaaagtcttttcctttttttctgttcttgttgatattttctttcttgaatttttggctttttttctgtgttctccaaaataaaagatggggcaacttggtttctccattcatattatttttttctttttcttcttttgtattttcttaggtgtatgtatttaagcatctaatttatgtctaacttcagttcaagtttctttatcatctggaattgatttatttaataggtttgattatttaaacgttatacacgatcaagaagaatttcaaaaccaatgactagtcttttatcaatgagttttctaaaaatatcacttttaaaatttacagtgttaaatttcatttattctagccactgctatttttaggtatagggctgggatattattttccaaccagctactttattttccatcattacacacacaaaaaaatcagatgttcattgtttctaagcaaagtaatacacttcaagctgtatggcagtgtgccattttaaatcattttctttgcacttcttgataatcatggaattatatgatatgacacttattaagtaagattccataatggctattgactatttcaagtgctagataataagctagagggcaaatatgttaaaacactcactatataaaatgttgcaataagagaaaagattttatatgggtatgaaggatggctgcctggaggaagaaagctggcaggattggagaagatttcccatagcagttacatctgacttaaattttcaagaggattgagaaatttgccaagttaagtggtgagagcaggaggctttctgagcagagggagtagcagctgtgagttcataaaattg

SEQ ID NO: 671572 - DNA, 1336 bp, Homo sapiens
  misc_feature 363, 364, 365, 366, 367, 368, 369, 370, 371, 372, 373, 374,375, 376, 377, 378, 379, 380, 381, 382, 383, 384, 385, 386,387, 388, 389, 390, 391, 392, 393, 394, 395, 396, 397, 398,399, 400, 401, 402, 403, 404, 405, 406, 407, 408, 409: n = A,T,C or G
  misc_feature 410, 411, 412, 413, 414, 415, 416, 417, 418, 419, 420, 421,422, 423, 424, 425, 426, 427, 428, 429, 430, 431, 432, 433,434, 435, 436, 437, 438, 439, 440, 441, 442, 443, 444, 445,446, 447, 448, 449, 450, 451, 452, 453, 454, 455, 456: n = A,T,C or G
  misc_feature 457, 458, 459, 460, 461, 462: n = A,T,C or G
cttgcaaagccatggtgggtgtggtattttattaattgtgcttytaattctcctgtgcttaccccgtatctgtaatctatatcgactatgccttccctatgtatctgtaagggtattttcctacaattgagtatcagatggaggccgactgtgaagggaaagttaaatattaaatttgaactcaattgaacatggacacaaacaacagtcaccaagtcccgaaacaggttgtgtgagctccttgaggcattcatccagcactgtttcagagaaatctctatttcaatctattcctatatgttagttatcggaaaacaatagacaatcacaaaaacaagttgacctttttgtgttccttgagcnnnnnnnnnnnnnnnnnnnnnnnnnnnnnnnnnnnnnnnnnnnnnnnnnnnnnnnnnnnnnnnnnnnnnnnnnnnnnnnnnnnnnnnnnnnnnnnnnnnnaatacctatgtgatggtttgataggtgcagtaaaccaccatggcacacgtttatctgtgtaacaaacctgcacatcctgcacttgtaccccggaacttaaaataaaatcgtataagattaaaaagaaagagaatatgtttacacactgataggctattgcagtctcaaaaagtttataattattcatctgctttaaattgatatgacaaaaccttttatgtatggtcactgaggtgttgctctgcttcttcctaaagctcttcattaaaggttaaacaaataaaaacacagcaaataagcaaacttggttagtcagaagtcccaaaaaacataatttatttccatttaaaacatggaaaatatgtaaatttgtcatttttcccaaaatcagttgaattcccctcaaaaatcaaaaggtcagatttcatgattgctatctaaatctgtatctatatatacacacttttatttatttcccaaaaaatgctttcgtcatttttgttgttatatcttgttatcattggagcaagcatgactggggacctgccagagcaaacaatatgtagtctttctaattatataaaaaatatattttattgtaaaatgaccttcccattgggagaaaatggcttctaatctcttttaagtatcgaattttaacaatagaagaatcattgtatgtaagttttattccagacagaaatcaatcacacaagaaaaagaatcttggaaaattccaatggaagcatatcatttatttgcattaaaaaatgtacctctttttctaaaaattgtggagcttaatattatgaggaagttttcttatttttccattaatgtgcaatatatatattgcacattatatttatatgca

SEQ ID NO: 671573 - DNA, 1034 bp, Homo sapiens
gcacagactagtctggtttttaaatctaactcccaaagtctagtcacacttaaatgtgttttccctcaattccatgttttatcaggactccgtgcatttgaataagctggttcctttgtccaaactaccatttccccttcttcatctgacttccagttaagttttagagtttggataaatctgtacttcccctgggaagcctttctttcattgtcactttcaggtgtgctcctatccgttgtcatacttactctgttaagtaagtgtagcttgtttcattgcccatgcctctgctctaatagcagtaactgcatttttttattctcgcaattgctaatatcaagtagagaaaatgacacatagtatgattcaaaaattttagttaaatacattatccatctttttatcaacttgagttcccaaatttgttctcaaaataaaacactgtacttgtttattctcagcatggtagaaatattcaaaagaatatttaggattatgtaaaagatagatctctgcctcatatttcagcaaataatctttgattgaatagattccagctgttaggcagacaatagcataatccaaaggctatcttagaagtatgtaacaaaccagatacacatgtcaccaaggcaagggaagtcacctgagacattctgtaatactttaattttgctctttcctaaactactatggctttcctgactaaataatgaaatttagcaatttattacattctgtttttattgtttttaagttctccatgactacaagtctactctcaacaaaatcaaaattctacagaggaaagagccaaccctcaggaaatatatatgtgtrtatatatatatatgtgtgtatatatacacacgtatatatgtatatacatatatgtgtatatatacacgtgtatatatgtatatacatatatgtgtatatatacacgtgtatatatgtatatacatatatacatatatacacatatataatattttatatatgtatatatttatatattttatatatgtata

SEQ ID NO: 671574 - DNA, 630 bp, Homo sapiens
tttttctatatatgtcttttggaagtggttccttccatttacattagcattataagtaggtgttamttttatactgttatgaacacaaagcatctttaaatatgcaacacaatgaaatatctgctatttcattcaataatatctactcatttaaaaatgtttgacttacttatctttccacccagcctggtcaaacagctctatacttgagtctcattctttttctttcataaaactgcttttattgaattgcattttggtctttgctatttatttttattgaggggcataataagattcagtaatactcaaatcacaagaatgagtagggcatggtgtccaccatgtctgacagggttccattagggggttggaacagaatgaggggtggagaatgtctcttttttcttacggcagagaacagttgttcgttttggggataactttttttgttgctgtttaattttattttgttgctatttttaacattcagtgagaaccagggtgtgtatttattttaatctccctgattctgtaaaataatgtcatttatagtatttcattctgctttggctgatgtgaggcttaaaatcaaattaaagccaaaatgggagccaagaaactgtacta

SEQ ID NO: 671575 - DNA, 376 bp, Homo sapiens
ggagacatttatatgacaatgtattgttgttgattttgttaactgaacagttttttaattaaaaattaatttttaattgaaaaaaacacttaactcttttcttatacccagaagcaattgacatatgtgaaaagtccttgaaaattaatcattcactgctttttgacagatctatttttgtctttacatgttacttagattttttattttacttaacatttgtccattatgtcttttctgcccaattaatagatttttaagaaaatttatgtataatacctagcatgrtattttatacataacaagtgtttagaaatatttgtggagatactttgaaagacctagttataaaacaaattttatctaagagggattt

SEQ ID NO: 671576 - DNA, 639 bp, Homo sapiens
tataaagaaaacaatgataaattatgaaaatttcttttgaagatattctacttcaagttatagagtatatggaaagaactgtaaatcattatctaggattctggaatgtaaagtattcaaagcagtcaatattttttaaggtaatgatgtattccctctcattcctgaacaattttgatttttaagaataatcaggaaaacctcctgtttttgaacctgtacagagttgcatagatgttggccattttgaggaaaacatcttttgtcctttgcaagcagcctgcacttgcaaatcattcaccagaaatcagaatagtagctgagactgttgaacttcctctgatgcaattagtggacagagagtcattagtgtagctctagacataggcaattgcccagactttaaactgttttggaggcagcttttkggtcagtagaaggaacagtatcactcaagctagcccaagtggtctctagctgtgtctccatgagtgcagaattatttttttcccctctgtagtaattattattagattctaccaagaaatgttgttttccctagtttataatagttaatatttatgaaaaattttccataggtcagcatatcaactatgattcctttggttacaagtgata

SEQ ID NO: 671577 - DNA, 639 bp, Homo sapiens
tataaagaaaacaatgataaattatgaaaatttcttttgaagatattctacttcaagttatagagtatatggaaagaactgtaaatcattatctaggattctggaatgtaaagtattcaaagcagtcaatattttttaaggtaatgatgtattccctctcattcctgaacaattttgatttttaagaataatcaggaaaacctcctgtttttgaacctgtacagagttgcatagatgttggccattttgaggaaaacatcttttgtcctttgcaagcagcctgcacttgcaaatcattcaccagaaatcagaatagtagctgagactgttgaacttcctctgatgcaattagtggacagagagtcattagtgtagctctagacataggcaattgcccagactttaaactgttttggaggcagctttttggtcagtagaaggaacagtatcactcaagctagcccaagtggtctctagctgtgtctccatgagtgcagaattatttttttcccctctgtagtaattattattagattctaccaagaaatgttrttttccctagtttataatagttaatatttatgaaaaattttccataggtcagcatatcaactatgattcctttggttacaagtgata

SEQ ID NO: 671578 - DNA, 618 bp, Homo sapiens
gtactttatcagatcatgtatagatatggaacatttcccttgttattcttttaaattcattttcaatttataatttacttccaacagaacaaaatgacactgtcttcagggcaataatcatgtttgccttcctttgtatttttctcrtaacatctagtgaaagtaggtatttaatacaagagagcatttagtgaaagggaacctaataagtgtgaattctcatgggcataattcaggagtaatccaaagtccttactgtctttgcggggttttacacgttcttgcccctgtcacctctctgaactctttcttaccactccccctcactctctctgtgccgtactgaactccttgctgtttcttactgcatacctctgcttcagggcctttgcacttaccatacatgctgtgtggtactctcctcccttcagatttctaaatcattctttttcatctcattcaaacctccttctcaatgaaaccttctgatgtccttatttaaaattgtaatgcctctcccagcccctatactttctttccatcccctcgccccactagaatataagatccataagggctggtattttgtgtcatttgtatttttatacggtgccagga

SEQ ID NO: 671579 - DNA, 618 bp, Homo sapiens
gtactttatcagatcatgtatagatatggaacatttcccttgttattcttttaaattcattttcaatttataatttacttccaacagaacaaaatgacactgtcttcagggcaataatcatgtttgccttcctttgtatttttctcataacatctagtgaaagtagrtatttaatacaagagagcatttagtgaaagggaacctaataagtgtgaattctcatgggcataattcaggagtaatccaaagtccttactgtctttgcggggttttacacgttcttgcccctgtcacctctctgaactctttcttaccactccccctcactctctctgtgccgtactgaactccttgctgtttcttactgcatacctctgcttcagggcctttgcacttaccatacatgctgtgtggtactctcctcccttcagatttctaaatcattctttttcatctcattcaaacctccttctcaatgaaaccttctgatgtccttatttaaaattgtaatgcctctcccagcccctatactttctttccatcccctcgccccactagaatataagatccataagggctggtattttgtgtcatttgtatttttatacggtgccagga

SEQ ID NO: 671580 - DNA, 1087 bp, Homo sapiens
cggaatacattttatgtcaattcaaaatttattatcaaatagtatgtataatattaaatactctgcagaatcatatgtgtgtatgattttttttcttcctgaaaaaaatcttgaaggatgtacttcaaagcattaacagtgattacccttaaagagggcctttgaattgaggttgtcgtcaacggggacatggtgttatatgtaatacgatgcttcaacaatcagaatgaattcatgaattacttttatatttaagactttaaaaatcaaaataagggagtatgagatatatagcctatttaaaaactacaaaatatggaaggatatagaaatacgcatgtaaatgtcttaaaagcaacttggaagatacacaaaaattattaacagtggtttccactgggaaggaataggagattggacatatcagaaaatgccttttctaaaaataatttcaccaagttcgacaaaatacaaacatcaattcctagtgttttaataactgcttcaatttttatagtttaatataaaatatttaaataaataaaacatatggaagtgctaagaatccttaaaataatataaagactttgtwttttttttcctttttatggagaacggggtctcgctatattgcccaggcaggtctcaaatcctaggctcaagctatcctcctgcctctgcctccctaagagctgggattacaggcatgagccactgcgcccggcaagactattttttattaaactacattttaatagtaaaatttatactttatatagattttcaatccaagtggtatctgtttataaattgggatcaacttttgtaacagctcggattctatctggtttcactattgcaagctatttcctgcctcttagaaaaaaagtcaatttattttaacaacacaataattcatctaaaatggcagtgagccataagacacaaataattcactccaggtttttcacaatctttttaatgtttaatatttccatattacaaacaataaaccacaatagatttttgtatgttggttaataaatttaagtaatatgatgatttagaagtatgtagcattatgact

SEQ ID NO: 671581 - DNA, 620 bp, Homo sapiens
ttttattctaactcttattgggcatttaattattaaaaatatcacaaaatccttaaagtatattaacaaattaaatctttttaaaacaattagtatctgataaaaataaattgccttttagatcaaagaaaaactcgattcaacttgaaagcttgaaacaacagaataataaaaatcagagtttctaaagtttttctcttataaatatgtataggatctatatttttaaagggattcacactcatatatatatcaattcaaatttatttttcatttttctgatagtttcttgttgtttttgaaacatcatgaacatatgtctaaaataaaactgtactgctttgtagaaaacatattagtgtaaaagatgtataaagatggtaacattttattctgattataaattktaggtatcactttattttttattgtattaaacatactccatacagcagctaatagtaacagatacgaacgtaaagaagaaaatgaaaaaactatcttatatcaacataggatgaataccaaagtctgagaaaaagaattttaaagtactaatcggaatacatgttaggatagtaaattaaaaggtggctacattggacatttataattatttc

SEQ ID NO: 671582 - DNA, 1942 bp, Homo sapiens
tatgtccattactgtaatatggctacagaaaactttgtttttttaacatgaaattcagttcaagaaaatttttgaatatataccacctgctgggctatctttgacatattttaattcctttttctctactatcattaatgctactactgctactaataattttcccaaatttggaagtgattattatgtcctagatattattctgtatactttatatacattaattaaaatgattgaaattgctactattattataagctattttgcaggcaagaagatgggagcaaagataaactgtgtgtccacaatcacaaaactaataattcatttattgggatataaatcctatgaggtaggctcctatgtttcccattttacaaatgtgaaaacaggctaaagaatcatacagctggtaagtagtgcagtcagattacaactctctgaatccaaagctctggctctccataactatgctttactacatgtcatgacttaaaatattaaataaaatttatgtgacataatgtcacgagtaataggattataaagtttatccataaacatagaatttcaragttttaaatgcatgagttaattttccagctgtcttaatacttttctcatttgatacaagatcacttttatgcacgtgaccatgtttgtccatttttggaactttgtattctttagtcatatatgcctagctcctttacctgtaatataatcatgagaatatgataatgatgatgatattaatgatggttacccttttgtataattaatatatgcccaaaaatgtactaagaagattgcatgcactgtttcatatagtccttataaaaattttgcatgtcatgttaataactaaaatttataataagttaaataactttatagggtcacatagttagcaaatgatggacttgatattgaaatccaggaagttttaaaattatataaaaaagagatagaaatgcaattatcctgacatatctaattcttatttagtaatgatgactttcctcaaagcctaattgaatactgcatatttttctctctctggaaattagagaatgatcagttatcttggagactattactatgttgattgggatcctatttgtaacacaataacacattaattttgctgatttgataatgtgttggctgttcttggataaataagctggtaatgtcaacaaactaaactatcctttagtttttgaaaatattcatgtgctatttataaggattttataattttgaagtttaaaattttaaaaacagctaagtaaatgtattttatccaataaagagttgctatagacactaactttcataatgctaaatttagtttgtattttgtatgaaatatttaagccagtactttatacacatctaagtgttctaggtgtacaatcatgtcagaactaatgagttatctggcaatttaacttttattcattgtcttaaaaagttatttaaaaagaactgctatatattggactaatagattctggacagtctttaaactagtagatgagcctaattagaacaattttttcatttactcattcattcattcagcaaatatttattgttttaacactatgttaggcactagggatgtagcaatacacaaaacaggcctagatccctgccttcctgaggcttactttccactggggatactcagttaacatgctatatatatcagatggtgataactgctgagggtaagtttaaagcagaataaaggcttaggaagcagaagtgggattccagtttgcatttttaaatgtaacaggatgatacccaaggtaacatattggtaaaggtttgaaggaacttaaataataagtcatacagatatttgagagaaatatattagtgcaaggttgtgagtcaaaggctgtgtagggctggagcatgccagtgatgt

SEQ ID NO: 671583 - DNA, 631 bp, Homo sapiens
ttcaacggttttagaagttctgcaccaggaggcagagacaaagagcaaatacatttcttattatgccatataccactcctggtttttgacgatggatcttttayaacaaaaggctcatagcaattaaaagatattgttacattattagagtctcatttggtcattagtaattagtgcggttcattattatatcatataaaaatggctcccaggcaagaccattcaggtttgcaagcttctatttaatctcgtttgggttcccaaagcaggaagtggtctcagcaatacactgcctcatcttttcatgcatctggtagagttgagctaagagaaaatatctttcattctgggcctcttccaagatgttgagttaatattggatttctctcattacttaatacatttattcattactttactttcaactattatttctccttttctccatttataaccaaacttttccaactttggaaaaaacattaggtacaatcactatactggtctagattgcaggcagcaatactagtctagcaagtgcctttccctgagttcattactatccatccagagtagggttaaatagacacagaactagtggatcactttgattactaggcagtatagctac

SEQ ID NO: 671584 - DNA, 631 bp, Homo sapiens
ttcaacggttttagaagttctgcaccaggaggcagagacaaagagcaaatacatttcttattatgccatataccactcctggtttttgacgatggatcttttacaacaaaaggctcatagcaattaaaagatattgttacattattagagtctcatttggtcattagtaattagtgcggttcattattatatcatataaaaatggctcccaggcaagaccattcaggtttgcaagcttctatttaatctcgtttgggttcccaaagcaggaagtggtctcagcaatacactgcctcatcttttcatgcatctggtagagttgagctaagagaaaatatctttcattctgggcctcttccaagatgttgagttaatattggatttctctcattacttaatacatttattcattactttactttcaactattatttctccttttctccatttataaccaaacttttccaactttggaaaaaacattaggtacaatcactatactkgtctagattgcaggcagcaatactagtctagcaagtgcctttccctgagttcattactatccatccagagtagggttaaatagacacagaactagtggatcactttgattactaggcagtatagctac

SEQ ID NO: 671585 - DNA, 631 bp, Homo sapiens
ttcaacggttttagaagttctgcaccaggaggcagagacaaagagcaaatacatttcttattatgccatataccactcctggtttttgacgatggatcttttacaacaaaaggctcatagcaattaaaagatattgttacattattagagtctcatttggtcattagtaattagtgcggttcattattatatcatataaaaatggctcccaggcaagaccattcaggtttgcaagcttctatttaatctcgtttgggttcccaaagcaggaagtggtctcagcaatacactgcctcatcttttcatgcatctggtagagttgagctaagagaaaatatctttcattctgggcctcttccaagatgttgagttaatattggatttctctcattacttaatacatttattcattactttactttcaactattatttctccttttctccatttataaccaaacttttccaactttggaaaaaacattaggtacaatcactatactggtctagattgcaggcagcaatactagtctagcaagtgcctttccctgagttcattactatccatccagagtagggttaaatagacacagaactagtggaycactttgattactaggcagtatagctac

SEQ ID NO: 671586 - DNA, 301 bp, Homo sapiens
ttttttttattattgcatagattgtgctgtggccaaaacattcagcaaaaccatgctctaattggcctctgtggctattcccttgaacgagcaagaaataagrggacctgctgttaaggggatataaagacaagataagacccaaagaagtctcagtctccacgacagcttgggaaagaactactgcagtgccaataaatctctagtattcagcctgaggcatgacatgcggggctgagccacacaagagctagagacgctccccgcaagcagaggacagtgcttttgtggcaaaacatgg

SEQ ID NO: 671587 - DNA, 610 bp, Homo sapiens
aaagggtcaggctgacaaaaaggatgaatgacattgagaggcgggagaacccaaggaggggtggccagttcagaccaggtacagagggagagggctctggaacacagggtgtcggggctcagggccaggctgaatcttccggagggcgatgctgggcagactcaccccaacaggagtctcactgggcctttgttcttttgtaaaggcttttgccacttgggtgtccaagctgtgggaggttcagtggtggtcagaggagtctcatcaagggatggggctcaggccmttgtctgtggacagcagctgcatgcactgcagggtccaaagtatgccgaccacaggtgatgaggccagacggggttatatttaaattccaacctggcatttatttgccatccatcttgggcaagatacttaacccctgacaccttgatttccacatctgaaaaatgattcctcgtgactaatacatgagctgttctctataaagtgtctgctcaagcatctgacacaggtgctcagtctgtgagagcctctcgccgccgcctccttcctccatcgcccacagcccttgctctctgtgtcttgggttgtgacctaacttaaggct

SEQ ID NO: 671588 - DNA, 647 bp, Homo sapiens
taattgattattccatcgtgtcctctgcctctgaatccagggcactggaaacagccatcctcttacttcctgtggcaggcagtttggcctgygtctcaggcttggtgtctagagtcagactacttggattcaagtccagctctgcttctgacaagccatggggtcttggaaagttagctgacctctttaccttcagtttccacatctgtaaagtgtgttaataatagaatgtgctggtttgggttgttatagaatccgattagagaatggatgtgatgtgcttagcacagtgcctggtgcagaggaagtgctcagtagagaacagcatcgacactgtcactgctgccaccaccctggcagtgtgagtcgactgccacagctgctttccaggtgccccaccagcacccctcggccccatcctctggcgacctgccttgtcttgcagtatcttgttctcaaacataggcatcctaggatcttcacctctgagtcttttttctatcctcttgttcccttttcttggcacactctttgcccaggcctttgttcactgctcccggggagagccctctggtgacccgagctgccgggctcctgtgcagtcttgctgtttcaggtcctgtttggtgcattctactttagtcttc

SEQ ID NO: 671589 - DNA, 982 bp, Homo sapiens
ttcttggaaggcccttggctggtgcagccttgtcaacatgatgtctgttatgcctcacagcggcaacttaagcattcatcctgttgaaagtcacaactcggccaactggttatcttgcttaatgctgtctgttcaacagcagatttgacttgagccctggtttactcattgtgaaatcagcaataccactctggacaagttccccaaccaccctgaacttcaattccctcagccttgaattcgcgagaaccattgttaattgacaggcatcatctgctgacaggttcaccttccatttcgtaggcaagcgataaaaagcctgagctccgcggtttgccaagtaaaaagtatttgtgcatattgttactttgaatcctcrtgagaactcattgaggatgaaagttgccttcattccatagacgaggactaagcagaacctggactgtggaccagcaatctatcctgggctcctgtggccacacgccccgcttcccccacggtcacctgaagctggacttaccactcgcctcgccatcatgggacaaaaactttctagggggtgccgtgctaccttgaatgattttatagacctttgttctgcaggatgtggtgtataagctgagatgtctgtgttgaaggtggggcagagttatttatatcagacatgtataatcaataacagtttcttttctttttaaatgacagttttattgagatgtaattaacatatcctttgatgcacctatttacagctcgttaactcattggtattgaggatactcacagagttgtgcagccgttaccatgattgattttagaacactatcacctaccatgctacaaaaactcctacccattggccaccactccccctttccacttcccccacccccagccctaggcaaccattgatctacttttggtttctatggatttacctattctggacatttcatataagtggaattctgtgtgtgttctg

SEQ ID NO: 671590 - DNA, 629 bp, Homo sapiens
ttgcaggcagcttcctccaatcaagcatgcagccgccctgtgtgttcattsattttgcgtcagtggccatttcctccctcagcagtcaggctgcatctccatgaggggtgctccttctaggggagtaggcacaggaagcaacagctggggatcggggtcctgccttcctgcatctcccacgatgaggacggaggccgccgccccgggcctgttttgagcgccagcagcagcgaggcacccctcaaggaagcagcgccctgcagctcctttatctttttgcaaaagcgaatccgactctccctcaacgagccagcacacgtggaacccagtgggtttggatgtccggggtgtttgggacctcaggcatgacctgtgtggtcccttcccaagccctaagccgtaacagggaggtcaggccctacgggcatctggccattcgtgctctccgttccgagcaccccatcagggctaaggaggtgccctgctccaggcccagggacatttgcagaggttgagcttgctccctaccactgcactcttctcaggagaaacagccaggcccaaggacaccatgtccgcctgcccagggcagtccatggccagccaagccccagacttgaggtgaaacc

SEQ ID NO: 671591 - DNA, 610 bp, Homo sapiens
taatgattctcaatatttcagacaatcagttggaaatcatgtgtttatcttccatcgggcagcacaaaccaaagaaaatattccattttctccctctgggctggcatggtctctgttctatgaggttacaccagctaccttgggctggctgggagctctggttggcagatgtgtgtttctgattgatgacatgaaaaggtaagttcatgatcctttattcaagaggatgggatatcatctttcaaaatatggggcagcccctggggagaggaaactgcaaacatagtctcttggaggtaggcagagcaaactggcatcttgagttctggcctgccccctgtctgatcatctgggtcagccgctgaccaagccatacgctgctgttcgtcattcgcaaaggttctttgtatcttctttcccgtgagtctaggcttcccawgaagtgttccgtggtgacgccaacacctggcattaaaccactcctgtcttgtcagcatggggacgctccatgctgaattctgtaaaggcctctggcccccaggccttccctgttccagatggttctggccagccttcccaagctcggctcctgtagcacatggcggtggca

SEQ ID NO: 671592 - DNA, 1148 bp, Homo sapiens
ggatgtggaatgagcaccaccctctgctgagtggaaatgaagccagcgctgccaccctgtctcggtgtctccagagaaatgtagcaaggaggcaggtacgacaatgtatttcagaggccctatcagtgacgccgatagaaacagccagccccttcggaaggcaggtacgacaacatatttcagaggccctatcagtgacgctgagggaaacagccagccccttcgggaggcaggtatgacaacgtatttcagaggccctatcggtgacgccaatagaaacagccagccccttcgggaggcacgtgcgacaacgtattatttcagaggccctatcagtgatgccgacggaaacagccagccccttcgggaggcaggtacracagcgtattatttcagaggccctatcagtgatgccgacggaaacagccagcccctccaggaggcatgtgcgacaacgtatttcagaggccccatcagtgacgctgacggaaacagccagccccttcgggaggcaggtacgacagcgtattatttcagaggccctatcagtgatgccgacggaaacagccagcccctccaggaggcacgtgcgacaacgtatttcagaggccccatcagtgacgccgacggaaacagccagccccttcgggaggcaggtacgacagcgtatcatttcaggggccctatcagtgacgccgatggaaacagccagccccttctggaggcaggtacgacagcatactatttcaggggccctatcagtgacgccgatggaaacagccagccccttcgggaggcaggtacgacagcgtatcatttcaggggccctatcagtgacgccgatggaaacagccagccccttctggaggcaggtacgacagcatactatttcaggggccctatcagtgacgccgatggaaacagccagccccttcgggaggcagtacgacagcgtattatttcaggggccctatcagtgatgccgacggaaacagccagccccttcgggaggcaggtacgacagcgtatcatttcaggggccctatcagtgacgccgatggaaacagccagccccttctggaggcaggtacgacagcatactatttcaggggccctatcagtgacgccgatggaaacagccagcccct

SEQ ID NO: 671593 - DNA, 1148 bp, Homo sapiens
ggatgtggaatgagcaccaccctctgctgagtggaaatgaagccagcgctgccaccctgtctcggtgtctccagagaaatgtagcaaggaggcaggtacgacaatgtatttcagaggccctatcagtgacgccgatagaaacagccagccccttcggaaggcaggtacgacaacatatttcagaggccctatcagtgacgctgagggaaacagccagccccttcgggaggcaggtatgacaacgtatttcagaggccctatcggtgacgccaatagaaacagccagccccttcgggaggcacgtgcgacaacgtattatttcagaggccctatcagtgatgccgacggaaacagccagccccttcgggaggcaggtacaacagcgtattatttcagaggccctatcagtgatgccgacggaaacagccagcccctccaggaggcatgtgcgacaacgtatttcagaggccccatcagtgacgctgacggaaacagccagccccttcgggaggcaggtacgacagcgtattatttcagaggccctatcagtgatgccgacggaaacagccagcccctccaggaggcacgtgcgacaacgtatttcagaggccccatcagtgacgccgacggaaacagccagccccttcgggaggcaggtacracagcgtatcatttcaggggccctatcagtgacgccgatggaaacagccagccccttctggaggcaggtacgacagcatactatttcaggggccctatcagtgacgccgatggaaacagccagccccttcgggaggcaggtacgacagcgtatcatttcaggggccctatcagtgacgccgatggaaacagccagccccttctggaggcaggtacgacagcatactatttcaggggccctatcagtgacgccgatggaaacagccagccccttcgggaggcagtacgacagcgtattatttcaggggccctatcagtgatgccgacggaaacagccagccccttcgggaggcaggtacgacagcgtatcatttcaggggccctatcagtgacgccgatggaaacagccagccccttctggaggcaggtacgacagcatactatttcaggggccctatcagtgacgccgatggaaacagccagcccct

SEQ ID NO: 671594 - DNA, 1148 bp, Homo sapiens
ggatgtggaatgagcaccaccctctgctgagtggaaatgaagccagcgctgccaccctgtctcggtgtctccagagaaatgtagcaaggaggcaggtacgacaatgtatttcagaggccctatcagtgacgccgatagaaacagccagccccttcggaaggcaggtacgacaacatatttcagaggccctatcagtgacgctgagggaaacagccagccccttcgggaggcaggtatgacaacgtatttcagaggccctatcggtgacgccaatagaaacagccagccccttcgggaggcacgtgcgacaacgtattatttcagaggccctatcagtgatgccgacggaaacagccagccccttcgggaggcaggtacaacagcgtattatttcagaggccctatcagtgatgccgacggaaacagccagcccctccaggaggcatgtgcgacaacgtatttcagaggccccatcagtgacgctgacggaaacagccagccccttcgggaggcaggtacgacagcgtattatttcagaggccctatcagtgatgccgacggaaacagccagcccctccaggaggcacgtgcgacaacgtatttcagaggccccatcagtgacgccgacggaaacagccagccccttcgggaggcaggtacgacagcgtatcatttcaggggccctatcagtgacgccgatggaaacagccagccccttctggaggcaggtacgacagcatactatttcaggggccctatcagtgacgccgatggaaacagccagccccttcgggaggcaggtacgacagcgtatcatttcaggggccctatcagtgacgccgatggaaacagccagccccttctggaggcaggtacgacagcatactatttcaggggccctatcagtgacgccgatggaaacagccagccccttcgggaggcagtacgacagcgtattatttcaggggccctatcagtgatgccgacggaaacagccagccccttcgggaggcaggtacgacagcgtatcatttcaggggccctatcagtgacgccgatggaaacagccagccccttctggaggcaggtacgacagcrtactatttcaggggccctatcagtgacgccgatggaaacagccagcccct

SEQ ID NO: 671595 - DNA, 1148 bp, Homo sapiens
ggatgtggaatgagcaccaccctctgctgagtggaaatgaagccagcgctgccaccctgtctcggtgtctccagagaaatgtagcaaggaggcaggtacgacaatgtatttcagaggccctatcagtgacgccgatagaaacagccagccccttcggaaggcaggtacgacaacatatttcagaggccctatcagtgacgctgagggaaacagccagccccttcgggaggcaggtatgacaacgtatttcagaggccctatcggtgacgccaatagaaacagccagccccttcgggaggcacgtgcgacaacgtattatttcagaggccctatcagtgatgccgacggaaacagccagccccttcgggaggcaggtacaacagcgtattatttcagaggccctatcagtgatgccgacggaaacagccagcccctccaggaggcatgtgcgacaacgtatttcagaggccccatcagtgacgctgacggaaacagccagccccttcgggaggcaggtacgacagcgtattatttcagaggccctatcagtgatgccgacggaaacagccagcccctccaggaggcacgtgcgacaacgtatttcagaggccccatcagtgacgccgacggaaacagccagccccttcgggaggcaggtacgacagcgtatcatttcaggggccctatcagtgacgccgatggaaacagccagccccttctggaggcaggtacgacagcatactatttcaggggccctatcagtgacgccgatggaaacagccagccccttcgggaggcaggtacgacagcgtatcatttcaggggccctatcagtgacgccgatggaaacagccagccccttctggaggcaggtacgacagcatactatttcaggggccctatcagtgacgccgatggaaacagccagccccttcgggaggcagtacgacagcgtattatttcaggggccctatcagtgatgccgacggaaacagccagccccttcgggaggcaggtacgacagcgtatcatttcaggggccctatcagtgacgccgatggaaacagccagccccttctggaggcaggtacgacagcataytatttcaggggccctatcagtgacgccgatggaaacagccagcccct

SEQ ID NO: 671596 - DNA, 796 bp, Homo sapiens
atctccaggcctggcatggtggctcacacctgtaatctcagcactttgggaggctgaggctggaggattgttggagccaaggagtttgagaccagcctgggcaacattgcgagacttccatttctacaaaaagtaaaaattaaaaaattagccagccgtgatcgcacacaccagtagtcccagctactcaggaggctgaggcaggaggatcactggagcttaggagatcaaggctgcagtgagctatgatcacaccactgtactgcagcctgagtgacagaacaagatcctttctaaaaaacaaaaaattgaatctccagtgtacatgcagacttggatgagtaggcctgcccctccacctgttgcagagtctgcacacctcttctccaagcccatttctccatttctcttttcttctgggcacacagctagactacatttcccagcttcccttgtagtgacatatagccacgaactgagttctggccaatggaacatgggcagaagttgtgtgtatcccttctggacctggcccattaaaatgttctaaatgatcatacacattctctatccactggaggacattcttggrccagatgcagaaattccaagaccttagaatagagataaacaagtttttgggccagatgtaaatattttaggcttgtgagctacacagtatttgttgcaactgctgtcagagttcaaaagcagccataaatacgtaagtaaatgagtgtgattgtgttctagtaaaacttcatttacaaacagctggcagactcaatttggccca

SEQ ID NO: 671597 - DNA, 796 bp, Homo sapiens
atctccaggcctggcatggtggctcacacctgtaatctcagcactttgggaggctgaggctggaggattgttggagccaaggagtttgagaccagcctgggcaacattgcgagacttccatttctacaaaaagtaaaaattaaaaaattagccagccgtgatcgcacacaccagtagtcccagctactcaggaggctgaggcaggaggatcactggagcttaggagatcaaggctgcagtgagctatgatcacaccactgtactgcagcctgagtgacagaacaagatcctttctaaaaaacaaaaaattgaatctccagtgtacatgcagacttggatgagtaggcctgcccctccacctgttgcagagtctgcacacctcttctccaagcccatttctccatttctcttttcttctgggcacacagctagactacatttcccagcttcccttgtagtgacatatagccacgaactgagttctggccaatggaacatgggcagaagttgtgtgtatcccttctggacctggcccattaaaatgttctaaatgatcatacacattctctatccactggaggacattcttgggccagatgcagaaattccaagaccttagaatagagataaacaagtttttgggccagatgtaaatattttaggcttgtgagctacacagtatttgttgcaactgctgtcagagttcaaaagcagccataaatacgtaagtaaatgagtgtgattgtgttctagtaaaacttcatttacaaacagctggcagrctcaatttggccca

SEQ ID NO: 671598 - DNA, 583 bp, Homo sapiens
gccttgcgggaagacagagagaagctgtgggtaaggaactgctgatggttttgtagatctgtaaatggtacctgggaatcattggcgagccctgaactggaacacagaactgagagagtgctgatgcaggacccagcgtcccgacccaccctccctccttgaactcatgtgaccttggcaacttcrttttctctttctctgggcaggagttcagctgcaagattggaacctttaggaacatggcttatggtgttaggagaacatccataaagtgattaaaagtactccctgcactgaaatatttgttactgcccacgctggcctcctcccatcatggtgcctaaaaatagccttaatatttggccttttagatctcaaagacttttaatatttgggagtcccctattaaactgtcaggtccatggaaaagtcatttaggcgagtgtttgggatattcactgtagactgaggaacaatagcttgaggtggcaaaagtggagactttagcagcgtgagaagggggagagccctaagcttcacacacttacaactggctggtgtccccagggcagtggggctccct

SEQ ID NO: 671599 - DNA, 583 bp, Homo sapiens
gccttgcgggaagacagagagaagctgtgggtaaggaactgctgatggttttgtagatctgtaaatggtacctgggaatcattggcgagccctgaactggaacacagaactgagagagtgctgatgcaggacccagcgtcccgacccaccctccctccttgaactcatgtgaccttggcaacttcgttttctctttctctgggcaggagttcagctgcaagattggaacctttaggaacatggcttatggtgttaggagaacatccataaagtgattaaaagtactccctgcactgaaatatttgttactgcccacgctggcctcctcccatcatggtgcctaaaaatagccttaatatttggccttttagatctcaaagacttttaatattygggagtcccctattaaactgtcaggtccatggaaaagtcatttaggcgagtgtttgggatattcactgtagactgaggaacaatagcttgaggtggcaaaagtggagactttagcagcgtgagaagggggagagccctaagcttcacacacttacaactggctggtgtccccagggcagtggggctccct

SEQ ID NO: 671600 - DNA, 1132 bp, Homo sapiens
  misc_feature 12, 13, 14, 15, 16, 17, 18, 19, 20, 21, 22, 23, 24, 25, 26,27, 28, 29, 30, 31, 32, 33, 34, 35, 36, 37, 38, 39, 40,41, 42, 43, 44, 45, 46, 47, 48, 49, 50, 51, 52, 53, 54,55, 56, 57, 58, 59, 60, 61, 62, 63, 64, 65, 66, 67, 68,69: n = A,T,C or G
  misc_feature 70, 71, 72, 73, 74, 75, 76, 77, 78, 79, 80, 81, 82, 83, 84,85, 86, 87, 88, 89, 90, 91, 92, 93, 94, 95, 96, 97, 98,99, 100, 101, 102, 103, 104, 105, 106, 107, 108, 109, 110,111: n = A,T,C or G
attttyttcaannnnnnnnnnnnnnnnnnnnnnnnnnnnnnnnnnnnnnnnnnnnnnnnnnnnnnnnnnnnnnnnnnnnnnnnnnnnnnnnnnnnnnnnnnnnnnnnnnnntgctaaattgaaatacaactcttttattataatgtgtcgtggcaaagactctatgttctatgattatagcagctgttttataagcattttagaagaaaacacagcatataaatatatgtatttgattttcatggaaaaagtaattcacaatttggcttagatacttagtcatcatgctcagcatgtagcttagaaattttctatctggatcaataaacgctcttaagttgtgtaaaatgaatttaatatactgctttctcagtgttttggaatgaatacaagtgtgtgtatatacatatatatatacacacacacacactcacacacacactgtttaaaaaatcaattgttcaaaatatgcatattcccaaattattattcttccataaagtaagagcaacagagatagcattatttgattgacaatttggcaatgatactatttcttacaccaagtatacatctttgcgggtctttcaatatgctcaattatctggacctgtttaatctgcccaggctcctccctgttgctcatccaccttgatctgctatcctagtggttctcgccttcaccttttctcatccattcctttcctaattcccatctctatgttgttgtcaagaatggtgcttccatctgctgaaaactccctactttcatatgaatcatgtttatttcttaaaaagtgtgaccatgccagtgattccagtgctttagaaggcagaggcaggataatcacttgaagccaggaatttgagacctgcttgggcaacataggcaattccttctccacaaaaacttattttacaattaaccaggtggggtgggatgtgcccgtggtcctggctactcaggaggctgaggcaagatgatctcttgaggtgaggagttcaaggctgcagtgagccatggctgtgccaccgcactccatggctgcgcaagtgagtgagaccctgtctcaaaacaaacaaataaataaatgaaaagcatactatgacctaagtccaccctgaactctct

SEQ ID NO: 671601 - DNA, 1132 bp, Homo sapiens
  misc_feature 12, 13, 14, 15, 16, 17, 18, 19, 20, 21, 22, 23, 24, 25, 26,27, 28, 29, 30, 31, 32, 33, 34, 35, 36, 37, 38, 39, 40,41, 42, 43, 44, 45, 46, 47, 48, 49, 50, 51, 52, 53, 54,55, 56, 57, 58, 59, 60, 61, 62, 63, 64, 65, 66, 67, 68,69: n = A,T,C or G
  misc_feature 70, 71, 72, 73, 74, 75, 76, 77, 78, 79, 80, 81, 82, 83, 84,85, 86, 87, 88, 89, 90, 91, 92, 93, 94, 95, 96, 97, 98,99, 100, 101, 102, 103, 104, 105, 106, 107, 108, 109, 110,111: n = A,T,C or G
atttttttcaannnnnnnnnnnnnnnnnnnnnnnnnnnnnnnnnnnnnnnnnnnnnnnnnnnnnnnnnnnnnnnnnnnnnnnnnnnnnnnnnnnnnnnnnnnnnnnnnnnntgctaaattgaaatacaactcttttattataatgtgtcgtggcaaagactctatgttctatgattatagcagctgttttataagcattttagaagaaaacacagcatataaatatatgtatttgattttcatggaaaaagtaattcacaatttgrcttagatacttagtcatcatgctcagcatgtagcttagaaattttctatctggatcaataaacgctcttaagttgtgtaaaatgaatttaatatactgctttctcagtgttttggaatgaatacaagtgtgtgtatatacatatatatatacacacacacacactcacacacacactgtttaaaaaatcaattgttcaaaatatgcatattcccaaattattattcttccataaagtaagagcaacagagatagcattatttgattgacaatttggcaatgatactatttcttacaccaagtatacatctttgcgggtctttcaatatgctcaattatctggacctgtttaatctgcccaggctcctccctgttgctcatccaccttgatctgctatcctagtggttctcgccttcaccttttctcatccattcctttcctaattcccatctctatgttgttgtcaagaatggtgcttccatctgctgaaaactccctactttcatatgaatcatgtttatttcttaaaaagtgtgaccatgccagtgattccagtgctttagaaggcagaggcaggataatcacttgaagccaggaatttgagacctgcttgggcaacataggcaattccttctccacaaaaacttattttacaattaaccaggtggggtgggatgtgcccgtggtcctggctactcaggaggctgaggcaagatgatctcttgaggtgaggagttcaaggctgcagtgagccatggctgtgccaccgcactccatggctgcgcaagtgagtgagaccctgtctcaaaacaaacaaataaataaatgaaaagcatactatgacctaagtccaccctgaactctct

SEQ ID NO: 671602 - DNA, 655 bp, Homo sapiens
attgatgggtattttagagccaacgctgaataatattaccaaagattctaaaggaacacaatagctgttaatttcaaactttagcatgttgtaaaaataaggtggatgagaagtttatacctgcttaatcactaagaatcagttctagatgattaagttctaaaaggaatcatggaattctcttattttatatattcataattttagaasaaaaaggtcaatagagtgtatttatcacaaattataagtattacacacattttctgaaatggaaatctttagacatgttggtcttagacgtcataattcactctttgttttcacacccaaattatgatacttattattaattttctagggagagaaaattaatattatgccttactaactgaagagttcaataactgtggctctctctattcaattctattctagacttgtacatgcttggagaacctatggagtcaaacaccatgaaaaagcataaaaagtgttcctagagggaattaggaaagaaaaattgatttgtaatggaaattactgttgaataatttggataaattttgtattaaaatgtaaaccagtatcccatcagatatttcatgaggctaaaataagatttttcagtaatacttaattttaatttttttaaatc

SEQ ID NO: 671603 - DNA, 655 bp, Homo sapiens
attgatgggtattttagagccaacgctgaataatattaccaaagattctaaaggaacacaatagctgttaatttcaaactttagcatgttgtaaaaataaggtggatgagaagtttatacctgcttaatcactaagaatcagttctagatgattaagttctaaaaggaatcatggaattctcttattttatatattcataattttagaagaaaaaggtcaatagagtgtatttatcacaaattatawgtattacacacattttctgaaatggaaatctttagacatgttggtcttagacgtcataattcactctttgttttcacacccaaattatgatacttattattaattttctagggagagaaaattaatattatgccttactaactgaagagttcaataactgtggctctctctattcaattctattctagacttgtacatgcttggagaacctatggagtcaaacaccatgaaaaagcataaaaagtgttcctagagggaattaggaaagaaaaattgatttgtaatggaaattactgttgaataatttggataaattttgtattaaaatgtaaaccagtatcccatcagatatttcatgaggctaaaataagatttttcagtaatacttaattttaatttttttaaatc

SEQ ID NO: 671604 - DNA, 655 bp, Homo sapiens
attgatgggtattttagagccaacgctgaataatattaccaaagattctaaaggaacacaatagctgttaatttcaaactttagcatgttgtaaaaataaggtggatgagaagtttatacctgcttaatcactaagaatcagttctagatgattaagttctaaaaggaatcatggaattctcttattttatatattcataattttagaagaaaaaggtcaatagagtgtatttatcacaaattataagtattacacacattttctgaaatggaaatctttagacatgttggtcttagacgtcataattcmctctttgttttcacacccaaattatgatacttattattaattttctagggagagaaaattaatattatgccttactaactgaagagttcaataactgtggctctctctattcaattctattctagacttgtacatgcttggagaacctatggagtcaaacaccatgaaaaagcataaaaagtgttcctagagggaattaggaaagaaaaattgatttgtaatggaaattactgttgaataatttggataaattttgtattaaaatgtaaaccagtatcccatcagatatttcatgaggctaaaataagatttttcagtaatacttaattttaatttttttaaatc

SEQ ID NO: 671605 - DNA, 679 bp, Homo sapiens
ttgtaactccatgtagataaccacaatcctgaatacttttcctgcttttatttatatgcttatttaatgcataaatataaattttatataaaataawtatttatataatttatataaaataaatgcataaatataaatatttgtatgcatgtatatgcatatttgtatacaattcaaccattatattgtttttagcacaaaatatatattatcgcttgtgcagctgtaattcatttatttactgctatacatttcactgaatgaacaaatctcatttatttatctcttctcctaagttgtttccaatatatttctgttgtttaatttgctatcacaaccaatgatcttacgaattttcttgtatgtcggtgttggtcattacatttgcacaagtacaagagtttctctaggttctagcgtctagaaggaagtctaggaatcttaacctttaatgccacctttttttccccagtgtgattgtatcaatttataccaccactagcaacctgtaggagtttcttttgttgaccttaccaacttaactcttaacaattaattcccatctaaactaacttgttacctcctaagctacaaatctgatcacctatctttctcataataatcttccttatttacttgtttctttccttatttatgtggccttttctggcagatttat

SEQ ID NO: 671606 - DNA, 636 bp, Homo sapiens
atgctactaaatttaaatttaaattctttttaaaaatattcttcaaaaaatggtttacttcctttacatggtataactccgtgctttcatataacaccattaaatatataaatacaatattactgcttattaattatcttttgaacttgggcaaaagatatcttaataccctcaaactttattaattaaatggaagaatgtacctaatctctcatagttagtgtgtaattagaatggttaaaactgatctgtaagtgccaagtatgactacatttatgagtttagcagagcgggcataggtttaatttctggagagtacaatgacatttattaatggcacctttataaaagaaacaatgattttcagaaagctattttatccctgtgattgcagtttagtcttcgcactggttaaactatattttgctgagtagtaactcattgtccacgataagaaagcactctggaggtgatttaagcccgtagtttttgcccgcctttctgagctgccatttccattttccsaattcattcctcagcacgcacatcatggcacttgccctggagatgagacagggctccaccttctagggcgtgactacagctctgcctgcgagcaccagcagcagagaccgc

SEQ ID NO: 671607 - DNA, 618 bp, Homo sapiens
tggttaatggtgtttaaacttatcatctgccatgaattacagaaattataatgtaaaagtagaaaaaccttctgttgatggataaaagagtacacttgaataccagaaaagagcctggctgatcctagattggaatcctctccactctttcaaattttgcacttagatcttcaaaagtatgtcatcatgagtttctttgaaacaaaaaccacatttagaatatatctaaatgttctatttgctatcataggataatgtaaatctartaatgtttttcttccacattcctcattagcatagaatgtttttaaaaatctcaatcaataatgaatataattcaataaactcttcaaaaattaaaataaaagatttccactgagcctttaaatattttaatttgataagaaaaggtccaatttttttagtgttgctaatacaaaaatgtaaaaaattcttaaattttacaaaggtacattggatgtacacaaataccattttggaaagaaagtaatgcaattttgttctcactcataggtgggaattgaacaatgagaacacttggatacagggtggggaagacaacacaccggggcctgttgtggggtggggggagtgggg

SEQ ID NO: 671608 - DNA, 618 bp, Homo sapiens
tggttaatggtgtttaaacttatcatctgccatgaattacagaaattataatgtaaaagtagaaaaaccttctgttgatggataaaagagtacacttgaataccagaaaagagcctggctgatcctagattggaatcctctccactctttcaaattttgcacttagatcttcaaaagtatgtcatcatgagtttctttgaaacaaaaaccacatttagaatatatctaaatgttctatttgctatcataggataatgtaaatctagtaatgtttttcttccacattmctcattagcatagaatgtttttaaaaatctcaatcaataatgaatataattcaataaactcttcaaaaattaaaataaaagatttccactgagcctttaaatattttaatttgataagaaaaggtccaatttttttagtgttgctaatacaaaaatgtaaaaaattcttaaattttacaaaggtacattggatgtacacaaataccattttggaaagaaagtaatgcaattttgttctcactcataggtgggaattgaacaatgagaacacttggatacagggtggggaagacaacacaccggggcctgttgtggggtggggggagtgggg

SEQ ID NO: 671609 - DNA, 618 bp, Homo sapiens
tggttaatggtgtttaaacttatcatctgccatgaattacagaaattataatgtaaaagtagaaaaaccttctgttgatggataaaagagtacacttgaataccagaaaagagcctggctgatcctagattggaatcctctccactctttcaaattttgcacttagatcttcaaaagtatgtcatcatgagtttctttgaaacaaaaaccacatttagaatatatctaaatgttctatttgctatcataggataatgtaaatctagtaatgtttttcttccacattcctcattagcatagaatgtttttaaaaatctcaatcaataatgaatataattcaataaactcttcaaaaattaaaataaaagatttccactgagcctttaaatattttaattwgataagaaaaggtccaatttttttagtgttgctaatacaaaaatgtaaaaaattcttaaattttacaaaggtacattggatgtacacaaataccattttggaaagaaagtaatgcaattttgttctcactcataggtgggaattgaacaatgagaacacttggatacagggtggggaagacaacacaccggggcctgttgtggggtggggggagtgggg

SEQ ID NO: 671610 - DNA, 618 bp, Homo sapiens
tggttaatggtgtttaaacttatcatctgccatgaattacagaaattataatgtaaaagtagaaaaaccttctgttgatggataaaagagtacacttgaataccagaaaagagcctggctgatcctagattggaatcctctccactctttcaaattttgcacttagatcttcaaaagtatgtcatcatgagtttctttgaaacaaaaaccacatttagaatatatctaaatgttctatttgctatcataggataatgtaaatctagtaatgtttttcttccacattcctcattagcatagaatgtttttaaaaatctcaatcaataatgaatataattcaataaactcttcaaaaattaaaataaaagatttccactgagcctttaaatattttaatttgataagaaaaggtccaatwtttttagtgttgctaatacaaaaatgtaaaaaattcttaaattttacaaaggtacattggatgtacacaaataccattttggaaagaaagtaatgcaattttgttctcactcataggtgggaattgaacaatgagaacacttggatacagggtggggaagacaacacaccggggcctgttgtggggtggggggagtgggg

SEQ ID NO: 671611 - DNA, 618 bp, Homo sapiens
tggttaatggtgtttaaacttatcatctgccatgaattacagaaattataatgtaaaagtagaaaaaccttctgttgatggataaaagagtacacttgaataccagaaaagagcctggctgatcctagattggaatcctctccactctttcaaattttgcacttagatcttcaaaagtatgtcatcatgagtttctttgaaacaaaaaccacatttagaatatatctaaatgttctatttgctatcataggataatgtaaatctagtaatgtttttcttccacattcctcattagcatagaatgtttttaaaaatctcaatcaataatgaatataattcaataaactcttcaaaaattaaaataaaagatttccactgagcctttaaatattttaatttgataagaaaaggtccaatttttttagtgttgctaatacaaaaatgtaaaaaattcttaaattttacaaagrtacattggatgtacacaaataccattttggaaagaaagtaatgcaattttgttctcactcataggtgggaattgaacaatgagaacacttggatacagggtggggaagacaacacaccggggcctgttgtggggtggggggagtgggg

SEQ ID NO: 671612 - DNA, 1777 bp, Homo sapiens
agatgctaatatcttccagaaacattctcacagaaacacccagaaataatgtctaaccactatctgggcatcctgtaacccagtcaagtcgaagcagaaaattaaccaccacacccgtcttaatcaagcaagaaaagactcttccaaagttgttatacttgttaacagataagaaaacaaaatgattttgtttctgagagcggtaagggagattaaaggaggaaaaatcaggcacaagtgtaaagaggaaggtgaagtgagtaaagtgttttacccataactctgactcccaaagcttgactgaattctccaaaatacaggaaatgctgtttgcttgtgaaattatgtatgctttccgtaaaaggtagaaagtgttgcacaggtttaygcagtcttgagaggcagagatgaacctgtcatttgcagatatgaacacagctcaaggtggttaccctggacactcaaggaggggaagttagatattagaaccagggatggatgctcactgagttagtcagtcagtccctggatcactcaggggaaaactatgttgatttttggagctctttctttgtctagttcctaccttaaatttaagatactcgcttagtcctcctgcaatagcatttctgtccctttaactcagggatttctccaagctctgtctgggttctgctgtcaatggtgtggtccggtaggtatccccaggcagaaatcaggggctattgtagatcttacgttgtttgtttctcttctcaactgcggaaaaccagtccttaggagccaattgtccaatgtttgaaaatgattgtttcatatagtttgtctagttttccagctgtttataaaggaatcggttatcccttgattagagatggaacctctcatctactgaacattttacttcaatttaaaagtttttaattttttaaattttaatttaattacaggataataatccattctcctagtataaaattcaaatgttaggtaataaatattaataaaaaaactcccttccactttaactaccagaggcaagtgatgttacaaaatccttgtgtcttctagagttatatgtatctataaaataaaacagtaaactcagccataatgagataatggggtctaaaggaattaaattgcacaaaatgtttggtcaaatttattgtgagattgataaaaattattttttactattactgtcacaaaaagcacaaaattcatgactttgaaacttattgcatgcattccttattagtgaattgagtaatccccattgattgtgaggcagtgatttctatgacccctccccatctcattacttataagtcatgtatgagtctcctttgttctataacttttctgacacttgggactggaattttaacttttcttcacactggctagtgtaaaatgtcatcctgccctgtgttgaaatagcatttccctggttaccaaaattaagcatcatatattaattaactattcatgttttcatattttgtataatgtgtgtatcatttgtgcattatttaattgggttatttgtattattctttatatattctggatattaacactttgctgtttatatgttgattatattaatattttcttctagtttgttggaagcctttttatttttctgagagcatctattgataaatataaactgtgaatattaaagttatcaaatgttcaagataacttcattcattaagtctttacaagtcttttataagaatgttattcttttttcaaacttttaagttca

SEQ ID NO: 671613 - DNA, 1777 bp, Homo sapiens
agatgctaatatcttccagaaacattctcacagaaacacccagaaataatgtctaaccactatctgggcatcctgtaacccagtcaagtcgaagcagaaaattaaccaccacacccgtcttaatcaagcaagaaaagactcttccaaagttgttatacttgttaacagataagaaaacaaaatgattttgtttctgagagcggtaagggagattaaaggaggaaaaatcaggcacaagtgtaaagaggaaggtgaagtgagtaaagtgttttacccataactctgactcccaaagcttgactgaattctccaaaatacaggaaatgctgtttgcttgtgaaattatgtatgctttccgtaaaaggtagaaagtgttgcacaggtttacgcagtcttgagaggcagagatgaacctgtcatttgcagatatgaacacagctcaaggtggttaccctggacactcaaggaggggaagttagatattagaaccagggatggatgctcactgagttagtcagtcagtccctggatcactcaggggaaaactatgttgatttttggagctctttctttgtctagttcctaccttaaatttaagatactcgcttagtcctcctgcaatagcatttctgtcyctttaactcagggatttctccaagctctgtctgggttctgctgtcaatggtgtggtccggtaggtatccccaggcagaaatcaggggctattgtagatcttacgttgtttgtttctcttctcaactgcggaaaaccagtccttaggagccaattgtccaatgtttgaaaatgattgtttcatatagtttgtctagttttccagctgtttataaaggaatcggttatcccttgattagagatggaacctctcatctactgaacattttacttcaatttaaaagtttttaattttttaaattttaatttaattacaggataataatccattctcctagtataaaattcaaatgttaggtaataaatattaataaaaaaactcccttccactttaactaccagaggcaagtgatgttacaaaatccttgtgtcttctagagttatatgtatctataaaataaaacagtaaactcagccataatgagataatggggtctaaaggaattaaattgcacaaaatgtttggtcaaatttattgtgagattgataaaaattattttttactattactgtcacaaaaagcacaaaattcatgactttgaaacttattgcatgcattccttattagtgaattgagtaatccccattgattgtgaggcagtgatttctatgacccctccccatctcattacttataagtcatgtatgagtctcctttgttctataacttttctgacacttgggactggaattttaacttttcttcacactggctagtgtaaaatgtcatcctgccctgtgttgaaatagcatttccctggttaccaaaattaagcatcatatattaattaactattcatgttttcatattttgtataatgtgtgtatcatttgtgcattatttaattgggttatttgtattattctttatatattctggatattaacactttgctgtttatatgttgattatattaatattttcttctagtttgttggaagcctttttatttttctgagagcatctattgataaatataaactgtgaatattaaagttatcaaatgttcaagataacttcattcattaagtctttacaagtcttttataagaatgttattcttttttcaaacttttaagttca

SEQ ID NO: 671614 - DNA, 1777 bp, Homo sapiens
agatgctaatatcttccagaaacattctcacagaaacacccagaaataatgtctaaccactatctgggcatcctgtaacccagtcaagtcgaagcagaaaattaaccaccacacccgtcttaatcaagcaagaaaagactcttccaaagttgttatacttgttaacagataagaaaacaaaatgattttgtttctgagagcggtaagggagattaaaggaggaaaaatcaggcacaagtgtaaagaggaaggtgaagtgagtaaagtgttttacccataactctgactcccaaagcttgactgaattctccaaaatacaggaaatgctgtttgcttgtgaaattatgtatgctttccgtaaaaggtagaaagtgttgcacaggtttacgcagtcttgagaggcagagatgaacctgtcatttgcagatatgaacacagctcaaggtggttaccctggacactcaaggaggggaagttagatattagaaccagggatggatgctcactgagttagtcagtcagtccctggatcactcaggggaaaactatgttgatttttggagctctttctttgtctagttcctaccttaaatttaagatactcgcttagtcctcctgcaatagcatttctgtccctttaactcagggatttctccaagctctgtctgggttctgctgtcaatggtgtggtcyggtaggtatccccaggcagaaatcaggggctattgtagatcttacgttgtttgtttctcttctcaactgcggaaaaccagtccttaggagccaattgtccaatgtttgaaaatgattgtttcatatagtttgtctagttttccagctgtttataaaggaatcggttatcccttgattagagatggaacctctcatctactgaacattttacttcaatttaaaagtttttaattttttaaattttaatttaattacaggataataatccattctcctagtataaaattcaaatgttaggtaataaatattaataaaaaaactcccttccactttaactaccagaggcaagtgatgttacaaaatccttgtgtcttctagagttatatgtatctataaaataaaacagtaaactcagccataatgagataatggggtctaaaggaattaaattgcacaaaatgtttggtcaaatttattgtgagattgataaaaattattttttactattactgtcacaaaaagcacaaaattcatgactttgaaacttattgcatgcattccttattagtgaattgagtaatccccattgattgtgaggcagtgatttctatgacccctccccatctcattacttataagtcatgtatgagtctcctttgttctataacttttctgacacttgggactggaattttaacttttcttcacactggctagtgtaaaatgtcatcctgccctgtgttgaaatagcatttccctggttaccaaaattaagcatcatatattaattaactattcatgttttcatattttgtataatgtgtgtatcatttgtgcattatttaattgggttatttgtattattctttatatattctggatattaacactttgctgtttatatgttgattatattaatattttcttctagtttgttggaagcctttttatttttctgagagcatctattgataaatataaactgtgaatattaaagttatcaaatgttcaagataacttcattcattaagtctttacaagtcttttataagaatgttattcttttttcaaacttttaagttca

SEQ ID NO: 671615 - DNA, 1777 bp, Homo sapiens
agatgctaatatcttccagaaacattctcacagaaacacccagaaataatgtctaaccactatctgggcatcctgtaacccagtcaagtcgaagcagaaaattaaccaccacacccgtcttaatcaagcaagaaaagactcttccaaagttgttatacttgttaacagataagaaaacaaaatgattttgtttctgagagcggtaagggagattaaaggaggaaaaatcaggcacaagtgtaaagaggaaggtgaagtgagtaaagtgttttacccataactctgactcccaaagcttgactgaattctccaaaatacaggaaatgctgtttgcttgtgaaattatgtatgctttccgtaaaaggtagaaagtgttgcacaggtttacgcagtcttgagaggcagagatgaacctgtcatttgcagatatgaacacagctcaaggtggttaccctggacactcaaggaggggaagttagatattagaaccagggatggatgctcactgagttagtcagtcagtccctggatcactcaggggaaaactatgttgatttttggagctctttctttgtctagttcctaccttaaatttaagatactcgcttagtcctcctgcaatagcatttctgtccctttaactcagggatttctccaagctctgtctgggttctgctgtcaatggtgtggtccggtaggtatccccaggcagaaatcaggggctattgtagatcttacgttgtttgtttctcttctcaactgyggaaaaccagtccttaggagccaattgtccaatgtttgaaaatgattgtttcatatagtttgtctagttttccagctgtttataaaggaatcggttatcccttgattagagatggaacctctcatctactgaacattttacttcaatttaaaagtttttaattttttaaattttaatttaattacaggataataatccattctcctagtataaaattcaaatgttaggtaataaatattaataaaaaaactcccttccactttaactaccagaggcaagtgatgttacaaaatccttgtgtcttctagagttatatgtatctataaaataaaacagtaaactcagccataatgagataatggggtctaaaggaattaaattgcacaaaatgtttggtcaaatttattgtgagattgataaaaattattttttactattactgtcacaaaaagcacaaaattcatgactttgaaacttattgcatgcattccttattagtgaattgagtaatccccattgattgtgaggcagtgatttctatgacccctccccatctcattacttataagtcatgtatgagtctcctttgttctataacttttctgacacttgggactggaattttaacttttcttcacactggctagtgtaaaatgtcatcctgccctgtgttgaaatagcatttccctggttaccaaaattaagcatcatatattaattaactattcatgttttcatattttgtataatgtgtgtatcatttgtgcattatttaattgggttatttgtattattctttatatattctggatattaacactttgctgtttatatgttgattatattaatattttcttctagtttgttggaagcctttttatttttctgagagcatctattgataaatataaactgtgaatattaaagttatcaaatgttcaagataacttcattcattaagtctttacaagtcttttataagaatgttattcttttttcaaacttttaagttca

SEQ ID NO: 671616 - DNA, 1777 bp, Homo sapiens
agatgctaatatcttccagaaacattctcacagaaacacccagaaataatgtctaaccactatctgggcatcctgtaacccagtcaagtcgaagcagaaaattaaccaccacacccgtcttaatcaagcaagaaaagactcttccaaagttgttatacttgttaacagataagaaaacaaaatgattttgtttctgagagcggtaagggagattaaaggaggaaaaatcaggcacaagtgtaaagaggaaggtgaagtgagtaaagtgttttacccataactctgactcccaaagcttgactgaattctccaaaatacaggaaatgctgtttgcttgtgaaattatgtatgctttccgtaaaaggtagaaagtgttgcacaggtttacgcagtcttgagaggcagagatgaacctgtcatttgcagatatgaacacagctcaaggtggttaccctggacactcaaggaggggaagttagatattagaaccagggatggatgctcactgagttagtcagtcagtccctggatcactcaggggaaaactatgttgatttttggagctctttctttgtctagttcctaccttaaatttaagatactcgcttagtcctcctgcaatagcatttctgtccctttaactcagggatttctccaagctctgtctgggttctgctgtcaatggtgtggtccggtaggtatccccaggcagaaatcaggggctattgtagatcttacgttgtttgtttctcttctcaactgcggaaaaccagtccttaggagccaattgtccaatgtttgaaaatgattgtttcatatagtttgtctagttttccagctgtttataaaggaatcggttatcccttgattagagatggaacctctcatctactgaacattttacttcaatttaaaagtttttaattttttaaattttaatttaattacaggataataatccattctcctagtataaaattcaaatgttaggtaataaatattaataaaaaaactcccttccactttaactaccagaggcaagtgatgttacaaaatccttgtgtcttctagagttatatgtatctataaaataaaacagtaaactcagccataatgagataatggggtctaaaggaattaaattgcacaaaatgtttggtcaaatttattgtgagattgataaaaattattttttactattactgtcacaaaaagcacaaaattcatgactttgaaacttattgcatgcattccttattagtgaattgagtaatccccattgattgtgaggcagtgatttctatgacccctccccatctcattacttataagtcatgtatgagtctcctttgttctataacttttctgacacttgggactggaattttaacttttcttcacactggctagtgtaaaatgtcatcctgccctgtgttgaaatagcatttccctggttaccaaaattaagcatcatatattaattaactattcatgttttcatattttgtataatgtgtgtatcatttgtscattatttaattgggttatttgtattattctttatatattctggatattaacactttgctgtttatatgttgattatattaatattttcttctagtttgttggaagcctttttatttttctgagagcatctattgataaatataaactgtgaatattaaagttatcaaatgttcaagataacttcattcattaagtctttacaagtcttttataagaatgttattcttttttcaaacttttaagttca

SEQ ID NO: 671617 - DNA, 614 bp, Homo sapiens
cagtcactgcatgctctcacttatatgtgtgtcaaaaagtcatcaaactcctaaaaacagagaatatattgctgtcaagggtaggsgaaatgaggagatgttggtcaaaggatgcaaagttttacttacgcaggataaattttttgtggagatctaatgtacagcatggtgactatagttaattattatgtgttttatacttaaaatttgctaggagaatagatcataaatattctcaacacacacacaaaattgacaactgtctgaggtgaagaatatgttaattagctttactgtagtattatttaactctgtaaatgtatgtcaaaacatcatgttggatatattaaatttatccaatttttatgtgtcaattatacctcaataaatctaaaacaagaaattctaacaaaaatgtcttaaagtagaaatttttcttatttaataatttaacaatttttttttacttcaaaggcaatttttgcttaatgcaaaaccttgagaatcagggataagtatggaaaaagaatagcatcataatttatcacaaacaaagcacatctaaactataaccatatttagagatacaaagataaatatagttggtcctttat

SEQ ID NO: 671618 - DNA, 614 bp, Homo sapiens
cagtcactgcatgctctcacttatatgtgtgtcaaaaagtcatcaaactcctaaaaacagagaatatattgctgtcaagggtaggggaaatgaggagatgttggtcaaaggatgcaaagttttacttacgcaggataaattttttgtggagatctaatgtacagcatggtgactatagttaattattatgtgttttatacttaaaatttgctaggagaatagatcataaatattctcaacacacacacaaaattgacaactgtctgaggtgaagaatatgttaattagctttactgtagtattatttaactctgtaaatgtatgtcaaaacatcatgttggatatattaaatttatccaatttttatgtgtcaattatacctcaataaatctaaaacaagaaattctaacaaaaatgtcttaaagtagaaatttttcttatttaataatttawcaatttttttttacttcaaaggcaatttttgcttaatgcaaaaccttgagaatcagggataagtatggaaaaagaatagcatcataatttatcacaaacaaagcacatctaaactataaccatatttagagatacaaagataaatatagttggtcctttat

SEQ ID NO: 671619 - DNA, 1484 bp, Homo sapiens
aaacttgatggatgagaagattatgttaaattatgagcaacctttccattactcatacttatcatcactcctccttaggaggagtggaaggttgttaaattatgagtaatggaaaggtctaggttacgatttcagaaataggtataatgagtagagtggtaggtcattgaaaaagcaagataagaaactggaaaaccacgttgttcatgttcttggatggttgatttatgtaggcagtaaaaacccaggatcatgactgtagctaaagtgaagaatcatatcatttccaaagatgtcagtaaagaggctgtactacacagactctaacggtcaccccaaataattttcacctcctgatacaaccttgtgtattccccttcttttcaatattggcaggacgtgtagcttgcttctgaccaagaacgtacaacataacaatatgatgtcaagtacattattgagttacgtgatcttataacatgttcttgctagcatctcacttgctggtattattgaagcaaactgctatgttttgagctgctgtatggagaagttcatgcagtgaaaactgacagtggtctctggctgacaaaaagcaaaacaatcaaacaaacaaacagaacaatgcctttgtttctacaatccacaagggactgggctctgtcaagaaccagatgagcttgaaagtagattcttcctcggtcaggacttgaggtgagaccacagccctggctgacactttattggaggcatttgggaagactcagctaaactttgcctagaattctgacccacagaaacagggagacaaaaatcttgtgttgtttcaaaccactaattttgtgataaattgttattcagcattaggtaaccaatatagagggtaagaactaagtggctaccaaatacaaaagaggtgaatctggtcatagccacatcattaacatgtcttttgatcttggaaaaatgacttaaattcttaaaaccttgactccttactactatcctagacactatgactaattaatggcaatgaaatattttaaaattaaaactggttcgtgagatatacttattttgaacaggatttatgaaacttatactaatataaggtattaagcatacatattggtcatcatcatcatcatcataattatcatgcaatgtatttctggaaactgtatggttttaatgtactcagaaataatacatgcaaaatgcttagcacattgcctggatctcctrtgataatagctattattatcagttccaaaaggaagaagtatgtcagatttgaagactattaggcaaaccacaaagtaaaattgtctgaatccttgtaagcctcacaacatcaagcatgcatactttggcaaatgctatgcccctcattaagagataatatttgtataacatctacttgccataaatcccatgtgtctcattggacgtattaccactaaaaattattaatgcaatcacaa

SEQ ID NO: 671620 - DNA, 1190 bp, Homo sapiens
gctaaggttgttgaaaaaaatgctcctttataaaagtgaaaacacaagccagtaattggtagagaatatttgcaaaacatgtaatcagaaacacatcaatataaaagcagtcttataaatcaataagaaaagacaaacaacctagtgaaaaatgtgagaaaaatatatgagcagaaatttcacaggagaaacacaaatgctcaacaaactacagaaatcaatttattttagaatgattaaaaattataaatattaattaacatacaaaagggacaataaaacaaatcattagaaagaaaagtgacaaratattgatgacctcattgagaacactttcttggctgggtgcagcgtatcatgcctgtaattccaacactttggaaagcgtaggctggaggatagcctaagcccagtagttcaagactgagtgagttatgactatgccactgcactccaatttgggggacagagaaagaccctgttcagagagagagagagagaggacagagagagaaagagagacagagagagaatggtctcaagctttttgtttgaacatcaaaatgattattgccttttgaaatactcatggactgaggcagagaaaggagggatatgccatttccaattctaccactactcacagcttaactctcttcttatcttctgtcatttgaatttttgaaatatgaaggtcatttctaacaactgtggccctattcattgaaataaatattcctaactggtttgatgtcaatgagcgaagctttctaagctttgcgttaaagacccttggcattggtgaaaggagatgtaggcttgtattactattttttccaaagccatatgaataagcagctctgcacttggagtaagcaaaagcttgtgatcatgtgttttgatgcaagtgaagaggctacaatcagaagaaaaccaaaggacaaagaaggaccaaaccaaaggacaagcaccagccttgctttttgatcattaatattactgcctttttttctcccttttaaataatgatttttcaaacaggctgtgatggtagactatattctttgaaactgtatttataccattttgtcattgacactttctattctgcctaagaaaggtaaatgttacccagaggagaattcttttaaattgaggtttttctatttgaggaagaagcctattattga

SEQ ID NO: 671621 - DNA, 644 bp, Homo sapiens
ttatacatgggaataaaccctgttatttgagacaatatgattaaacctaaaggaagttactttaagtgaaataagccaaggacagaaagataaatactgtaaaatctcatgcatatgtggaatctaaaaagttttatctcatagaagtagagagaagaaaggtggttgcaagagtctaggatggttgggggttggtggtggggtttggagagatgttggtcaaaggatacaaaattttagtaagaattagtaagttcaagcgatcttttgtacaacatggtggctatagctaataacaatatattttattattagaaatgctaagaaagtggatattaagtattctcagcactattagcaatataattggtagtatctgaggcaattcccatattaattcgctagatttagttattagtctagctaattagtatttagttatttcacaatgtgtatgtacttcaaaccatcatattatacacagaaatgcaagcagtattatctttcaaaayactttcagaaaaattaagttaaaaaataaaaaagtttttcacaatggtctttatgtctgcttttccagttgattttaattcagaatatctttttatacatgtattgagcaactgttggttttgtgaaaggtc

SEQ ID NO: 671622 - DNA, 607 bp, Homo sapiens
gaaacactgttagtagtgtttctccatgtaaacctcgtttccctcctttttcctttctgcttaattacagaaattctgtaastttttttttttttttgagacagagtctcactctgttgcctaggctgaagtgcagtggtgcgacacggctcactgcagcctcgacctccccatgctcaggtgatcctcccacctcagcctcctgagtagctgggactagaagtgtgcaccaccacgcccagctaatttttgtatttttcgtacagatggagttttgccatgttgcccaggctggtcttgaactcctgggctcaagtgatcctcttgcctcagcgtcccagtgttgggattacgggcatgagccactgcgcccagcctctgtgactttttaaattccacatctgcatacagggctctaactaccatttgtatgctgatggctcccaaatctgcagccccaattgcttccttgattctcgatttgactcaatatccaacttttatcaagacaattatctatgctggccatttatcaatgagtccccgctacctctcggatgtgttcagacccttcaaactcatttcctccttgtctgctattaatacc

SEQ ID NO: 671623 - DNA, 607 bp, Homo sapiens
gaaacactgttagtagtgtttctccatgtaaacctcgtttccctcctttttcctttctgcttaattacagaaattctgtaactttttttttttttttgagacagagtctcactctgttgcctaggctgaagtgcagtggtgcgacacggctcactgcagcctcgacctccccatgctcaggtgatcctcccacctcagcctcctgagtagctgggactagaagtgtgcaccaccacgcccagctaatttttgtatttttcgtacagatggagttttgccatgttgcccaggctggtcttgaactcctgggctcaagtgatcctcttgcctcagcgtcccagtgttgggattacrggcatgagccactgcgcccagcctctgtgactttttaaattccacatctgcatacagggctctaactaccatttgtatgctgatggctcccaaatctgcagccccaattgcttccttgattctcgatttgactcaatatccaacttttatcaagacaattatctatgctggccatttatcaatgagtccccgctacctctcggatgtgttcagacccttcaaactcatttcctccttgtctgctattaatacc

SEQ ID NO: 671624 - DNA, 586 bp, Homo sapiens
gtgtttcctgatggtggtataagcagctgctgatgtgacagcatktgaaatgctacacgggtacccctgatccctccgtgcctatagccaggccttagagaggactgttctctaagttaagtcttgccttttccccacgtatatacttatctattttaattctatgacccgcatgctccacgaatgttccttctctgtcccattagtgagaatgagtttctggttcgcctaggcagcaggagagccctcagtgctcagcaggggcctttgtgttagttagggatggagaatcttctgtgtgactctcagatgctaccacatccttagtgacaacaacatggaactcactaactcattccagagatggagtcctcaccattgatggacaaagctcttgtttgaaattcacctttcccggtgtggaacccaagccagtatcttcaataaagcattatcacttcattatgaatggccagacatcctccctgatctgcccaaggccaggatgttccagagccccctggtgatggaggctgtgacagtcataccaagcaccaactcaaacccacataagttagctgaggcc

SEQ ID NO: 671625 - DNA, 608 bp, Homo sapiens
gttaggtgctaggatgggctaggcgcagaggatggggcgtgatctctgcaggagatcaggggaggtctcacagagcaggtggggtgtgaactgacactccaagcctgggtggactttctcaggcaacaggtgaagtaagactttccagataaaagataaggcctgtgtgaagtcacaggtaggtggtgagaatgtgacacaactgggaacagaaagtggttgagtgtgatttgagcacggtgggacacaggggatgtggccttccaggtcagcagggatggaacaaggaaggccccgtagggcatgtggaggcctcggtgggtggctacagtgcctgcttcaggtctgtagaggatggagccagggcagcaggtctggaagaagggcctatgggaggtgagcaccttgggggcagagaacataaggaccccacagcccccatctctgatcytatcccttccttcctccttccctccccttctcttcacaaaggcattgcctttgttgatatcaccgaacagaaactaaagatgtaggaagtataggctctgcccacaaggagcttaacgccttttttccccttctttttttttcattatggtaaaaaa

SEQ ID NO: 671626 - DNA, 802 bp, Homo sapiens
agagacgaggtctccctgttttgcccaggatgatcttgaaatcctgtactcaagctatccttctgcctcagccccccaacgtgctgggattacaggcatgagccaccatgtctggcccagataactggttttgataccctcattttgtagatgaggaaacggaggataggagaggtgaaaactggcctgaattagcatgctgagggagggagcagatacttacgcccaggaatctgagccgsggtcccagtccctcaagaccacactagctgtgaggggggcttcagttcaatctgattaatgttgaccaatgtagcagccctgtgcaaggcactgtggaggacaagagctgaataagacaaggctgtgtcagtacagaggctggttcatagcagaaaagcagaccaggaacaagcagctcacacagggagatatctactttctcccatgccaagaaaccaaagtcaggcagctccatgcgtttttagttcaatgcttagtgatgacttccatgattcaggcgctctctgtctgtgtcggttactgggctgttatctcagttccaaactcacccttctaccctgctttgtgacacaaggactgggactccacaaaccacatttctgctttgacaaatgctccatgttaaaccctggcaatacggggagctggatccctccagctgggctggaggagggagagggacttcctgtgccttcccaagggctttactcttcctgtcagcattgctctagcaatgcttcttcacctcggcagaagcagttcctcctgatagaaggct

SEQ ID NO: 671627 - DNA, 802 bp, Homo sapiens
agagacgaggtctccctgttttgcccaggatgatcttgaaatcctgtactcaagctatccttctgcctcagccccccaacgtgctgggattacaggcatgagccaccatgtctggcccagataactggttttgataccctcattttgtagatgaggaaacggaggataggagaggtgaaaactggcctgaattagcatgctgagggagggagcagatacttacgcccaggaatctgagccgcggtcccagtccctcaagaccacactagctgtgaggggggcttcagttcaatctgattaatgttgaccaatgtagcagccctgtgcaaggcactgtggaggacaagagctgaataagacaaggctgtgtcagtacagaggctggttcatagcagaaaagcagaccaggaacaagcagctcacacagggagatatctactttctcccatgccaagaaaccaaagtcaggcagctccatgcgtttttagttcaatgyttagtgatgacttccatgattcaggcgctctctgtctgtgtcggttactgggctgttatctcagttccaaactcacccttctaccctgctttgtgacacaaggactgggactccacaaaccacatttctgctttgacaaatgctccatgttaaaccctggcaatacggggagctggatccctccagctgggctggaggagggagagggacttcctgtgccttcccaagggctttactcttcctgtcagcattgctctagcaatgcttcttcacctcggcagaagcagttcctcctgatagaaggct

SEQ ID NO: 671628 - DNA, 585 bp, Homo sapiens
tgaaaaatgagagtcatttacaggttgctacagtctagctactagtgcgctcgctaggcctgtggaatcagcatcaccaagagcttgtgagatgtagaagctcaggcatcagctgtatcagaatctgccttttcataagattctaggtgatttctaatgacgtggaagtttcagacgcactggcctgcattctgtcaccaaactgttttatattttacaatcgaccaaaggttgatgaaagtgaatgaaggcagtccaatcatattcttccttatccttttatttgtaaatacattaaactagcatcctgtctcctcaacccacrtttgaaaggggctccattcaagccccaagaaagtaaaaggcttttcaacaaacagattcaaaagaaaagtgatataattatttctacagattcagaaaaagcatttgataaatttaacagtcattcatgattttcaaaaacacctttaaaaaactaggaataacataccggggcctgtcgtggggtgggggcaggggggagggatagcattaggagatatacctaatgtaaatgatgagttaatgggtgcagcacaccaa

SEQ ID NO: 671629 - DNA, 649 bp, Homo sapiens
ccgctaagcacctttgtattaataagcaaaagaaaagaaactgtctactacagcagtcaaagtatcctttggttgctctattgcaggatatgtagagcttatgtaaagggctaccaggctaccaggctttcaaaaacctgtaactcaaattctaaagtgaggccaaagatcacctacctctacgtgtaaacctaacttaaattctaagaaaaggctaaagatcacttctacctgtaatcatttgaacctgatttctcatttgtacaaatgaaaaaggctttttaaaatattgctgttaaatgtatcatttcaaaacaaggccatgctacatctggggagccagggaagtagaggccgtgatgaagaatggaaaaaaaaaaaaaaaaaagtggctttcctgactttcttagcccctggtacttgagttgaataaataacaatagggcaattctgtagtcttkgagtacactaaacttttttaacccatgttaaaaaaaaaaaaaaagccaaaagtcaagctaaattatatttccacccttaaaattgtcacgacgtatttaaagatatcagcctttaatatcacatacaatggactacctttaattatccaaaaatgatgtgtgctattttttcatatataaaactccca

SEQ ID NO: 671630 - DNA, 614 bp, Homo sapiens
tgctatatatttatggtctctttgtggtttcctctgagtttatgagtataggacagtgtaggttttgaggagagctttgagaaatggaaagttttagaccttattaggtgatgatatcttrtattgagttgggtctgtttattgatttagccaatgttaaccaatctagagtgaaacccattgcaaagagtctcaacaattcacatcatggacttctgctgcattcacatgttgtgatctgtaggacacatttgtcctgagtgactcagtgagcacagtgagaccttgctgtcttagtctgttcaggctattatcacaaaataccataaactggtagcttaaaaacaagagaaatttatttctcacagttgtggaggctgggaagcctgagatcaaggtgacatcaggttttgtgtctggtgaggaccaactttctggttctttaacagtgctttctcgcttgtcctcatattctggaaggggtgaggatatctctggggtctctctctcttataagagcacaaatcccattcatgagggttccgcttgcatgacctaatcaccccacctcctaataccatcaccctgggggttaggatttcaacatacgaatt

SEQ ID NO: 671631 - DNA, 614 bp, Homo sapiens
tgctatatatttatggtctctttgtggtttcctctgagtttatgagtataggacagtgtaggttttgaggagagctttgagaaatggaaagttttagaccttattaggtgatgatatcttgtattgagttgggtctgtttattgatttagccaatgttaaccaatctagagtgaaacccattgcaaagagtctcaacaattcacatcatggacttctgctgcattcacatgttgtgatctgtaggacacatttgtcctgagtgactcagtgagcacagtgagaccttgctgtcttagtcygttcaggctattatcacaaaataccataaactggtagcttaaaaacaagagaaatttatttctcacagttgtggaggctgggaagcctgagatcaaggtgacatcaggttttgtgtctggtgaggaccaactttctggttctttaacagtgctttctcgcttgtcctcatattctggaaggggtgaggatatctctggggtctctctctcttataagagcacaaatcccattcatgagggttccgcttgcatgacctaatcaccccacctcctaataccatcaccctgggggttaggatttcaacatacgaatt

SEQ ID NO: 671632 - DNA, 614 bp, Homo sapiens
tgctatatatttatggtctctttgtggtttcctctgagtttatgagtataggacagtgtaggttttgaggagagctttgagaaatggaaagttttagaccttattaggtgatgatatcttgtattgagttgggtctgtttattgatttagccaatgttaaccaatctagagtgaaacccattgcaaagagtctcaacaattcacatcatggacttctgctgcattcacatgttgtgatctgtaggacacatttgtcctgagtgactcagtgagcacagtgagaccttgctgtcttagtctgttcaggctattatcacaaaataccataaactggtagcttaaaaacaagagaaatttatttctcacagttgtggaggctgggaagcctgagatcaaggtgacatcaggttttgtgtctggtgaggaccaactttctggttctttaacagtgctttctcgcttgtcctcatattctggaaggggtgaggatatctctggggtctctctctcttataagagcacaaatcccattcatgagggttcygcttgcatgacctaatcaccccacctcctaataccatcaccctgggggttaggatttcaacatacgaatt

SEQ ID NO: 671633 - DNA, 1483 bp, Homo sapiens
gaccaagccagagcctccactctcactctccttgcctcctcaaccccatactttgtttatgcaagaaaacagctggggtttctttctacttccccttacccccctaacaatacaacccagtcaggtgcaaatgaaaacttaaagtccaaaagggtaatgggcttggggagtgggaagaaacaggtggtggtggggtgaagaaaaggccttagaatgcatttgaaagaagaaggctgtcattttaattttaatataagcatatcggtagggaataaacccaatgtttttaactctgggcctaattctataattctatatcagaattaatcagacacctaatttacacttacatgacaaaattttactgccataaaacctaatatcaaaaaaaaagtattcctaaattcacttcattgagttgcaagtatacacaatttaaaagtgaaatttattttgtggaggaggaatagttcaattcctaactctgttgcccaggatggagtgcagtggcatgatctcagctcactgtaacctccgcctcccgtgttcaagcaatcctcctgcctcagcctcccgagtagctgggactacaggcacgcaacactacacctaacaccttttaatacttctgtcaaacagaatgaagtacaactttcccggcaagacatgaatttcaggcagagcatgaaatattcaagtgcaccaatgacactaccaataaataaaaccatcaaatcttaacatattcaaaaaatatccggttgtaacaactttttaaaaaaatttctacttatcttgagagccctaagttatctatgtgttcctactgaacaaatcatgaagaaactatagatgggctgataaaaagaaaataattttcacttgacattttctttttctttttttttgttttgagatggagtcttgctctgtcaccaggctggagtaccgttgcgcaatctcagctcactacaacctccaaytctgtggttcaaatgatcctcctgcctcaggctcccgagtagcttgaactacatgtgtgtgccaacacgtccagctaatttttgtatttttagtagcgacggggtttcaccatgttggccaggatagtctcgatctcctgacctcttgatccacccacctcggcctcccaaagtgctgggattacaggcatgagccgccgcgcctggcctcacttgacattttctaatgatatcaatgtgtggacaaaatgacagtattatatgacatcaagaataaactatttccttggttcactgatactcagctgctgcagaaaagtaactacagaacaaagggggaaaaaggtaaacatcattgaacccttagaaagatttgtcctaatttcaaataagctgtttgttataaagaaatcctataaaatcttccaaggtgctgataggtgtttttgtcattgttaattttgtttttttttaattaactgattagaaaaaaaagatga

SEQ ID NO: 671634 - DNA, 1043 bp, Homo sapiens
catcttctcaacacaatgactgccaatcatcatttaaacctaagctgaggggaaaagggagagtagctgatatttttggatatcattctgatttcttgattaattaaatagcacattccctatttctacaaatgatatattttttaaatttcatattttcttatcataccaagcactccttttcaaattgcctaacgtaaatatgcccacgtatgtacatacatgtatacatgaaatgaccaaacatttcaacatataaaactcccagatggttcaaaacttggtaattgatgttatgtcttaactctctccttccatttccaatttttttgttaaattcatatttaaaatatatatttagatcatttaatatgtacttagtaaactaacttatattcaatatattatacagaatttaatatatcatatattttacatgattatatataacttaatatatgttatatgattatatataatttaacatattatatattttatatgataaatagatatagatctttgaaaaaaaattaagctttcaaagataaacataactgtaatctctactggtaggagtgaacactggtacaaactttytagagaataatataaaaatttgtatcagaagacctaaaatgaccgggtgtggtggctcacgcctgtaatcccaaaagtttgggaggccaaggaaggtggatcacctgaggtcaggagttcaagaccagcctgaccaacatagtgaaacccgtctctactaaaaatacaaatattagcctggtgtggtggcacgtgcctgtaattccagttacttgggaggctgagggaggagaaccacttgaagccaggaggcagaggttactataagctgagatcacaccattgcactccagcctgggcaacaagaacaaaactccatctcaattaaaaaaaaaaaaaaaacaggcctaaaatatacacacctttggccaaaaaaaaaaaaatcccaattctgaaatttttatatatatatatgagaacacataaatatacaagaatcaaaa

SEQ ID NO: 671635 - DNA, 635 bp, Homo sapiens
tgccatgggtcggcactccgcctagctcagtcactcgtgttctctgctttactgctcagaaaaccctatgtcatcagctctgtctttcatactttagagaaaacgtttagtaaggtaaagtaatttaagtaagttcagccagtggcagaactcggagtgggtagggagtctttgaattctaaggtcacggtttttcctctacaacatgtccatttctgtcggagcatagttgaggaaaaatagtgtggaagtttcctcactaaacactcccttacgtagtttacatgtccggagtcccctgtcattcaatatcaaagtatcttcaagttatgttaattgcataaatgctcaaagattggaaagaccatatccaggtctacaagygctgggtactgagtacagaggtcagaaaagtctctgtgaaagtgggagaacattccaaatacctataattgtgtgtgtgtgtgtgtgtgtgtgtgtgtgtgtgtgtgcacagttgcataattatctacttatatagttacctaatacatgttctgtatttggttgtttgttgtttggggtactgtggtgtatttcatttagttacaggtccctgaagattaaggactttgttaactgtctctgttgtgtct

SEQ ID NO: 671636 - DNA, 666 bp, Homo sapiens
tgtaattttaagaagagggataagattttccccaaaaatggaatgaaacttctgcataaaaaccaacaatatactgaaaaataaacagttgcaattactttttttcctacttagtaatacaaagataaattgttctctttggaaatcaaatattttcctaaccactgtgtttctttaattaaactgtattctttatagtgatcaaacataattagcagtaacaagtatttaatgaaaacaaactgctactcccaaacctttactacatgttttgtttaaatcccacagatgctccaaggattactgtatctccrtcacaagtacaaaagcatacaccctccccactctgcccaccccaatttgccaggagcatttaaaacaacaataaaaacaacaaaaacttctataattccaaggactttagttcacattcaaatcctgctcctcagctcaaggcatcacttccaaagaagcttaacacttagcccttcaaatattttatagatttgttcttcagaaatcccacttgatatcttcatataataaagcattaccctggtatctttgattattagtaagtggtcaaaatagaaagaaaagtgcccatgctggactcattgacagctaggtgatacagcaagtcttctgtaattaattgtgagtgaa

SEQ ID NO: 671637 - DNA, 751 bp, Homo sapiens
tgtggttttggaattctgttgaattggcacttttgcttttacaattagtgtgttgtggacctttagcttctacctaggtaagaatttgtgcttgagatgaaaaagtcaataaatgaactgggcaaagtggtgtatcttagtgaagcaataaaaagggcaatttgggtctactggtctagctgaaggtggtcattctttagattttgagatactaaactactgaccaaattattctcttgttcagttgtaactgtgatttcacatgtacagttgcacagaccctcctgtgcacatgctaactgaggttatatgcagcagctgcaatgaaatagatgcaccaagggggagcaggaggcttgactcaagaattagaaagggacttcagtggcaaggcaaaacgataacacattctggtactttacaaaaggtacatgacctctgatgtcatgtgcttatccaccatttggggactctcttatcaagatttaaaatttcctccacaatctgagtgaccagagcaacccatgacatccatctgtaatgttagtaaatttgtagtataggtactggggcaccaacctaagccataagtcatcacctcattttgagcatacagaatacctgaatgctaaagcaggagagatctttagagttcatccagtccaactcatggggattttaaagatgacaaaattgagagccagtaagtttgggagatttgtccaaggtcaaacagctgtttaatgayaga

SEQ ID NO: 671638 - DNA, 1343 bp, Homo sapiens
cagtagatgtttaaaaaaaagttggttctttttactattacacaactagtaaatatttagtaaattattgactttttttttgttgatttcattttattgattataaatctttactcatacctctctgtaattcacaggaggtggctttagtcttactaaatcaaaaggctgtttcagtttttgtaataatgtgagctgaggttctcttctggaacttcagttttcatgattgtgtatataagttctggcatttgactggcttcatctgcttacttctcactttttgataaactgatacctagttcagattgatatctggctgcattgggacctgtttgatcttggaataagagcccaataataaatcaatatgccacggagtcttttgggtttggtctaggtgaaaaatctcttttatcatcaggattctttgatgtaagtgaccatctggtgttttgatgtgccaaatgcccagaatgggagagtctcaacaaattagcaagtccaattttggctttctggaggtgaagaagtaaatgacttttaggtaactgggaaccgcatacatatgtgaatcaagactgttgtttctttcttcttttgtatcctcaagttgcactatcagcatatatcagtcagtaaaccattggtttcagatttatttcttgtagttattttattttcctgtaccttacaactcattttgtatattatattatgactaataacccccttttagattttgccagtacttttcacatttattaacaacaatgacaaaaaaagtaataaatatacattatggactagggtgtataaggcatggagatataactgtgaaaaatatctrtgatctagtgggagatgctcatgtttatattaggaaaactacacaggaaagacttctgtctcacacttaggggtacaaaaaacactctgaagaaaataatacttaaagaataatagaaggagggtgcgtggagaaagaaagtggagggaggaggaatgagaaagtagtaaataaaaggagttggaaaatagaggaacagaaaatgttacaggcggaagaatatgttttgtaaatccttgatgtgatgggcagtgtataagctctctgtggttgagtaacaaattatgtttatacttagaggctagaaacagcaataacaacaaagacagttttcgtgcatcaagaatccaggcatgtactggctggatcctctggcttcagggtctcacagtgctacagttaagttgctgggcagggctgcagtcatctctaagctggactggtaaggaattcacattcaaggtcattaataatgttttcaccaagtttcagt

SEQ ID NO: 671639 - DNA, 636 bp, Homo sapiens
agcagtttgtgtgtgatttgtgtgtgtgtgtgaggtgttataggagtctctgttcatgctcatataggccaagtaaagactagatcaaccatatatcctcttttgatgttgctaatgtctgaataagctcattggaacactggttctctaattattgactgtttcatcaaaagagttgttatcttcaatatagaaaatgtcacaatatttttaagatattgaacgaaaacgcatttgctatcagcttatttttytgaaaaaaaaaaaaaaaaaaatagaacacagaattcctgtataccctttactcaccttttccaaatgataacattttatatgaatgtaattatcaaaactagggaattaacatttatgcagttttattttaaattttgtcaattactcatgtaatttttttttggaccaggattcaatctggaatcccaattttatttgcagatacagtgattaaatagtatcataataataattacattttttctttgagtcatgaagagaaaatttccattttaatgtatatactgatatcgtaatgtaataaaacagtatatttgttttggatgcaattttgcttttctttaagcaaataaattccagtagtatacaattgacttagcc

SEQ ID NO: 671640 - DNA, 651 bp, Homo sapiens
tatmtatatagcaactttgtattttctgacctatatcacacaagcagcccacaattagtatgcaataaagagaattttctgaagaatcacggactcatgatatctacattcggactggtttattgtgacttgaaaaaatagaaaacaagtgcctttgataagtttcctaaatagctaactaatcattttacgaggttctttcatcccttaatataaagtacaaattgcgtttaatggaagaacaatgaaacatgaaattcaaaataattacaaagtccactatgagaatgaagttaggttatcatctacggaataacttattaaatgatgttacaatatctcagagaaaaagagtacagttgcagttttccaatgcagtcagataagaaatataatgaatagaaggaatgcaggcttttatatttgtgattagaccacagaagagaaattcaaggaaagtagtggatgctgcagtacgaataaataaaacctctggagaccagattacaggcaaccatcttgttgtgaacaccaaggcacacacaagaagtgaagtaatacacctctgccatctcaggggcctgtcacccaatattaggtgacatcatgtatgttattaatccaaggcttggaaagccttttaaaatgctt

SEQ ID NO: 671641 - DNA, 411 bp, Homo sapiens
aaattacaacacagttaagcaataaaatcagaacacactgcttatcattgaagcctgattagaagagaaaatagtgcataacatatcattgataaaactttttttccatagatataattgtaaaaatgctggatgcctatttgtctatttccaaggggaaaaaaaaacaaaaattgtactattttaaagataacatatagtttataataggtaaacatttagtatgaaaataatactttgatgcaaaatataatgtaagatatatcaatattgttaatttaaagctaccaagatcctattatgtacattgctttatactaggtactttggaaaataaaaaagaaaggtagttggttcttactcttaacaaaaacrtactctatctgtcagataacttctataaattaaaca

SEQ ID NO: 671642 - DNA, 583 bp, Homo sapiens
ctgcttctaaagggataacaatcccaattttttttttttttttttgagacggagtctggctctgtcgcccaggctggagtgcagtggcatgatcccggctcactgcaagctccgcctcccgggttcaagccattctcttgcctcagcctcccccagtagctgggctacaggcgcctgccaccacgcccggctaattttttgtatttttagtagagacrgggtttcaccctgttagccaggatggtctcgatctgctgacctcgtgatccgcccccccttggcctctcaaagtgctgggattacaggcgtgagccaccgcgcctggccaacaatcacaattctaacagtgaccacatatatccatgacacactagggcgcagcaccaaaccacagtacaaaagctgagacagaatgggtatcttctttctttaagaaaaaataaaatggaaagtttaatgaaatgcaatggaatttagcaccatgatgattctatagttactatgtttatgacaataaacctaaaggactaagacgttctcacgtatcttctaaatattaaaaggcatttgaaaacaatttaat

SEQ ID NO: 671643 - DNA, 583 bp, Homo sapiens
ctgcttctaaagggataacaatcccaattttttttttttttttttgagacggagtctggctctgtcgcccaggctggagtgcagtggcatgatcccggctcactgcaagctccgcctcccgggttcaagccattctcttgcctcagcctcccccagtagctgggctacaggcgcctgccaccacgcccggctaattttttgtatttttagtagagacggggtttcaccctgttagccagkatggtctcgatctgctgacctcgtgatccgcccccccttggcctctcaaagtgctgggattacaggcgtgagccaccgcgcctggccaacaatcacaattctaacagtgaccacatatatccatgacacactagggcgcagcaccaaaccacagtacaaaagctgagacagaatgggtatcttctttctttaagaaaaaataaaatggaaagtttaatgaaatgcaatggaatttagcaccatgatgattctatagttactatgtttatgacaataaacctaaaggactaagacgttctcacgtatcttctaaatattaaaaggcatttgaaaacaatttaat

SEQ ID NO: 671644 - DNA, 1874 bp, Homo sapiens
tcttgtggttattattctttagttatattattcttactcatttcaaggattaaaaatgtaatcttatacaataaatatatggttaaaatattctgcttttatttacaacaagtgtgatgattgaggttggtgttttgagtgagattttgcttgattaaagggtctattgctttaaaaagtttggaagccacaaaagtttgaataataatcttggaaaggcttgatctacagttagtaagtgaatttagaaaatttagaagcctcatcaagtaatagttaacttcaactatttatttgaagggacttatagagctattttacagttttaccatacttacccaatctgataatgggactgctaacatcacctcttccagctcttagttagttgtgatcagttaagaccccattcattcccccctacaatgaaatataataacccttctatgtggctaagttatatatgtgaataaatacgcttctaccaccaagatccaatgatatgcatttcatcagatcatgttggctatttccatcataaactgtaattttagttaactgcaggctacagatggtccatgatattgttttctaaatagagtagataccttagtagattgtacctaagtgacaaagattcctctcttggaatttaggccaggaaaatacctaaatctaaacatcctaaagtgttttgcttcttaaggtttttttgatttctaatcttattgaagtataaagagtgccaacctcacacacttagagtacaatttaatcagtcttaacatatgtacataccacaatcaagatagtgaacatttccatcagcggcaaaaatttcctttacccttcataaatctcctctccctccactaccttccccagagaataattgatgtaccttcttttattacagattaattaacatttctagacatttatataaatgaatcatatagtatgtgctctttttgtctggcttctttcactcagctactgattttaaaattcattcatgttgtggagaacatcaataattcattcctctttattgtgtagtagcatttcactgtatgaatgtaaaatatatcttgatgtatattttggtagaatactgtagggatattttatgtaaatatcataaatctacctgctgattttataatggttacatggtattaaatagcataatgatactatttaatcatttaatgctgcaacaaacccatttgtacatgcaattttttgtgcatgtggatatttctgtaggagagatgtcaagaagtggaaaagctgcctcaaatgatatgcccaattaaaggtaggtagatattgtattatgacctcaaaaattgcaacaatgtacactgtaaccaattttatatgacatcatatttcctacatcccctctaaaactagttttatcaataattttaatatttgctagtctgataatcatattttatttaaaattctaattatgtatttactagtgaatttgtatgactttatactatacatgacacttgtacaattatttttaaaattgaatcttcatatttttatcaatttttgwcatattagattattgtcttatttttattgattattagaaactgtattttatattcttagacacatctttcacttctgttaggaatcttccttgatttacatctggtatttaaacattgtttactatgctatgtttcttgcagaaatcgaatattatactataatctaggattctgagatttatcttgatgaaaaaataaatactatcaattatgttttacttaaaacatcatttattaaaacttttataaatattgttttatttagttcattatggtaagggagaatttaagtctttc

SEQ ID NO: 671645 - DNA, 1474 bp, Homo sapiens
tatgtccacaatattatcatttggggtagagcagttcatgaaatagagaacattatctactattctaggaatcaccttctagtagcgaggaagattaacaaaaaaaaaaaataagttatgttacatgtttgacagtagtaagtactaagaaggaaaaataaaacagataaaaagcaaaagaatatcatgaatgggaagaggtagactgttagaccaagaggccagaaaaagcagcacttaagacattatgctgaacccatccacccacccactgactcatttattcattcacgtattccttcctccattgtccttccaaccaagtaaccagccgttctttcagctactcaataagtggtacagaaatgtatgtatttgatattttattcatccagttattcaaaaattaattggttcttttactcactctttgatgtattcaccaacttatttactcattcatccactttatttcttcatttcctttttctttttttctttctttctttatttttttgagacggagtcttgctctgttgccaggctggagtgcagtggtgcgatctcagctcactgcaacctccacctcccgagttcaagcaattctccgcctcagcctcccgagtagctaggactacaggtgtgtgtcatcatgaccagctaatttttgtatttttagtagagacggggtttcaccatgttggctaggatggtctcaatctcttgaccttttaatccatctgccttggcctcccaacatgctggtattacaggcttgagccaccatgcccagccttcatttcctttttcaaaaatgtattcatataccagatatttactaaactccttcattatcctttggcactaggaaaaacaaagaaggtgtgaacaaggctttcggggggggggaaatttcccaggctgtcccctgattgtaaatttgtaactgtgttttgtttaagtgcttacgctgagtgcttgctgggctcagtgcaagcactgagctcctgggacatcagataacacagccacagtgccaggggctttatcacagcctaatactactaaaaggatgctatcaggcttaaccctgtcaccttgaaccagaaatgaataatgagcacctttcacagttaatattaatccagacagtctccatatatcatttgccaaaaggcacaatgtcttctgggtccmggagctctgggacagcacacagagtccatgggcgacttcagggcgagacggtagggtgagttcacactttgaagctgagtttgcccatccaacctcaaaacacatagcaagacagacatagataaaataagagtaaagcagacatggcagtcaaaagcaagacaaacatccacagggaacagaaacccaaggcataaatgaagctaaagccacgggctgctgggatttgagcttggaaataagcagcagcagttggagtttcacatcgtaaggatca

SEQ ID NO: 671646 - DNA, 619 bp, Homo sapiens
tataggtagayagacagatagatagatcttagcgattagataaaatatataatttcatcaagaatatagaagtagaaatacataatacaaaattggcaattaatttaaaagacaattcataaagaagaaaactcaaaggctaataagtatgggaaagatatttccactaactagtcatcagggaaatgcaaattaaaacaatgtaatacctttaaagaatgtgttgctacaacattaagaagctttaatttaaaaaaaatctaataatatcaagtgttagtgagaaaataaagaaaagagaaatctcctatacactaatagatatgtaagctgttatgaccactttgaagaacaattttgcaaaatctggtaactttgagatgtgtttactcagtgacctaccattcccctttggatgtattcacacccgaattaaatactgacagaaatatgcaagaagacatgtataaggatgtttgttatagtgttgtttgtaataggaaaaataaaataagacaactatgtacgtgtccgtcacaataagaatgaacaaataaatgatatgttaaatcaaagttaagatgaataaagtgtcatctatcaacatggacgattctaa

SEQ ID NO: 671647 - DNA, 619 bp, Homo sapiens
tataggtagacagacagatagatagatcttagcgattagataaaatatataatttcatcaagaatatagaagtagaaatacataatacaaaattggcaattaatttaaaagacaattcataaagaagaaaactcaaaggctaataagtatgggaaagatatttccactaactagtcatcagggaaatgcaaattaaaacaatgtaatacctttaaagaatgtgttgctacaacattaagaagctttaatttwaaaaaaatctaataatatcaagtgttagtgagaaaataaagaaaagagaaatctcctatacactaatagatatgtaagctgttatgaccactttgaagaacaattttgcaaaatctggtaactttgagatgtgtttactcagtgacctaccattcccctttggatgtattcacacccgaattaaatactgacagaaatatgcaagaagacatgtataaggatgtttgttatagtgttgtttgtaataggaaaaataaaataagacaactatgtacgtgtccgtcacaataagaatgaacaaataaatgatatgttaaatcaaagttaagatgaataaagtgtcatctatcaacatggacgattctaa

SEQ ID NO: 671648 - DNA, 626 bp, Homo sapiens
gctcaggtctgagaaccactggcttttatattccacttcactaatgcctaatcatctctcgggcagaaaacatgcccggagctgctctggtccactgagggacagttcaaatcacagaccatgcacagctgctgagaccacgtgctatgaatgtggtcactgttctgtgaggctcccactcctgctgcatttccagaaacaccttgggccagtggagaagagcagcggggccagcccatggccacatctcactgtgtgccatgtgagcaggatccttctctttagctcctgcattgaagccacagaagaacttgcaccctgctcttgtgaaggagaggagcrgtgggaagttcctcagtatactcattgcatttcagtctatccttacctagacctctggccaagtctaggtaaataaagtgggtgatgttgtggtgttcccccctttcacttttttgagctttaaattaggagtcagtggaaggcttcaatctcaacagcagaaagcccatagctgaggactgtcattcttccttgatgactctcaatggacccacaagaaaaatggcagatggaatccatgtgccttctcagaatagtccctcaatagaaccgaggtctttctt

SEQ ID NO: 671649 - DNA, 670 bp, Homo sapiens
ctctcattgaatatagtctttcatgaattaatttcatttagttctcaaccaaatctaggaagtaggtgatcatatccccgtttgatgcatgaaaacacagaggctcagagagggaagtctgtcactcctggacacacagctacagaggtgagattcacattctcgtcttcctccaaaactcatgctttcaatgagttagttcattgatgcaaattaatttatactcgagaattttataaagggaagaatgagtatcagaacattactttgcaagggttaactatgtggtaaaaatggcagtgatttgggagttttcttcgttatgttttcttttgttttcaccaatttctgcatcaagcatgcattgcctttaacatcaggaataaaaaatgaattcatgacgaaaccttgcagcttaaacaaacaaacttattcatgaattataaacaaatgacttgatgttcagaaaaaatatggacaaatgcaaccacagagtaaaatgtggggttattgagttgtgagacctagttattttctatttcttatttctgtgccacattttgttaagcacaacttttagactaggaaataagaagaraactgaccacatttacaggcctatcttaattttatttctctgtgatgacagcaaggcaaacatttctctcta

SEQ ID NO: 671650 - DNA, 1005 bp, Homo sapiens
agttgtcagaattgtagatataatctggaaggtatcaaagtatacatggtttttaaacttagggaatgaaatcaccaaggaagaggatgtaaagagagaagatactgagaacagagatcgagaagaaaagaattaagtaaatgagactgaaaaggaatgacagtgttatggaaaaccaggtcagtgaggtgacctagagatgaagtacagaaagtatttaaagaactaggcaacagccagctgtaataaataccactcagaacttgagtacaataaaaactaagrattgagcggtggaggtgaacaaatgatcttgtcaagaacagtttcagaagaatactggggataaattgctttttattagctgaaaaattagaatatggggaaagttgataacactgaaaagtagaaatttaagcaacttagtttttaatataatctttaaatatgtaggagattatgtaattcccttatatagttcttgattattttctgtgaaccaagaatgatttatctttattatgagttggactttcaagttaatatgaaaatcgaatatttatggcttctcatgctgctgtgtcaatagagatatcatactcttgactttgtacctctgctttaatgacaaatttgttatttttaaaatgaggtgtcaaaagagtagggtagtttttgtaatctccaatatagaaaataagtgattaacaggatttcaacagtgctcttataaagtttacagttttacagttacatgtgaaatccattattttacactgtctgagtatttataattgccatgaaaccatatagaatatatgtatatgcgtaaaaataaaaattcttttgactcctacaggttattctgaagagcatctgagtggattgtgtctctctctaattttactttgcttctatattgaacacttctgttgcctggaggttttcctaacactgtggtgatatttggcagattttaagttgtcttgtatagtagaaacaatg

SEQ ID NO: 671651 - DNA, 679 bp, Homo sapiens
aaaatttacttatttatgtattgcccattgtctctcactaaaatgtataccctattaaaacaaattttaattctttattcactgctatatcttagatcctaaaaagaggtctagatcataataggtactttatacatacttatataaactaaagattacaggggttaatgttaatcaccctgagaaaacaagctatttttaaaagccttattatgtttattgcaagcatgtgaaataaagattccatctatagatgacatatttcttcattataatatatccatcaaaaccagttttgggaattaaacagtttgatttatgatctaatttaaactgataaaaccacatttttaaagtaatataagattcaattatttcactaaagtatatccttcgtttacattgtgctgattagtactgatgccagagtgcttgtcaaaatgtgacttataattaaatttccttttgcctaaaataatcattagaaatatgtaatatatgacatcaatgataaacttcacttttttatgccttttctttatataagttgcattgcaacatggaaacataagcgactatgaggcrtcaacttgcaaataatctattccagaattttaaatttgatatttctattcagtgagcttaatacttctggtcatgtatgtgtattaaataataa

SEQ ID NO: 671652 - DNA, 676 bp, Homo sapiens
tttttataactatgaaaagaacacaacacatgatgcaaagagcatatttgtaaatctgttttaaattttaaatgtttttctttatttttcccaccatggcatataaagtactttttgtttattagataactcaataaatatgtgttaatttgaatttttatttagagcacctaagagccactatgtcaatataattataaattcaatgctatatagattaaaaataartaagtttttaaaagtaaaattgtacttcgtttgaggtagtacaatgttgcatgaaagtagtcatttatcttatcttatttctcctggaaatttttttttatcattcagatccctagccatatcaaataatataatacattatttttgagattcatcttcttaagtacataaaaaataagaatatggttttattgctagttggtcaatagaagacaaagaaactaatgctattttgtgtgcgtatgtgtgagcgtgtgagtttgtatattaacatacaggaatagaaattgtggtatactgacagatgaaagtaggtgaaaatgtccaggtatacaactttgcaatggccaacgaggcttactcttacgtacattagttaatttcacttttttcctttgtcttccagctctccaaaccttacattaagaacatgtggtatagtgatgct

SEQ ID NO: 671653 - DNA, 638 bp, Homo sapiens
atttggatttccattaaatgcagccaaatgtcatatctaataaacacaggggatcacgcattcttcaaagtttgtgttaatggtcagtctcatagcccaccactagcaacagcagtgtccttaaacttgggtataaatgggaatcagacagggcttgggggccctgtacacagtgactaggacccaccttcagagcttttgattcagtaggactggggcaggacctgggaatttgctttcatattctagcaagctcccaggggatgctgatgtagctggtgcagggaccacactttgaaaaagactgccctacagcacggggctcaaacaactactgacccaaagtgcattttcagccctttccctgattcccctgactcatttccccaagacactattctccagccacaccaggctggaggatgccccaaataccyaacgtgcccacacctccaaggctttgcccaggtcagtccctcaccttgcaatgctcattcttcctgtttttctgcaacccaaaccccatttgtcctttaaaactcaggcttctttttcatgacattttctccaatgcctccggagaatgaaactttcttcctgctgagtctccctgagctttgctttttatctgttcaagc

SEQ ID NO: 671654 - DNA, 1489 bp, Homo sapiens
tatgtaataacttgggccttttaattttcctgtcaggattaaaaagtagtactcccttatttctcaatgcaagaaccctggactcaattgatgtgcaattatttagagtaagcaaagactctaaatcagatgcttttgttatctcgtttgccttagtaaattataggaagtggttccactatcattgccattttttccccatatcagctgtgtgttgaggtcctgcttcttggcatacctaagccatttcttcccatatatgatacagtttatttttaatgcctaaagattccttatcatacttacccttattttactccagctggtttgtgcaatattgttattttaaatggtcaattaaaaattaacccaccctgggtattatgtgtgttcgatgcattttcttatcattcattgttcagcaatatatttactgtgattttaagatccgagagccagaagggagcaccaagtcagagtaaagccttcttagccactacatttcttcttagtgctctctctgtctctgcctctatctctgtctctcttacttttgcatataagttgcttgtaggatagacttaaatgtttatgttaaacactataggaaaggcataaatacgagctactacacatacatgttttaacctaatgtgagaaacacatgctaaagttttccggaggacacatggtttactgtcctatgtcccagatttctttataagcagaaactagcttattactataaaatatggcaatatgaaaaaattggcttatccctgactcctctatttttttcatgctcttcaaaacatgtcttctaagatccttgtaatctctgactgcgttttctactctattttgtttattccattaacttcctcacattgaccttccttactgttcccttaacacgctggctatgatcctgcctcggggctttggaactagcttttctctttccatactccagatgtatgcatgacatgacctctctctcaccttcaactcttttccaaatgtcaccttatcattgagatgtaccttaggttccctatttaaaattgtaactgactcccatcttgttctctccatacttcttaccttgctataattctatatcatttactaatttatttgtttgtctttgtcctcactagagtgtaagcttcaagagattaagaattttgtcttttttccactgatgtatcaccaaatcttagaagagtcatgacataaagtaggccctttacatatttgttcaatgaataaatgtrtgactcatggcagaaatgatgttattactttaactggaaaattatttaatgtattgatatatccagagcttctaaatggcaggttagatatagccagctcattagaagatggggatagtattggaggacttttaaaaaatatgcatttgcataaaaatatactatattgtatttatacatggtatattttactataaatataccataaaata

SEQ ID NO: 671655 - DNA, 1877 bp, Homo sapiens
ttctctgagatactggttccttatatttcaactcagagaatacctaccttgtaatattataattagaaataatgcatataaaggaccttgtgtagtgataaaaacaaagtagatgcctaacacatggtctgttctattaaaatatagtgtttataaagaacagtaacttcaaatcataagggattcatattgtgcagtgaattaaatataagttacctaaggtaaaggcgaaccagagtagatttaaaaaaacagtttatgttttaatttgcagggagggaatagaaaaaaaggcacaaggaataggaataaacaaaagtatatagaaggaaggaagaaaggaaggaaggaagggagtaaggaaggaaagaaggaaggatggaaggaaggaagggagcaaaggaagggagggagaaagaaagagaggagaggtttgggttggggcaggaagactctctatttaccaagagtaatagtgtgcaatgaactgaagaatatgactaatgcaatcctcagctcctgagttccagcaacataaacaacaacaacaaagggccctatatgtactagataaaaargagtaaatatttatttttgtgactttaggatggtaaaggatgttccaaatgtgataccaaagaccaaaaacaaaagaaaaggggcgcgaactttactgctgagaatacaaaataaaaaaggtaaacccaagcaaacaaaacacaaaataaagacaaacatccatttgaggagataataatcacaaattatataagaaaatgtttatatattcatagaaatagattttcacaaattaataagaagaaatgactcctcaccccactttccacgcctggccaacagaaaacgtgcataggccctattacaaggtattcataaagaatacatgtacatttatagtaagtatgttaattgttgtcccatctcatcagagattacaaaaatgcaaatgaaaacaacaatgaaatactatattcggataacatttgaagaagacatgaaaagattgttaatatccattgtcagaaagtttttatggaaaattgatactcaaacactttgtggagataccaattagggtaagctgtctgcaggaaaactgggaagtaagcattgaaaacctttataaaagtgcattctctttgtcttctagaatgtttgcccagatacatttggagaactgcagaaagatattcaccactcagtatacacacacacacacacacacacacacacacacacacacacacacacaaaacacctacctatctacataaatatgaaacaactgataaccattaataacatgtagataaatgataccagatctaaatcatgaaataagagttataaaatgtgacaaatctatattatacagacactggtctactttataatgttaaaaaataaggaacaaaacagtatacataatatgatctcattttgcaatataatttgtaaaataatgacacatatatatgtagcctacaagaatagtcttaaaatattgctttcaaaatctttggtatatgaaacaatattttatgaaaataaaggtattctgtatgaaagtacagagggaaaaagaagcctaccatactactgagagtttgtgcataattttatagaccaaaatgtttcaaataaacataaggaaaaaatagctatctataagtttactatctagaatgagccgtggttgttaatccatttgattttcttaatctttaaaaagttacattaatagaaagtatatatactcttactgaatatttaatgaagcatacattattaaagcccactgtaagacgaaatttttgttctctatcttttgatagaggctactaattcttgtctca

SEQ ID NO: 671656 - DNA, 1463 bp, Homo sapiens
  misc_feature 585, 586, 587, 588, 589, 590, 591, 592, 593, 594, 595, 596,597, 598, 599, 600, 601, 602, 603, 604, 605, 606, 607, 608,609, 610, 611, 612, 613, 614, 615, 616, 617, 618, 619, 620,621, 622, 623, 624, 625, 626, 627, 628, 629, 630, 631: n = A,T,C or G
  misc_feature 632, 633, 634, 635, 636, 637, 638, 639, 640, 641, 642, 643,644, 645, 646, 647, 648, 649, 650, 651, 652, 653, 654, 655,656, 657, 658, 659, 660, 661, 662, 663, 664, 665, 666, 667,668, 669, 670, 671, 672, 673, 674, 675, 676, 677, 678: n = A,T,C or G
  misc_feature 679, 680, 681, 682, 683, 684: n = A,T,C or G
atgatatactgaaatatccccaaaggaaaaccttgattctgatcttctggataacaagttcttgaagtgtctggaattgaagagttctacagaaaaggaataggtgaaggaatgaatgagagaatgggaagatgacagttaatagcatctgatgattatttttcacataactgcaagatcatcttgtggaaaatagattacatatactcctttaggttctagaggtctgaattcaggctaatatgtagacatagagaggaaagataaagattttctaataactacctctgtctaaaaatgtaattcagtgcctcagaaggaagtacttgcctgttgttggaagacaaaagtaagatatcaagtggaaaaagggttaacagctcaagtagaatctcctcagtgatgaggtcactgaagtcctggggttggtcctcactgttgggaatagaaactctttagtgttgatgcccctaawcaaatcaaccaggcttttaaagattgactcttgctaaacaaatttaccaacccttcaatatataattatatatacatataattttagaggaaagagtataaaggcttggnnnnnnnnnnnnnnnnnnnnnnnnnnnnnnnnnnnnnnnnnnnnnnnnnnnnnnnnnnnnnnnnnnnnnnnnnnnnnnnnnnnnnnnnnnnnnnnnnnnnaccactttcaggcgatttcttggaaacaacccaggcctgattctcttcaagacaatatatgagtgtgtgtgtgtatgtgtgcgtgtgtatgcgtgcatacatacatgtgtgtacatacatgtgcttctttgtcacttaaaatttgtagaaaggtgtttaaaatcaatcaataatatgccatttatctgaacgctacttcctgttcatttgatgcccataggaatttagttaaaaagataactattggctgggcgcggtggctcacacctgtaatcccagcacttcgggagaccaaggtgggcagatcatgaggtcaggagatcgagaccatcccagccaacacagtgaggagcaatcatatctctctcacctctgatggaatagaaaaagacgtatatctatatatatatatatatatatatatatatatagccaggcgtggtgcacacgcctgtaatcccagctaatcaggaggctgaggcaggagaatcacttgaacccgggaggcgaaggttgcagtgagccgagatcaccccattgcactccacccgggacggcagagcaagacttcgccttaaaaacaaaaaaacaaacaaacaaacaaacaaactatttggtctgaagtgtagtgagataatatgtctgatagtttttatgtcataaaatgaacgtaggataaaatgtaaagaccatacatacatagcactgaagttttgttgttcttttttttttgcttgttaaaatgtgtgttagtatgacactttaaagaatatacacaa

SEQ ID NO: 671657 - DNA, 1463 bp, Homo sapiens
  misc_feature 585, 586, 587, 588, 589, 590, 591, 592, 593, 594, 595, 596,597, 598, 599, 600, 601, 602, 603, 604, 605, 606, 607, 608,609, 610, 611, 612, 613, 614, 615, 616, 617, 618, 619, 620,621, 622, 623, 624, 625, 626, 627, 628, 629, 630, 631: n = A,T,C or G
  misc_feature 632, 633, 634, 635, 636, 637, 638, 639, 640, 641, 642, 643,644, 645, 646, 647, 648, 649, 650, 651, 652, 653, 654, 655,656, 657, 658, 659, 660, 661, 662, 663, 664, 665, 666, 667,668, 669, 670, 671, 672, 673, 674, 675, 676, 677, 678: n = A,T,C or G
  misc_feature 679, 680, 681, 682, 683, 684: n = A,T,C or G
atgatatactgaaatatccccaaaggaaaaccttgattctgatcttctggataacaagttcttgaagtgtctggaattgaagagttctacagaaaaggaataggtgaaggaatgaatgagagaatgggaagatgacagttaatagcatctgatgattatttttcacataactgcaagatcatcttgtggaaaatagattacatatactcctttaggttctagaggtctgaattcaggctaatatgtagacatagagaggaaagataaagattttctaataactacctctgtctaaaaatgtaattcagtgcctcagaaggaagtacttgcctgttgttggaagacaaaagtaagatatcaagtggaaaaagggttaacagctcaagtagaatctcctcagtgatgaggtcactgaagtcctggggttggtcctcactgttgggaatagaaactctttagtgttgatgcccctaaacaaatcaaccaggcttttaaagattgactcttgctaaacaaatytaccaacccttcaatatataattatatatacatataattttagaggaaagagtataaaggcttggnnnnnnnnnnnnnnnnnnnnnnnnnnnnnnnnnnnnnnnnnnnnnnnnnnnnnnnnnnnnnnnnnnnnnnnnnnnnnnnnnnnnnnnnnnnnnnnnnnnnaccactttcaggcgatttcttggaaacaacccaggcctgattctcttcaagacaatatatgagtgtgtgtgtgtatgtgtgcgtgtgtatgcgtgcatacatacatgtgtgtacatacatgtgcttctttgtcacttaaaatttgtagaaaggtgtttaaaatcaatcaataatatgccatttatctgaacgctacttcctgttcatttgatgcccataggaatttagttaaaaagataactattggctgggcgcggtggctcacacctgtaatcccagcacttcgggagaccaaggtgggcagatcatgaggtcaggagatcgagaccatcccagccaacacagtgaggagcaatcatatctctctcacctctgatggaatagaaaaagacgtatatctatatatatatatatatatatatatatatatagccaggcgtggtgcacacgcctgtaatcccagctaatcaggaggctgaggcaggagaatcacttgaacccgggaggcgaaggttgcagtgagccgagatcaccccattgcactccacccgggacggcagagcaagacttcgccttaaaaacaaaaaaacaaacaaacaaacaaacaaactatttggtctgaagtgtagtgagataatatgtctgatagtttttatgtcataaaatgaacgtaggataaaatgtaaagaccatacatacatagcactgaagttttgttgttcttttttttttgcttgttaaaatgtgtgttagtatgacactttaaagaatatacacaa

SEQ ID NO: 671658 - DNA, 669 bp, Homo sapiens
tttatctagataacctgtctaatgggcttggagtatccagataggtgttgtctagttactgaggagtagggaattttttcttttagaaaataacttcttagtagttgctattcagtgaaactaaggactgtgtttaacattcaataacaaacatttattaaaaatgacatactgactaaccaaatgaatgaataaattaagtccataccacartgagttaatgctaaagaaaatattcttgaaatattccgcaggctcgacatcttattgaagagcagaatgttatctctgtcattactgaaactctgctagaagttttacctgagtacttggacaggaacaataaattcaacttccagggttatagccaggacaaattgggaagagtatatgcagtaatatgtgacctaaagtaagttgttcaagtcaaaaggtgagggcacctgttaaactcagtgtgcttatttgctgtgtcttataagtaatcctgtgatcattttggttatccagaattctctttataatgatggcaagtacaaagaactgttactgcctcgcgttaataaatgtcttcagtgaaggcttcttattgagttgtaaaacctggttagtaaagaaggtattgaggagaggcccattacaggaacttgggatctcctggggtcacca

SEQ ID NO: 671659 - DNA, 1208 bp, Homo sapiens
atctctaaaaaaataaaataaagttcagtaaattattatattttatcttcagtataagtggagatggtaggtaaattcagtagtgaatcaatatatagccattgtaattgaaatttgtttctcagccaaattatgcaaaacttacatgttgtacaaaacaaaaactcctaatggcagtacttaaagttattgttaggtcagtgaatatagaaaaaaatctctctaccatggctatcattactgtgaagtattataactgagttatttttatatccagttaagtggtgcataatcacttgttttatcatattttatgagtctctgactatagctaatctctacggtgaataatttagagccagcacatccctaaatacctacccttatagtagaactttaaggtgtctagtttggaaggcaactttaaatcttctgatgcttacaattcctcccctctatcccaacctaaatatagatatctccagtgaccaggggaagggaaaattaacacctgttctgcaggtactgtgtaattcactctcatgagaatcctgtgagatttattagtaactgctatgtgccaaggagctttgcttatcttacctgattatattcttgcactattcttagaaggtacttgatataatcttactttgtagattgtaaatatttgcctcaagtcacaaacctagtaagtggcagaactgagatttgattataaacaccgtttatctgtaaaactcatgttcctttcactatgtcatgtagcctcacaggatacataaacaacaacacaaaatctactctgaaacctggcctaacacaccaatcacaaaaactctttatttagcaaataattcgtgttaattgctttctcagtctctcattgtagaaattctgtagtcacatcttactctttccctacatrtttatttactaatttcccctgaaaccttgtttttaaattagttagcaataaccacacttaatgtattttctttcccagataaagtctaaattctgtcagaatttgtaggtcttcatagtttagctttgtgtttatctgactgtacctcagcatgaaataagtttgttggtactagtaggtactctgttcagcctgccttaggaaattttcattctctcaaagcagcacattccaactttggatagcttcttccaactattagaaagtttcctattgtata

SEQ ID NO: 671660 - DNA, 925 bp, Homo sapiens
ccctagatccttattttccaagcctcccaccaatattaggttcttatggtaaatctcctttttgtcttacatagccagagtcggattctgttgaaaagaaaaaagcaaaaatcctgaataataaaagtgttctcaaaactattattctgtgttcaataaaaacactgtctaattcataatactgctgcgtagcttcatacgttcattcacacattcatcttcacaatttgattctttcatttattatcactatgatttggtataaagtacacagattttgctatcaggccaacctgggttcaaatttcgacttcaacatttggtatgtaatcttgagtaatatgtgatataaacaaaaaatccagttcaaaactaagtgcatagaagaaagatcaattaattcaatatcagaaaatgcattattattaggtttgcctctaagcaactttgtaatcttgggtaaataaaaagctccaatcttattgacctaatctaaaaagaaaacgttgttcaggattatttttaaggccctttctagttctaagattctataattcacacaaaattccatttcacatttcaaaactgtgattgtatttttcaatctcgccctgtgtgtctatgtgtgtttgcaggcactaggtattatataaaattagcccattcctttttaaacaaaatatttactaatttttgttatatattgataaattgtgattgtatatattaatggcgtagaaaatgttgttatgatttttaatataatgtggaattattaaattaagctaatgaagatatccatcacttcaaatatttaacagtttttgtgataagaacatttgaagtttactctctgtggtattgaactgcacagtactcrattattagctctattttatgccagtctgttggtcctagaaaagtg

SEQ ID NO: 671661 - DNA, 526 bp, Homo sapiens
cttatctttaatttatacttttttctacaacagccaagtctctggacatgttcttgaacactggacatctgaatttcagtagacactggatgcagacatctaagctgtagccttgggcatacggtatgcacttgaaagaatgtttatgaaraaaagcagacagaaaaaatatgttattaaaaatccatgcacgcacatgaataaaacaagttctgctgggcatggcagctcacgcctgtaatctcagcactttgggaggctgaggcaggtggatcacgaggtcaggagttcaagaccagcctgaccaacatggtgaaacctggtctctactgaaaatacaaaaattagccaggcatggtggcacactcctgtaatcccagctactcaggaggctgaagcagcaggagaatctcttgaacctgggaggcggaggttgcagtgagccgagatcgtgccactacactctagcctgggcaacagagcaagactctgtcatacacacacacacacacaaagttcttagaga

SEQ ID NO: 671662 - DNA, 1062 bp, Homo sapiens
tgaaaagtcatcaataactctgtcatctcaaaggttgttttcacatcaatgctttcctkgcctcttttaaaattttcgttataatctttcatttgtcctgtctccacatcttgatcttaattaccatttttctttccaaataaattagttaagaatttaaaaatgaggtaacaatatacatactgcactgaaatttaatatttaatttagtatgtcataaacatttctcctgaagatcttaaaggtttttctttaccatcatcatacataaatgcatgatatttctttgtatggatgtactataatcagtactataatagtttgccattcaggacgtatcctttttctacccattataagtcactctacgaggaatgttttatatacaaaatctggccccagttggtctctctgtgtattgctctgtttggtttttttctgggtgctgctctgatgagtcctctgtgaatgatgcatttgccatgtggagcatttgcgctgctcaggagcgctgtcagtattggcagttctgcctttcccatacatatcaagagttgcatatccctggtttgaaaaggggccaaaatgtaaccagctcatatacccacagggcagccctcctgtcccagagtctgtagcttttaattccctcaatcagtcaactctgccctggtatggctctccagaaaaagcaaattacacatgaatgctgcatgaactgatgctggcagttttacagatagggatgagcttcttggcagataacctgcctggaatggagagaatggcaagggaaaggctgttttcacatcaatgctttcctggcctcttccctggaggaatcaagcccactcagagcatgtatggtgcatagccttgctccaaatcttaatagaaaagttatctacttatttacaataaaacatgtgtcttctgttgttttcattaaagcatagcgtctgaaaaagtttaaccttttctttaacttgctagcagatttaaagacaccttaaaaaaatcctggcattattttttatattcaagaagttacagaggctaatg

SEQ ID NO: 671663 - DNA, 1062 bp, Homo sapiens
tgaaaagtcatcaataactctgtcatctcaaaggttgttttcacatcaatgctttcctggcctcttttaaaattttcgttataatctttcatttgtcctgtctccacatcttgatcttaattaccatttttctttccaaataaattagttaagaatttaaaaatgaggtaacaatatacatactgcaytgaaatttaatatttaatttagtatgtcataaacatttctcctgaagatcttaaaggtttttctttaccatcatcatacataaatgcatgatatttctttgtatggatgtactataatcagtactataatagtttgccattcaggacgtatcctttttctacccattataagtcactctacgaggaatgttttatatacaaaatctggccccagttggtctctctgtgtattgctctgtttggtttttttctgggtgctgctctgatgagtcctctgtgaatgatgcatttgccatgtggagcatttgcgctgctcaggagcgctgtcagtattggcagttctgcctttcccatacatatcaagagttgcatatccctggtttgaaaaggggccaaaatgtaaccagctcatatacccacagggcagccctcctgtcccagagtctgtagcttttaattccctcaatcagtcaactctgccctggtatggctctccagaaaaagcaaattacacatgaatgctgcatgaactgatgctggcagttttacagatagggatgagcttcttggcagataacctgcctggaatggagagaatggcaagggaaaggctgttttcacatcaatgctttcctggcctcttccctggaggaatcaagcccactcagagcatgtatggtgcatagccttgctccaaatcttaatagaaaagttatctacttatttacaataaaacatgtgtcttctgttgttttcattaaagcatagcgtctgaaaaagtttaaccttttctttaacttgctagcagatttaaagacaccttaaaaaaatcctggcattattttttatattcaagaagttacagaggctaatg

SEQ ID NO: 671664 - DNA, 585 bp, Homo sapiens
tcctttaaaatgaggaacaagatgacagcgtctgttctccccacttctattcaactttgtggttctagccagggacacaggaaattttggggagtgacagatagttcattatcttgattgtaattattttcttcatgaatgcatatayacatcaaaacttatcagatcatagccttcaatgtgtgtagtttattttatgccagtgatacattaataaagctttttaaaaaatgccatttaagtgcagtccctccacctgatagtaagcaaagcctaatcaagttcttttttttttttttaacttttattttaggttcgggggtacatgtgaaggtttgttacttaggtaaacaggtgtcatgggggtttgttgtacagattatttcatcacccaggtactaagctcagttcccaatagttatattttctgctcctctccctcctcccatcctgcctgctcaagtaagccctagtgtctattgtttccttcttcaggttcataagttcttatcatttagctcccacttataagtgagaatgtgtggtatttggttttctgttcctgaatcagtttgctaagtatca

SEQ ID NO: 671665 - DNA, 658 bp, Homo sapiens
tggctgtcatcttttaaagatagttgaacttggtttaggcaggttataaagtttcttgcagattagtttgattatgttgaggcttaatttgaaggattttaaaaggcagccraaattaacctttattctaggcctagtttatgtttagtacagaggtatcatgcttctggggttcttactgaattccccagatattaaacaagatttctttactctggctgtttagaaggagtcacagccctgtgtgagctctgggaattgttcaccttacagctttatggtaatcgttctttctatgacagttattctctgcctcattctattactttaccttgaaaattacgtgtgtttcagtctcccaaagcccgatttctgtcgacttgtttcagagtccggtgttttgtttgggctccccctcttcctccataatgatccagaaaattcctgcaggcagaaagttgggacagttgtaggacttattttatttgttctcttatatcaaggatcacacttctgggctgcctcctgttcaacatgagaaaagagttgtttacatagattgtgcagttttctagttataagccagaggaaaacaagtttagtgctatagtactatacactccattatgggtgttagcaaagtttatagtggaagttt

SEQ ID NO: 671666 - DNA, 658 bp, Homo sapiens
tggctgtcatcttttaaagatagttgaacttggtttaggcaggttataaagtttcttgcagattagtttgattatgttgaggcttaatttgaaggattttaaaaggcagccgaaattaacctttattctaggcctagtttatgtttagtacagaggtatcatgcttctggggttcttactgaattccccagatattaaacaagatttctttactctggctgtttagaaggagtcacagccctgtgtgagctctgggaattgttcaccttacagctttatggtaatcgttctttctatgacagttattctctgcctcattctattactttaccttgaaaattacgtgtgyttcagtctcccaaagcccgatttctgtcgacttgtttcagagtccggtgttttgtttgggctccccctcttcctccataatgatccagaaaattcctgcaggcagaaagttgggacagttgtaggacttattttatttgttctcttatatcaaggatcacacttctgggctgcctcctgttcaacatgagaaaagagttgtttacatagattgtgcagttttctagttataagccagaggaaaacaagtttagtgctatagtactatacactccattatgggtgttagcaaagtttatagtggaagttt

SEQ ID NO: 671667 - DNA, 637 bp, Homo sapiens
tgatctggggtagcgtttaactagcaggagcttttcacactgtcgggccacagaaacatagaaagtcagaaggtcctagagttctcgtaatccagtcccataatatttacagatgtgtttactttggcatatgcaaaagaacacagggttcatagtcagtcaatctggggtcaaatactgactttgctgctttcagctttatgagctgtggtatgttgcttagcgttgttttccctgattatagataggaatattgatatctaactcatagaattattttgaagatcaaacatggtaatatgtaatcasttagcacatttgtggcacacaggaagggggctcttaaatgtgagcccctattgtcattattcttgtaataccgtggtacttcattgcacaattctaaatttataatcatgtgagcactgcttggtgtgggtgcatattgaccatactgctactgttcagctactctcaggcaggcctagagcttagtagaggtgttgaaaagtaaatttagccacaacccctaaagataatactttttaaaaattttggtgcttaaaacactattttaagggtgatacctagcaattctacaacgatttttctatctgaatatacatttttccagtga

SEQ ID NO: 671668 - DNA, 698 bp, Homo sapiens
tttgttctctttggatccccagtagattggatgatgcctgcccacactgagggcagatcttcctgcttagtccactcaaactcacatgtaaatcttctcgggaaaacaccctcacagacagaccccaraagaagtctgtaccaggtttctagacattccttgatccagccaagttgacacctatcattaactgtcaaaatatgtaagtgttcatcctatagagggagagtcaatacatgtggatcttccatagaagaagcatatctcaagtattaaaatagcaaatatagcagagctgagagttcattcactgtgctgaggaagcaggtttgttcagcatgagactcaaatgaaatggctggagcattatgatacattttctgttctctccaagtatagcaggctatgtaagacactcttgtcccctgctcacatctgcatggatcaccttttctttaatttttgccacagccaccagttttgcacaagtgttatgtggtggcacttcacttcagctgcattgtatgccttttacctctggcccttgtgcaacttgggcttatgagggagctaatgcccggtgaggcaaaatttattaaatggagaaggggagcccaagagctaatcctcccttcctgcagtgaagttgagcagacaattctgaggtgcatttttaagagcatctcagaagtgcccag

SEQ ID NO: 671669 - DNA, 632 bp, Homo sapiens
tttactactgctgtatctcatgggagtaaattaggctaacaaaaaaaaatgtgtgggttgattaattacttgtgtttactggcaggacattcctaagatactctaccatgtactccctcagtttatattatgttggagatgtctaatatggttttaaaatccattattcagaaatagagtgagaaagtctacatcttttatgtgccaagccatgaaagaaagtggtcattgaaaaaataaaacatcctttgtcttaggtaagtttcacataaaattctgcatgctggaattcggaattgctttgggaaccagccaggcaacaaccaaagyggggacaggacaaaataaagaaggacatgaacgtactatgtacatttaatatgtcttgagttttaactaaagtaattctgaatgcatatccactggttcatttccaaacaattttgaaaagattatttatacttcatggataatgaacactaggttacagatattatttatattgcgtatcagagagtagtatattggtaccagaaactcaaatatgattgtcaacctaattgaactgaaatatttctgccattattatcagaaagaaatttgctatttaatgattctggacaaattgagca

SEQ ID NO: 671670 - DNA, 632 bp, Homo sapiens
tttactactgctgtatctcatgggagtaaattaggctaacaaaaaaaaatgtgtgggttgattaattacttgtgtttactggcaggacattcctaagatactctaccatgtactccctcagtttatattatgttggagatgtctaatatggttttaaaatccattattcagaaatagagtgagaaagtctacatcttttatgtgccaagccatgaaagaaagtggtcattgaaaaaataaaacatcctttgtcttaggtaagtttcacataaaattctgcatgctggaattcggaattgctttgggaaccagccaggcaacaaccaaagtggggacaggacaaaataaagaaggacatgaacktactatgtacatttaatatgtcttgagttttaactaaagtaattctgaatgcatatccactggttcatttccaaacaattttgaaaagattatttatacttcatggataatgaacactaggttacagatattatttatattgcgtatcagagagtagtatattggtaccagaaactcaaatatgattgtcaacctaattgaactgaaatatttctgccattattatcagaaagaaatttgctatttaatgattctggacaaattgagca

SEQ ID NO: 671671 - DNA, 632 bp, Homo sapiens
tttactactgctgtatctcatgggagtaaattaggctaacaaaaaaaaatgtgtgggttgattaattacttgtgtttactggcaggacattcctaagatactctaccatgtactccctcagtttatattatgttggagatgtctaatatggttttaaaatccattattcagaaatagagtgagaaagtctacatcttttatgtgccaagccatgaaagaaagtggtcattgaaaaaataaaacatcctttgtcttaggtaagtttcacataaaattctgcatgctggaattcggaattgctttgggaaccagccaggcaacaaccaaagtggggacaggacaaaataaagaaggacatgaacgtactatgtacatttaatatgtcttgagttttaactaaagtaattctgaatgcatatccactggttcatttccaaacaattttgaaaagattatttatacttcatggataatgaacactaggttacakatattatttatattgcgtatcagagagtagtatattggtaccagaaactcaaatatgattgtcaacctaattgaactgaaatatttctgccattattatcagaaagaaatttgctatttaatgattctggacaaattgagca

SEQ ID NO: 671672 - DNA, 610 bp, Homo sapiens
cgccagggaaatggactttgtggtcatttatacatggaagtaaaagcaggaaaaaagcaatatggtggacactggggcagggtgagttcttcctttagcactggagattcataactgtcattgggcatgactgtaactgtgagtctgttggtggtgtcaggtaacattggcagtacattaaacatgatctcatcttaccagatctaagaaccatcactagcctatactgtttactgtagtttgtactgcagaaatgccctttgaaagtatggaggtatgtagggcattttgccttactctaaatgggcccaaacttaatgaggaagttccatttggaaacttctggttgactattcatttccatgagcacaaacttactacttctccttcttgacattttatttattgaattatttgtgtttattgtgtatttatttgaggtcaaggagtttgtcttattgatctttgtgtatctgtgtgtctggcacaaagcttttactataagaggtactctgtaactattacrtaacaaaatacaatgatgattgtgatcttggaatattggtgacctcattttccagaccaggattctgtttatgttgttttcaat

SEQ ID NO: 671673 - DNA, 1366 bp, Homo sapiens
agccccatcattttctgtatagttttagactgcaattccttgaaaatattgctagatcacaataatcaaacctcattctctaatctcagaaatgatggctagcctaccctctccagcattttgattacatttattctctaattcatgttctgtgttataggaagtaaaatgataagttaaatgcactttaattggcagaaaccaggatcattaattttcctttcataggatttctttccaagaactatttgcttacaaaatcaaatgggactagagtctggtattcacagaggaaaaccaagtgctcttgtcttcttttgttcagtcctccttttagcaytgaagcagaatcctagagaggagtgttaaggaagatggatgttgacaagaagggagaggggcttagggagagttactgtatgagacaaaataatctagctctaagataattctaataataattagaagtttgtttatgagtatattttgaaactgttaaaaatatgaagcaaaatcttatacaattaatttagagtgaagtcattttcttaattaaaactgggctaagtggttagtttgcgctcattgtcattagccaggaaattcacactagtcagttccgcacaattacagctgcctctttagcattttctgggtgttcaagtctcactttttccttccatcaaaatttaaattctttgctcttctttggaaaatcagtgactgaaatacaagaacagaatatttgattgcactggttgctgtccccataatacaattcaagtctttgagaagcgacaacttatttcaatacaattttatcagattagcataatcaaggctgaaatggcgcataaaatacaggtgaagatagagcagcatgattagcagctgcaggtcagttcttttttcctgtgaccttaaatcaaatggtcaccatgatgaaagaaaattaagagaagttttccagggacaaagttgagaaggtgtctgaacatttgttgaggaaagttgtttcatatagaatgttattatgaaagtgaaatgagtcaaaatgagatatcatttctcacacgcttttataagaacaaatgtaaaagttttctttcaaaaaagaactgggtgttaggtttcagcatcagtcttataatgaggctctggactgtacataaaactgttctcctaggacattctactataatccaaaatggatgttcaaagccacaacatcaggcttcaaattcttgtttcaaaggcaaaattatggaataacagtataaattagtcttagtattttctttgtagttgtacatttaaggaaaaatattaccagataaccaaaatgtaaggccaatcatgaatgaaa

SEQ ID NO: 671674 - DNA, 864 bp, Homo sapiens
gtatttttagtagggatggggtttcaccatgttggccaggttggtctcgaactcctgacctcaagtgatccactggcctcggccccccaaagtgctggtattacaggtatgagtcaccatgcctggccactacctcccattttattgctagacaatgtggcactcaggaagcccttccttctattgtactgatttctgatttctgtgagctcttcccatagccttgattctccccttgggcctcatgaaatgggactacccccrcgccatgatgccccacagggcccacttcactcagccctctgactctcctgatgccaggaggccactgcactcagagcaagattgcacattcctgccttgttcagagtcaatgtcctgtggcattccagcctccagcctcctggcctgtccctcatctccctgacctgggacatctgcccggcctcccatcacctctcaggcctgctgctctatgatgccccaggctgctccacttcccagttgtgacttccacttgctgctcaaatgaacacttatcctgacttccgtaaggaactcagcctccaccaggccccaggaggccccttcccaccccactttgctgacattcctttggggtagtcctagcctctgcagagtggcaccctggacagcccaccagctccttagagacactgactgcacccattcctctctgtgtccccatctaatggtgaaccccaagtccatccacatcctccatgagtgcagcacctcaagctgcttataggcccaagcacagccttaccagggcagcctgactatagcagggccaggcaggatagaggagcattgcctctctctccttctaggagccacctt

SEQ ID NO: 671675 - DNA, 1527 bp, Homo sapiens
ggggtgaacaggggcaggtgggccctcagagacctgctggacaacagccccgaggctggaccaggcgtctcctcaccctgtggccacaacccttggatctcactggggttgtctccaagtgaacagggccagaccctcaggctgcccccctcctcttgtgctaactcggagacagaactgctgagagcccaggggcctgacctagccccctctccattcccacccactccctagatgggccccgcaccactggcctaacaacaacctcaggctggacctgcaggggagccagggaggagttctgatcctggaaaggaggttggcccgacctgggcagacatgttctgcttcagaaagtcccttctaaaagtaaacccatccctaagctgaaataagtgctttaggggctgaggggagcacagaggactcactgcagaatcccaaagcgatcagtgctgctgtagattccaacaggctttaggccccgtgtctgctggcagcccagctcggtgtccctgtaatccagagggagccttgatgaggggtccaaggtaacgggtgcaagggtctgggggtagtggccacccgtccctgccctgtgctcctagggagcccaggatcctttgascagggcacactggaagaggcctccctccagggagcagacggacctgtacgttctcatacttcataatgatgtcctctcactcctgcaaagtatccacatcctctaccatgtccatcctgtgagacaaaatcatctaaatgttacactgtacctgagaccttcggagaatacctaaaccgctcccacctggctcccagattctgcctggcggtgtaaccccccttccaccactgccctcaggtgaaaaggggccagacccagtggcccacacctgcatgggtctctggagtctcaagccccaagcaggggtgggcatcttcccaaggacttgagaatactgggacctggacagagaatcctgttgtccccaaatgccatgaaacgggtacacacctgccccagcatgttgaatggtgtccacctgccaaggttgaagggcccatgatgggctattccagggatgtggaggcagactggggtcagggaccagaggtctctgtacagtcggcctcctgggatgctcagggaccacagagatgcccagtttcctacgggaacaagacctctcctgactgctcggttctactccactcatcacttgggctactgtggcccttcagtctcaccagtgaagccactttaggaacaacgccagttaagcaggagggtgtttggtttgggggatgaaaataatctactgtctccaaagcagcccctatgctcgtggaaaccacatctctcggggagggacggtggactccaccattctgagctatccatacaggagggggcttcattttcctgggtcactgaggaagaacagtgggtccttggttctggagaacacctagatggaccatccctcctgggaacactcagggcaaaaggagggtgaggcc

SEQ ID NO: 671676 - DNA, 654 bp, Homo sapiens
tctcttatagaacaattagaaatcctattgtggggatacaaggtcaaggtagcaacatagagtctgtttctctaaaagagaatttgtaagccaaagtgctgaaagttttaagagaatcttcaaagaataatggattattttgttggtttctccatctgggtgtctctgtatatagtaaggtatagtaatgaatgcatacgtttattccagccctttacagcaggggccacgtggtgggcacacaggatagcctccttagtagagagcaacagaggctccagagggcagggatgtgcccacactcccagcgccagaggctagacctggcctcagcctscaacacataatggtgtgctcctttggcgccagcattctctctctcggagcccagatcctgtttaaggccaggtcagggactgccccctggtttgagggacatgagggctgggtgggtagtggcggcctctgtcttcagtccttcctccaggggcacaggctcgagatcttcaggcctggggcagcatggtgtgttcattcatgccttaagcagccaggccagcttttttttttttttttcgacacagagtatcctcttgtcgcccaggctggagtgcaatggtgcgatcttgactcattgcagactccgcctcccgg

SEQ ID NO: 671677 - DNA, 603 bp, Homo sapiens
gaaagaaatctggattttaaacatttgccaacacacccctgtctgcaggcctctgagcatgtcacgcccttgcatagccccctcgacctttaatgctgttccctctgccaggttccactccttcttcctggaatgcctcgccagtccctcttccctgcctggtgaaaacctagacatttgttcaggcccagggagtcatccagctccccattcaggtgttccacagtgaaagggtcttatgccctaggcaggacttctcgtcttctcttccaccttaaccaggaattctcaatcaattttcaattttggggacaacaggtgagcaccaccatgcctgggaagggagctaaaggaaaaagcagaactatgggggcaggaaagttcacaataccccggggcagaaagtacagctggtttcatggggacaaagaatatgtccagcaagcagctgccctttttattattattattagtattattattatcactgggagacagagtctcactctgtcgcccaggctcggttcaagcgattctcctgcctcagcttcccaagtagctgggattacaggcrtacgccaccacgcctggctaattgttgta

SEQ ID NO: 671678 - DNA, 2272 bp, Homo sapiens
tgcattactgcaaagtcactgtaaggataaaattagataacatgtgtgaaggcctgacaccaaaaatgggagcccctcctttgtccctccctccctttgtgaaggcaaatgtcctccaggaaggtcttcatctagaatgtgctccacatggggctgatgggtcccaacaagcttcgttatcttgtctggagttacagctttcacagtctggtcactgttagctcacctttcccctctgcccaccccagccaagcagttaagtctttagaagaaactgtgaaggcctgtgacagcctgtttggggatgcagtctaggaagaaatggccctgccctgggaaagcttaggaacctcttaccctcttaccatagttaccatgaaactatgtacgtacaccatctagaaacaagccaaatggcatttccaaggatgtttcatgattcttttctaatcactttgcctctcttaagttctttctctaattcattaagaatggtaattgcatttttccattttaaacttttcctttggtcttgggtctcattaactttgcccattggcttcaaaatgagaaaaacctctgctctacagtcaccacaatttgaactcatttcatagaaattcagagctgataggtcttcttacattacagataagaagctaagacccaagggaggtggaatcctgcatccattcacacagcaagatgatggccgagcaggtgaattccatctctgaaagccaggtcagggcgcacatctaacagcatcatgggggtttcaagcctgaagcgggtggctccctgctagaggcaaaacgcgagtcctctcaacttgggttcagtggcctcctcctcctcctcttccttggagccagaagccagagttggggaggcatctcagacaacaaatgctgcttagtgcccgggtactgcagaaacccctccaaccaaaactgtcccatcagggaccagatggcatttgactttggggctgaagacctcaactagattcaaatctggcaacccacagagaatgtagccccaaacctggatcttgcctcaggagtttccatgcagagatgcaattaaaaaacggggagcaaaggagaagcatgtgctctgattaggaaaaacaagggcggccactcctacaaagccacagggctsgtcctagtgcttgcacctgctccttgattctagggtccagatagaaggaggaggcccaaataaaggaaaggaaaaagcaagaggaggaggaagagagagacagaaaagggagaatgagccctgcctggcctcccttctgcaaggccgggccctgccatggtcccctccccagcattaatcctctagtagtgctttatataagtccattgtgcaagaagattaaaagggacaggcagaacaaagcattggtctccctaacaaaggcccctccacttagtaaattaggagctctttctacctgacacacttttaaagggaaatcttcaattactatgtgctggcggggcagggcaacaaaaggtctgtctggtgactttattctcaaagccctgagcaggcactgaaatggttttatgtaatagagatactaatctagtccatataattttgagaatcctttatggaggactgaaggatgtttgagccctgcggctgtttcagagagaatttctgcagcttatgcatttaccttgccaaaagtttagctgagcaaacagagtcctctaaatcacacttgctgttgatttcctatcaggcctccgcagtttgtttggtggatgaagccctgtggatcaacagaggccaaggctatagtccctgcacctggccacaccaaagggctaggggctgcctttcagttgccgccactctggctcccagatttgggagttttcctctctttccagccaatgcaggataaaggcaaccagaggggcagttctctggccaggggagggaggaggcctccctggcttctgcccttggttccaggtctgcgtccattgtgggaatgagattgatggtgtcatttggctccccttccccaccccatcaggagcaaagaagcgattctggctcccttggtgacaattcagcaccactgctgcttaaaaagggaaaggagaaaggagatgggaaacaatgatggggaaggtgactctcaggagagtctagggagaagtgaaggcacagcctcttcgaacatgccagcgtgcagttatgcacttggtacataggttactgggggctttttcatggacagaca

SEQ ID NO: 671679 - DNA, 2272 bp, Homo sapiens
tgcattactgcaaagtcactgtaaggataaaattagataacatgtgtgaaggcctgacaccaaaaatgggagcccctcctttgtccctccctccctttgtgaaggcaaatgtcctccaggaaggtcttcatctagaatgtgctccacatggggctgatgggtcccaacaagcttcgttatcttgtctggagttacagctttcacagtctggtcactgttagctcacctttcccctctgcccaccccagccaagcagttaagtctttagaagaaactgtgaaggcctgtgacagcctgtttggggatgcagtctaggaagaaatggccctgccctgggaaagcttaggaacctcttaccctcttaccatagttaccatgaaactatgtacgtacaccatctagaaacaagccaaatggcatttccaaggatgtttcatgattcttttctaatcactttgcctctcttaagttctttctctaattcattaagaatggtaattgcatttttccattttaaacttttcctttggtcttgggtctcattaactttgcccattggcttcaaaatgagaaaaacctctgctctacagtcaccacaatttgaactcatttcatagaaattcagagctgataggtcttcttacattacagataagaagctaagacccaagggaggtggaatcctgcatccattcacacagcaagatgatggccgagcaggtgaattccatctctgaaagccaggtcagggcgcacatctaacagcatcatgggggtttcaagcctgaagcgggtggctccctgctagaggcaaaacgcgagtcctctcaacttgggttcagtggcctcctcctcctcctcttccttggagccagaagccagagttggggaggcatctcagacaacaaatgctgcttagtgcccgggtactgcagaaacccctccaaccaaaactgtcccatcagggaccagatggcatttgactttggggctgaagacctcaactagattcaaatctggcaacccacagagaatgtagccccaaacctggatcttgcctcaggagtttccatgcagagatgcaattaaaaaacggggagcaaaggagaagcatgtgctctgattaggaaaaacaagggcggccactcctacaaagccacagggctcgtcctagtgcttgcacctgctccttgattctagggtccagatagaaggaggaggcccaaataaaggaaaggaaaaagcaagaggaggaggaagagagagacagaaaagggagaatgagccctgcctggcctcccttctgcaaggccgggccctgccatggtcccctccccagcattaatcctctagtagtgctttatataagtccattgtgcaagaagattaaaagggacaggcagaacaaagcattggtctccctaacaaaggcccctccacttagtaaattaggagctctttctacctgacacacttttaaagggaaatcttcaattactatgtgctggcggggcagggcaacaaaaggtctgtctggtgactttattctcaaagccctgagcaggcactgaaatggttttatgtaatagagatactaatctagtccatataattttgagaatcctttatggaggactgaaggatgtttgagccctgcggctgtttcagagagaatttctgcagcttatgcatttaccttgccaaaagtttagctgagcaaacagagtcctctaaatcacacttgctgttgatttcctatcaggcctccgcagtttgtttggtggatgaagccctgtggatcaacagaggccaaggctatagtccctgcacctggccacaccaaagggctaggggctgcctttcagttgccgccactctggctcccagatttgggagttttcctctctttccagccaatgcaggrtaaaggcaaccagaggggcagttctctggccaggggagggaggaggcctccctggcttctgcccttggttccaggtctgcgtccattgtgggaatgagattgatggtgtcatttggctccccttccccaccccatcaggagcaaagaagcgattctggctcccttggtgacaattcagcaccactgctgcttaaaaagggaaaggagaaaggagatgggaaacaatgatggggaaggtgactctcaggagagtctagggagaagtgaaggcacagcctcttcgaacatgccagcgtgcagttatgcacttggtacataggttactgggggctttttcatggacagaca

SEQ ID NO: 671680 - DNA, 638 bp, Homo sapiens
cattcacgcagcattgagttttgctttaggctcatgcccaggctcaggctaacctcatggtgcttgtcttatattagaatatttttaaagctctctttgcgaaatctgatgtcagagttagaatgtcaactgcttgtcaaaacgtacataatttgatgccagattttttaatgtcaagcataatcacagatatcatccacatatgcccagagaagctacccaaaggaaactgaaaccatattgctaacatcactgactgtggcaakaaaatgtaatcaacaaaggcatcttgagattaagaaagttgaaacctcagtgaggctgcttctctgtaaaaaagaactccaaagacccacaacacagtgggacctgtccacagtcccaatccaattgatggtatgaaagcattgtttttctctaaagcattttcaggtctcagcagtattcaagggcacctttaaaagcagtgcacatgtgtcaggtgagcatcagggcagctcaacctggtgcccccggtgcagttgtgggtgatgaagacacaggatagtgctaagccagaggaggaaaggagaaagagcatagctcaagcccagacccaagggtgaatatattttgagaatcactctgtgttggtttcc

SEQ ID NO: 671681 - DNA, 668 bp, Homo sapiens
cttcccagagtgctgagattacaggagtgagccaccgggcccggcctaaataactaaatttttatattacaaacatgtcctctgcaatatttgagatgacattataataaaatacagttattcagctgaaattaacattgaaatggaaagtctgagtttttattggctacacagggcaagctaggcatcttttttcctagctcagtagttgctgagtgatagcacatttagttttattctgttgctaccacctgcctcaagcataatgagggggttttaaaaaatgtactctagaaggctgaatgtatgtgctacacagttaagatatctcaatgaaccagttccatgctttagagatttttgttatcaggtaaattgtcttggtatataaaaaaaaccaaaaagtatgcctgccaaaagatttcaaagagtagcagaaactcagagcaggactcctcaaacacaatgcacaaaagaatcagctgaggatcttgggaacaagaagaatttgactcagaaagcctggagtgaggcctgaaattctacrtttctaataagctccatgttaatgtcaaggtcaaagccccacttcttacactttgagaaggaatgcacttgagcattctgaaagttgagtcagtccacgatctgactctcaaaatctcagg

SEQ ID NO: 671682 - DNA, 633 bp, Homo sapiens
atactcacacaccaatcagcacacactccccattttgagcccataagagtccctgattcagccacactgagagaaagaccacccaacttccggtagggaaacaccctcacatcccctttccactgagaactgttttgtagcttaataaaattattctctgccctcctcacccttcaactgttgcataacctcattcttcttggacttgggacaagaactagggacycaccaaatgcaggtacagagaaggctgtaacactgtggccctccaccctctgcagatggaaggcagctgccccacatgatgggaaggagcagcagcacttggaatggcggactggaccctgacttgcttgctcatacaccccttcctggcaggggctgagtgtgcagtcacagtggccatgggatctgcaccacagtgcaagacagacatagcccagtgggccaagtagatggggcatatcctgcagcaagcttgggcccaagcaaggcttgggcaggggcatcaccagctggatgtctccactctggcaaagtggctgagaaaaatcctgtgtcattatcatattgtatcatagtttaaacattctttaaaaactcattaaggactattttattaatttttatcca

SEQ ID NO: 671683 - DNA, 633 bp, Homo sapiens
atactcacacaccaatcagcacacactccccattttgagcccataagagtccctgattcagccacactgagagaaagaccacccaacttccggtagggaaacaccctcacatcccctttccactgagaactgttttgtagcttaataaaattattctctgccctcctcacccttcaactgttgcataacctcattcttcttggacttgggacaagaactagggacccaccaaatgcaggtacagagaaggctgtaacactgtggccctccaccctctgcagatggaaggcagctgccccacatgatgggaaggagcagcagcacttggaatggcggactggaccctgacttgcttgctcatacaccccttcctggcaggggctgagtgtgcagtcacagtggccatgggatctgcaccacagtgcaagacagacatagcccagtgggccaagtagatggggcatatcctgcagcaagcttgggcccaagcaaggcttgggcaggggcatcaccagctggatgtctccactctggcaaagtggctgagaaaaatcctgtgtcattatcrtattgtatcatagtttaaacattctttaaaaactcattaaggactattttattaatttttatcca

SEQ ID NO: 671684 - DNA, 636 bp, Homo sapiens
attttattgtatatggtgtgaggtaaggatccagtaatttttcttaataggtggaatcagtttcactaatgctatctaaataactcttcttttcaaacttatttatgataccactgctagtacatactgagttccaagataggcatggatttgttttatatttttattttattttatttttcatttttaaagcatgggttggttgtatgtgatagagactggctagatatcacaaactcatttcctcttctcagacacagagctaaactgtttctcagtcttcttgcatccaaatggggcagaaatgaagtgtgtcacttccaggcctgggcagcygggaacaagtgtgtcttcaccttgttctctctctctctctctctctccttttcaaagacaccttgcaaacatatgaatctgggttgaatgggctcagttctcactcagggagataaccagaacaaactataaatatagtctctgagtccaggggtcagttaatcaagattcctagattgaagcttgaagcatattttcctgatttgtggttttaatatctctgtttatggcagaaggcatttcagcaaactcctcaagtgctccctacatcaggcatgaggggttttctctgaagtttaa

SEQ ID NO: 671685 - DNA, 620 bp, Homo sapiens
ggacatacagtcccctctcctctgtcccacctggctcctcagaagtccctagatgccagcccgatgacgcacctcggaggggctcgtcctcctgccctgtcccactctccatcatcytccactcccgtgccctggaaccactccccaaaacaagccactgcatacaagcctcgtcttgggctctgccttttgagagacccagcctaagacagcagggggtgattatagaaataattctgggtagtttttccaacacagagagagggactgacaccctttttcctgtgaacacttattgacagtcttcctccacatggagaagtagataaaacgcaagctccaaagcgcggggactttgtcttcttccctctgcgtccccagtgccttcagccatgcctggcacatagtaggtgcccaggaaacatgtgttcaaggaggaaggtggggggcggtgcagctctgctgctctttgtcccctccaggctgaagctgcatgtctctttctttaggggagctgtcctcgcttctgcactctttggtgttgcctcaggagggtgctagaaccttggagactgggtctgggacaggcaggactgggtctgagatggatgatgcctggg

SEQ ID NO: 671686 - DNA, 1767 bp, Homo sapiens
gaagacccagtgtcttgatcctgccttttcagagtctacgactcacttgtcagggactcctgcaaaactggtgatatcatccccaattttttagttttaagcttagggaaattgtgtaatttgtctgatatttcacggccagtttcagatcctgtctttctaacttactggmtaagaacttccctaagtttaaaatgaaaaaactgcaaacgacatcaccagttttgaaggactgttatgatagatgagtaaattacatttgaagcaccctagttttgaggcagcaatcacagagcaaacgctcaatataatgtgaaagaaaaatataatcttggaaccccaaactcactaggcttaagagaaagttggctggctaatcagagcctcacaagaatgtaaccacttgcctcactgcctaccctccctccttttttttccttccccttctgtttcatctttcccctttaaatattgaagttcccaaaaccctctttggaaaaagcacaggtcacagatcctactgtgacttgtgtttctttttcccaagcatatcctcaaccttggcaaaataaaccactaattgattgagatctgcctcagtcagtttttggtttacaataggaactagcatttttcaaatgttcaataacaaatgactatatatatgcatatttacatgcacttacatgcgtataaataaaataccctttctgactttatccccttgccatactaacccatgaagggtcagcttaaaatatgacctcctcctgcttatttgtttatatttctttttccctctccctctctttcactagatcgtgggttacgagggatatgagtcttctcttagatacctttgcattcccaatacctaacacagaagctgaaacataacggaatgcgtaataaatgtttattatctcaaataatgatgttgaagaaaaatcttattcttattgcgaggagccattgttaccaatattaaagaaaaggatcaatctgtcatctttatttgattcactatgacaaatctaaaggattccaactgtgcaagagaagtaacattgaggaatatttcctagtcctaacaccaaaatttcattttcaatattaggcccctttatagtcctgccctacttaaactttggccaaaaaaaaaaaaaaaaaaaaaagaacaaacaaaaaccagcttagccaaagcatttgcctgcaaaagacattcaatgcaatcagtgacacagaagttgtgtagtcttaatgctttgaaattaaactcttataatacagaagccagcccgataggaaaaaaaaaaagcaccacaaaaagttaaaatcaggtagcgcctacttctccttatctcatacaattttaactgcactttctttattcaccaaataatgtctagtcatccctagataatcagtgcaggggtaattttcctcaggaagcttccctgatatcctaagacgggttaaggatgccttctctgtgttcagacaggatactatcattgtttattttacacagcaccatgagtttctcaaaaataagaaatgtttctaaggcatcactgcatctccagaacctatcacaaggcctaggtcagaatagagcttcagtatttgttgagctaactgacaaagaattccaagacaaaaatttgaaagtacagcaaatactttagacatttgtcaaaatttatatcttcagcttatacaaataggcctaatcatgataggttcaagtagcatagtacagagtat

SEQ ID NO: 671687 - DNA, 2228 bp, Homo sapiens
tgaaatcagtttatttagttatatttgtaggtcttttctacctcttaatttcagttattgtttctgtatgaatttctgccttaaaaacaatgactgcattttatgcccacttccttccatcataaactcctgttcagtccctcaagacccttatctaatcaacctaaaatcttttcctaatcactttctccttataactttacaccttcctttgcaagtttgtggcatgcaagatatatagcacgtttccttgactatcttaagaacataatgaattcttatgcaataaataaaatcaaactagaggtgatgtactttacagaataaacttttagacagaatagattataagttttgcatttgctcaatatatctaaaacaatgattttactcaagtagtagaaggacttcaagtagaactcttcacactttatgctgaagatacggaagaaaataaaagagtctttgagaaagcattgggaaacacttctctttatctaggtttattatcaacttatataatttaatcttaactaacctaaattgccatgatttatttatagcataccaaaatgtatttacttcattttcctaaatagcctcaacctcttatttctgtggtaccactctgagtaccaccacccttcctattcagattgacccagatatgtgatgttaatttaccgagatattttaaattcaagacaatgcagtctgatgcagtctgatgcctgccttgttctttttagatttgacataatgggctctgtcaaaatctttcttcttcaaaaataccgatctaggcagatacccactctgatatatctatatccatacatctccatttcatacagatgagggacaaaatgattattagtcttcagataaagacttgctatttttctcaatgctgatatcacatctattgacaatagaacaatcgagaattaattcttctgtatttaacatcccttaaactgaccaagcctttgtttttcttttttaacgtgtagggtggggaagatagtggtagttgaaaaggatacaatcaccatttaaacaagttaaatatgacaatccacctacttcaatacctggtaaataataaatattaaaataaatattaaaacagtttatttcctggtaactacagtgccaactgcacattttgatttatcattaaacccataatttctagtaaatctttcactgtaatatggtttataatatttttaatcatataaacaatatctttgtgtaaatttttttaaaactggaagttagaaaattattaaaatctttaagactttcactcaaagataaccactgcaggtctgataaatttaatcactttcctcagtagatatatattaattactagataaagcagagatgtaaatctgggcagctatatgtacaattgttgtgtattgttcataattttaaaatatgtctaatgactaatatatagctttaaaatatgtctgatgactaatatctaatgagtcataatattctggcatgtgattgaatataataggattattttaatggtgaaaattcaggttatctctaattttagctcttagatatactgtaatgaacgtatttatggccgggcatggtggctcacgcctgtaatcctagcactttgggagactgaggcgagcggattgcctgagctcaggagttcaagaccagcctgggcaacatggtaaaaccccatctctactaaaatacaaaaaaaaaaattagctgtgcgcctaagtcccagctacttgggaggctgagacaggagaattgcttgaacccaggaggtggaggttgcagcagtgagctgagatggtgccactgcactytaaccttggcgacagagcgagactctgtctcaaaaaaaaaaaaacatatttatgtgcataaaatttagtttaccactctagctatttctttagaatagagtcacataattatttgaccaaggagcatgaacatttttaaagaacttaatatgttgttatgttgtttttcagaaatgcagagcaagtttatactcctaccagtaatatgtaagagggacagtccatttgaccctgaacatgacaataactatgaaagtaatggtgaaaataataaattgcaaataataatagtattactgaatatcaaattctgttaagtgccataggtgaatttttatttaatcatcactgtacctctattaagtagat

SEQ ID NO: 671688 - DNA, 2228 bp, Homo sapiens
tgaaatcagtttatttagttatatttgtaggtcttttctacctcttaatttcagttattgtttctgtatgaatttctgccttaaaaacaatgactgcattttatgcccacttccttccatcataaactcctgttcagtccctcaagacccttatctaatcaacctaaaatcttttcctaatcactttctccttataactttacaccttcctttgcaagtttgtggcatgcaagatatatagcacgtttccttgactatcttaagaacataatgaattcttatgcaataaataaaatcaaactagaggtgatgtactttacagaataaacttttagacagaatagattataagttttgcatttgctcaatatatctaaaacaatgattttactcaagtagtagaaggacttcaagtagaactcttcacactttatgctgaagatacggaagaaaataaaagagtctttgagaaagcattgggaaacacttctctttatctaggtttattatcaacttatataatttaatcttaactaacctaaattgccatgatttatttatagcataccaaaatgtatttacttcattttcctaaatagcctcaacctcttatttctgtggtaccactctgagtaccaccacccttcctattcagattgacccagatatgtgatgttaatttaccgagatattttaaattcaagacaatgcagtctgatgcagtctgatgcctgccttgttctttttagatttgacataatgggctctgtcaaaatctttcttcttcaaaaataccgatctaggcagatacccactctgatatatctatatccatacatctccatttcatacagatgagggacaaaatgattattagtcttcagataaagacttgctatttttctcaatgctgatatcacatctattgacaatagaacaatcgagaattaattcttctgtatttaacatcccttaaactgaccaagcctttgtttttcttttttaacgtgtagggtggggaagatagtggtagttgaaaaggatacaatcaccatttaaacaagttaaatatgacaatccacctacttcaatacctggtaaataataaatattaaaataaatattaaaacagtttatttcctggtaactacagtgccaactgcacattttgatttatcattaaacccataatttctagtaaatctttcactgtaatatggtttataatatttttaatcatataaacaatatctttgtgtaaatttttttaaaactggaagttagaaaattattaaaatctttaagactttcactcaaagataaccactgcaggtctgataaatttaatcactttcctcagtagatatatattaattactagataaagcagagatgtaaatctgggcagctatatgtacaattgttgtgtattgttcataattttaaaatatgtctaatgactaatatatagctttaaaatatgtctgatgactaatatctaatgagtcataatattctggcatgtgattgaatataataggattattttaatggtgaaaattcaggttatctctaattttagctcttagatatactgtaatgaacgtatttatggccgggcatggtggctcacgcctgtaatcctagcactttgggagactgaggcgagcggattgcctgagctcaggagttcaagaccagcctgggcaacatggtaaaaccccatctctactaaaatacaaaaaaaaaaattagctgtgcgcctaagtcccagctacttgggaggctgagacaggagaattgcttgaacccaggaggtggaggttgcagcagtgagctgagatggtgccactgcactctaaccttggcgacagagcgagactctgtctcaaaaaaaaaaaaacatatttatgtgcataaaatttagtttaccactctagctatttytttagaatagagtcacataattatttgaccaaggagcatgaacatttttaaagaacttaatatgttgttatgttgtttttcagaaatgcagagcaagtttatactcctaccagtaatatgtaagagggacagtccatttgaccctgaacatgacaataactatgaaagtaatggtgaaaataataaattgcaaataataatagtattactgaatatcaaattctgttaagtgccataggtgaatttttatttaatcatcactgtacctctattaagtagat

SEQ ID NO: 671689 - DNA, 603 bp, Homo sapiens
tgaatgtataattataaagtaatgaattctgcatttttcattttcgcttgataaatgtattcagcaaacatttattgagtgcctaaatgttttatggccatgaatatatttcatttgcatgtcaaattaaacatttcagagaggatagggatcactgagtatttatcgaatgtcttctctaactttgaaattattgtccyaatctctactctggcctcatgcctcagttctcccttagaattcccagaaagcaaggagttattgctgcacagctagccacatgctgcatcccgctttctgctgccaactgcttctgacaaacccatttttgatttatatttagaaatgggaggctagatagaggtgtggaaaagtattttttaaattatgttctgtgagattaaaatatatcaaccatttacataaaacagatttttaaagaaattttctgaacctgttatgaccattcattgataaggatctaagaatgggaagaaataaaaggcgagtctttgtagtctacttaaaatttcatttttcaccaaatattggctggtactggaatttttatatatgtaatattttttccttgtattaaaacac

SEQ ID NO: 671690 - DNA, 652 bp, Homo sapiens
gtaagagattttgctgtatgatatgcattatgggtgaaagttcacgataagttttattattgctttattactttttattggtatgttgacaggaatatcatggatatgtttacagtgacttttatattacagtggacgctttgatcttaaaacagccacaacaactcatctacggctgaaatataatatgcgtggacaagcttttgctgaagtgtagtgtgtcctttaagtttgttttttaaaaagtaacttacctcagaagaaataaataactataaagaaaaaagaaagctttgggaaaattttctatctgaatctgccatgtgtacattatttctatttcatttctaatgttgtagtcccttggggaaaaaaattacaaaacataaatggaaaggacctctaaggcatagtaatagcttgtrcccatttatttttaatatacctgtgacctggccgtttctatgctcttaccctatactatttttcccttgctggagacaaagatcaaacataatatttatcacaaaattcaatcctcatttctcatttactgggccttctgctatccagcaagcagcatagtatggtagaagagcactagattggaatccagaagacctggatgctaacctggtctctattgcttaca

SEQ ID NO: 671691 - DNA, 621 bp, Homo sapiens
atttaaaagatacaattatgcatcacttaatgatggggatgccattctgaaaaatgcattgttaggtaattcatcattgttcaaacattataaagtatatttacacaaacttggatggaatcgcctactgtggtatagtttattgctcccaggctacaaatctgcttggatcatgggtgcaccagaatctcagaaatcaccacagaagaacttattcatgtaaacaaacactacctgtttcccaaaaacctattgaaataaaataaaaataaagatatgcaaaaaagagtttagttrtttacataaaatatggaaagatggtcaaaatatatgtaaaaaaagccaaggtacagactgtgaagtgtagtgccacttgctaaacacacacacatgcacatacttgcacacattcttacacatgcttatgaatgcatagactatttctggaaagacaagaaactttacaatagggctagggagggaagagacttttgctttttaatatctttaatttagtttgaattatttcttaacatgtccatgcactacttttatacgttaatacattttttaatacaagtgaccatatttactcagtaaatactagtaattattcttgac

SEQ ID NO: 671692 - DNA, 658 bp, Homo sapiens
agtgctttggatgaagcagatgatgaaaaaatgaaagaattactaagatcttatggtgctattgagactgttaatagagatgagagtgatgctatagtcaatggtatgtatatcaatattgctgctattttatatagagatatatctctgcttaggaaaatcttctgatttgttgtgtaaattgtttcataactgggatagatgtgtcctatgtttattaaactcttcaaaagccattatttatttttagaaattggcatttacaatttggtttaatttatagatcatatgatcctactggattggagttacatgttgaaatgaaacctatagcattcatcaagcaaacrttaatgtccctaacattgggtttgagatagagatgtaattgaagccaggcagatcagtttagttgtagtagggctggaaaagggcgacattatactgaagtttttgcaactaagaggaatataacatatattacaatgaaaagaatatttcaagggaatgtacaatcaggaaaaattttatgaaccattttagcaatactttatattttattaagtattgaggggagggaattgttcttccttttccctcatgctcaaaccttgactcatagaagaagatactcaggaatgtatctatattctcacca

SEQ ID NO: 671693 - DNA, 607 bp, Homo sapiens
tacctcatcaaccttttgtatagcaggatataactgttcatctcttgtcctaactcatgtttgtatagtctttaaaaaaatcatctcctttaaaattttgcacattctacttttcgtcctggcctaacatggtacgtgttatgtttggaggaaactaatataaaataattcatacccccaaacaaaaawgtacagttagtatatttatttcatttactatttgtaatgtcttttgcatccaagatgatttttccaagtttataatttttttcattatgaaagtcatacagatatacttcgagaaaaagagaaaaatgctaaaattagctactgtcccatcacaatattttgttgttttatttccaggcccccctccccacatttttttttttgtctaagaacatagtaatgcaattggacctcaataaaactcttaaaaacatagttttgatcatgatatatatggtaattttgcatttttttcatagtcttcattcttagtgtttaataaatgttccacagcttcctaaatttttccctttttgttgaacatttgatttccaattttttgctgttctacaatatgtagctttttccacacgtatta

SEQ ID NO: 671694 - DNA, 984 bp, Homo sapiens
acatttatcacagaatgctatctctgtggtttcccaccgtaaaacagaatctcaaactacctcttatctaattcctatcaaaagcctaaacaagagaaaacacatttatagaggattatttggaagatacataatctatccacttccctaagaaatccatgcattctacatttgaattaagtcagattatcgttagtctaaatacacaaatgatcatttcagcttaagtttcacctaacaatactttcaagagatgcatttttataccatgccctcagcatgtgtaagagatcatttcaagaaaaaagtccacgaaattcattgctgcattgctacaaaaatgttaacgtatgatttgctagctatgtgttctcagactcccttataaatcccaagtagagaattgttttagtgtcagcttgaagaaaagttcataatcgtctgtattttcccttaaataaaaaataccgtgtaactgtttcagtattgcgtagtttaaaatctgcccaaaaaataataataataataataataataacctggatcctggattcaagagatctaccaaacttatataagaaacaaaygattagtatctgaataaaatcttttagataacagaaaaagagggaagatttattatctcatttctaaaactaaataaaatcacccccagaaagggacaaaacaaagaaaaaaactgcaggccagtctcactgttaaacatagatgcagaagtcttaaacaaaatgttagcaaaataaatccatcactgaacaaaagggctaatacatggagttcaagccatttcaacattaggatatctgttaaggtaacttcaaatgaatggtttgtgaaagcagaaaaccatctgattatctcaatagatctgagggaaatactaaaatttaaaaacatttataaacttaaaaacaaactcatagaaagcttaaaataaagaaaaactttgttatcccaattaaa

SEQ ID NO: 671695 - DNA, 611 bp, Homo sapiens
tatggtctgaagaatagaatggtgagctctaaagagtcagcttcttgtaacacatttgaaagtactctttgaagacatcatctcatagcctcatagagtttatatatcagcatcatatctaaaatgacgtaaaatcaaatgactcacttttcagggggagtgtattgtatgtatcctccacccagtgatatctacactaaaacgcatactgttacatgaggttgacattgtttatcaattttatatagatttgagttaaacacacaaaggttcttgattttattaggctttaaaatggatttagctggaaatttttgagtcagaaatatgacttattgaccattaatatcctcagataattacttatgctgccattgtgtttaacagccatttattcttgctcactgaccacattcatttgtttattctggaaatgtgcaccgaaagctgggcattgggttcagagacctcagacccagggaaggtgcacttgctccagcagtgtctttttttttttttttttttaatcccaacactttaggatgctgaggtgggcagatcacttgaggccagragttgaagaccagcctgggcaacatagtaagactatg

SEQ ID NO: 671696 - DNA, 611 bp, Homo sapiens
tatggtctgaagaatagaatggtgagctctaaagagtcagcttcttgtaacacatttgaaagtactctttgaagacatcatctcatagcctcatagagtttatatatcagcatcatatctaaaatgacgtaaaatcaaatgactcacttttcagggggagtgtattgtatgtatcctccacccagtgatatctacactaaaacgcatactgttacatgaggttgacattgtttatcaattttatatagatttgagttaaacacacaaaggttcttgattttattaggctttaaaatggatttagctggaaatttttgagtcagaaatatgacttattgaccattaatatcctcagataattacttatgctgccattgtgtttaacagccatttattcttgctcactgaccacattcatttgtttattctggaaatgtgcaccgaaagctgggcattgggttcagagacctcagacccagggaaggtgcacttgctccagcagtgtctttttttttttttttttttaatcccaacactttaggatgctgaggtgggcagatcacttgaggccagaagttsaagaccagcctgggcaacatagtaagactatg

SEQ ID NO: 671697 - DNA, 1019 bp, Homo sapiens
tggcaggctctgcaggatctggaagccagtacagactttcctcagcacatttgagagcaggatgtagggctcataatttataatcatacttgtgtgtatatgtgcttctgtgtatatattagcccttggtaatgacatgtcaagggcttttttttttctttgcctaaacacagtgtatgctgcagaaaacaaagtgctatagtaattcagtgaacagaaaattctacaggcaaatamggtgggaaacactgcatattatatccaacattcttggtgcaccaggaaacacgtttgcatattaaggactgaacggtcccataataaagagacacctttaggttagtttaatccagtgattcccagatttatttggttatgaccatctatccccccagtagtcctcaccaatattctgtggaacaaatctgtttatttgcagaacacaattttgaaaagggttattctgaatgtctatgaagtgttttaaatatggtacattttaatgaggttatataccaaaatagcctaatcaccaacaatgacagaaacatccaggatacaacttgtgaaagtaaaaatttttattttgattgatttctcaatgtatagttcagtataatgccagtttttaatggcaaaaatttggttccactgaaactccataatgctacagagagctactactttttccaggaagtaggttaacagctagaaagaaaaaggacaatttcctagcagcatggcaacttaaactgcagatctaataggtctgcaacttttacactaaaaatggcacaaacagctggtgacacaagtgagaaatggggaacaagatgtgaacactgaaaagaacaatatatatactgtaaatatgatgaataaaccaaatgtagctataagaatcttaaaggatgattatagaaaagggaaccaaatattttcctcaaatgctttttagagcctttctgtagcgatacaaatatatatatatatatttatccaaaaatatgttttataca

SEQ ID NO: 671698 - DNA, 1565 bp, Homo sapiens
tttctattttgagtccctactcccaccaaacaagcaaaagaaattaacctcagtcatgtggggagttttttttccatccttctgcaggctcatgtcctaaaagaatcttttaagtccaggaaaacccttcccccttcatatttttacctcagccacttgtctataccatggaactctctccaacatgtttacttcttttgcaggccctccacattcacatcaagagttatggttttggaaaataaaaggcataggatcttacaggttatttctgattttcactttaccaaataacttccctcaggcaacaaagtacagagytggctgcacacttaaccctagagaaacggataagaaaatagttggagaaaaaaatagtatgcaaaacagtatcctcgcatgttctccaactagtaaatctttgattcttcactaagaaaaaattacttctaatacagatctcttccccaattgaaggactctgactacgatgttttagcctaagaattaccctgtctttatttaaaatgttgtattttgaagatcatgggcttttttggcattgacttattttaaacttcgcattgaaacaggatttgtcttgatgccttagttctgtctgctctgtctccagttgtccagggcaatgttcagacttttctgtcctatggaaatagagtccaggaagaagctcagagccaacaccagttagctgtggatgacaatttattttcacctctggtaaacagctaactctccaattaacttcatccagaaagtgtgtttttccccaactaagttaacaggactttctgacaagcagtaacagtgttagcacctctcaattacactgttcaggatcactgctccttgaagtttacatcttaaaaggctcaggggaaaaaaattattcaaaaggcagttagcccatcaaatgtgttcaagctcaagagttcactgcattttaattattcaggcaaccacttttcatgtaaaagctttgaaaacttagaaaataagcaaggaaagggaatgtgtaacattgtgccaagatttttttaatttttaattatatttttatagaaggcattttttaaactgtatatttcaaagaagaaataatcttaatgaagcaaagctctttttcctaaaagagactttcagaagaacattcttataactataaatccctcttcagggttagaaatatccacagcagcaataacatgtggctgcacaataaaatcaggttcagaaatacaagaaataaggccgtgtttaagttcagagatattaggtgatcaatcaagacaccatgacatcatgtattttaaaatgcattccttgccttgtctaggaaggatttatgataacctaaaagggcacacaaaatccaaccagataatacaagtcaaaacaggagacaaaaagggaaaggaaaacaactttccagacataaaaggagccaaggaggaagctaaaatgtgtccccagaacacctaatcatgaacagaaccacgtctaatatactctggcctcatcattggcagaaatgttgaaataga

SEQ ID NO: 671699 - DNA, 1565 bp, Homo sapiens
tttctattttgagtccctactcccaccaaacaagcaaaagaaattaacctcagtcatgtggggagttttttttccatccttctgcaggctcatgtcctaaaagaatcttttaagtccaggaaaacccttcccccttcatatttttacctcagccacttgtctataccatggaactctctccaacatgtttacttcttttgcaggccctccacattcacatcaagagttatggttttggaaaataaaaggcataggatcttacaggttatttctgattttcactttaccaaataacttccctcaggcaacaaagtacagagctggctgcacacttaaccctagagaaacggataagaaaatagttggagaaaaaaatagtatgcaaaacagtatcctcgcatgttctccaactagtaaatctttgattcttcactaagaaaaaattacttctaatacagatctcttccccaattgaaggactctgactacgatgttttagcctaagaattaccctgtctttatttaaaatgttgtattttgaagatcatgggcttttttggcattgacttattttaaacttcgcattgaaacaggatttgtcttgatgccttagttctgtctgctctgtctccagttgtccagggcaatgttcagacttttctgtcctatggaaatagagtccaggaagaagctcagagccaacaccagttagctgtggatgacaatttattttcacctctggtaaacagctaactctccaattaacttcatccagaaagtgtgtttttccccaactaagttaacaggactttctgacaagcagtaacagtgttagcacctctcaattacactgttcaggatcactgctccttgaagtttacatcttaaaaggctcaggggaaaaaaattattcaaaaggcagttagcccatcaaatgtgttcaagctcaagagttcactgcattttaattattcaggcaaccacttttcatgtaaaagctttgaaaacttagaaaataagcaaggaaagggaatgtgtaacattgtgccaagatttttttaatttttaattatatttttatagaaggcattttttaaactgtatatttcaaagaagaaataatcttaatgaagcaaagctctttttcctaaaagagactttcagaagaacattcttataactataaatccctcttcagggttagaaatatccacagcagcaataacatgtggctgcacaataaaatcaggttcagaaatacaagaaataaggccgtgtttaagttcagagatattaggtgatcaatcaagacaccatgacatcatgtattttaaaatgcattccttgccttgtctaggaaggatttatgataacctaaaagggcacacaaaatccaaccagataatacaagtcaaaacaggagacaaaaagggaaaggaaaacaactttccagacataaaargagccaaggaggaagctaaaatgtgtccccagaacacctaatcatgaacagaaccacgtctaatatactctggcctcatcattggcagaaatgttgaaataga

SEQ ID NO: 671700 - DNA, 1700 bp, Homo sapiens
caaagcattgtaaaacttcatttcattaatatttaaattgattttccactaatgtctttcttcaaatatttaattctagaatattactagaaaataaattaagttttaaaatatgtttttagttcacattattttggtcacttgtaaaacattttcataattttctgagttgtaagcgttcatgataaactaagttaatacgccctgcagctgctaatactttttcttgatttgtttactttcgctgcatgtcgaatttgggaaatacagacaacactaattcagtgttgaattagacaacaataatacagacaacactcagctcatatttcaaagtagttcaaatgaattcagaattagcttgaaatatgtagtgataaatgtaattgaatattacatcctatggcttcaaaattaaagacatgtttctaaggctaattttccatgttgttttaaataataaattattatttttacttccagaaaagatagtttcaaaatgatactcaagcaatattttgtttctgatttatctaaaatgttttaaattatcaaatcaatttaaatactgatcatcacaaatttatttctgtctctaatatgcaaatattcatttttctgttctaaccataattttgtctagcgaaaagttattgaacttcaaattgtaatgtaatcaattttccactccacaaattgtcaaattaaggtgcttgctctttgagtgttctccatttcaataaattaaattccagttccagtatataattttctgtaaatatataacacatatataattttaattcattatttaataataaatatttaaaaactcagatttacagttgcaatataaccattctgactttgtggctaggaaacctcacctacaaaacacgtataatatcacctcttcgacttcaaatcatgttttctacagcctttgctgtcttaacttagcatttttgtagcaattacaaaaaaaaaaagataaaatcaagattagaatctttgagtgagttcctttacacacaaacaattttttaactcctgctatttttacatattctattttaaaatttgaaaacatttatttggtttttattagagttttgttgacactgaacttacctctagctacatagttttacttttctttaactgagcaatataaatatattataaccaaattatatgtgcaacattatattatgtaataatttaaataatttttaaataattattatcgaattcttatacatatatgtataaatatgcatatgagtcagatattataattaaatacttttttattcttttctacgtgacaattttaattttcctcctcaggagctaatagatgttgtaatraacacctcttaataataaataatttagtctggttgcagtggctgacggctgtaattccagcagtttgggaggccgaggcgggaggatcatgaggtcaggagatcaagaccatcctggctaacatgatgaaaccctgtctctactaaaaatacaaaaattagctgggcgtggtggtgggcgtctgtaatcccagctgcttgggaggctgaggcaagagaatcgcttgaacccgggaggcggaggttgcagtgagcagagatctcgccactgcactccagcctgggtgacagagagagactccatatcaaaaaaatgtaaataaataaata

SEQ ID NO: 671701 - DNA, 1700 bp, Homo sapiens
caaagcattgtaaaacttcatttcattaatatttaaattgattttccactaatgtctttcttcaaatatttaattctagaatattactagaaaataaattaagttttaaaatatgtttttagttcacattattttggtcacttgtaaaacattttcataattttctgagttgtaagcgttcatgataaactaagttaatacgccctgcagctgctaatactttttcttgatttgtttactttcgctgcatgtcgaatttgggaaatacagacaacactaattcagtgttgaattagacaacaataatacagacaacactcagctcatatttcaaagtagttcaaatgaattcagaattagcttgaaatatgtagtgataaatgtaattgaatattacatcctatggcttcaaaattaaagacatgtttctaaggctaattttccatgttgttttaaataataaattattatttttacttccagaaaagatagtttcaaaatgatactcaagcaatattttgtttctgatttatctaaaatgttttaaattatcaaatcaatttaaatactgatcatcacaaatttatttctgtctctaatatgcaaatattcatttttctgttctaaccataattttgtctagcgaaaagttattgaacttcaaattgtaatgtaatcaattttccactccacaaattgtcaaattaaggtgcttgctctttgagtgttctccatttcaataaattaaattccagttccagtatataattttctgtaaatatataacacatatataattttaattcattatttaataataaatatttaaaaactcagatttacagttgcaatataaccattctgactttgtggctaggaaacctcacctacaaaacacgtataatatcacctcttcgacttcaaatcatgttttctacagcctttgctgtcttaacttagcatttttgtagcaattacaaaaaaaaaaagataaaatcaagattagaatctttgagtgagttcctttacacacaaacaattttttaactcctgctatttttacatattctattttaaaatttgaaaacatttatttggtttttattagagttttgttgacactgaacttacctctagctacatagttttacttttctttaactgagcaatataaatatattataaccaaattatatgtgcaacattatattatgtaataatttaaataatttttaaataattattatcgaattcttatacatatatgtataaatatgcatatgagtcagatattataattaaatacttttttattcttttctacgtgacaattttaattttcctcctcaggagctaatagatgttgtaataaacacctcttaataataaataatttagtctggttgcagtggctgacggctgtaattccagcagtttgggaggccgaggcgggaggatcatgaggtcaggagatcaagaccatcctggctaacatgatgaaaccctgwctctactaaaaatacaaaaattagctgggcgtggtggtgggcgtctgtaatcccagctgcttgggaggctgaggcaagagaatcgcttgaacccgggaggcggaggttgcagtgagcagagatctcgccactgcactccagcctgggtgacagagagagactccatatcaaaaaaatgtaaataaataaata

SEQ ID NO: 671702 - DNA, 682 bp, Homo sapiens
gcatcttctgtgtgtcccgtcttggacaaagtaaagtttattaaatggaagatactctaatgggaaacaaagagaagcatgccaacatacaattgctatgcaactccattcaagcccctacagtcctatcggagagaagaaagttatgtattaaatatgtcctttatattaggtcttgctctactgtggttctgtcatttgcatctcagattagccttgacataagcattatatctttattttaaaagaacttaataggccaggcgtggtggatcacacctgtaatcccagcactttgggaggccatggcaggctgatcacgaggtcaggagatcgagaccatcctggctaacatgatgaaatcccatctctactaaaaatacagaaaattagtcaggcrtggtggcaggcacctgtagtcccagctacttgggaggctaaggcaggagaatggtgtgaacccaggaggcagagcttgcagcgagccaagatcatgccactgcactcagcctgggcgacagagcaagactcttgtctcaaaaaaaaaaaaaaaaaaagaacttactagtgtacctagtgatagacctagtaagtgatagagatggcacttaaagttttgaaaatgtgacccaaagccagggtgttttggcactacaaagcctttcctaaggctctaactagg

SEQ ID NO: 671703 - DNA, 636 bp, Homo sapiens
gatcaaagtcaatgtggacagagattaaggaaaaactgaagagagaggaaatgtgaagcacaagcaatgggaaacaaaggctgttttgttgtttttttaatctagtgtcatagcagagccagggaggattttaaaaactggccatggagcaaaaacattatttaaccttgcaagctgaaatatccacaggctgtgaaagatcaaggaaaataaaaagaatattgttattgcgagaacatcacaaagagaggcaccatcctggagtcacccctgaaacaaataacagaatgagctcaatcagtttctctataagcctttgctatttcctccccccacacccccagcacacactccaggtcaagtagcagatcatttcttttataaaattcactagaatatgtgccctttctttgtattacatttcctcaaaaccacaaaataaactgtactatggagtgttttaatttcctatcatatttggaaaatcatgctaataagatatttagtgaagagagtagttgcccaataagtggcaataatcttttatgagtgccactgtgaacacgatgaacaaatatgttgactttgaaagttctagtcttaccacgagygcaagaacaatgacacaaatattca

SEQ ID NO: 671704 - DNA, 2048 bp, Homo sapiens
tttttgaatgagtcagatgctagtgagaaagatcacatgaaatgaggtctgaagccactgaattttgaaaaaaaataaagtatatggtagatattgattagatcarttgaagctgagtaatgagaatgaaagccagattttttgtttttttattttatttatttatttattttgagagacagtcttgctctgttgcccaggctggagtgcagtggcgtgatctcggctcactgcaacctacgcctccctggttcaagctattcttctccctcagcctgcgagtagctaggactacaggcatgtgccaccatgtgcagctaatttttttgtatctttttagtagggatagggtttcaccatgttaaccagaatggtcttgatctcctgacctcgtgatccacccctcttggcctcccaaagtgctgggattacaggtgtgagccaccgtgcctgggtgaaagccagatttgattgaatgcttgacgtggaaaaattttgtagtacaaatacataactaaagcatttgctgtattataaaggttgaaaagaaacttaaatgttataaagtctaattaaaaaacaaaattactaccccttagtcaatattagacgatagagacataatgataaaaaattttattgctataccaatcataagtgttgtggtgctatattttataagatactaaatcttcatgctctaatgtattctggtatagttttaagttagaggggcacttttgttaaacaaaatttgctctagtaatatcaggtaaactgatccaaaatcatgaaagattaagcccacatatggaaaaaccatagtttaaggtacttctcttcttaaacactgctttcctttatttggaaaatatctgtttttagtccaaaactatgctagatacttttaaataatgtacttttgaggacccatagcttgactgtgatgcctctagtgaggaagtagcattgataacataatcaaacaatccgtgtaggtttggctttatcagctctgtacagtgtttagtagttccaatatataataatcttctttgatacagaaactttatatcttattcatttcaatacatttatcatttagcctaataatgcctgaaatatagtggatgtttaataaagaacttttcaattgattgataattaatactctggattacataagactaaaaatcatttaaatatgacttcaagataaattaatgcttcttggtttctaatttatgtccaggccataagtgtatgagttataaagatgctattgggggtgggaatattttagctcctgctgatatgagatcacagataatctgtacacatttgcccatgtaaaactacactcagatcaaaatcctaaaatcagtacttattcttaaatatactggaatttgttaaatttttaatcattagaatgattttttaagattctttgttactcgtggaataaatttacattatatgaaaatgatgatggttttacctgtaattctgttgtgcataatgcacatagcatcatttacctttcgttttctaatataaaatcgatatttatatattggccttgtattcagagacgttgctaagttcacttcttaactataagtatttctttgtggattctttggaatttttttacatagagagtcatttcatctgtgagtaatttagctttgtttatttctttccaattcttataacatattcaatacttttattccattctagttttattcctctggttaggacctccagaataatgcttaatataacttaacaataggcattgttttctcctttcttagtttacagggaaacctttcaatatttcattattatcaagtgtttaatacgtataggtagattagaggttaagctggcaagcttggtaaacgcttttctcatgggtggtgttaaattttgtgaaacaatttttgtaactatgctgagataatattccgtgttctctttcaaactctcaaggtagttaaaacatttaatgattttctagtataaaccacctttacatt

SEQ ID NO: 671705 - DNA, 626 bp, Homo sapiens
agctatggtcttattcatttttggtagaatcgttctggtccacagataagagcatattctctgtcatgataaatgaattatgaaattccctattgtagcgatttttmtactctgctgttataacttacattagctatcctcttactgtaaatattgattcattgcaaagtgaagactgtttatatttagggttgcctagtttaagaaaattttccatatcatcttttcccttgctataaaattcttcattccaaaggcacttttaatttggcctcatttattttgtagtatttcaaatgctgccaaaatttgcataagtgcatggagacaaaattaagtccagattttccaagatggataaatttgtgggtggttattttttcttctccacagaagggttgattgcaaaattccagtaaatgacaagttttcaacataatcagttttctagaactccatattctagcaaattttcagaaattaatctcttacattaagtgagttaccctatgtatgcatgtaagtaaaaaaaatcctacttttaaaagtttggatttgtatctggaaactaaaaaagctattaattttgccatacacttatgttatcaattaaaatacttttgcaa

SEQ ID NO: 671706 - DNA, 626 bp, Homo sapiens
agctatggtcttattcatttttggtagaatcgttctggtccacagataagagcatattctctgtcatgataaatgaattatgaaattccctattgtagcgatttttatactctgctgttataacttacattagctatcctcttactgtaaatattgattcattgcaaagtgaagactgtttatatttagggttgcctagtttaagaaaattttccatatcatcttttcccttgctataaaattcttcattccaaaggcacttttaatttggcctcatttattttgtagtatttcaaatgctgcyaaaatttgcataagtgcatggagacaaaattaagtccagattttccaagatggataaatttgtgggtggttattttttcttctccacagaagggttgattgcaaaattccagtaaatgacaagttttcaacataatcagttttctagaactccatattctagcaaattttcagaaattaatctcttacattaagtgagttaccctatgtatgcatgtaagtaaaaaaaatcctacttttaaaagtttggatttgtatctggaaactaaaaaagctattaattttgccatacacttatgttatcaattaaaatacttttgcaa

SEQ ID NO: 671707 - DNA, 626 bp, Homo sapiens
agctatggtcttattcatttttggtagaatcgttctggtccacagataagagcatattctctgtcatgataaatgaattatgaaattccctattgtagcgatttttatactctgctgttataacttacattagctatcctcttactgtaaatattgattcattgcaaagtgaagactgtttatatttagggttgcctagtttaagaaaattttccatatcatcttttcccttgctataaaattcttcattccaaaggcacttttaatttggcctcatttattttgtagtatttcaaatgctgccaaaatttgcataagtgcatggagacaaaattaagtccagattttccaagatggataaatttgtrggtggttattttttcttctccacagaagggttgattgcaaaattccagtaaatgacaagttttcaacataatcagttttctagaactccatattctagcaaattttcagaaattaatctcttacattaagtgagttaccctatgtatgcatgtaagtaaaaaaaatcctacttttaaaagtttggatttgtatctggaaactaaaaaagctattaattttgccatacacttatgttatcaattaaaatacttttgcaa

SEQ ID NO: 671708 - DNA, 626 bp, Homo sapiens
agctatggtcttattcatttttggtagaatcgttctggtccacagataagagcatattctctgtcatgataaatgaattatgaaattccctattgtagcgatttttatactctgctgttataacttacattagctatcctcttactgtaaatattgattcattgcaaagtgaagactgtttatatttagggttgcctagtttaagaaaattttccatatcatcttttcccttgctataaaattcttcattccaaaggcacttttaatttggcctcatttattttgtagtatttcaaatgctgccaaaatttgcataagtgcatggagacaaaattaagtccagattttccaagatggataaatttgtgggtggttattttttcttctccacagaagggttgattgcaaaattccagtaaatgacaagttttcaacataatcagttttctagaactccatattctagcaaattttcagaaattaatctcttacattaagtgagttaccctatgtatgcatgtaagtaaaaaaaatcctacttttaaaagtttggrtttgtatctggaaactaaaaaagctattaattttgccatacacttatgttatcaattaaaatacttttgcaa

SEQ ID NO: 671709 - DNA, 651 bp, Homo sapiens
ctggtactctttaatcttccgtcaggggctcccaatgactaaggtcaaccagaagcaagagggtaagaatacggttaatgtagcctatagaaattggcctcttgacacccagagcagactgaagatgcacgtaaaataagtctggaagagcaagactctttgatacactcagatttcctaaaatgtaagcctgagagctatttgtggaagaaaagtcactgaatggaagctcatatacacctgtgtcaatgttgacagtgtaggtgggattgtgacatctttttggtttattgattggcccaccttctctaaggaagaaaggcagggcaccaccatcctgaatatataggatgtattttaattcctgaaaaattatctttctcattcttctgtcccccactcactcacttactcagtgtatgataacattgctgagcaaatatgtcatgaaacagggcaattggctagctgtcagtcatagattgagtctcttatagatgcaaacatcaatyaagtggttccaaggtcatacattttaacatttccttgactaaacccttctcacatgaccagtgtgtcgggggtggggatgcggaggtatagttgggaacagtgcaaagaggaaattgatattgataccctgaatttacc

SEQ ID NO: 671710 - DNA, 1051 bp, Homo sapiens
tctaagagctgcygtcccttggccaggagggggcctctcccagctcctcccagcaactcggagcaataagtgaagatgtcagcaccttggacagcgcccaacccattacaggacgcggagccagcggaagccaagctctccacctcccttagcctctgggtgatggatttcctctcttctcaatttgattaaagcccagtagataaccagagcgccttgttcctttctcttctcccttcctgatgaacataattaactccgtcaggctgggaatgcttgctcttaaatactgcctgcccagctcccacccaggcatgaatcagtaaaatagaacacttggaagattcacacgtttcttcctagggaatgaaagtgggagaggaagctgtctctgagatatacagaggctgtgaatgaaggctgacatgtggtggttgggtagagaaacccctaaactggaagtcaggaagtttactttagtcctagctttgccactaatccagatatgatctaggcaggtcatgtgccctttctttctgagcctgtttttccatttgcaagatgtatattggtctagataatatcagatgctgagttcagtgctaatgtgctatggttgaaaatctttaaacagagagggaaaggaacttgcccaaggtcacacagcaagcttatggcaaagcagactttaattcatggctcctggcttctaccccagtgctatttccacaaacttaccccttcattcatatcacagactttcttgcctgaagatggaggctaaggaagttaaaaacagataggattgcattaattggtgttagcatttagaaaataacatttaacatatgtgtaaatgctaatctctctgaagagaacagaaagcatggcataaataattaagattatggggaaaggatcacctgatagagacagaaaatcaaccccacactcagagaatcccagaaaggttttgtgacttgcccaaggccatctagtaaggcaactcttgaatcttttaaaaagaaagagtgaactcttaccttaagtg

SEQ ID NO: 671711 - DNA, 1051 bp, Homo sapiens
tctaagagctgccgtcccttggccaggagggggcctctcccagctcctcccagcaactcggagcaataagtgaagatgtcagcaccttggacagcgcccaacccattacaggacgcggagccagcggaagccaagctctccacctcccttagcctctgggtgatggatttcctctcttctcaatttgattaaagcccagtagataaccagagcgccttgttcctttctcttctcccttcctgatgaacataattaactccgtcaggctgggaatgcttgctcttaaatactgcctgcccagctcccacccaggcatgaatcagtaaaatagaacacttggaagattcacacgtttcttcctagggaatgaaagtgggagaggaagctgtctctgagatatacagaggctgtgaatgaaggctgacatgtggtggttgggtagagaaacccctaaactggaagtcaggaagtttastttagtcctagctttgccactaatccagatatgatctaggcaggtcatgtgccctttctttctgagcctgtttttccatttgcaagatgtatattggtctagataatatcagatgctgagttcagtgctaatgtgctatggttgaaaatctttaaacagagagggaaaggaacttgcccaaggtcacacagcaagcttatggcaaagcagactttaattcatggctcctggcttctaccccagtgctatttccacaaacttaccccttcattcatatcacagactttcttgcctgaagatggaggctaaggaagttaaaaacagataggattgcattaattggtgttagcatttagaaaataacatttaacatatgtgtaaatgctaatctctctgaagagaacagaaagcatggcataaataattaagattatggggaaaggatcacctgatagagacagaaaatcaaccccacactcagagaatcccagaaaggttttgtgacttgcccaaggccatctagtaaggcaactcttgaatcttttaaaaagaaagagtgaactcttaccttaagtg

SEQ ID NO: 671712 - DNA, 634 bp, Homo sapiens
tggtagcttgtatatttcaaggtggggagggagggagagagacttcatcatgtccacagattttagcaataactagacatatgcatttgcttgtgattcctcagagcctggttttcttctacaaaggatacaaatgcacaactctcttttccaactaaaggaagytgttttaagaaaaatacgtgttgagatgcttaaataagtccatgctttacttctgaatgttcacgcccaagaacaaaagaaagaagaagaaaggacaagaatcacaccaagcagtatcacaacccctgcttacagatccataattgagactgctctgccagggaacaaaaatttatcacctgtccccaagatggacacacaaaggatattaaacacagggtagaatttctgaaaaatcaatcctgagcctgaattcacagcatatgtgaagttgagagaactcctgttttagccttttctttcctccctccttcctttcctttcttctttctttccttgtttctttctttctggaagacgaatgctctgtggtctttaaatttgtgcctgttttttctccagtccagcaaaatttgaggattgcctggggctctccgggacaggaagatgtaatgttgactttaatgaa

SEQ ID NO: 671713 - DNA, 603 bp, Homo sapiens
tacccctatcatgcagagagagcatgctcttgtatcctgaaacttcacaaaaatcaaatacatcaatcagcacaagtttagggagacccagctttccggtcaaccccatggtagtgacaaagaaagagccttcttagagtcaaaattgcccagaatcactttgtctggaattcttgggtgatgggctgtgatgtgctgattttttctcgcattcttcgtggatccagttgtcactgtttgtttggagtgtgtgctatgtaccagacactttgctacagrgctttcttccttggagccccaaatattttatgtcatcatttttgataaaaacaactttttagaatgttccactatgtcttctgtttttcgaaaataagttttctgaatgtgatctcatctttatgattcagggatagccttattaacacagttaacaaacagcacatcctataagaaaaaaatgtcatgggaacttctgtttgtcctaattactaaatggtacaagattgcattttgtgaaaaatctgtttttcatagttttctgccttattcacttcctgacaaggccttatgaccacccatgtttctgcctgcttgtctacc

SEQ ID NO: 671714 - DNA, 603 bp, Homo sapiens
tacccctatcatgcagagagagcatgctcttgtatcctgaaacttcacaaaaatcaaatacatcaatcagcacaagtttagggagacccagctttccggtcaaccccatggtagtgacaaagaaagagccttcttagagtcaaaattgcccagaatcactttgtctggaattcttgggtgatgggctgtgatgtgctgattttttctcgcattcttcgtggatccagttgtcactgtttgtttggagtgtgtgctatgtaccagacactttgctacagggctttcttccttggagccccaaatattttatgtcatcatttttgataaaaacaactttttagaatgttccactatgtcttctgtttttcgaaaatragttttctgaatgtgatctcatctttatgattcagggatagccttattaacacagttaacaaacagcacatcctataagaaaaaaatgtcatgggaacttctgtttgtcctaattactaaatggtacaagattgcattttgtgaaaaatctgtttttcatagttttctgccttattcacttcctgacaaggccttatgaccacccatgtttctgcctgcttgtctacc

SEQ ID NO: 671715 - DNA, 603 bp, Homo sapiens
tacccctatcatgcagagagagcatgctcttgtatcctgaaacttcacaaaaatcaaatacatcaatcagcacaagtttagggagacccagctttccggtcaaccccatggtagtgacaaagaaagagccttcttagagtcaaaattgcccagaatcactttgtctggaattcttgggtgatgggctgtgatgtgctgattttttctcgcattcttcgtggatccagttgtcactgtttgtttggagtgtgtgctatgtaccagacactttgctacagggctttcttccttggagccccaaatattttatgtcatcatttttgataaaaacaactttttagaatgttccactatgtcttctgtttttcgaaaataagttttctgaatgtgatctcatctttatgattcagggatagccttattaacacagttaacaaacagcacatcctataagaaaaaaatgtcatgggaacttctgtttgtcctaattactaaatggtacaagattgcattttgtgaaaaatctgtttttcatagttttctgccttattcasttcctgacaaggccttatgaccacccatgtttctgcctgcttgtctacc

SEQ ID NO: 671716 - DNA, 636 bp, Homo sapiens
tttattcctttagtgctttatgagtgcaatataagtgccaaacactgtactgggaactagtaagacaaagagtaataagacatactccttcccttaacaactataagtttctgaagaaggtagatttagcaagtaataagtacaaagaaattgaagtttactgaaatacaagcatgtacaaaattctactatatcacagaaaaaagtctatatgtagagaaatcaggaagtgtttccaaaataagtaatattttagtgagatctgarcaattttccagatgaagaagaggaaagacatttcaagcaaaataaacagtaggtacatatgcggggataaaaccctgctacttgttggaagtatggaatagtatctcagtatgggaatgaaggaaacaagagaaaatatatacagatacctaaacagtatacactatgcatgagacactcagttatttaaatagattttatagtattgttaataataaactgcctagatagtgtaaggtgaaaataattagcataattaggaaaaatttagcgaggagtaaaatttgttatatatctatcacagtagttcaggaaagagatgatgaagcctgatttaatactttgtcaattcatataaataaagtgagt

SEQ ID NO: 671717 - DNA, 636 bp, Homo sapiens
tttattcctttagtgctttatgagtgcaatataagtgccaaacactgtactgggaactagtaagacaaagagtaataagacatactccttcccttaacaactataagtttctgaagaaggtagatttagcaagtaataagtacaaagaaattgaagtttactgaaatacaagcatgtacaaaattctactatatcacagaaaaaagtctatatgtagagaaatcaggaagtgtttccaaaataagtaatattttagtgagatctgagcaattttccagatgaagaagaggaaagacatttcaagcaaaataaacagtaggtacatatgcggggataaaaccctgctacttrttggaagtatggaatagtatctcagtatgggaatgaaggaaacaagagaaaatatatacagatacctaaacagtatacactatgcatgagacactcagttatttaaatagattttatagtattgttaataataaactgcctagatagtgtaaggtgaaaataattagcataattaggaaaaatttagcgaggagtaaaatttgttatatatctatcacagtagttcaggaaagagatgatgaagcctgatttaatactttgtcaattcatataaataaagtgagt

SEQ ID NO: 671718 - DNA, 1248 bp, Homo sapiens
aattggaaaagagaaggtcaaattgtctctatctgcagacaacatgatcttatatatagaaaaacctagattccaccaagaaacccttagaattgataaatgaattcagtaaagttgtgagatacacaatcaacatagaaaaatcagtagtatttttataaaccaataacgaatgagctgaaaaagaaataaagaaagcaatttcatttgcaatagctaaagaaatacctagaaagaaatttaaccacrtaggtaaaaaatttctacaaggaaaactttataaaacgttaatattaaaatgctaatattattttattatggatttccagtgaactcaattactcctaatagtttttgtatcagtcatttgcttgcattctgaatcataataaaataatattcagtagaatttttcttctatcaatatctgaatagatatttttctgaccaacttccttttgagaacagttagtaaaagaataatagaaagagatggggagagtgtgttaaggtattaacagtaataaaaatcagtgataggagtcctcttattttttttagaaggtctcatcataaagcttcatgatagtagagggtatgatgacctgctacagattgactctagtttatttttaatatctgaatgcatttgtttatataaccattttaatagtttttctagggaaaaaaatttaattattgattgttttcttcaggtgataacatttcttaaaatagcataaaaatgtgactgtttttacttccattctggtatttccatcttgatcatcacctttccctgtacatttttctgaagttctcagaatgatttaaccttgccttgaaagtttaggatatattacatatccatcttttgaatatctgtaaaagtttactaatagcattagtttgtgatatggttttgctctgtgtcctcacccaaatttcatcttgaattttactcccgtaattcccatgtgttgctggagggacccagtgggagacaatttgaatcacaggggtgattttccccacactgttctagtggtagtgagtaagtctcatgagatcttacggttttttcaggggtttcctctttcgcatcttcctcattttctcttgctgccaccatgtaaaaagtgtctgccaactcccaccattattctgaggccttgccagccatataagttaattgaactgtaagtccaattaaacctctttttcttcctagtcttgggtatgtcttta

SEQ ID NO: 671719 - DNA, 1248 bp, Homo sapiens
aattggaaaagagaaggtcaaattgtctctatctgcagacaacatgatcttatatatagaaaaacctagattccaccaagaaacccttagaattgataaatgaattcagtaaagttgtgagatacacaatcaacatagaaaaatcagtagtatttttataaaccaataacgaatgagctgaaaaagaaataaagaaagcaatttcatttgcaatagctaaagaaatacctagaaagaaatttaaccacakaggtaaaaaatttctacaaggaaaactttataaaacgttaatattaaaatgctaatattattttattatggatttccagtgaactcaattactcctaatagtttttgtatcagtcatttgcttgcattctgaatcataataaaataatattcagtagaatttttcttctatcaatatctgaatagatatttttctgaccaacttccttttgagaacagttagtaaaagaataatagaaagagatggggagagtgtgttaaggtattaacagtaataaaaatcagtgataggagtcctcttattttttttagaaggtctcatcataaagcttcatgatagtagagggtatgatgacctgctacagattgactctagtttatttttaatatctgaatgcatttgtttatataaccattttaatagtttttctagggaaaaaaatttaattattgattgttttcttcaggtgataacatttcttaaaatagcataaaaatgtgactgtttttacttccattctggtatttccatcttgatcatcacctttccctgtacatttttctgaagttctcagaatgatttaaccttgccttgaaagtttaggatatattacatatccatcttttgaatatctgtaaaagtttactaatagcattagtttgtgatatggttttgctctgtgtcctcacccaaatttcatcttgaattttactcccgtaattcccatgtgttgctggagggacccagtgggagacaatttgaatcacaggggtgattttccccacactgttctagtggtagtgagtaagtctcatgagatcttacggttttttcaggggtttcctctttcgcatcttcctcattttctcttgctgccaccatgtaaaaagtgtctgccaactcccaccattattctgaggccttgccagccatataagttaattgaactgtaagtccaattaaacctctttttcttcctagtcttgggtatgtcttta

SEQ ID NO: 671720 - DNA, 1248 bp, Homo sapiens
aattggaaaagagaaggtcaaattgtctctatctgcagacaacatgatcttatatatagaaaaacctagattccaccaagaaacccttagaattgataaatgaattcagtaaagttgtgagatacacaatcaacatagaaaaatcagtagtatttttataaaccaataacgaatgagctgaaaaagaaataaagaaagcaatttcatttgcaatagctaaagaaatacctagaaagaaatttaaccacataggtaaaaaatttctacaaggaaaactttataaaacgytaatattaaaatgctaatattattttattatggatttccagtgaactcaattactcctaatagtttttgtatcagtcatttgcttgcattctgaatcataataaaataatattcagtagaatttttcttctatcaatatctgaatagatatttttctgaccaacttccttttgagaacagttagtaaaagaataatagaaagagatggggagagtgtgttaaggtattaacagtaataaaaatcagtgataggagtcctcttattttttttagaaggtctcatcataaagcttcatgatagtagagggtatgatgacctgctacagattgactctagtttatttttaatatctgaatgcatttgtttatataaccattttaatagtttttctagggaaaaaaatttaattattgattgttttcttcaggtgataacatttcttaaaatagcataaaaatgtgactgtttttacttccattctggtatttccatcttgatcatcacctttccctgtacatttttctgaagttctcagaatgatttaaccttgccttgaaagtttaggatatattacatatccatcttttgaatatctgtaaaagtttactaatagcattagtttgtgatatggttttgctctgtgtcctcacccaaatttcatcttgaattttactcccgtaattcccatgtgttgctggagggacccagtgggagacaatttgaatcacaggggtgattttccccacactgttctagtggtagtgagtaagtctcatgagatcttacggttttttcaggggtttcctctttcgcatcttcctcattttctcttgctgccaccatgtaaaaagtgtctgccaactcccaccattattctgaggccttgccagccatataagttaattgaactgtaagtccaattaaacctctttttcttcctagtcttgggtatgtcttta

SEQ ID NO: 671721 - DNA, 1248 bp, Homo sapiens
aattggaaaagagaaggtcaaattgtctctatctgcagacaacatgatcttatatatagaaaaacctagattccaccaagaaacccttagaattgataaatgaattcagtaaagttgtgagatacacaatcaacatagaaaaatcagtagtatttttataaaccaataacgaatgagctgaaaaagaaataaagaaagcaatttcatttgcaatagctaaagaaatacctagaaagaaatttaaccacataggtaaaaaatttctacaaggaaaactttataaaacgttaatattaaaatgctaatattattttattatggatttccagtgaactcaattactcctaatagtttttgtatcagtcatttgcttgcattctgaatcataataaaataatattcagtagaatttttcttctatcaatatctgaatagatatttttctgaccaacttccttttgagaacagttagtaaaagaataatagaaagagatggggagagtgtgttaaggtattaacagtaataaaaatcagtgataggagtcctcttattttttttagaaggtctcatcataaagcttcatgatagtagagggtatgatgacctgctacagattgactctagtttatttttaatatctgaatgcatttgtttatataaccattttaatagtttttctagggaaaaaaatttaattattgattgttttcttcaggtgataacatttcttaaaatagcataaaaatgtgactgtttttacttccattctggtatttccatcttgatcatcacctttccctgtacatttttctgaagttctcagaatgatttaaccttgccttgaaagtttaggatatattacatatccatcttttgaatatctgtaaaagtttactaatagcattagtttgtgatatggtttkgctctgtgtcctcacccaaatttcatcttgaattttactcccgtaattcccatgtgttgctggagggacccagtgggagacaatttgaatcacaggggtgattttccccacactgttctagtggtagtgagtaagtctcatgagatcttacggttttttcaggggtttcctctttcgcatcttcctcattttctcttgctgccaccatgtaaaaagtgtctgccaactcccaccattattctgaggccttgccagccatataagttaattgaactgtaagtccaattaaacctctttttcttcctagtcttgggtatgtcttta

SEQ ID NO: 671722 - DNA, 1411 bp, Homo sapiens
tattgttaaagattttaaaaatcttccatggagttatttgcaatcaattcattaacttgatcctttcaaggctcatatttatacattgtttcatttactgttgctatataacgaacctctctgaaatgtagtgggctgctctgctctgcctatggaatagccattcctttatccctttagtttcctaataagcttgccttcacataaaaaattaaatttggtggtataaaattaccattttattatgctcattgcttctgttggctagaaattcagaaatgattcagttgtgcaactattaattgaagttactcatgcaatctttgcaaatgttgcttagggttgcattcttttgaggagtttttttagtaggacatcccaggtagctcactcatatggttgggtttctgttggggaatcagctgagattgacacttgaggtatttagatgtggcctctttggcatgatggtcccaaattagtcaaacttcttacctgatgtctatgttgccccagaatgaacataccaaggaaacaaggttttttttcatcgtgtgtgctacatttttgttataagtgagctactaaggctacattatattgattacagaaaagcttttcaggtgggcatagtccacacttgttaatgggaaaaatgttcagagaatttgcaggtttttaaaaagctatcacacattttaataaggtaggcatttatctagaaataatttagtcctactagtaagacataagtcttctgatgtctctacagaattctgcaagtgttcagtctggtctccttactctggtcacatataaatcaaatgtctccaatcttagtgtgaactctgaagattgttcatcatatagctgcctggcaattgtctgagttcatggaattttatcctatgtatgtagagactaatatttagaaaaacaatcagagaatactctatagaggtttctgmatctctcacctttcataatctcttctctggtattttttatcagaagtttcagttactttggtttctccaaatcactgtatcagtctcctcaactcaacaagatgacagttttctgcttgtgttcctcctccctgcattgcagtacagaacttttttcaagatgaaagctgtggagatgatagggcttaacttgtttgtttctcttttctcaaaaaccacatcttgtgctgcctgttgtcaaacaactgagtctttttctcatatattttgtccaatattctagtttttattataatgagaaaacgcatctcaaatcatcttatttttgataaatataataaataattacaaattcattaagttcttaagtaactcagtttttttaaatgaatgattttactctatgttttttagtttaattattctaaagttacctaatgtgc

SEQ ID NO: 671723 - DNA, 1411 bp, Homo sapiens
tattgttaaagattttaaaaatcttccatggagttatttgcaatcaattcattaacttgatcctttcaaggctcatatttatacattgtttcatttactgttgctatataacgaacctctctgaaatgtagtgggctgctctgctctgcctatggaatagccattcctttatccctttagtttcctaataagcttgccttcacataaaaaattaaatttggtggtataaaattaccattttattatgctcattgcttctgttggctagaaattcagaaatgattcagttgtgcaactattaattgaagttactcatgcaatctttgcaaatgttgcttagggttgcattcttttgaggagtttttttagtaggacatcccaggtagctcactcatatggttgggtttctgttggggaatcagctgagattgacacttgaggtatttagatgtggcctctttggcatgatggtcccaaattagtcaaacttcttacctgatgtctatgttgccccagaatgaacataccaaggaaacaaggttttttttcatcgtgtgtgctacatttttgttataagtgagctactaaggctacattatattgattacagaaaagcttttcaggtgggcatagtccacacttgttaatgggaaaaatgttcagagaatttgcaggtttttaaaaagctatcacacattttaataaggtaggcatttatctagaaataatttagtcctactagtaagacataagtcttctgatgtctctacagaattctgcaagtgttcagtctggtctccttactctggtcacatataaatcaaatgtctccaatcttagtgtgaactctgaagattgttcatcatatagctgcctggcaattgtctgagttcatggaattttatcctatgtatgtagagactaatatttagaaaaacaatcagagaatactctatagaggtttctgaatctctcacctttcataatctcttctctggtattttttatcagaagtttcagttactttggtttctccaaatcactgtatcagtctcctcaactcaacaagatgacagttttctgcttgtgttcctcctccctgcattgcagtacagaacttttttcaagatgaaagctgtggagatgatagggcttamcttgtttgtttctcttttctcaaaaaccacatcttgtgctgcctgttgtcaaacaactgagtctttttctcatatattttgtccaatattctagtttttattataatgagaaaacgcatctcaaatcatcttatttttgataaatataataaataattacaaattcattaagttcttaagtaactcagtttttttaaatgaatgattttactctatgttttttagtttaattattctaaagttacctaatgtgc

SEQ ID NO: 671724 - DNA, 608 bp, Homo sapiens
taattttagtgaagacggggtttcaccatgttgatcagactggtctcaaactcctgacttggtgatctgcccgcctcggcctcccaaagtgctgggattacaggcatgagccacagtgcctggccagtagctactcttataaataaataattttgctattttacaaatcattagttaaataacagagtatttttgacycacataaaaacagattttaaaggtggccttttttttttggagactttattccgactatagctcagcctcttctcaggcataggttaaattctcattgaattatgtaatactgtgcaattttaggtgagatttacaaataaaggtatgaactcaggattcaggcttcctgtattcagaaatcatagagtaggagtttaacctcttcttgctactgttttagcatctggaaagagtatcactcaatatttaaatcagttaattgtgtaaagtgctaataattgtgcctggtgcatagcctagatacatactattatttttatatttcttatgttattgtcaattaattctatcgttatttctaatggataaaagttaaaaattaaatgtatttagtatgaagataaacatac

SEQ ID NO: 671725 - DNA, 630 bp, Homo sapiens
tttagcctcctctccacttctgctgctttttcaaagtaagcatatttgccaaccactatactctctattgtttctctactctctattgtttctctactctgaaatcccctcattcagaactttccagaaagtgtgtaatgaccatgttcttaatgtaatctttgctacaaagctatgttccagttcccctttgttgcttcaagactttcttaattttatctccagcatttgagggtaagaggtaattacctctttcaacactaaaagttctcaaaattgtacattctttttcttttctttttttttttttttgacacggaatctcactctgtcacccaggctagagtgcagtggtgcaatcttggcttactgcaaccttcacctcctaggttcaagcaattctcctgtctcagcctcctgaatagctgggactacaggtgcatgccaccacacccagctactttttgtatttttggtagagacaggatttcagcacgttgaccaggctggtttcaaactcctgacctcaggtgatccacctgccttggcctcccaaagtgatgggattacaggcatgagccaccatgcccagcataaattcaatttttaatcaccttaatrtggactgaa

SEQ ID NO: 671726 - DNA, 1202 bp, Homo sapiens
aaatttctacaatcaaactaaatcaattcaagacctcaaaacttttgacagccttcttaatatattgaaaatctattttaaaatataggtgtctagtgaagacatgaggatcaggtgcactcaggccatagtagaatgtaaattgggcggctcttcctggagagcagcttggtaacatacaccaaattgcaagatgtgcataatcttttaattccatgctcccactttgagaaaattgtctacaagaaataatggtacaaatatgcaaagatgtgtgcatgagaatcataacggctatgtcaaatatgacataagacaaaatcaacataatcatgcatccataaggatcaactcataatgatcatgcatgaaatacgatacggctgccacaagtgaatcacgcaaaactactttatgtccacttatattaagtagaaaaaaagaggatttatagcgtgctcccattttgcgtttaacagcaattccatctatatataaaatccagaatacttttatctctgggttgttggatgaaagggtactattatgtgtgttttgaaatttttattgctttctgaataaacagtccattaaattttataatcagaaatcaatagttatttaaaagacattaatttactctaggtaaattaatataaaatatttattttcacgtattttaaggggaaatcttgattgggggagtttcagaaaattggtaattcttaatgacaggcataagcagaggaggatttttttcagattgaaacaaaacagaattctgtgaaatccacggaacccacaagaaaatatttaaatgctcataaccccacaaataaggatttaggctgtgatctacggtactgtgcagtaaattcctcagtatctctaaatctgtgaaggagcatgagcagcctgccaatgaacgactgaagtatcaggaggaccagttccaagcaccgtctgcctatcattgactctattatgtgcaatttgacaaagcttttgttatcctctccgctggagctatttttacattgtaagtttgtgtagcartttctctctgggtacttttccattgattctcacaacaagcccttctaaaaaggaaacgcaagccagatatgtttcaacatgtgttcagtggtaaggaatgctcagtcattttagaagagggatgatgtgtggaacagggaaacaac

SEQ ID NO: 671727 - DNA, 596 bp, Homo sapiens
cagagatgagaggggaaacaaagtctcccttactctgaagccttggttctgtcccctgcattagagggatgttagaggcctgagtggggttaagtaggctggaaatcagaatcacctgtgggttgctttatagttaatcatgtcactttccttttctggaggtcctgacaatgtttatactgaaccacactacacagtacagttgcaccaaagagttttgctcttgcacaagttcagccatatcccatgcagcttggccccaaatcagagaataaaaactatgcatttcagataggttttgattgagaatatggtagttcttggatgcctctgtggtgattaacaaggtgaccatgtgactttggcattctggtgttaggttgttttaattaagtgaaaaattaaaacaatagtacccagagctccactatttgatgagcttaatatacaatcttatgtgtcccagtccctactttacctacaaccaaaagttggcaaaatgagtttggttaaacaaggacaagttggaagtagagtggatgtatgatgagtgctgccgtcatttggtggtgggaacawgattatgaaaaaacaga

SEQ ID NO: 671728 - DNA, 1633 bp, Homo sapiens
tttttattgatttatgtaaacgttgtctactactgttattagtgcaaaacagcaagctagtcaagcgcggttgtggggggagacaatgttaaatcaacttaacaataacccacaacactcggaccaactgtgttatyctgtgagtctcttgttatttatagtgcctacttagggtcttttctaggtaaggagacttttcagagcctatgccatgatcgtaaaaataaaatgtgtaaaactttttgattaaacacaatgaaaacaaaaccaaatgctctctcttaagagagtttgtaagaattatgttaatcaaccaaggtttttctgcatttcacttttacaaatgcattgtgggtagcgcctagctaaatatgaaagtaaacccggcgcgtggttcgcagccacgcgggctccgggcaattgcgctttagtctgggtggacagcttcgccggagctgagagcccgcgacctgccggaccagggccgggccgcgggtcaatgatccaggaaatcccgtcactcgcgtgcctgtggctgaagcgcggcagcttgtcttgtccgtttcgtgtcagtttcagggctgagtggcagcgtctggactttgcggacgccgagggctcagatgctgggctctggggagggagagggcgccggccggcctgtccctctccggggatttgcaggtaccacctgtcggctttgtttcatcatcaggagcccctttgcccagaaatcccgatcgtctacacccaggtctctactgatcagagattgagagtgagtcaacaggagtccaacacgtgacccccataagtctaccctcttttcccccaatacttgtagataccacccagtaacacccgtgtgtgctaaaaatcctattctgggagttcttcggcagtttaaatcgcccatgaattactcatattttctcaatccaccgtgagcctggcacatttcttttcagtaattgattgggaaagtgcaagccattggtgacctttagaagttttaaatgtttataacgaaagggctaaggacagaggagattacccacacttaagtattttgcaccttaaaaatgctagcaaaaatatgaatttatattccttcagggagaagatttcgtctgaggacgtaggccgaaccttgtgttttatatgtcatatgaattacgctctgaaactaaaatatgaaatagattccataattaagccctttggaatatcagcctcatctgaattatttctaaggatatttttgccttttttggtttattaaaaacttccttttggggaaacttgtatagattttctgcacttaggcaaaataaagcattttattcaaaatatttcttagggttttcctagaacttactcttctttcttcctgtaaagacaaacctaggaaattgttcagaaaaaggcccaaggtgatttcctcataacctatagtgattagtgagaaaaagtttggatattggggatttcggggttgatttgataatttcaggaaaatgaagaaaacctcaaatttaagatattaaaatgtttaaaaattgtcctagagaaaacgatggtactaaaagcttaaaaatttctaaagattaagagagctgacagtgatttaaaa

SEQ ID NO: 671729 - DNA, 550 bp, Homo sapiens
ctcaagcctgtaatcccagcactttgggaggccgaggcgggcggatcacgaggtcaggagatcgagaccatcctggctaacacggtgaaaccccatctctactaaaaatacaaaaaaattagccaggcgtggtggcggacgcctgtagtcccagctacttgggaggctgaggcaggagaatggtgtgaacccgggagggggagcttgcagtgagccgagatggcgccactgaactccagcctgggcgacagagcgagactttgtctcaaagaaaaaaaaaaaaaaaaaaagaacaagtactgattaaaaaggttaaggggttatgtgaggggaggggagtttttggtggggcccagggctggtctcgaactcctgagttcaagggatctgtccgcctccgcctcccaaaagtgccgggattacaggcatgggctaccgtgccctgcctctttactgttttaytgggatgtacctccatggatcttcactagtattatatcatttcatcctcaaaacagctctatcaggtagttaaatcagataacgtaaa

SEQ ID NO: 671730 - DNA, 660 bp, Homo sapiens
caataggaagtactccatgagaaggtggcagaatggagccatgaaagaagtgaaacagtgaagtgagagagacaggcaggcaggacaccaagtgtacagacatggaggcaggagtgtgcctggccgtgttagagaactagcaaggagactcatgtaaagtaaggaagtgataggaataggggataggagcacagaggtaaccagcagtcagctatgtcaggaccttatggstatagactgccttttacgattagtgagatggtaagccataatgtgatagagcatgggagcaccacaagccaagatggttttagtaggatcattttctctgctgcacagtgatagaatgtagaatggaaaagaacaaaatcaagaagaccagagagtaagctatttagtaagatgactgtggcatgccttatgacggcagcagtggggtgacacggagagagtctggattgataaaacacacagacgcaaagtaactgtgaagctaatggaactttagctttgggacactcccctgcacaggctccttccaaagaaggcctgtatcttgaaatgaatgtcttatggctgctagcgtgcatgcatggggggcagtgaataaaaagttgaggagatggaggacggaatacaaaggagaaacaacttttgggc

SEQ ID NO: 671731 - DNA, 654 bp, Homo sapiens
ttcactgtctatcatgctttcttttccaacggtaggaaaagtatctacataaaggctatagagtagagaccaaactcaccctgtgatccctgcactaccttcccaaatcctgccttsttatcactgtgaagaagacccagcagtaaaaggggactgaaatgtaagagtgacacaccatgccatgcctcaaagctacattctaattatttctgcctatctatctacatgtgcatatgaagtagatatttaaaataatcaactactgcatgtttcttacctattgcatgaatctgattctgatgaagaaagaacttcttgaatatcaatacagctagaagaatcctcttctctgtcaggttccaattcctctggggagtccagctttgattgagaaaagtggtttgttactgaggtcatattatcttcctgtcctaggaaaaaataaatttaagagtaccttaaaatctacaacttctgtatgcctattacttctgcaacacttaatactgccatgtgcacttagtaaagttgaagtatatgtcacatagattccagaactctagtgacagccagagagcaagaattaacactacaatggtgctatctaattatactgtccagcccatgtttttccaagattaattagtttaaaaa

SEQ ID NO: 671732 - DNA, 654 bp, Homo sapiens
ttcactgtctatcatgctttcttttccaacggtaggaaaagtatctacataaaggctatagagtagagaccaaactcaccctgtgatccctgcactaccttcccaaatcctgccttgttatcactgtgaagaagacccagcagtaaaaggggactgaaatgtaagagtgacacaccatgccatgcctcaaagctacattctaattatttctgcctatctatctacatgtgcatatgaagtagatatttaaaataatcaactactgcatgtttcttacctattgcatgaatctgattctgatgaagaaagaacttcttgaatatcaatacagctagaagaatcctcttctctgtcaggttccaattcctctggggagtccagctttgattgagaaaagtggtttgttactgaggtcatattatcttcctgtcctaggaaaaaataaatttaagagtaccttaaaayctacaacttctgtatgcctattacttctgcaacacttaatactgccatgtgcacttagtaaagttgaagtatatgtcacatagattccagaactctagtgacagccagagagcaagaattaacactacaatggtgctatctaattatactgtccagcccatgtttttccaagattaattagtttaaaaa

SEQ ID NO: 671733 - DNA, 654 bp, Homo sapiens
ttcactgtctatcatgctttcttttccaacggtaggaaaagtatctacataaaggctatagagtagagaccaaactcaccctgtgatccctgcactaccttcccaaatcctgccttgttatcactgtgaagaagacccagcagtaaaaggggactgaaatgtaagagtgacacaccatgccatgcctcaaagctacattctaattatttctgcctatctatctacatgtgcatatgaagtagatatttaaaataatcaactactgcatgtttcttacctattgcatgaatctgattctgatgaagaaagaacttcttgaatatcaatacagctagaagaatcctcttctctgtcaggttccaattcctctggggagtccagctttgattgagaaaagtggtttgttactgaggtcatattatcttcctgtcctaggaaaaaataaatttaagagtaccttaaaatctacaacttctgtatgcctattacttctgcaacacttaatactgccatgtgcacttagtaaagttgaagtatatgtcacatagattccagaactctagtgacagcyagagagcaagaattaacactacaatggtgctatctaattatactgtccagcccatgtttttccaagattaattagtttaaaaa

SEQ ID NO: 671734 - DNA, 1096 bp, Homo sapiens
tgctgggccaatggcatgttttactataaaaccatagacagcattttatttctgacaaataattcttcttgtacaattggaaatctgtgcttagagcatattggggacaattactgcgtgaaagaacaaatgagtagggcaataacagtttcaattcagaggtatcagagagagagtgcataaaacacaggcagcctgtggcagtatgatcaggaactggttaaggttggttcctaagaaaagaggaaaatcctattagcaaaatgaccttaaaaaaagttgcagcgagcttttgtactaattgaaaaaaatccatagtaacacagtgaaagggacagaggagtcttagagctgggtagttatttagggaaggatgttagggaggatgcttacattcataaggttctgagggaagtctaagaaggaggcagagaaatttagcctacaaaacaatttacatgacaaagtaaaattgggggacttattatttagtcatggatttcaattcaagtttctaagtaggaggaggacagagaaatagaaaaagagatgtactttccagaagatatagagataaattattaatattactatttgagacagggtctgaccctgtagcccagactgggrtgcaatggcatgatcatagcttactgcaacccccatctcctgggctcaagcaatcctcccacctcagtctccccagtagctatgacattaatggaactcattcttgcagataaaataaatatcaatagccttatacatatagtatactttatacaaatattattggtggtattccaaagacaggtttctatagcaaattaactcctaatttgaaatttctgcctgtgatattgttaaccttgctagaagatctgaggatctgctgttacattatttgaattctatccaattatgttcactgatgtttctccttccagtgtttgaatatttgttagaggctgcagttcccaggttatagccaccatgttggtaatggaaacctgtagtttgaggctaaaatacatgctggccatttgcatatatttttcactaaccatgaactgaccagttgcttttgtactttcca

SEQ ID NO: 671735 - DNA, 646 bp, Homo sapiens
ctccctccatttcctgccccggaaacaggcatctcctctggccacctcccaaagaagcctgtctggaagcctcaggcacccgttcctggaagcctgtactattcacaacaaagggcctgtccacccagtcgtgctgagcacacccctattcccccgagctctgaattgtcctttgcccaggctgggacaacatctcagagccttctgcctgctgcagactcggctcagcccaaagcactccatgaaattggggtgtggcatctgcctcaaggagcatttctacaacctctgctgcctctaccgcaaatgaaaactccacctctgaatgccgagttagaactgcacaattgtaaggaagaaaagttgggcaggactggtggctcacaactgtaatcccagcactttgggaggatgaggcaggcagatcaccggaggccaggagtcaaggccagcctggccarcatggtaaaaccccgtctctactaaaaatacaaaaataagccgggcagagtggctcacgcctatcatctcagcactctgggaagccgagacaggcggatcacctgaggtcaggagtctaagaccagcctggccaacatggtgaaaccctgtctctacaaaaaatgcaaaagttggctgggcacgg

SEQ ID NO: 671736 - DNA, 646 bp, Homo sapiens
ctccctccatttcctgccccggaaacaggcatctcctctggccacctcccaaagaagcctgtctggaagcctcaggcacccgttcctggaagcctgtactattcacaacaaagggcctgtccacccagtcgtgctgagcacacccctattcccccgagctctgaattgtcctttgcccaggctgggacaacatctcagagccttctgcctgctgcagactcggctcagcccaaagcactccatgaaattggggtgtggcatctgcctcaaggagcatttctacaacctctgctgcctctaccgcaaatgaaaactccacctctgaatgccgagttagaactgcacaattgtaaggaagaaaagttgggcaggactggtggctcacaactgtaatcccagcactttgggaggatgaggcaggcagatcaccggaggccaggagtcaaggccagcctggccaacatggtaaaaccccgtctctactaaaaatacaaaaatragccgggcagagtggctcacgcctatcatctcagcactctgggaagccgagacaggcggatcacctgaggtcaggagtctaagaccagcctggccaacatggtgaaaccctgtctctacaaaaaatgcaaaagttggctgggcacgg

SEQ ID NO: 671737 - DNA, 646 bp, Homo sapiens
ctccctccatttcctgccccggaaacaggcatctcctctggccacctcccaaagaagcctgtctggaagcctcaggcacccgttcctggaagcctgtactattcacaacaaagggcctgtccacccagtcgtgctgagcacacccctattcccccgagctctgaattgtcctttgcccaggctgggacaacatctcagagccttctgcctgctgcagactcggctcagcccaaagcactccatgaaattggggtgtggcatctgcctcaaggagcatttctacaacctctgctgcctctaccgcaaatgaaaactccacctctgaatgccgagttagaactgcacaattgtaaggaagaaaagttgggcaggactggtggctcacaactgtaatcccagcactttgggaggatgaggcaggcagatcaccggaggccaggagtcaaggccagcctggccaacatggtaaaaccccgtctctactaaaaatacaaaaataagccgggcagagtggctcacgcctatcatctcagcactctgggaagccgagacaggcggatcacctgaggtcaggagtctaagaccagcctggccaacatggtgaaaccctgtctctacaaaaaatgcaaaagttggcygggcacgg

SEQ ID NO: 671738 - DNA, 673 bp, Homo sapiens
ttgcttattcaagaatatttgagagactgcttcccatgctttcttgcatgcttcctacaaatgttttgttgtttattttttttttcatttgatagtttccttatgtattagggttttccaaagaagagaaccaatagaagagatatagatgatactgatataaatacagatatgatatggtttggctttgcgttctcacctaaatctcatgtcaaattgtaaactccacgtgttgaagcaggagccttgtgggaggtaattggatgatgggggtattttcttttttttaattttaattttcttttttttttttttttttctgagatggagtctygctctgtcgcccaggctggactgcagtggcgcgatctgggcccactgcaagctctgcctcctgttcacacaattctcctgcctcagcctcccgagtagctgggactacaggcgcccaccaccacgcccggctaatttttttgtattttcagtagagagggggtttcactgtgttagccaggatggtctcgacctcctgacctcgtgatccgcccgtctgggcctctcaaagtgctgggattataggcgtgagccactgcgcccggctgatgggggtattttctaatgctttagtactgtccccttattgctgtcttgtgagtgagttcccatgagatct

SEQ ID NO: 671739 - DNA, 673 bp, Homo sapiens
ttgcttattcaagaatatttgagagactgcttcccatgctttcttgcatgcttcctacaaatgttttgttgtttattttttttttcatttgatagtttccttatgtattagggttttccaaagaagagaaccaatagaagagatatagatgatactgatataaatacagatatgatatggtttggctttgcgttctcacctaaatctcatgtcaaattgtaaactccacgtgttgaagcaggagccttgtgggaggtaattggatgatgggggtattttcttttttttaattttaattttcttttttttttttttttttctgagatggagtctcgctctgtcgcccaggctggactgcagtggcgcgatctgggcccactgcaagctctgcctcctgttcacacaattctcctgcctcagcctcccgagtagctgggactacaggcgcccaccaccacgcccggctaatttttttgtattttcagtagagagggggtttcactgtgttagccaggatggtctcracctcctgacctcgtgatccgcccgtctgggcctctcaaagtgctgggattataggcgtgagccactgcgcccggctgatgggggtattttctaatgctttagtactgtccccttattgctgtcttgtgagtgagttcccatgagatct

SEQ ID NO: 671740 - DNA, 626 bp, Homo sapiens
tcacttaataaagcaatcatttattatttaatgaaacagtcagactctcttgaacayggttacaatttgctagatttataaacaaaataatgttttgttagctaaaatggaaagctcaaagaaaaatgagttttaagtttgtaattttataaaatcaaaatttttctttaaaaagtaattgaacaaaattgtttctaaccgatctttacatggaaactggcctgtaaggacatcaaaaaacaatccccatctgctgggcgtgggcgatcctgacactggcacgctgtggcatcactcagagaaggactgtcacagaatcacagagctggaaggagctcagaggtcatctgatttactttcatctgatccacaaatcccctcagctgcaatcaaccacctctacttaaatagatctcatgccaggaagctcaacatttcttgcagcattcaatttccggcagcatcctattattactgggggaggcagggaattctgttttcattccattcacagcatctgtcacacactgggctagctgctgggaaaacactggtgactaaatcccagccttccccctgcaaagccaggaaagcagacaggtaaacaactgtgtttaaccaaagtg

SEQ ID NO: 671741 - DNA, 561 bp, Homo sapiens
tgtgtcttcttcctggagtgattgtttctagtttttagctcactgaggttcctgtggaaaatgagggcagggagaaagctggttgccggcccatgcatcacactcaacacattctagatgatgattaggaaaatgtactctggaaaaatagaggatattgtaagatctttttaacaattttctatagagttttccaaccatggtatatattgaaaatacattgttggtatttattcttaatatygtatgcttaattccaaggtttctctaaaagtactgtggtttcccaatccttaaggtttaagacgtttctaacaagtcttccatgacctagtctcctcctacccctccagcttcacatgtttttcttctggttgactttgctggagtcacattgagactcaataggatagcacatttaagctccttcccactccagggcttctgcatatattgcatgttgttctacctggaaccctatgattaacctgctgatccatcccatatctgagttttaaaatgactcttcattaaatatgtccctaagcctcaccatgttct

SEQ ID NO: 671742 - DNA, 654 bp, Homo sapiens
ctggctacattataggtcatttcacttaaagtcatagtttccaagaacctatcaacaacattaagtgaggacttacccgtacgctaatatccactgaacaagacacttaaaatcaacgccaggtgaataattctgagttcaggagttcgagactagcctggccaatgtggcaaaaccccatctctactaaaaataaaaaattagccgggtgttgtgcccgacacctgtgatcccagctacttgggaggctgaggcaggagagtcgcttgaacccgggaggcagaggttgcagtgagccaagaatgtgccactgcgctccagcctgggtgacggagcaagactctatctcaaaaaaaaaaaaaatcgtcagaatggtaaattttatgycatgtgtattttaccacaattaaaaaaaaatggaagaaaaggtcgtaaaaagttacacctgtggctgaatatacacaaggcaagaaaacaacagctgttgggaaaagtaaataactgcacaggatgtcagcaaggaatatctcaatggtctccactgggagctcatgctagtaagtaagctaagcatatattactttctttttttttttttttttttttttttgtataagcagccaacaaagctagttgttgatttcacagcaaaat

SEQ ID NO: 671743 - DNA, 698 bp, Homo sapiens
aaatgtaaacaaaatctgatttcccctctagaagaggaaatttctatttgtactgatatacaaatatattgcaaatagaaacttatacatctgtgtctacaccagcaaatagactcagatcttagctggttaaaacataaaatgtgttatgttccaaaataaaatgaaacttttaatttattttttcaactgatgaatgtacaacaaagaaatctgaaatcattttcctgttctacttaattacattccttatttatttccattaatgaaatcagttcaaagcaatagaattttgtgtattttctttgtttttattttggctaacacctgatttaggaaagccttttcctttgtatataatcttcataatgtaaatatataaaactagtgggagtttwtgtttttgtcccttattttgttttttttaattttattttaagtttaggggtatatgtgctgtatacctatctgacagcaaaatgatgtgttggattgatactgaatttttagatcttgaactaactagatttctacatctatacaaaaaacaatgtaagatgattaatatggaacattcatgaaaggtcagtacatgcataatgcatctaatatttccaagaactctttaaaagagcaatttgcttatgaaacatttcttatgtatatgaagatatttttaaaaatgaattcttaccatg

SEQ ID NO: 671744 - DNA, 1009 bp, Homo sapiens
tgagtagagtagtaatacagtgtgttcccttgtgaagttcataaccaagaattattttagtagtggataggtaggctgaataattgacttcttatcattttcaggttctgtgtttgattttttttacatattaatttctttgatccacattaagctcagttatgtatttccattttataaatgaaaaaaaaaaaaataggcacttgcaaatgtcagatcacttgcctgtggtcattcgggtagagatttgtgaagctaagttggtcttaatcaaatgtcaagcttttttttttcttataaaatatagattttaatatgagttttaaaataaaattaattagaaaaaggcaaattactcaatatataaaatgtattgcatttgtaataggtaggtatttcattttctagttatggtgggatattattcagactataattcccaatgaaaaaactttaaaaaatgctagtgattgcacatttaaaacaccttttaaaaagcattgagagcttataaaattttaataagtgatcaaaccaaatttgaagagaaaagaagaacccagagaggtaaggatataaccttaccagttgcaatttgccgatctctacaaatattaatatttattttgacagtttcagggtgaatgagaaagaaaccaaaaccgaagaytagcatatgttaagtcttcttaaggagccctcccttaaaagattgagatgaccaaatcttataccctcagcataaggtgaaccagacagacctaaagcagtggtagcttggatccactacttgggtttgtgtgactgcgtgactcaggtaatctcaaaaattgaacatttttttaaggtggtcctactcgtatgcccaggtgttagggagaagcaaatctgaatgctttataaaaataccctgaagctaaatcttacaatattctcaagaacacagtgaaacaaggcaaaataagttaaaatcaacaaaaacaacatgaaacataattaacccacaaag

SEQ ID NO: 671745 - DNA, 1260 bp, Homo sapiens
gaattgattggcagacatggtgattacaactgggtaggctcttggcaaaggatactgctctttgacatcactgtgctttctttaaactccactgtgttgaacctcayggtcaacataattcagaaccagagtataaaattcccagttagacagtgttgcatggtaatggttgtattcacttgagattttaatttttgatgaaaagttcagttgctcacttgttggaaggctttctaaagtacctaagcagttcataagtgattgcggttaaacttcctggagtagagaaagtatgtaggcagagcatttgtccagggaaattgatactattttcttcccctgatgatgatttggccttgctcagccgaccatggctcaaaaatcagaagagtctagaatgtgtcaatattaccttaaatggaagtacagtacacagagagttaagttcttcctgaatggtgatatgtcaccacaaattggatttttctcaagtccaacaccaccttaccctgcaagaagtgccactagcaacctaagccttccactagggacacggatgtagagaaaaatctaagatgaaatatgctgcatcttcatgtgctacaaagtttctatgcccttggactaaacataaattataatatttatgggtttctgtaaacctttccaatcaatcaagatcatgtctgaagtgctcagagatgtcacctgtttgtctaacactgaaaaggaagggattatctgttaactctttgcaattgtgtgcctcatttaaataagtctattctgtctccaatattttcaatatgagtacagagttatttggccctggtatatctgggtaattatgctttttctctgaattgttttgtcatttaagcatagtcaaaaatgagaaaaagatatcctcctaaatgtctataaggtatgactttaactaggactttgtatctgtgaagacattttgaagctgtaattcttggctgctagcacaaaccttaatctcaaattgcatcatcttaaaacatctttaaaagctgtcatttcatcaatgacagttttgaaatgatagacttagaggaagatgaaactatgttatcccaagcagatcactttggacaggacccagaagcagaaacaaagattaaaaaaggcacctcttcaggtctcagcggaaggacactggatactcagatttctaagcgtccaacccatggccattttgtagaataaaatgcatggagcttacaacctatctta

SEQ ID NO: 671746 - DNA, 1260 bp, Homo sapiens
gaattgattggcagacatggtgattacaactgggtaggctcttggcaaaggatactgctctttgacatcactgtgctttctttaaactccactgtgttgaacctcacggtcaacataattcagaaccagagtataaaattcccagttagacagtgttgcatggtaatggttgtattcacttgagattttaatttttgatgaaaagttcagttgctcacttgttggaaggctttctaaagtacctaagcagttcataagtgattgcggttaaacttcctggagtagagaaagtatgtaggcagagcatttgtccagggaaattgatactattttcttcccctgatgatgatttggccttgctcagccgaccayggctcaaaaatcagaagagtctagaatgtgtcaatattaccttaaatggaagtacagtacacagagagttaagttcttcctgaatggtgatatgtcaccacaaattggatttttctcaagtccaacaccaccttaccctgcaagaagtgccactagcaacctaagccttccactagggacacggatgtagagaaaaatctaagatgaaatatgctgcatcttcatgtgctacaaagtttctatgcccttggactaaacataaattataatatttatgggtttctgtaaacctttccaatcaatcaagatcatgtctgaagtgctcagagatgtcacctgtttgtctaacactgaaaaggaagggattatctgttaactctttgcaattgtgtgcctcatttaaataagtctattctgtctccaatattttcaatatgagtacagagttatttggccctggtatatctgggtaattatgctttttctctgaattgttttgtcatttaagcatagtcaaaaatgagaaaaagatatcctcctaaatgtctataaggtatgactttaactaggactttgtatctgtgaagacattttgaagctgtaattcttggctgctagcacaaaccttaatctcaaattgcatcatcttaaaacatctttaaaagctgtcatttcatcaatgacagttttgaaatgatagacttagaggaagatgaaactatgttatcccaagcagatcactttggacaggacccagaagcagaaacaaagattaaaaaaggcacctcttcaggtctcagcggaaggacactggatactcagatttctaagcgtccaacccatggccattttgtagaataaaatgcatggagcttacaacctatctta

SEQ ID NO: 671747 - DNA, 668 bp, Homo sapiens
tgcccataatctggcctggcacagtggctcatgcctgtaatcccagcactttgggagatgatggtgggaggatcgcttgaggccaggagttcaagaccagcctgggcaacgtagtgaggaacccccgacctccaccatcccccccgccccccaccaaccccctcacttcaaagttttttaaatcagccacrcatggtggtatatgcccttagtcctgtgtactcaggaggctgaagtgggaaagtcctttgagcccaggagttgaacgttgcagtgagctatgaatgtgccaccgcactctagcctgggcaagagagctgaccctgtcacttaaaaaaaaaaaaaaaaaaaaaccgatattctgatagcaacactgctcacttgctcactctttctcttaggaaagtaaaaaagttttgtcttgatgcacagatttatttaaactttagttctaaatatataggactttaaaaaatattttctgaaagtgatatccatttttgaggtgcaagcagttgggtccattttggagattccgccttaagccattcagcttcaaaatggcggggagctcttgctacagagggttaccccgttctgcttccttcccattctgttaaaccttgtacatgctccttcccacagatcactattatcttcaaagccca

SEQ ID NO: 671748 - DNA, 668 bp, Homo sapiens
tgcccataatctggcctggcacagtggctcatgcctgtaatcccagcactttgggagatgatggtgggaggatcgcttgaggccaggagttcaagaccagcctgggcaacgtagtgaggaacccccgacctccaccatcccccccgccccccaccaaccccctcacttcaaagttttttaaatcagccacgcatggtggtatatgcccttartcctgtgtactcaggaggctgaagtgggaaagtcctttgagcccaggagttgaacgttgcagtgagctatgaatgtgccaccgcactctagcctgggcaagagagctgaccctgtcacttaaaaaaaaaaaaaaaaaaaaaccgatattctgatagcaacactgctcacttgctcactctttctcttaggaaagtaaaaaagttttgtcttgatgcacagatttatttaaactttagttctaaatatataggactttaaaaaatattttctgaaagtgatatccatttttgaggtgcaagcagttgggtccattttggagattccgccttaagccattcagcttcaaaatggcggggagctcttgctacagagggttaccccgttctgcttccttcccattctgttaaaccttgtacatgctccttcccacagatcactattatcttcaaagccca

SEQ ID NO: 671749 - DNA, 649 bp, Homo sapiens
attttccaactacttactcgccttcctcattaatgtcattttttcttctgcttctactctcaaggagaactgaaggaaaaccaagagagactacttcaaaccagattctgtggcaaaaggaagcttaagtggtatggccagaggattggaagcatttgaagtaatgaagatttgtatacagtgatttaaatattttgttaaaaatgtcatactcttatttagattagactttaagtaataaatctcaaactaattttcaaaggtggcaaattattcctctttatgaacgttctgttggatcatcttcctatgctgtggcattgtctgcccttaaacagactcaaatttttattaagttttattcaattctgcaggctatttattttgatgtcataagctcctaaattcttggcaaaacaaggggaattgacaagaagggattatgaaggtgtaaagcttaacagaaataaggttccaaacaagatcagaaaatccatttctggcgtaagatttactcactaatatkaaataaatgtgaggttttaaaataacataatgatgctttaaaatttaagttcatattcacatatcatttttaatttttctttgaaaattgattttttatacatatctatccacattaatttga

SEQ ID NO: 671750 - DNA, 665 bp, Homo sapiens
tacgatgagggcgtctgggtctcctatttgacctggtgcatccagggtgtgtggtggcttcaatcctcagccacaccacagacaagtgtgggtgtatctccatcaacagcattcccgcatgttaggacaagcggtttctcctgggcttctgctaccgtaattctcaacgtctctgaaaggagagcttagtccattctcacatccctataaagaaatacttgagactgggtaatttattttaaaaaarggtgtaattggctcatggttctgcaggctgaacaggaaacacagcactggcttctgcttctggggaagcctcaggaagccacaatcatggtggaaggtgaagagggagcttgcatgtcacgtggcaaaagcaggaggaagagagacagagcaaggtgccacacgctttaaacaactagactttgtgagaactcgctcttgccagtacagcaccaaaggcatggtgcccaaccattcatgagaaatccacccccatgatccaatcacctcccaccaggccccacctccaacactggggattatgtttcaaaatgagatttgggcagggaacacacatccaaactatatcagagatcagggaaactttaagtaaattacatgattcttccctaattctactgtcctgtccatcatattga

SEQ ID NO: 671751 - DNA, 665 bp, Homo sapiens
tacgatgagggcgtctgggtctcctatttgacctggtgcatccagggtgtgtggtggcttcaatcctcagccacaccacagacaagtgtgggtgtatctccatcaacagcattcccgcatgttaggacaagcggtttctcctgggcttctgctaccgtaattctcaacgtctctgaaaggagagcttagtccattctcacatccctataaagaaatacttgagactgggtaatttattttaaaaaaaggtgtaattggctcatggttctgcaggctgaacrggaaacacagcactggcttctgcttctggggaagcctcaggaagccacaatcatggtggaaggtgaagagggagcttgcatgtcacgtggcaaaagcaggaggaagagagacagagcaaggtgccacacgctttaaacaactagactttgtgagaactcgctcttgccagtacagcaccaaaggcatggtgcccaaccattcatgagaaatccacccccatgatccaatcacctcccaccaggccccacctccaacactggggattatgtttcaaaatgagatttgggcagggaacacacatccaaactatatcagagatcagggaaactttaagtaaattacatgattcttccctaattctactgtcctgtccatcatattga

SEQ ID NO: 671752 - DNA, 586 bp, Homo sapiens
ttgcttggcttgttcgtcacttgtcatgttggaaaaagcagcatgcttgttagcacagcaatattaacatagaaatcttgattatgttaattgatttctactttctttaaacatccatcattgactgattttcccataattgacatcttgatttttagaataatttttttctgtcctccaactttgttcattctctttggcctcagatctttggtaaactgaataatagtctcatcttttaggtttgttactttattattaacatttccaattatttcagtacattattttctatttctcataaaatcaaggactctactttcctttggtctttctttaatttgtttcttgtgttaaagtacacaaaatccagaaaaaggaatcagatattttttctggcagttctcatcaagaaaggtctcacatcatsactgccatggagaaacccagaagtttgtaggaaaagtgaagccagtgtgatcttactgggtctaagtaggtgggattaggaaattctgtggggttctagaaactattttccccctgcttactacacaattcttcctttgataacagcatctcattt

SEQ ID NO: 671753 - DNA, 641 bp, Homo sapiens
ctagtaaactgtgttttttcactactctgcattgatcacaaagaacgaacaactaactggaagaaagaaaaaaaaggcaagcagattttattcctggtcaggaatggagaaagagggagctcttgctctaaagaccttctcttcaagctgtgaaaacctggggaattttaaggagttagatgtggggcagggaggtatatgtaagcatgtccagagaggaactccagatgtacaagtacagctcataaacatgcttccttatacaacatatgttcaagaaatggtggccattttcttctatggcagggactttagcattataatgacatgttaatgatctaaaggtaacaaggggttgctggttcttgtttgctccgttttctcaatggctttatcttcctctggtaattggcaaagggtcctgaagctyccaggccgtctatagttgtttttcagcaagcttacctacagataaatagactagaaaaaaaaaaactgtttaagaaaaaataatgcactttctcagctatctactgtttaacaaaataatgaactttctcagttatctactcttcaagaaaatagtaaactttctcagccatatctccaggtttgccctggtaacattaggaaaaagcttg

SEQ ID NO: 671754 - DNA, 641 bp, Homo sapiens
ctagtaaactgtgttttttcactactctgcattgatcacaaagaacgaacaactaactggaagaaagaaaaaaaaggcaagcagattttattcctggtcaggaatggagaaagagggagctcttgctctaaagaccttctcttcaagctgtgaaaacctggggaattttaaggagttagatgtggggcagggaggtatatgtaagcatgtccagagaggaactccagatgtacaagtacagctcataaacatgcttccttatacaacatatgttcaagaaatggtggccattttcttctatggcagggactttagcattataatgacatgttaatgatctaaaggtaacaaggggttgctggttcttgtttgctccgttttctcaatggctttatcttcctctggtaattggcaaagggtcctgaagctcccaggccgtctrtagttgtttttcagcaagcttacctacagataaatagactagaaaaaaaaaaactgtttaagaaaaaataatgcactttctcagctatctactgtttaacaaaataatgaactttctcagttatctactcttcaagaaaatagtaaactttctcagccatatctccaggtttgccctggtaacattaggaaaaagcttg

SEQ ID NO: 671755 - DNA, 1372 bp, Homo sapiens
tgaaatgtttcttacacttttccttgatttgtggtaatcaaacaactctataaagtgacttcttaattgtacctaagcatgcacagctgcaaacaaaatagtataattgtatttactcacatcccaaataatagcaatattgcaccccctttatatttttagcttgaatgagactatatgatggttcattatggtttagtgcctaaaacaaaaaatcaccataagtattgaattaatgtgtgcatgatgtcagaatttggaaatctgtcttttcatgcattttttaaagtgttcccagaaatcaagaaatagcaacaatgctaattggcttgtgatcacttaaatgttttcctaagggcaaggaaaaaataagcctttggaatttccctctaatccaaaaaagcaggtttgygaaaatccagaagagaaaaaaaaattgtacttttcatactgcttaggaaactttaatcttattaacttttgtcaaggatattgacagtactggggaagcaaaaggtttactaggttaagtctagaaccagctatcttataaatatagcattttaacataatatattaacatctatagggctgtctgcttacgtctacctcccatgtagactgagtgtcctatccttggtgtgtagggaatcaaaagtattactggatgaatacataaatacagatgaaggtctctcgcttttcaattgtttcatgagccataatattgaacaagtatttttgttgtttttgtttccttttttttgagacggaatctctctctgtcacccaggctggagtgcagtggcgcgatcttggcttactgcaacctcctcctcccatgtccaaatgattctcctgcctcagactcccaagtagctgggactacaggcgcctgccaccacacccaactaatttttgtatttctagtagagatggggcctcaccatgttggccaggctggtctcgaactcctgacctcaggtgatccacccacctcggcctcccagagtgctagaattacaggtgtgagccactgtggctggccgttgtttttgtttttatcagtagaatttaaatgcttttctctctctgtagtatagaatttataagcttatctttgattaaggtaataatgaatgtattaatcacgtaatagtaagttctattagcattctttcttttccattacaacctcactagtttccattacaattcaaaagtagcatggtaagagtacatattatcttggggtggatatatatgtatgtatggctggtgcataacaacctttcccatacagcacacttacaaagatggatctctaatatatggcaatggctgtcattcacagattctttacactactgca

SEQ ID NO: 671756 - DNA, 788 bp, Homo sapiens
ctctgcatgggatttggtcagggctgggtctgtgccctgaaagggagctcattccagcccagctccccactgctgcagcgtgtgagggcttctccaggagggaagcgagagttttcttatagaaatttattatccctggtgcagtgggcagcagaggtgaccatattttttcagagtgagggcacctttgtatgtgtcattgtgttacaggcaggaggtgtgttgattctgagcagtaaacaacatatttctaacattcaggattgacttctaaagacttggtacgtgaggaaaaaacacggaagaggaagaggaaagcaaaggagtcagggatggctcttcytcaggtgagatgatattctcgggggattgttctgtctccttcctttcagaaatgctgatcttggagttgggaatcttctctgagtctcaagtgtcctgcctgacaggtttgctcacactcaactcatgccttccctcagtccctgtcatctcacttagattccatctcttgtgactgagtgacatgaacttgggaagaggctgcactgggcatggtcctgggaagggctcacacccagacatgtatggagatggggtgagggtcccgcagtgtcagtgctgttgggcagcagggattgttcaggggccacatctggatgcactgtcaactctctgtggaccaggattagagcagctgccaatggaagtgacctattaatgtgcacaaagtacgtggtaaattctagaaaaggagaccaataagggaaaatcttttctccctaatt

SEQ ID NO: 671757 - DNA, 1379 bp, Homo sapiens
tacctatttctgtatccttcatgtataacacgtttcttctcattgtcaatctttctacctccttgatcactgaagtggcccttctctgactgtactcaattctgtttcagaaaatgcctgaakacccagaggaaatgaggagcactcagtcagtcagcgtcacaggcatcagctgcctctgtttaatcaactccacccctcttcaggatgttttcactaacacctgctgtaggaaagcatggggtcagaaaaacttggaagaattgcatatgcttctacatctatttctataacaaagagaagaaaaaggtgggagattatctatgaggacctgaaacagggagagaatgagacttggggaaaccactgcatatctgtgttcagttctggattctgataactgggattctaccttatttctcaaacccaagcccgccccagctcctcacccaaaccttgcatctagttataaaggctattggctttttgccttttgagcactgtacctgattctgtgttgctacaacctccctaactgccctgtctctatgggtctgagtccttaccttgcttaattttcaatttcttttctggagactgagttctttccttaaaccactgctaaagattctttgcttggtcaaaactcagtccatcttctgaaacttcttctgggtcctctgtgtacttccttataaaatccaactttaacaaacaaccgaagtcagtttagtaacatccccccacccgcctttacagatcatcctcggtacctgctcggttcctcattctccaccgccccctacgtgacgtctggtccctctgacctatctccagcaagaattctgtttggtcagcttaggcagaacccacctacctcacctgtttcctcttcatgattttccacctgctgacccccaccctgctccttggttttaaattcctctctgccaatgttacactggagttgaacccagtctttcttttccatttacaaaatcccattgctgtcgtccctatacttatcacagtgatccggaataaagtctgccttactgtgctttaacaaatatcattgagtgtttttgtttgttttttgttttttctttaacaccacatctcatcggctggagaggagcaggatggtgccaggtaccagaatttctcgcatgttgacttctgaatgctgcccatttcagaagtcccttattgcaggctgagactcactgttagccagccctaagccagttctgcactaggcttgttactgaggcctgggccagaagaatgctctgctgtagcctgaccttagggcacagagctctgtctgctgcaccgaccttcttcccccagcagctgtctcaccaagtgggtggatc

SEQ ID NO: 671758 - DNA, 1379 bp, Homo sapiens
tacctatttctgtatccttcatgtataacacgtttcttctcattgtcaatctttctacctccttgatcactgaagtggcccttctctgactgtactcaattctgtttcagaaaatgcctgaagacccagaggaaatgaggagcactcagtcagtcagcgtcacaggcatcagctgcctctgtttaatcaactccacccctcttcaggatgttttcactaacacctgctgtaggaaagcatggggtcagaaaaacttggaagaattgcatatgcttctacatctatttctataacaaagagaagaaaaaggtgggagattatctatgaggacctgaaacagggagagaatgagacttggggaaaccactgcatatctgtgttcagttctggattctgataactgggattctaccttatttctcaaacccaagcccgccccagctcctcacccaaaccttgcatctagttataaaggctattggctttttgccttttgagcactgtacctgattctgtgttgctacaacctccctaactgccctgtctctatgggtctgagtccttaccttgcttaattttcaatttcttttctggagactgagttctttccttaaaccactgctaaagattctttgcttggtcaaaactcagtccatcttctgaaacttcttctgggtcctctgtgtacttccttataaaatccaactttaacaaacaaccgaagtcagtttagtaacatccccccacccgcctttacagatcatcctcggtacctgctcggttcmtcattctccaccgccccctacgtgacgtctggtccctctgacctatctccagcaagaattctgtttggtcagcttaggcagaacccacctacctcacctgtttcctcttcatgattttccacctgctgacccccaccctgctccttggttttaaattcctctctgccaatgttacactggagttgaacccagtctttcttttccatttacaaaatcccattgctgtcgtccctatacttatcacagtgatccggaataaagtctgccttactgtgctttaacaaatatcattgagtgtttttgtttgttttttgttttttctttaacaccacatctcatcggctggagaggagcaggatggtgccaggtaccagaatttctcgcatgttgacttctgaatgctgcccatttcagaagtcccttattgcaggctgagactcactgttagccagccctaagccagttctgcactaggcttgttactgaggcctgggccagaagaatgctctgctgtagcctgaccttagggcacagagctctgtctgctgcaccgaccttcttcccccagcagctgtctcaccaagtgggtggatc

SEQ ID NO: 671759 - DNA, 1379 bp, Homo sapiens
tacctatttctgtatccttcatgtataacacgtttcttctcattgtcaatctttctacctccttgatcactgaagtggcccttctctgactgtactcaattctgtttcagaaaatgcctgaagacccagaggaaatgaggagcactcagtcagtcagcgtcacaggcatcagctgcctctgtttaatcaactccacccctcttcaggatgttttcactaacacctgctgtaggaaagcatggggtcagaaaaacttggaagaattgcatatgcttctacatctatttctataacaaagagaagaaaaaggtgggagattatctatgaggacctgaaacagggagagaatgagacttggggaaaccactgcatatctgtgttcagttctggattctgataactgggattctaccttatttctcaaacccaagcccgccccagctcctcacccaaaccttgcatctagttataaaggctattggctttttgccttttgagcactgtacctgattctgtgttgctacaacctccctaactgccctgtctctatgggtctgagtccttaccttgcttaattttcaatttcttttctggagactgagttctttccttaaaccactgctaaagattctttgcttggtcaaaactcagtccatcttctgaaacttcttctgggtcctctgtgtacttccttataaaatccaactttaacaaacaaccgaagtcagtttagtaacatccccccacccgcctttacagatcatcctcggtacctgctcggttcctcattmtccaccgccccctacgtgacgtctggtccctctgacctatctccagcaagaattctgtttggtcagcttaggcagaacccacctacctcacctgtttcctcttcatgattttccacctgctgacccccaccctgctccttggttttaaattcctctctgccaatgttacactggagttgaacccagtctttcttttccatttacaaaatcccattgctgtcgtccctatacttatcacagtgatccggaataaagtctgccttactgtgctttaacaaatatcattgagtgtttttgtttgttttttgttttttctttaacaccacatctcatcggctggagaggagcaggatggtgccaggtaccagaatttctcgcatgttgacttctgaatgctgcccatttcagaagtcccttattgcaggctgagactcactgttagccagccctaagccagttctgcactaggcttgttactgaggcctgggccagaagaatgctctgctgtagcctgaccttagggcacagagctctgtctgctgcaccgaccttcttcccccagcagctgtctcaccaagtgggtggatc

SEQ ID NO: 671760 - DNA, 1379 bp, Homo sapiens
tacctatttctgtatccttcatgtataacacgtttcttctcattgtcaatctttctacctccttgatcactgaagtggcccttctctgactgtactcaattctgtttcagaaaatgcctgaagacccagaggaaatgaggagcactcagtcagtcagcgtcacaggcatcagctgcctctgtttaatcaactccacccctcttcaggatgttttcactaacacctgctgtaggaaagcatggggtcagaaaaacttggaagaattgcatatgcttctacatctatttctataacaaagagaagaaaaaggtgggagattatctatgaggacctgaaacagggagagaatgagacttggggaaaccactgcatatctgtgttcagttctggattctgataactgggattctaccttatttctcaaacccaagcccgccccagctcctcacccaaaccttgcatctagttataaaggctattggctttttgccttttgagcactgtacctgattctgtgttgctacaacctccctaactgccctgtctctatgggtctgagtccttaccttgcttaattttcaatttcttttctggagactgagttctttccttaaaccactgctaaagattctttgcttggtcaaaactcagtccatcttctgaaacttcttctgggtcctctgtgtacttccttataaaatccaactttaacaaacaaccgaagtcagtttagtaacatccccccacccgcctttacagatcatcctcggtacctgctcggttcctcattctccaccgccccctacgtgacgtctggtccctctgacctatctccagcaagaattctgtttggtcagcttaggcagaacccacctacctcacctgtttcctcttcatgattttccacctgctgacccccaccctgctccttggttttaaattcctctctgccaatgttacactggagttgaacccagtctttcttttccatttacaaaatcccattgctgtcgtccctatacttatcacagtgatccggaataaagtctgccttactgtgctttaacaaatatcattgagtgtttttgtttgttttttgttttttctttaacaccacatctcatcggctggagaggagcaggatggtgccaggtaccagaatttmtcgcatgttgacttctgaatgctgcccatttcagaagtcccttattgcaggctgagactcactgttagccagccctaagccagttctgcactaggcttgttactgaggcctgggccagaagaatgctctgctgtagcctgaccttagggcacagagctctgtctgctgcaccgaccttcttcccccagcagctgtctcaccaagtgggtggatc

SEQ ID NO: 671761 - DNA, 1379 bp, Homo sapiens
tacctatttctgtatccttcatgtataacacgtttcttctcattgtcaatctttctacctccttgatcactgaagtggcccttctctgactgtactcaattctgtttcagaaaatgcctgaagacccagaggaaatgaggagcactcagtcagtcagcgtcacaggcatcagctgcctctgtttaatcaactccacccctcttcaggatgttttcactaacacctgctgtaggaaagcatggggtcagaaaaacttggaagaattgcatatgcttctacatctatttctataacaaagagaagaaaaaggtgggagattatctatgaggacctgaaacagggagagaatgagacttggggaaaccactgcatatctgtgttcagttctggattctgataactgggattctaccttatttctcaaacccaagcccgccccagctcctcacccaaaccttgcatctagttataaaggctattggctttttgccttttgagcactgtacctgattctgtgttgctacaacctccctaactgccctgtctctatgggtctgagtccttaccttgcttaattttcaatttcttttctggagactgagttctttccttaaaccactgctaaagattctttgcttggtcaaaactcagtccatcttctgaaacttcttctgggtcctctgtgtacttccttataaaatccaactttaacaaacaaccgaagtcagtttagtaacatccccccacccgcctttacagatcatcctcggtacctgctcggttcctcattctccaccgccccctacgtgacgtctggtccctctgacctatctccagcaagaattctgtttggtcagcttaggcagaacccacctacctcacctgtttcctcttcatgattttccacctgctgacccccaccctgctccttggttttaaattcctctctgccaatgttacactggagttgaacccagtctttcttttccatttacaaaatcccattgctgtcgtccctatacttatcacagtgatccggaataaagtctgccttactgtgctttaacaaatatcattgagtgtttttgtttgttttttgttttttctttaacaccacatctcatcggctggagaggagcaggatggtgccaggtaccagaatttctcgcatgttgacttctgaatgctgcccatttcagaagtcccttattgcaggmtgagactcactgttagccagccctaagccagttctgcactaggcttgttactgaggcctgggccagaagaatgctctgctgtagcctgaccttagggcacagagctctgtctgctgcaccgaccttcttcccccagcagctgtctcaccaagtgggtggatc

SEQ ID NO: 671762 - DNA, 600 bp, Homo sapiens
gtagctttacttttttccaactagatagcccaacaccatttattcaactggccactcttctcctaccattttgtcttttttttttttttttttgagacagagtctcactctgtcatctaggctggagtacagtggtgtgatcttggcttattgcaacctctgcctcctgaggtcaagcgattctcctgcctcggtctgccaagtagctgggactacaggcatgtgtcaccatgcctggctaatttttgtatttttagtagagacagggttttgccatgttggccaggctggtcttgaactcctgacctcaggtgatctgcctayctcggcctcccaaaatgctgggattacaggcatgagccactgccccctgccccttttcctaacattttgaagtgctcctttatcatatactaaatttccatttatacattagtcagttctatttgtttatttatataccaatactaccattgtcatagctttacaggataatttgatagccaagaggacaactctacctacattgtccctcattttaaaaaagaatcgtggcgattgtatatattctcttgtgatggattttatttatttatttat

SEQ ID NO: 671763 - DNA, 1199 bp, Homo sapiens
tcccagctactggaggctgaaggggctgctgctgaggtaggaggtaggaggattgcttgggtgtgggagtttgaggctgcagtgagccatcatcgtgcctctgcactccagcctaggcaataaagcaagaccctttctaaaaaaaaaaaaaaaaaaattctacacattccttaagtttgaatatacctgctctaggctgcactatcggagactacaccctctgctggtggcgggcggggtgggggggtccctttgggtttctgtgctcactaccatgcctttccaaccatcccttgctttctagacttctctactgtgtcacaccttctaatccacaattggaatctgacaaccaaccaatgccaacctgtgggctttgctggtgggtgagtgagggcttaggcaagtcccttgggcacagggagaatgaatgaacctgaagttggcaccatagttttgcatgtgtctccaggtcccagtagcaggggtcactgtatgtaaggttataaccagggtgccagcttttcaccagcttcctggtgttagtgcagggaaatcggggtggcttggcgcccatgagggaccagtgggctgatgggagtcacaggtagaatcagaagtactaaagctattcctggaatttttttttttagaccgagtctcgctctgttgcccaggctggattgcagtggcacgatctcggctcactgcagcctccatctcccaggttcaagtgatcctcctgcctcaacccccctagtagctggggttacaggcatgcgccaccgtgcctagctaatttttgtatttttagtagagacagttttcgccatgttggccaggatggtcttgactcctgacctcaggtgattcacctgcctyggcctcccaaagtgctgggattacaggcatgagccaccgtgtccagcctggaatttttttaatttaaaaaatattttgggccaggcatggtagctcaacgcctgtaagccctgcactttgggagactgaggcgggtggatcgcttgagcctaggagtttgagaccagcctgggcaacatggtgaaatcccatctctacaaaacaaacaaacaaacagacaaacaaaaaaacaaccacaccaaccctcctgccccaaattagtcaggcatattggcacatgcttgtagtctcagctacttggaaggctgaggcgggag

SEQ ID NO: 671764 - DNA, 1199 bp, Homo sapiens
tcccagctactggaggctgaaggggctgctgctgaggtaggaggtaggaggattgcttgggtgtgggagtttgaggctgcagtgagccatcatcgtgcctctgcactccagcctaggcaataaagcaagaccctttctaaaaaaaaaaaaaaaaaaattctacacattccttaagtttgaatatacctgctctaggctgcactatcggagactacaccctctgctggtggcgggcggggtgggggggtccctttgggtttctgtgctcactaccatgcctttccaaccatcccttgctttctagacttctctactgtgtcacaccttctaatccacaattggaatctgacaaccaaccaatgccaacctgtgggctttgctggtgggtgagtgagggcttaggcaagtcccttgggcacagggagaatgaatgaacctgaagttggcaccatagttttgcatgtgtctccaggtcccagtagcaggggtcactgtatgtaaggttataaccagggtgccagcttttcaccagcttcctggtgttagtgcagggaaatcggggtggcttggcgcccatgagggaccagtgggctgatgggagtcacaggtagaatcagaagtactaaagctattcctggaatttttttttttagaccgagtctcgctctgttgcccaggctggattgcagtggcacgatctcggctcactgcagcctccatctcccaggttcaagtgatcctcctgcctcaacccccctagtagctggggttacaggcatgcgccaccgtgcctagctaatttttgtatttttagtagagacagttttcgccatgttggccaggatggtcttgactcctgacctcaggtgattcacctgccttggcctcccaaagtgctgggattacaggcatgagccaccgtgtccagcctggaatttttttaatttaaaaaatattttgggccaggcatggtagctcaacgcctgtaagccctgcactttgggagactgaggcgggtggatcgcttgagcctaggagtttgagaccagcctgggcaacatggtgaaatcccatctctacaaaacaaacaaacaaacaracaaacaaaaaaacaaccacaccaaccctcctgccccaaattagtcaggcatattggcacatgcttgtagtctcagctacttggaaggctgaggcgggag

SEQ ID NO: 671765 - DNA, 3193 bp, Homo sapiens
accctaaagttctttcacagtatgcaatgactccacatttgtgactattagtaaggatgattcaaatttaagtgactgaacttayggggaggacgctgagcttcccagtagttgcagcatccatattttgttttggtctttatttttgttgttatatgccaagattacccatatattatggcaggtagtttactggatattctcatgaaaggaggacatactagaatcctgcaagagctggaaatgctatcacccgaaggtgaaggtcacaataggatgcttgacacagcaaaacacatggaggctacagaaatacagcaggccaactgctgtctaacaaccagaatgggttcatagcactcaaaacagtaacaactttggtgctctggctgaagttttttactctgacaagttctaaaaaaactcaccgaaagaccaaattgttcaaggacttccaagaacctagaataagcatctgaggaccaggtctcatctctgcatgagatgtctcctgtgacccttttaccgagagatgcatcttgaagagcaaggcttatgaccttaaagaatttgtgcaaataactccagcatcacaagcatgtatagaggtagaaaaacaatggggattttcattccttcccccatcatagaaaacaacagaagatttaacagaagagtttgaagaacttaagactgatcttgctgattgttgactgtggacctgattgaatagaaactatctgtatttaatgatatataatatacctttatttttcattcttaacttggaaatgcttttcaagggactattatacattggcattacattagatattacacattaataaacttctaattagtcaaatttagaagaatcagtgttccagacactggaaatgtgtcaagtaataaagctgaaccttgaactggagaaaaaaaggaaatatgacccctagatgttatctacactaggcatctgttgatatgatcaatattctttaccctcttcctttctggtaacagcgttagcccatctcctttgtggagttgaacaacccccattctacgtggtaggaagagcaccctggccaaaggcatagagctagcttggccaatcaggatactccatccatttgtccacagtgattggtccaggggtgggcatatgatctaaacagggccgactgttggagatcagaatcgttaggggttccatccatagtaagagcacacattccctggagaaatgtcaggtgtggaagattgtcaaatttggtatagtcagctgtggactaattagggctctttgaattacaagtgtcagatgttcaactcaaaaccaatctttccctggatttcacacacacatgctggaagagagaagctctgtctttcctctggggttacttgctacatagaggaagtcatccatcaaagagagaatgagaccaatctacagagagaagcaggactgagggaaggagttagagagccctaatgactttgagtctttggagccaatcatgctcaaggcgaactccaaccctgccacaaagagctaatgaatcccctttttttcattaatattagttttgagttgagcatctgacacttgtaatccaaagagcccttattagtccacagctgactataccaactttgactatcttccacacctgacacttctccagggaatgtgtgatcttactatggatggaacccctaatgattctgatctccaacagtgtactcacacaatgttactacagtgaccaccaaagtaagaatagctaacatcttccaatcaaaatcttatcaaaagcactgtgctaagtgctttgtatgcattgtttcctttactcaccacaaaagccctacacagcattatttatttccacttccctacttttaatttgaagaacctaaggtttggagaacttgagaaattgttcatggttccaccaccagtaggtgttggagagaatgtttaaagccaggcagtctgactctctggaacatgtgccgttgaccttacattgttattacttccttcctagacttaacctctcaagaacagcacagccaagaagggtcaatctgaattccaaggtgctatttatctactagttgggcagccagtattatgagatagtgaatgatgctgagggcacattttgcactaggattatagagcgaaccctttcaacaatgcaaaaagatagaaatgagtgttctagtttaactttctagattaagaaactgggatggttaagtgacatgctcatggttacgctgccccaagtgctaaagttgggaaaggctcccggaaatgtgtgacttcatccccaagaggactgaaaagaaagtgttctgaccttgaaaggtatacagaaatcaaaggattcaggtcgatggggtgaaaggtttgttttagtaaaaaatgtcttatccttgtttgatcggttattttattctagggaggaggccttgtctagttttcctttttatggaaaggtcagccggtgggtcaggaagctggggaatgtgtgccttgtcatgaattcaggcttcctgattcatggggtgaaatttcgctttcttattgcctctcggagaaggatgagctcattggtggtgacaagagcagccttctgtccttcctgctccaaatgctgaaagaagtgggatgtgagctgtcaaatgtcacagaagcctacaaaacgctgactcccggatgccaggcataactggggttggctcagaacatggggacagggcaataccatcatctgctaagaattcattgttctgtagcttgccctggacacaatggcaagactgagacaggaggaatagatgtggggcggggtgggggcagacaaactgggtgtgtctttgcaaacatagcctttttgggggtggggagagataggatcaatcaagaggcagactgtatgtgggtttagggcaccaagaaacagggacatgaaaaatcctgacaaaacaaggcaaagcataacaaaacaaatgcccaaacaaagaaagggagggggagcatttgtttggaaaggttttgacatttactgctttaaaaaaagcattgaaacagtcataggaaaattcataactttgtttagtattttgaatcacaaagggtgggtgattcaaatgactttgtagagacaaggtgcta

SEQ ID NO: 671766 - DNA, 579 bp, Homo sapiens
tgccatcttgtagaacgctgtcttccaactgtaaaaacaaacacttacaatgataagtgcttggccacggataaaggtataggcagcattaatcttacactcatgctagatcctcatggtattatggtgttcattttattktttttttttttttttttttttactttttaacaacaaggtgcatatggcagtgtacacaaagaataattgaataagtagtaagatcaaaaggagagttagataattaaagcgacaactgttgctgagttatattaggaatgctttcaaatgccctcaattcctccacagctgagctcaaaatattataagtaatatcgatgttggatttgaaaaacaatgtgaaaatgtcttactccaaaaatgtgtatttcactagatttcacttgtctgatatgccttcttttaatgtgtttattcacatttattaaatattagtgtatgtgaaagtagggtgacagatgaggaatacaaatttgaacttctgtatttttcagtatttcctagcaccaaccttcttatctctagaaaaaatttaaggaagctgggggtaagagtgct

SEQ ID NO: 671767 - DNA, 1129 bp, Homo sapiens
attggatcccttttcatcctaaacatcagcattttccaaatctacctgtttttttctcaagcaccaacctaacaaaacctaaacaaggcaaacacaccaaaccacctaatattatataattttatataaaataatttagtgtcctaaaaaattttagaaatattacaaaggaatggttattttcaactcaatcagtatcattacctctcagtctttacacatacacacacagacatacacacactcacacacacacacttctaaaamctaggaaaccaggaacagtttttttcagttctgaacaagaacgctttctttttgcttcttctttgcttatttatttatttattgctttttaatttttttgtagagacgaggtctcactgtgttgcccaggctggtcttgaactcctgagctcaagagatcctcccactttggcctcccaatgtgctgagattacagtcgtcagccactgcacctggcctagagtgggttttaatctgtagacgttgtatttcttcttttttttttttaatactttaaggtatagggtacatgtgcacaacgtgcaggtttgttacatgtgtatacaggtgccatgttggtgtgctgcacccattaacatgtcatttacattaggtatatctcctaatgttgtggaacacagtgtggcaattcctcaaggatctagaactagaaataacatttgacccagtcatcccattactgggtaaatacccaaaggattataaattatgctgctataaggacacatgcacatgtatgtttactgcggcactaatcacaatagcaaagacatggaaccaatccaaatgtccatcaatgatagactggattagacgttgtatttcaaaaacaggagcaattaagacaatattcatgaacacccacgcacacacaattatgcataaagaagcatctagaaagaagtatctaactcttaatggaggtggcctgaaacaactcccggaggttaggcttctcactgaaactaaacatctcgcccaaaatattagaagtccccttgcataaggagaagctggaggaaacacctagaatgcaagccagtagagaatgcccccttcttcaggtagttactaacttgca

SEQ ID NO: 671768 - DNA, 601 bp, Homo sapiens
ccacaaaccagaattcacaaagttgctgagcccayacatgtaggatgaaagagagtaatgaaaactaatgacaggaaaccagcaccctgacaaacagagtggacccctgtgaattccttttgtagcagactccattgggtaacaacactggagtgcattttctgcttcctccagtttaagtaaatcctacttttgtgcaggtaacaatgtgcctgatgctgcaaatgaatcataactgctgtagccaatcgctgagattccagttcaccttgccagtgattgatgtagagattggccaatgacatctaagaaaacgactgcagtgacgaattctgggaattattttcctgcagtaaaatgcaagacgtgtgaaggagaaactcctcttctccttccttctgatgagagtgctgccctgtgagaacgtgatatggggtagatggcagacatcttggaagaaggaaagaaaggccaacggaagcacagggattgcaaaccactgccctgataccaaaaagcctctgaatcaaccctggaactgggaggtggagagttatttatttttgtaaataactcttagcttttccataactcttagctt

SEQ ID NO: 671769 - DNA, 601 bp, Homo sapiens
ccacaaaccagaattcacaaagttgctgagcccacacatgtaggatgaaagagagtaatgaaaactaatgacaggaaaccagcaccctgacaaacagagtggacccctgtgaattccttttgtagcagactccattgggtaacaacactggagtgcattttctgcttcctccagtttaagtaaatcctacttttgtgcaggtaacaatgtgcctgatgctgcaaatgaatcataactgctgtagccaatcgctgagattccagttcaccttgccagtgattgatgtagagattggccaatgacatctaagaaaacsactgcagtgacgaattctgggaattattttcctgcagtaaaatgcaagacgtgtgaaggagaaactcctcttctccttccttctgatgagagtgctgccctgtgagaacgtgatatggggtagatggcagacatcttggaagaaggaaagaaaggccaacggaagcacagggattgcaaaccactgccctgataccaaaaagcctctgaatcaaccctggaactgggaggtggagagttatttatttttgtaaataactcttagcttttccataactcttagctt

SEQ ID NO: 671770 - DNA, 601 bp, Homo sapiens
ccacaaaccagaattcacaaagttgctgagcccacacatgtaggatgaaagagagtaatgaaaactaatgacaggaaaccagcaccctgacaaacagagtggacccctgtgaattccttttgtagcagactccattgggtaacaacactggagtgcattttctgcttcctccagtttaagtaaatcctacttttgtgcaggtaacaatgtgcctgatgctgcaaatgaatcataactgctgtagccaatcgctgagattccagttcaccttgccagtgattgatgtagagattggccaatgacatctaagaaaacgactgcagtgacgaattctgggaattattttcctgcagtaaaatgcaagacgtgtgaaggagaaactcctcttctccttccttctgatgagagtgctgccctgtgagaacgtgatatggggtagatggcagacatcttggaagaaggaaagaaaggccaacggaagcacagggattgcaaaccactgccstgataccaaaaagcctctgaatcaaccctggaactgggaggtggagagttatttatttttgtaaataactcttagcttttccataactcttagctt

SEQ ID NO: 671771 - DNA, 652 bp, Homo sapiens
aactggtgtcagcttctaatatagtgcccatttaaattattcttatagttgtacagatgagatcatttaatttgtattataaattcttgcatgctttacatgttctcacaccctctactaatttacrtaaatgtctcagcctagaattcaagactttaccctactagtctgatttatattatacagacacacacacacacacacacacacacacacactgtttttactataaataggatgaatattaattgcactgtccactaaagccaactattctaatgactctcactcaaaaatatctgcaaatttctggcttaggaatcttacttcacattgttcactttacctagattcctcagcttacttctcttcaattatatcatttcttccctagaaaataaggcttcttcaaatcacttacaatctcagcaaagacatgattaccagatacacaatggaacctccttcctgtcactggacacctacaatttacttcttcttgccatttgcaatatatgcataggtatgctggtaaatgttgggggatggaatataaggagacactaattgtcaaagtttacagattgttctgatataaatattctaacgatggttaatttcaagctcacaaaatgacttcactgaataaaaa

SEQ ID NO: 671772 - DNA, 634 bp, Homo sapiens
tattcattgcaccaaattctgataagtatattgatttcagagagaacccactactaccaaaatgtgggatgctaacagaaaatactcagaggcaaaacatattgggcacagttgttcccaaatgaacaactttaaaacaaatataagatttcagaactgctttgaggacatgtatatacggaaagaccaagagtttcagcaacgctgcataatctgtgcatctcaattcagatcggacatttttgaacttatggtttaaacatatttgatctatgtgaattcattacaattattactattatctatgttcaaattgtcacacctgtggaaatttcccctctggtaccttctttatgttttttaccatacygagtcctattgatttgaccataattaccttcgcaagcatccttgctatctgatatgacaagatatttcagactcatcttggatatatcctgtcccacagccaaaatgagccatttcttcaaggagcccttcaactattaatgggaaatgctatttggagatgataatctgtgttcacagagtatagttgacttttatggcctagaaatatattatcttaattatcagttcatgtgaaggataatctttttgctcagtagaggtc

SEQ ID NO: 671773 - DNA, 634 bp, Homo sapiens
tattcattgcaccaaattctgataagtatattgatttcagagagaacccactactaccaaaatgtgggatgctaacagaaaatactcagaggcaaaacatattgggcacagttgttcccaaatgaacaactttaaaacaaatataagatttcagaactgctttgaggacatgtatatacggaaagaccaagagtttcagcaacgctgcataatctgtgcatctcaattcagatcggacatttttgaacttatggtttaaacatatttgatctatgtgaattcattacaattattactattatctatgttcaaattgtcacacctgtggaaatttcccctctggtaccttctttatgttttttaccataccgagtcctattgatttgaccataattaccttcgcaagcatccttgctatctgatatgacaagatatttcagactcatcttggatatatcctgtcccacagccaaaatgagccatttcttcaaggagcccttcaactattaatgggaaatgctatttggagaygataatctgtgttcacagagtatagttgacttttatggcctagaaatatattatcttaattatcagttcatgtgaaggataatctttttgctcagtagaggtc

SEQ ID NO: 671774 - DNA, 597 bp, Homo sapiens
gaatatttgtcttgcagggatgttgtaaagacaataactaatgtaatatataaagagccaagcagaatatatgaaaactgacaaaacataatacacataatgtagaaagctcctaatttttaaaaaagagaaagaaaaagggttatcaggctatttgggaaatcggcagagatcataaaaagacaaaaaaaaaaaagagagagaggagtaagaggagaaagaaaaggagggaaagaagaaaatgagagagggaaaggagaaatataatagtgcatgaagaaatgaaaaaatactcactagctaatgaaataaaagcaaattaatgtgggagatggataacgatgatagcctgacaatgtgaatgtacttaatagcactgaactgaacacttaaaaatgattaaaatggtaaattttatgttatgtatattttaccacaatttttttaaataaaataatgtttaaaagcaaattaaaacaggtacatttccacctctcaaactggcaaaaatagaagcatggcaatatgcaataggaaagtaaaagcattttgttttgtttcagttttrttttgttgttgttgttgttgttgtttgag

SEQ ID NO: 671775 - DNA, 621 bp, Homo sapiens
ctcaggtgatccacctgcctcggcctcctaaactgctgagattacagaggagtgagccaccatgcctggcctaacctaaaagtctctttaaaaattattagaattaatgagataatttaataagtagctgggtatgtatagtgattctttgcttaatgagagggatacgtgctgagaaatgcatcgttaggtgattttgtcattgtgtgaacatcatagagtgtacttacagaaacctagacggtatagcctactacacatctgggctatgtatgttggccaggctaagctattgctcctaggctacaaacctgtacagtatgttactgtactgaatactgtaggtaattataacagaataataactgtatgtaaacatagaaaagatacaataaaaatgtatgatcttatgagactgccgtggctatgcagtctattgttgatttaagtgttgtgyatgactatacctagcgtgacaactactcagtcatagaacaggtttgcaacttagtttcactgaaaatttttttgtggtgctcacttttttttccctcataaaattgcttgtttcttcctgattgttgtaggtcttgaggatattaaacctttttaattatagga

SEQ ID NO: 671776 - DNA, 643 bp, Homo sapiens
agtggaatgaggatgaccaagtctgccccttcatttctcccctcactgttgagtaatgtaaacatgagttattaccctgcagagaggcagttgcatgttcacgaccatttctgaargcatatggtattcacgatccacaggaagatgtgatttgaggcatctggagaggtaatagaagagctgacacgtagggagaaacacgtagggagaaaaaaaatagaagagctgacatgtagggagcaacgttttgctccccttgaagccacacacactcatagagccagtcttgccgtgatgggcacttacactcttagcagatcccagacactgttaatcagccgagtttccagctctgccgatccagctgcatttagagcccaaagagtggctctgcggtggagtgaggctgtgaggccactccggtccccacagggctcaggaatggagtgatttgtggagtgaaagccgtttaccttttcttttcccctgcaaagttcgcagcatttgtaagatcttagccatgaaagccgtccgcaacaatcgcctgggttctgccctctcttggagcatccgtgctaaggatgccgcctttgccacgctcgtgtcagacaggtgggtgccgctagtgttggcttcccaggga

SEQ ID NO: 671777 - DNA, 643 bp, Homo sapiens
agtggaatgaggatgaccaagtctgccccttcatttctcccctcactgttgagtaatgtaaacatgagttattaccctgcagagaggcagttgcatgttcacgaccatttctgaaagcatatggtattcacgatccacaggaagatgtgatttgaggcatctggagaggtaatagaagagctgacacgtagggagaaacacgtagggagaaaaaaaatagaagagctgacatgtagggagcaacgttttgctmcccttgaagccacacacactcatagagccagtcttgccgtgatgggcacttacactcttagcagatcccagacactgttaatcagccgagtttccagctctgccgatccagctgcatttagagcccaaagagtggctctgcggtggagtgaggctgtgaggccactccggtccccacagggctcaggaatggagtgatttgtggagtgaaagccgtttaccttttcttttcccctgcaaagttcgcagcatttgtaagatcttagccatgaaagccgtccgcaacaatcgcctgggttctgccctctcttggagcatccgtgctaaggatgccgcctttgccacgctcgtgtcagacaggtgggtgccgctagtgttggcttcccaggga

SEQ ID NO: 671778 - DNA, 1062 bp, Homo sapiens
ggtatgtagccacaaggaggagctaaattctattgataaatgaggctggtacaggaacctcattttttaaaggcatttacagtttcactgtaaaacttcacatttggataattttgttttagtagatagatgacaggcttgtttggttttaaaagaaatagtaaaaagtatctattgtgctrtactctcagttattagaatgtatttcctgtctttaagccctccttacccaccactaaaacgggattatctgctatagtagttacaaatattaaacaaggagttatttgtttggatccgtgaccttgaggcattttaaaatcttcaggttgaatttgcaattcattttacttcattttgaagaatttggaattgattcgttttagaattattctcccaatatttgttagatagcaggattgtgataaattaaaacatcttagcaggcctcctgcctccccagcttttttttatttttttatttttcgagacggagttttgccctgtctcccagactggagtgcagtggcgtgatctcagctcactgcaacctctgcttcctgggttcaagcgattctcctgcctcagcttcccgagtagctgggattacaggcgcccaccatgatgcctggctaattttgtttttattttatttgtttatgttgtttttattttattttctgtattgacggagtcagtacaaaattagctgggcatgatggcgcatgcctgtaatcccagctacttgggaggctgaggcaggagaattgcttgacccgggaggcagaggttgcagtgagccaagattgcgccattgcactccaccctgggcaacaacagcgaaactccatcgcaagaaaaaatagaaaaacacaaatgtagtcatacaataagctgctttgctccttggggtgtacttttttttttttttaactgccccttacagagcatggctaacttatatagtcagtgcaccgagttggctgctgcttagttttaaaattgtgtttttagcctaacactgtatctactgtatcttaaagatattttcatttctgtaca

SEQ ID NO: 671779 - DNA, 1062 bp, Homo sapiens
ggtatgtagccacaaggaggagctaaattctattgataaatgaggctggtacaggaacctcattttttaaaggcatttacagtttcactgtaaaacttcacatttggataattttgttttagtagatagatgacaggcttgtttggttttaaaagaaatagtaaaaagtatctattgtgctgtactctcagttattagaatgtatttcctgtctttaagccctccttacccaccactaaaacgggattatctgctatagtagttacaaatattaaacaaggagttatttgtttggatccgtgaccttgaggcattttaaaatcttcaggttgaatttgcaattcattttacttcattttgaagaatttggaattgattcgttttagaattattctcccaatatttgttagatagcaggattgtgataaattaaaacatcttagcaggcctcctgcctccccagcttttttttatttttttatttttcgagacggagttttgcyctgtctcccagactggagtgcagtggcgtgatctcagctcactgcaacctctgcttcctgggttcaagcgattctcctgcctcagcttcccgagtagctgggattacaggcgcccaccatgatgcctggctaattttgtttttattttatttgtttatgttgtttttattttattttctgtattgacggagtcagtacaaaattagctgggcatgatggcgcatgcctgtaatcccagctacttgggaggctgaggcaggagaattgcttgacccgggaggcagaggttgcagtgagccaagattgcgccattgcactccaccctgggcaacaacagcgaaactccatcgcaagaaaaaatagaaaaacacaaatgtagtcatacaataagctgctttgctccttggggtgtacttttttttttttttaactgccccttacagagcatggctaacttatatagtcagtgcaccgagttggctgctgcttagttttaaaattgtgtttttagcctaacactgtatctactgtatcttaaagatattttcatttctgtaca

SEQ ID NO: 671780 - DNA, 658 bp, Homo sapiens
tactctgtcactatgaaaaccaaagacaatagggctctccctttcccccaactttctagaagtccttttgagaacctctggtttagattccctgggagtaaatgaaagaaccaaaggccactgatttttaataagtactcttctctaaaagcttttgacactaaattcaccatcttaccagtagartctgaatattttgtgttttaacccaccagtccctttagcaaaactattttgaagcctataaggtgacgaatattaaactaaaagggaaatattcttacactttcctgaaactgggcctaacatctatttagtaaaaaacactaaatgccagtaaattggacaaagtgacttcagtggttaagtagttttccttccttatttacttttatctatgactgtctcctgagttcctttagcttttttatagtgcaaatacttttcatttaagatcgtgctcactaaaaacgcacatacataattctgaaagtttataaaactggaccttcaatacaaaacgcaaaataatcagaagagcagacaggaaggacaaaatagaggccttaaaacaatactaaaagggagggcttaaaaccatagcaataatgcaggaattgatcaaactcaaagttaatccatgagaagtcagagagga

SEQ ID NO: 671781 - DNA, 436 bp, Homo sapiens
aaaggtcacttcattttccattgctggataaggagagataaagaaatttaaactacagatggttcccaacttaygatggttctactcaaccatttttcaactttatgatggtgcaaaagtcatatgcatgtagaaactatactcaagtacctatacacccattctatttttcactttcagtacagtattaataaatcacatgaaataatcaacactttattataaaataggtttatctgagatgattttgcttaactgtaggctaatgtaagcattctgagcatgtttaagttaggttaggctaaggtatgatgtttagtaggttaggtgtattaaatgtatttttatttatggtattttcaacttatgatgggtttattgagacaatcccatgtaaattgaggagcatctgtagttgatttggttgcccattaat

SEQ ID NO: 671782 - DNA, 625 bp, Homo sapiens
tctccttgaaaagaaaaaatggggtgtatttgcagtaggtttattgatrgtcgaataggaagaaacagcatttgagaagtgtggagaaaagatcttcctgattactacagagacctcctaaagtggggccagactgcttgaacagaaagtttggaagcaattgtgtgaggtgtgctgcatttgttttactaattcgacttgatttttgtaaatacacctgttcatttgggtttgaggatttaattgcataaagactctttatttagctaaagcgtcttgtcctcatggcttttcccagaagtttgtgttataaatgttaatatattaaaagtgcttttaaatgatttattattagcatcttaaaaaaatcctacactaaatattaaagtagtctttattatttcaggtgaaggcaaagggaaacagtacgagttgcaaggtagggggtaaatggaaaggaagaaaaaggaaagacaggagatgaagggaaagattgagtcccatcattcttgaagacacattgttcatggcttcaataaccctggcacagccctctgaagaaagtgtagttatcctcttctttctgcaaggaggcagagatgctgtgaacctctcttgaagttac

SEQ ID NO: 671783 - DNA, 583 bp, Homo sapiens
agcatggattcatatgtttgggtagtaatagtataaataattttgttttctcatgtataattttctgttctttgcatttgttttatgagtgtatattatataatcagaaagcaaccataactacaaactaatttctctggcaataaaacatattaatggaaagtagtgtttcaatagaaatgaaataatattctctaaagtgtaatgtttttttgtgaatattatttatatygtttcacttttatttgcaaaattgagtctcacaatatgacactgatcgtaatgctctttaagcacttgaccagtatgctatttccagactaagcatttcagaattggagaagcaatatcctctttgacataagaagctgctacatttgaatgtttaattatctacttctatctcatatgcagggaaatacttttaactctgtaaagtttttatgttggaaattctcccatttgccttgccattgccattgcaggcataccatctatccagctgttacaaggctttcttatgaaagttttttttttaatagaatgcatctattgctttgtttttcttcttgaacactgaaat

SEQ ID NO: 671784 - DNA, 664 bp, Homo sapiens
tttttttttggkgggggagtcttgctctgttgcccaggttggagtgcagtggcatgatcttggctcactgcgacctctacctcccaggttcaaacaattctcctacctcagcctcccgagtagctgggattgcaggcttgcctcaccatgcctggctatttttgtgtttttagtagagatggagtttcatcacattggccaggctggtctcgaactcctgacgtcagctgatccatccaccttagcttcccaatgtgctgggattacaggcgtgagccactgctcccggcctgacccatgcttttcctcggactcaatttaccctctggaaaatgggactaataacagtctaccctgttatatttttctgcagataacaagagaaaatagatgtacactttaaaacacaaaattgtaaactataaaacactttataaatgagagttaattatttcctgtctgttcatatacagaatgtcagagaaaatataaacactttaggtagggcaagcataacctgtgggagaaaaagtgtcaaaatgctaatccccaaattgaaatttttagaactgtgtatttgcatatagcttaaaatctcttcaaaaatagctggaatgcatttagttactttaaaaaatcccacattgggttgttattaatttat

SEQ ID NO: 671785 - DNA, 664 bp, Homo sapiens
tttttttttgggggkggagtcttgctctgttgcccaggttggagtgcagtggcatgatcttggctcactgcgacctctacctcccaggttcaaacaattctcctacctcagcctcccgagtagctgggattgcaggcttgcctcaccatgcctggctatttttgtgtttttagtagagatggagtttcatcacattggccaggctggtctcgaactcctgacgtcagctgatccatccaccttagcttcccaatgtgctgggattacaggcgtgagccactgctcccggcctgacccatgcttttcctcggactcaatttaccctctggaaaatgggactaataacagtctaccctgttatatttttctgcagataacaagagaaaatagatgtacactttaaaacacaaaattgtaaactataaaacactttataaatgagagttaattatttcctgtctgttcatatacagaatgtcagagaaaatataaacactttaggtagggcaagcataacctgtgggagaaaaagtgtcaaaatgctaatccccaaattgaaatttttagaactgtgtatttgcatatagcttaaaatctcttcaaaaatagctggaatgcatttagttactttaaaaaatcccacattgggttgttattaatttat

SEQ ID NO: 671786 - DNA, 1701 bp, Homo sapiens
  misc_feature 1586, 1587, 1588, 1589, 1590, 1591, 1592, 1593, 1594, 1595,1596, 1597, 1598, 1599, 1600, 1601, 1602, 1603, 1604, 1605,1606, 1607, 1608, 1609, 1610, 1611, 1612, 1613, 1614, 1615,1616, 1617, 1618, 1619, 1620, 1621, 1622, 1623, 1624: n = A,T,C or G
  misc_feature 1625, 1626, 1627, 1628, 1629, 1630, 1631, 1632, 1633, 1634,1635, 1636, 1637, 1638, 1639, 1640, 1641, 1642, 1643, 1644,1645, 1646, 1647, 1648, 1649, 1650, 1651, 1652, 1653, 1654,1655, 1656, 1657, 1658, 1659, 1660, 1661, 1662, 1663: n = A,T,C or G
  misc_feature 1664, 1665, 1666, 1667, 1668, 1669, 1670, 1671, 1672, 1673,1674, 1675, 1676, 1677, 1678, 1679, 1680, 1681, 1682, 1683,1684, 1685: n = A,T,C or G
ctttttagatgcataaatcacttaatataaacaatttgaataataaagtttaataggctagctgaaaaatcaaacaaattaagtgatatgaagtacttggcaggacacaaggaatgttagcttttattattggtcaggtaatttttattagttttcacataggttttcccaatgtcctcctaaatgccattctggcctacagacttttatctataccaatttattccatatgtttttagagaggaataattattttccactcctgaaattgtgcttacagtcttctttcacttatcttactcttgctcagtgtatgtaggtggtatgacatctcgttggtaaatgagcagataggtctattttgctggactcagatcaacctctcttttggaacaagttgacaactagcctacctagattaagtgttctgaaactggctgggtatatggtgctacttctgaagttcaattagcaggtccattaggttcttacactgagctctaatttggagctgtcagtaataatgatcctattccaatcagtatctaccactccattgttttgtttctcgaaagttgagaaaatcagtttcctcttctgaggaactcacttasagaaactcatatataggagtagcattttcactaccaaatgacaatgagcattaccaatgcccattctcatcttgccattcaaaaaaaaaaataaaggctttgtttaagtcattcacttaacaaatatgagctaaagaggaggatcgagtggctgctgaggtgacagcatctaaataatgttctggtgcatgttggaagagagatgatgtataaccacttggctggcctaatgttcatcctcacaaatccttcaacctagggctgacaatcttatagagtctgtataatgctgaactttgtcacatgagacaaatcacagagatgtggagcctttcttttgtacttcttgcatttaggttgtaaaactcccgtcaaatttatcacatagttccctgtattataattgttagagttttcaatgtagctatacaacaagagagaggcttcttgataagcaatactgtatttcaaatagctatactaagaactattacaccaagaggaatgtcaataaatatttgatgaatgaactaatgtatagcagtagaaacagcattatccttttaatcaaacagacatgagcttaatatcagcttcatccctcactgagcagttttctttcttatatataaaattggagtaataatacagaactgacctgagaattacataaaatagtatatattaacacacaaatcacagtacctggtggataacagatagtcactgcatgttaatatgtttacatattgcctaaatactggttgaatacctataatttgtgagactattctctgtcatgcaaagcacaggagtctgttgcttttcattaccatttctgaattgcccagagttaaaacttgggggacctactttgatattgacattatattttctctctaaagtctactttgtaccagttaatatcacaacaaatttcacactttgaactattggtttatcaaagaattnnnnnnnnnnnnnnnnnnnnnnnnnnnnnnnnnnnnnnnnnnnnnnnnnnnnnnnnnnnnnnnnnnnnnnnnnnnnnnnnnnnnnnnnnnnnnnnnnnnngctctttgtagttctc

SEQ ID NO: 671787 - DNA, 3092 bp, Homo sapiens
  misc_feature 900, 913, 914, 915, 916, 917, 918, 919, 920, 921, 922, 923,924, 925, 926, 927, 928, 929, 930, 931, 932, 933, 934, 935,936, 937, 938, 939, 940, 941, 942, 943, 944, 945, 946, 947,948, 949, 950, 951, 952, 953, 954, 955, 956, 957, 958: n = A,T,C or G
  misc_feature 959, 960, 961, 962, 963, 964, 965, 966, 967, 968, 969, 970,971, 972, 973, 974, 975, 976, 977, 978, 979, 980, 981, 982,983, 984, 985, 986, 987, 988, 989, 990, 991, 992, 993, 994,995, 996, 997, 998, 999, 1000, 1001, 1002, 1003, 1004: n = A,T,C or G
  misc_feature 1005, 1006, 1007, 1008, 1009, 1010, 1011, 1012, 2526, 2527,2528, 2529, 2530, 2531, 2532, 2533, 2534, 2535, 2536, 2537,2538, 2539, 2540, 2541, 2542, 2543, 2544, 2545, 2546, 2547,2548, 2549, 2550, 2551, 2552, 2553, 2554, 2555, 2556: n = A,T,C or G
  misc_feature 2557, 2558, 2559, 2560, 2561, 2562, 2563, 2564, 2565, 2566,2567, 2568, 2569, 2570, 2571, 2572, 2573, 2574, 2575, 2576,2577, 2578, 2579, 2580, 2581, 2582, 2583, 2584, 2585, 2586,2587, 2588, 2589, 2590, 2591, 2592, 2593, 2594, 2595: n = A,T,C or G
  misc_feature 2596, 2597, 2598, 2599, 2600, 2601, 2602, 2603, 2604, 2605,2606, 2607, 2608, 2609, 2610, 2611, 2612, 2613, 2614, 2615,2616, 2617, 2618, 2619, 2620, 2621, 2622, 2623, 2624, 2625: n = A,T,C or G
aagggcaatcaatatgaaactgagttctactgtaattgcattctgaaggaaacttcattgggctggaaagtttgcttcactaaaagaagttcaaacttcttctttatgcctaaaaacatttaattagattaagacataagataaaaatatgtagtagtgaccaatttgaggacattaggggagcaataaagggactcagggagctatagaaccaaatacctttgagtatataaccacatattctgcatggcaactttcaacccaaaccaactgttgtcttaccactaatggaagatgggttccagtgcttgggttctagtgagaaatatccccttggatatgtacaaaattttaaagagagagagagagagagakaaatatttttgaccaaatgatggataggagaaaggagaatgcatctgatctcaacacttgaaaaaattttcttagagaacaatcttgctgtgaaagaattacttttttctaagatcccagtgtgttagagtgaatgatatttatgtagtaatagcaacaaaacattacttttggattttcaatttaaaaaatcaggctgggtgcagtggctcatgtctgtaatctcagcactttgggaggctgaggcaggtggatcacctgaagtcaggagttcaagaccagccaggccaacatggtgaaaccatgtctctaccaaaaatacaaaaattagccaggcatggtggtgcatgcctatagtcccagctactcgggggctgaggcaggagaattgcttggatccgggaggcagaggctgcagtgagcagaaatcacgccattgcactccatccagtctgggtgatggagcgagagattccatctcaaaaaaaattaataaataaaaataaataaaaaataagtgttganatcctaaaaggcnnnnnnnnnnnnnnnnnnnnnnnnnnnnnnnnnnnnnnnnnnnnnnnnnnnnnnnnnnnnnnnnnnnnnnnnnnnnnnnnnnnnnnnnnnnnnnnnnnnnaaacaatctcaaaaattgaatagaatgagctccacatctttcaaaaaagagactcagagaggtaaaatagtatatgatatcatgcatgcccatgattttgattactaaatgaaagccagcaattaaaacagagccagggcttcagtcaaaacctcttctctaggtttcacaaacatctatccatgtccttcgtgaatatctccattatgaagatccaaaggaacccatgtttcgcctgaatcatctttctatgtgatcatatttttttgtaaaatactttattagcccctgacaacattctctgcaagtttttcttacatatattttctcttctcaatctccacttacttaaccttggtttactcccacttactcctgtattacatgggttaatttagtaacttcttagtagtctctcttcatccaaaactgtttccattcagtccatcccatgcattgcaccaagaatgatcttgtgccttcactcctcaaaaataaagccattttttagcgtgatttttcattattttgtcctacctctcaatatatccagacccttttcttgtctctgggcttgtgtatctttcgacttactagaagtttttttaaaatatgccatggccattcacatacccatgcttccaaaaatgctcctctgtctttctcacaacattgctcacctaggaaacccacatttatccttaatctcatatcctagacattatctatttttggaattctgtagtagaccttttggtgttctgcattatcccctccaagctcattcacgattttaaacatggttgtggtagacaattccttgtgagttgaggttttcctccagatagcagtgttcccactcaaacatctttctattttctgagtcaggacattttacggtgtcatacaaggctgcttcttgttctgagtgtgcacagactaagaaaaaagaaaaattaacactggacaacccttaactaacagggcttaggaactagtgggtaactctacagcttcctgtgctttagaaggaaagttctggtagatatcgagggggcctttatggaatgaagtttccattgcccagagcacagcattaataacaaacaagtgtattgactctctcgacttttcttgactcatttttctacctcatcacttctgcctcctggaattatctaacacactacatatatttcagtcctaatgccagtttctgctttgggagaaagacaaaagatgaaaggatcatttttataaccctcacccttaacatatttttaattcctctctactatgcactctctatatgttcatgtgcataagcttgtattagtcttttacattatttttattattgtttgcatttcctttttcttactagattgtaagcttattgagagggaagtttctgaattttatgcatcattcattctatttcaagccctttatcctaatatatagcacataatgagttctcattaaatatttgtgcaattaaaactagttatgannnnnnnnnnnnnnnnnnnnnnnnnnnnnnnnnnnnnnnnnnnnnnnnnnnnnnnnnnnnnnnnnnnnnnnnnnnnnnnnnnnnnnnnnnnnnnnnnnnngctccttgtaggtcactatgagaatattattctgccaatttcgtcttcttatgctattgaactcttactcatagtataagtctgaggtgaacggttccatttgtcaaagggaatcgcactgttgctacacaataggtgcaagaaagatttttttggagcccaggttatttatgtgaggacatttagaactttaacattattaactgatgccctagtaaatcacctcagtgattatcctggattatatttgctatttaaatcttttgggtagtaatctgctcatgagtatttctttattaaaacatctataaaaattgaacaattataaattctgaatagaattacatacaaaatcttatgtgaacaagcaggaaaggaaagaaaagaagtaaggttttaatctgagctttaaaatacaaaaaaaaagtgtttacaaggtaaaaaacaaagtgtatgacaataaaaaa

SEQ ID NO: 671788 - DNA, 1053 bp, Homo sapiens
  misc_feature 442: n = A,T,C or G
gccagagcttttcgttgccatgtcaatagaaatggatttaaatcccaggagattctcaaatcacaagcaatctctttactttttttttttttttttttttggccctgggatttttgatgaatactggggttttgagggaagctggggtgtttaactgtgaaggtggagaatctcctaaaatctcatgaatcgtacaagatagacaaaagggcctaaagtaaacacagagggcattttgccctcaaaacatttgtaactaaaagtgagttaaataaataagctgccaccagctcaacaaaggtcaatgtttttgttggattgagatgatcagcttctattgtgtgtaagtgatagtagaaaggatgtgtagcctctatggggaaataaaagggacctcaggtctggcctttttatacacaatatccggcacataacaacaatnccaataataattataataataagaacatatagagaaataataaaaatgacttaaatcaagataaatcatttcaaacaaaataaatcacaaagaattaacctttggaatatataaataatgcctacatataaataaaacaaattatctgaagagaaaaatggacaattgtcaaaaaaggaatggcaattgtcagaaaaagagttccacaacatatatgtggaaaaaatgttcaatatcattagagaagtgaaaaaacgtagttttatatccagtaattgttatgggttaaatagtttaaattgttacaattttaaaaatacaagcattagcaagaatgtgaatcagtccaaacccttactttctgctgtaatgtcaacaggtacaactactttggaaaattktttggcatcacctagcaaatgtggcaatgttcatatccaataacccagcaataaaactcgacaaagtttgaatatgtgccccaggagacatgtataagaatattcaaaatggtattgtttttcttagcaaggaattgttaacatccaagtggttatcaatagaagaatggattaataaattgtagtacaatcaattactgagcagtattg

SEQ ID NO: 671789 - DNA, 728 bp, Homo sapiens
gggattacaggcacgcgccaccacacccagctaatttttgtatttttaatagagatggggtttcaccatgttgacaaggctagtctggaactcctgacctcaggtgatcctaccgcctcagcctcctaaagtgctggaattataggtgtgagccactgtgccgggccctgtgagactcaacaggaaaagaatgaactagatcttaattaaccagcataaatgggtttcaaaaagataagaatgagggagcaaaagcaagttacaggataagatgcgtggagggtttcctttcatgtccattttrtttttaaatattgtttattttgagacagagtttcgctctttcacccaggctggagtgcagtggcacaatctcggctcactgcaacctctgccaccccctcctccaccaccaggttcaagcgattctcctgcctcagcctcccgcgtagctgcgattataggcgactgccaccatgcccagctaatttttgtatttttagtagagaagggttttcaccgtgttggccaggctggtctcgaactcctgacctcaggtgatccacttgccttgacttcccaaagtgctgggattacagatgtgagcccaccatgcccagccttaaatgtgtttttgagacagggtctcgctctgtcacctaggctgatatgcagtggtgtgatcacagctcactgcaggcttgacttcctgggctcaactgatcctc

SEQ ID NO: 671790 - DNA, 1014 bp, Homo sapiens
tggggtgcctccttccctgatggctctttcctagccaggagggatgagttcctcttctgggccccaaggacagtccctaatggcctaggccaggttgtttggggccagtggggagatgtccggggtcggtccccctcactagagtcgagcagggactggctgtcgtcttcattatcccacaaggcctgggccacaccctgcacacagcaggcatcaataccacgcttgggccacactctgcacacagcaggcatcaataccacgcttgggccacaccctgcacacagcaggcatcaatamcacgcttgggccacaccctgcacacagcagacatcaataccacgcttgggccacaccctgcacacagcaggcatcaataccacgcgtgggccacaccctgcacacagcagacatcaataccacgcttgggccacaccctgcacacagcaggcatcaataccacgcgtgggccacaccctgcacacagcagacatcaataccacgcttgggccacaccctgcacacagcagacatcaataccacgcttgggccacactctgcacacagcaggcatcaataccatgcactgacacgaggactggctgaatatgcaaaggtgggctggagcctgaggagccgtcgctcgagacctagtagcaggctggaggccactcggccccgtggcatcaccttcggtccttgggcaagaccaaccccatgctggggctcccagctctggccaggaatcccagtccccatccagtccccggtcatgcccagaaaccagaggagccacaacccctggggaatgtgggtgtgagggcagcctggcggcaccagagacaggacagggggcctcgggaatggaggaggagagaggggctctcaccaagccttcctggctccctgcctcacagccatctcccccaacaactggggtcctctgtccccccaagctgccctgtggcccagccctaactttgtgccttgcccaagagatcttgtcctgggcaa

SEQ ID NO: 671791 - DNA, 1014 bp, Homo sapiens
tggggtgcctccttccctgatggctctttcctagccaggagggatgagttcctcttctgggccccaaggacagtccctaatggcctaggccaggttgtttggggccagtggggagatgtccggggtcggtccccctcactagagtcgagcagggactggctgtcgtcttcattatcccacaaggcctgggccacaccctgcacacagcaggcatcaataccacgcttgggccacactctgcacacagcaggcatcaataccacgcttgggccacaccctgcacacagcaggcatcaataccacgcttgggccacaccctgcacacagcagacatcaataccacgcttgggccacaccctgcacacagcaggcatcaataccacgcgtgggccacaccctgcacacagcagacatcaataccacgcttgggccacaccctgcacacagcaggcatcaataccacgcgtgggccacaccctgcacacagcagacatcaataccacgcttgggccacaccctgcacacagcagacatcaataccacgcttgggccacactctgcacacagcaggcatcaataccatgcactgacacgaggactggctgaatatgcaaaggtgggctggagccygaggagccgtcgctcgagacctagtagcaggctggaggccactcggccccgtggcatcaccttcggtccttgggcaagaccaaccccatgctggggctcccagctctggccaggaatcccagtccccatccagtccccggtcatgcccagaaaccagaggagccacaacccctggggaatgtgggtgtgagggcagcctggcggcaccagagacaggacagggggcctcgggaatggaggaggagagaggggctctcaccaagccttcctggctccctgcctcacagccatctcccccaacaactggggtcctctgtccccccaagctgccctgtggcccagccctaactttgtgccttgcccaagagatcttgtcctgggcaa

SEQ ID NO: 671792 - DNA, 655 bp, Homo sapiens
cattttagaatttcattttaatgcctaaatatcagccttagaattaatatrgagtaatacaaaagcatatatggtgcatgcaagagccagctacagataaaagctcagtatctccagcacttgctcagacctcttctgcttgggcaatttttattattttattttaatgcttattcttcctttattcttctcacgtacctgcctcaagttctccttgatttgacattttatttagaatgtttaatgaagtctagtctcccatccttttgatttttaattttattctaaggggaaattgaataaatttattctattttattatattagacagaaactaatggaaacccatgcagtaaaggagaaatatactcctactcccagcatctcagatgaaagtatataaatgtagatttttcagctcaagataataggtaaatgagtggaacatttaagtcctttagctactcaacatttataaacacacttctctacagtaagtcctcacttaacatcgttgataagttcttggaaactgccagtctaaatgaaatgtcatataatgagacatattatatggcatttcatataatatgaaattacaacttcatattctctcaaatattctatgacatatttctggccttaacacccacta

SEQ ID NO: 671793 - DNA, 596 bp, Homo sapiens
caaagcttggaatcttcacttttgtaaaatgcccaaagcaatttacccatctactctgccttctctgttctttcttcaacttgaaagagaattaaacgtcagatttacagctcagattcaggttactttatgtcaaattctctatctacgtagacaaattcagccaggtcttgctatgctggagcagctttcactgtgggaggaggtggtggaagtattatggaagttactacttatcactgggtgctgagaagcagcatgctccgccattctcgattaccaaacttgtagtcagaagaactttgcctgagcccctggtctgctgctccctgcttagtgatccagaacaggacctattaatttctcagtctccaaaagaaaaatcttgccccttgaatagtgctgacctaaagttaatactcagtaagcattcatgaaatgaataaatgttacagaaagtgacatcagtaattatgttctaygtatttgtgctgtcgtcccttaaaactgtggatataagtccacagtctatatcaagtcaaacttagttaagttagcctgcaccatttagccaggaatgtatgtgctcctgttac

SEQ ID NO: 671794 - DNA, 1210 bp, Homo sapiens
cacatacaattccacacgccttgatcagcagcagtgctttgaggcatagttacaatcatggattattttttttcattacctttacatatttaaaagtagagaaggaaggaaatggttgcttttttaaaagtagtcattatttttaatttttttttcctcctgttggtgtcagaatggcctgggcgcataaaatttatttcctttgggggaactataaatttattcttcttctctttttggagaataaaatggtagtgacatcttacaattatcccatgcgaatataaatcttctctatatactccctattacttagcatgaaaatgaaaagggagtcaagtatagtttaataagttctaccaatgaactgtattgtagacagaagtatttcttattggtgccaagttggaaaagttagtcttgacgtggtcctgtaaatgaaaggaaaatcaacacatacatttcaggatcatgagtgatcagtgtcactagaaaagtgttcttctttcactttaagattaaataaatagttgttgacataaatagccggggtaataaaagggaacacctgtgtaatccagccatcagcagttttatcgtacaatcagataagctgctgtttgttaaggaattgtcaagtctttagaccagatgaatagatttagctcatacgttagagaattttaaaaactgaacagaagaagctttaatttcccttgatgccaaatgttctaaccactctcatctcctttcacacacgagaagctgtaggagtttaaagctcaattgacctagccttcaggtatgtcttcttccattagttattgctgtaccaaagtagctaaatgttctagatgagattagggtttgaaattttatatggcaaaataagtacctcatcatttttggataaacatggggtattttttttctaatacagctcatcttttctctccctttaattctcatgtccactttcatttgatgtcaaatgagagagaactttggttgtcatttaagagcctcttgatcaaaacagttatcttaagaagcattgattgtgtgtgtgtgtgtgtgtgtgtgtgtgtgtgtgygtgtgtgttgtgatgggtaggggagagggagagagagactttttagttggcttgtcccaccacaataagaattatatttttggattctcttaataagatgtgaaatttaaaatttg

SEQ ID NO: 671795 - DNA, 1210 bp, Homo sapiens
cacatacaattccacacgccttgatcagcagcagtgctttgaggcatagttacaatcatggattattttttttcattacctttacatatttaaaagtagagaaggaaggaaatggttgcttttttaaaagtagtcattatttttaatttttttttcctcctgttggtgtcagaatggcctgggcgcataaaatttatttcctttgggggaactataaatttattcttcttctctttttggagaataaaatggtagtgacatcttacaattatcccatgcgaatataaatcttctctatatactccctattacttagcatgaaaatgaaaagggagtcaagtatagtttaataagttctaccaatgaactgtattgtagacagaagtatttcttattggtgccaagttggaaaagttagtcttgacgtggtcctgtaaatgaaaggaaaatcaacacatacatttcaggatcatgagtgatcagtgtcactagaaaagtgttcttctttcactttaagattaaataaatagttgttgacataaatagccggggtaataaaagggaacacctgtgtaatccagccatcagcagttttatcgtacaatcagataagctgctgtttgttaaggaattgtcaagtctttagaccagatgaatagatttagctcatacgttagagaattttaaaaactgaacagaagaagctttaatttcccttgatgccaaatgttctaaccactctcatctcctttcacacacgagaagctgtaggagtttaaagctcaattgacctagccttcaggtatgtcttcttccattagttattgctgtaccaaagtagctaaatgttctagatgagattagggtttgaaattttatatggcaaaataagtacctcatcatttttggataaacatggggtattttttttctaatacagctcatcttttctctccctttaattctcatgtccactttcatttgatgtcaaatgagagagaactttggttgtcatttaagagcctcttgatcaaaacagttatcttaagaagcattgattgtgtgtgtgtgtgtgtgtgtgtgtgtgtgtgtgcgtgtgtgttgtgatgggtaggggagagggagagagagactttttagttrgcttgtcccaccacaataagaattatatttttggattctcttaataagatgtgaaatttaaaatttg

SEQ ID NO: 671796 - DNA, 621 bp, Homo sapiens
ggaaggaaggagccagcttgggatggggcagaaatgaggaggggttctcttcttcccatcctcacccagctcagtgttataaccaggcagacgtcaggccctcagggtacaaatcatctctccatagctggctcaaaaatagtttccactagctctggaatgcactgtggcttccttggcttccctcagcacagctccatcccctccgggagtccattctggctcacagaaggctgaagagggaggactgggctcagcgcctgagacaggagggccgtccccttctctcttctcacggccctgtcccccacccccatgcccacggtcagygtctcctgcacatacactcacctcctctcatcgtctcatctcagttctgccttagtgtccccccccccgtgtttccccactttcctcacatcccccagggaaccctcccctctccccggcagtgtcccctcctcctccctcttcccctctcctccgaaaaggtggccatgtaaacaggaagtggctcaaagacatagagggagtgtggctggaagcctttacacatgggaggtaatttccctatcatcacccaaagtcagatttcatgtgtgttctagccagctctgtgtg

SEQ ID NO: 671797 - DNA, 657 bp, Homo sapiens
agcctcagggaatgtttctgctctgcctttcttcttgttatgggaggaagcccaagggttcttggaggagcctgtgtgagtttagtggcatgtcttgtctacatgtcaggttgcagacctttcaaattctgacaccaggagacaaatccatctgcactctggtccatctaatgcctggtgaggagtctgctccaagccagaggtttctgggtgataaaacagtattcctggcctcccagagctcctcacactcccatggtcagagctcaatgccccaacattgtcctagttccccacatcacgccctggtcatcacccagggcggggatctcaaccctcctgcacgttcaactctccagggagctttcaagagaaactcccagtacctgggcccaaccacacctccggggactgggcttcctgggcaattctgatgcatgtcgagggctgagatccactgtcccggagaatctcgggctccagcccccttctccctctcagatagagcccatctgccaggtcccccgkggcctgctgcccacttacccacgaatcagtctacactaggctctggcacaggctctagggtgatggctcctcccagggaacccttgttctttaacaggggcctcctctagaaaatggatgagcagccaa

SEQ ID NO: 671798 - DNA, 633 bp, Homo sapiens
aatctcctgacaacttttgatattttgtcttccagaaatcaaatcctaaataatatcttcctgatctcaagctttgagatttcctgggggattcctggaaaattacaaaggctctttcatcttgttaaaagagaggggctagaataatatatcaaattattgwaatgttatgagttacataggaagtattgtcaaatcagaagaaatgcctgacctttcctagtttaaatttgtatgaataaaatgttactaatataaatatttgacaaattgtatgaagttatttgagatttgtcaatgttcatgctgtctatgatatatcgtgctatagttttgcctgatataagacaacagtgtagtgttattggtcaacttcactttttttttatgttgtatgccacagaagcaaccaaatttccatgtcaattggaatatttttgttgaactcattatatcattaaccatggctattttctctttgccattcacaggtagttttgtttcactctaatgcttcccttaacgtgcttagccagagtactttggttataaaccggagtactttgtcttcaacaagaagggactgtctcagagacccaggaaaaggtctatgccaggcagtatggggcacag

SEQ ID NO: 671799 - DNA, 606 bp, Homo sapiens
aaacgtaataaaaataatttaaccaaactgagtcgaattccgttatatcagccataccaacaaaaccaaattgagcagacccatctattaaataaaaattattgtcagagtggctcataagacaaaacccatgtttatgctgaaatcaagggatataacttttgttcccttgttttgtttgtttgtttgtttgyttgtttttgagacgcagtctcgttctatcgcccaggctggagtgcagtggcgggatctcgactcactgcctcctgggttcaggcaattctcctgcctcagcctcccgagtagctgggactacaggcatgtgtcaccacacctggctaattttttgtattttttagtagagacggggtttcaccatgttagctaggatggtcttgatccctgacctcgtgatccacccgcctcagcctcccaaagtgctgggatgacaggagtaagacaccgtgcccggccaagggatataactttcaaaaagtaattcaaaaagtctaatataaagtgataagaaaaagtatgtctggagactacaaacaataaaaaactagtgattgcaatcttgatattaaataaggagaattcaggcaa

SEQ ID NO: 671800 - DNA, 1061 bp, Homo sapiens
  misc_feature 960, 961, 962, 963, 964, 965, 966, 967, 968, 969, 970, 971,972, 973, 974, 975, 976, 977, 978, 979, 980, 981, 982, 983,984, 985, 986, 987, 988, 989, 990, 991, 992, 993, 994, 995,996, 997, 998, 999, 1000, 1001, 1002, 1003, 1004, 1005: n = A,T,C or G
  misc_feature 1006, 1007, 1008, 1009, 1010, 1011, 1012, 1013, 1014, 1015,1016, 1017, 1018, 1019, 1020, 1021, 1022, 1023, 1024, 1025,1026, 1027, 1028, 1029, 1030, 1031, 1032, 1033, 1034, 1035,1036, 1037, 1038, 1039, 1040, 1041, 1042, 1043, 1044: n = A,T,C or G
  misc_feature 1045, 1046, 1047, 1048, 1049, 1050, 1051, 1052, 1053, 1054,1055, 1056, 1057, 1058, 1059: n = A,T,C or G
gaatgatataattaggaacatcattattttaaagcccccatggaaagatcatcaaagaatgctaaatccatgtgcttaaatgttgttggggaagagcatatttgtctagagctaaattaaatcacccctccaaataattgctaattacatatggggagatttggaaacaacaccttaatgaagtgaccaactttagctttactaagagtggggacaacctgactctacattcctcatgatgtgatgaaatatgatacacgtaactgcacctagggcaagtccttgccaaaaaatatttaatctgagtctaataaagcctttggacctcactttcagttttcaggcaatatagtgaatagaaaaacatgttaaatgaaattataattcrctagtcagataatcaagaatatgggacattttaaaagaaatgttttagatgttccaacgtcacttccaagagggggaaaaatactgggagaccattctggatttaaagaaactaaaagaggataataatcaatcatacactttgattgctttctgtttgattttaatgacattttagaaaatatgttagatgatgtttgggaattaatcttatatttcctagctgtgataatagtctaggggttgtttgtaagagtgtcctttttcttagaggctgagttttctatggtcaggtgtcattaagtctggagcttattttcaaatgagatagcccaaaatgtgtgtgttagtgtgtgtgtctgtgtgtgtgtgtacacacatgcatatatatgagtccatattaaaattacatttttatattcatttcccattttctctagagcaaatgtgagcaaaatatgaatgatgtttgaatctatgtggatgatatagaggtggctattgttttagtctttcaactattcagctaaaaatttgaaatgtgataaattgaagtgaaatgtactatttacnnnnnnnnnnnnnnnnnnnnnnnnnnnnnnnnnnnnnnnnnnnnnnnnnnnnnnnnnnnnnnnnnnnnnnnnnnnnnnnnnnnnnnnnnnnnnnnnnnnnaa

SEQ ID NO: 671801 - DNA, 1888 bp, Homo sapiens
tggagagtttatttgataataataaccatggttcctatatataaaagtgtgctcaattattcatatgtcctgtcttattatgacattcccacaaaaactgcaaggtagttgcagttttctaaatcatattttttactaatcagggaagtgatgctcagagatgttaagtacgcttccccaagaccctaaaggtgataagtgatgtagtctcaactaaaactttggtttgtgtgattagtgcatgttctttccactctatcagtagtcagcaagctacaacatacaagacaattccagcccaccacctgttttgataaatgaagttttattgggacacagccacactagttattgtttatgactaccttcacacttcaacagcagaattgagacatagatttttttttcttttttttagacagggtatcactctgccacccaggctggagtgcagtggctcgatctcagctcactgcaacctctgcagtgagctgtatggctcaagccatcctcctacctcagcctcctgggtagctggcaatacacatgcatgctaccatacccggctaatttttgcgttgtttgtagacacagggtttcaccatgtggcccaggctggtctcaaacccctgggctcaagtgatccaccagcctcgggctctcaaagtgctgggattaaagacctgagccacggcacctggccaagacatagatctcatggcttaaaatacgtgctatctgattccttacccaaaattttgccaatccctggactatactattgtgtcttcacatggtcattttttatcttaaattctgtgtgtaagttcaactctcaattagaactcagaatgtaaccaataaaaaatttatagaatgtgctatgtgttaaatgccatgagagacattgaaaatgatttcaatgaacagttaaaaggtaactaagtcaaagaaacttgtgcttgcagaacttggaaatctgaggacaaacggaaagatattgataaactgcatgtcactgattcagtattccaaattccatctaaaaaggtataattcacacttcataaaatatttaaaattaactcatcaattttttcctcttgtaacaccctatttcaatgactttctgaaaatatgttttaaggtagaaaaaaagtaatttaattgaagatttgtgggaagattaagtcaacataagaaaagtctaaataatgaggcagtggcacatgcctataatcctggctactcaggaggctgaggtgggggcatgacttgagcccaggaattcaaggatgcagtgagctatgatagcatcactgcagtccagcctgggcgacagagcaaggccctgactctaaaaactgaaaataaaaaactgaaaaaaaaatgtgttgtgaactttgatgagatgcattcatataaatcatcccaagtataaaatttcccccactgatctatgttgaagagatagtgtagctttctttcactttgcagacatagacggagcacatgtttcagctaggcaactcaatgtggtcatcctccacctgactgttcatcctgtgactcttactgctatagttgccaccagagaatgtgaaaaagctcagaggagaaagaagagaggaagaatgggcaatgtgtctgtgttgagtgtgtgtgtctatgcctgtggatgagartgtgtgtctattcttttccaaggaattcaaagtggtttgtaaaataacactcaattgaatacagttcaagttacagaaaagagagtcagagtttgggtgtataccccaaggtggaactttaggaacaagtaggtaataagcatcaatttctttattcttttagtatgtgtgtcatttgatggatgaactatacaaatgtttct

SEQ ID NO: 671802 - DNA, 1888 bp, Homo sapiens
tggagagtttatttgataataataaccatggttcctatatataaaagtgtgctcaattattcatatgtcctgtcttattatgacattcccacaaaaactgcaaggtagttgcagttttctaaatcatattttttactaatcagggaagtgatgctcagagatgttaagtacgcttccccaagaccctaaaggtgataagtgatgtagtctcaactaaaactttggtttgtgtgattagtgcatgttctttccactctatcagtagtcagcaagctacaacatacaagacaattccagcccaccacctgttttgataaatgaagttttattgggacacagccacactagttattgtttatgactaccttcacacttcaacagcagaattgagacatagatttttttttcttttttttagacagggtatcactctgccacccaggctggagtgcagtggctcgatctcagctcactgcaacctctgcagtgagctgtatggctcaagccatcctcctacctcagcctcctgggtagctggcaatacacatgcatgctaccatacccggctaatttttgcgttgtttgtagacacagggtttcaccatgtggcccaggctggtctcaaacccctgggctcaagtgatccaccagcctcgggctctcaaagtgctgggattaaagacctgagccacggcacctggccaagacatagatctcatggcttaaaatacgtgctatctgattccttacccaaaattttgccaatccctggactatactattgtgtcttcacatggtcattttttatcttaaattctgtgtgtaagttcaactctcaattagaactcagaatgtaaccaataaaaaatttatagaatgtgctatgtgttaaatgccatgagagacattgaaaatgatttcaatgaacagttaaaaggtaactaagtcaaagaaacttgtgcttgcagaacttggaaatctgaggacaaacggaaagatattgataaactgcatgtcactgattcagtattccaaattccatctaaaaaggtataattcacacttcataaaatatttaaaattaactcatcaattttttcctcttgtaacaccctatttcaatgactttctgaaaatatgttttaaggtagaaaaaaagtaatttaattgaagatttgtgggaagattaagtcaacataagaaaagtctaaataatgaggcagtggcacatgcctataatcctggctactcaggaggctgaggtgggggcatgacttgagcccaggaattcaaggatgcagtgagctatgatagcatcactgcagtccagcctgggcgacagagcaaggccctgactctaaaaactgaaaataaaaaactgaaaaaaaaatgtgttgtgaactttgatgagatgcattcatataaatcatcccaagtataaaatttcccccactgatctatgttgaagagatagtgtagctttctttcactttgcagacatagacggagcacatgtttcagctaggcaactcaatgtggtcatcctccacctgactgttcatcctgtgactcttactgctatagttgccaccagagaatgtgaaaaagctcagaggagaaagaagagaggaagaatgggcaatgtgtctgtgttgagtgtgtgtgtctatgcctgtggatgagagtgtgtgtctattcttttccaaggaattcaaagtggtttgtaaaataacactcaattgaatacagttcaagttacagaaaagagagtcagagtttgggtgtataccccaaggtggaactttaggaacaagtaggtaataagcatcaatttctttattcttttagtatgkgtgtcatttgatggatgaactatacaaatgtttct

SEQ ID NO: 671803 - DNA, 2492 bp, Homo sapiens
gaataagctgtagtcaactgtacattggcattaagaataaattttcatcgttgctctatcactttctcactttctattaaaagttatagtgaacagtaaatgactgtgtattttaaaaataattcaaagtttttaaaaaataagtagtttaatttttgaaaaagtcttgctgtgtgatcagtcggtgatttttttctttttacaatagccacatgagagtcatctttttcttctcagtctagttccagaattataattctcaattttcatttattctattatatttttatgtaaaaatagggtaatcatcaacaaaagggtctcttttaggtatggaattaataacaagaagatattttcttaagttcatttaaagttgttaaaacaaaaactttagacaaaatatatttaacagagtttacttgagcaaagaacaattcacgaattgagcagcactcagaaccaaaggaagtttagagagctccactctgaaacatggagaatatttatagacagaacacagaagtaaagtacagaatagcttgactggttacagtgaggcatttgccttatttggacatcatctgatcagctggttgcctataattggctgaagctcagctgcttgtgattggctgagatctggctatctctaacaaaaaatatactccttatccaggttttggtttgtttgcatgctaggttaggatgcagtttattaagtggaaactcaaaagtacagaggcagtctcaggccaaatttaatttaacaaagttaatatgaccctggtattgttctaagaactttgatatgttaaatcattgaatcctaaaaacaacattgtaatataggtagttttattatccccattgtacaagtgacagaattgaaggacaaataagtgaaaataaaaataaatttaaaaaggtgcccagggttagtcatctaatacgtgaaaactctggaatgagaacacaggcaatctagcttcagaatctgtactttcaatcattacttattgaatctgtactctactgccctactactggtaataaacattccctttgtttatatttaatttatacattaatcacaatatttaaataagtaataacttttctgctattttgaaagtgcatttagtggcttgcataactaggctctcttttcataattagccttacrggttatctgaaagacatggaatataattttattctactgagacattatttccttctcctattgaaactaaatatatgcatatggcagggttgcttttacttcctacaaagacactgatgaacatttctggcctcaaggaataacacaatcaccaaccacacatatatttaaacagaaacataaaatttgacatacattaaccaaaggtttttgatataattccagacattttcatacttaaaaacttgtataaagtcttagaaatataaggttaattattttcattatctgaaagagcataaacagaggaatgcccaattctcttatcaacagtcattccaatgggtttcctgaagaatgtattattcaagcaatataagtcgaaatcagaacacaaagatatcattagctggaataatatctggaactataattttcatatgcactctgaaccagaagcttaagtggagtctttacttcccactaaaacccacatataattcttgggatattattaaaagcctctgattggccacatctaataaagacatcaagggagagagaaagagagtcgatccactgaccaggctatcacaagactaagccactttggctgaccggctacttaggtgagataaaaaaagaactataggcattatctgcactgatatcttaatccacatagacactggaataggcaacataagtgatattgtcgatgactgtaatccctttggaatcagagagcagagggagagcaatcaagtaggcagtgctagtggcagatagagacactatctcctataggaaaatgtcttaatacaaagctgtcaaggaaaacaattatcatcattcctctagcttcaccttttttttccattagcccctaggctcagttggctatcacagcaaaagtatctcaattttactcttattcaaggctttatcaatataaataaggctatgttaatgtcaccttttttttttcagcataatgctaataatgagttcctgactcaaccctgaggatctaccaaaattttcctcctttgttcaccagctgatggtgagtttgatataagactcaagaagtagtaatgattaaggaaaggacatgtggccaaggtggtctttgaggtaaagattaaaacaactcaatgtgtagaagtttgggaagtttcatttccaagagcagctcttggtaagaagggcttattgaaaagtgaagagaaaacagaaaccagaggagaaaagggttaggtttattgaaaaggttgttttcctccaattatttcaaatttttatg

SEQ ID NO: 671804 - DNA, 640 bp, Homo sapiens
gcatccaaattagaaaagagaaagtcaaattgtctctgttcgcagacaacacgatctaatatacagaaaaccccaaagactccagccctgcccaaaatgaaactaatacatttagtaaagttgtaggatacaaaatcaacatacaaaaattagtagcatttctatatgccaatatagagttacctgaaaaagaaatcacaaagcaatcccttttacaataagtacaaaaaaacactagaaataaatttaaccaaagaggcgaaagatctttacatcaagaactagaaaacatttatcaaatgaattgaagaagacacacaaaaaatggaaagatatcccctgctcatgggttgaaatggacattgttaaaatatccatactaaccaaarcaatctataaattcaatgcattccccatcaaaataccaatgatatttttcacacaaacagaaaacaaaaatcctaaaatctgtgtggaaccacaaaagaccctgaataattaaagcaatcttgagcaaaaagaacaaaatcaaaatattttctaaattaaaatgaagacatttaaaacatataatattaacagcaattgctgtataattgctgatgtaatattacattaacaaagaccagtatgggaatta

SEQ ID NO: 671805 - DNA, 608 bp, Homo sapiens
aaatgttgtaattctctgaggctcaattttagactttgttcttttccttcatacttacttccatatgtaagccaagtgcttctaaatgtgcttctctagcctagaactttgttttaagcatcaggtccatttattgagaaacttattcaaaggaacctcaagttcaacaagtcccaaactaaatttgagatttagcctcccatatagtcatcttaagtatttcctaacttaggaaacagcacaatcacttaccactctcactgttatttgygtttacttctacatttacttctacatttaccttctacatttacttaatattatgcccatgctgtgactttatatttgtttatttatttgctagtaacatctttctgtctcctagggagaagtccataaattcagtgagggtggaggccatgtatattttactcactgttctcaggaagtccgttacaaaagcaatgctgaatggatatctaataagagtgcatgaatagatgagatgaaaactgtaaacatttcatcacatgggataggatataacttctaacatcctgaaacttatcactctcttataaataagttctagatctcattctcatcaa

SEQ ID NO: 671806 - DNA, 1287 bp, Homo sapiens
cagggagagcaagatgacttgcccaagggcacagattaatatgaaacgggactgtgactactaaggtcttctgaccccttgtttcattgtatttttttttttctgatagaattcattaaagccagacaattagtttctgatttcaagtcttatgaatgctaattcacagataacttgggccactccattttgaaagttttaaattctccattaacaaactcagagagcattagaatttagatgcaaactctcaggtgcaaaatgttcagaaagaaactaaagtaaaatatcacatactagaaatggaactggttacatgaaaaattcatttggggcaatatgcgcatacaaaaatattsattgtagcatggtttgaaactgtaaatgcagtagaaatacctaaatgtccattagtggggaaaccaaataaaatacgatgtatccatcataaggaaatatagaataatttacatctgaaagtatggaggaagaagatatccataatgtatttttcatacatgtaagtagtttgtcatctatgtagcatatatcctcaggtatatgatatacagtacatatcgtaaatatacatagtatatgtatcatattatgcatattacaatacacaggctattttgctacatattacacatctatatctaaatatttttatataaatatatataatggattcatatttacatgtatacctagctctggaaaaacatgtataaaattaatggtagttacacctgggtagtgggattataggagtatgtgagtgaaggcagataacttttagtttgttttctacaattctccattgtttgaggttgttgcagtcagaaagtgccacctttaatatattagaaaaaaaatatgaagggtattatgagctgactatagagacaggtttaagaaatgtttgagtatactctttgaaaatagagccaaaatcaattattagggaaatagtactgtctgaaaagttgctgtagttctttctcgcctgacttttctcttttcattgttggaatgtggaaatggaagctggataaggtatctaagaccataagatgtaagctacaatttgtggaaagccgtaaaatcaataagagagcaagcctgagactggatgtcatggagttaccatataagcgatgcttagattattacggaagtaaaaaatattctttcatcatgtttaagctagtactattttggccttttacagcagctaaacctgtatccaaattaatgcagcatcctattccacatgacatttca

SEQ ID NO: 671807 - DNA, 649 bp, Homo sapiens
ttctggagcaagattcctgtgcaatctttaggcagctccgtatgtcaggcatgaggccccagtgggtcaggggttcctcccatagccaagatcgtaaaaacccattttggagctctggggatttctctctcactgtttccccaaggccagaaacctctcagctctcagtcagctctcagctgagcaagctgcctcgaaccctctcctcaattacttctggcacttatcatctcttctccgatgaattcaagtgttcccttatagacagttattctgaaggctgagaagtctaaaactaaggtgctggcagatctggtgtctgatgacagcctgcatcctggtttgcagayggctatcttcttgtatcctaacatgattaagaacagagagaatggccttctcttattatctttgaaattcagctaagaccctgaagccaaagagacccactaggtacatttctgcagaattttattttaaaatgcccaagctcatccttaaaataccaaacttcaaaacgaaacacagaaaataacaagtgttggtgaggatgtggagaaaatgccaaaagacaggcaataataaataaataaaaataaataaataaaacttcattaattaccttcagccaatttaagagaaggctata

SEQ ID NO: 671808 - DNA, 620 bp, Homo sapiens
tatccaccaaaatctatttttctattcttctacagtaataaagttgtaactgggctgttgctatccaataaggagctacatttcccggcctccccttgcagcttggattctaagttgttgccagtgaaatgtgagtagatgtgatatctgcatttgctggctttgcttgtatgccttttgagtcagaacttagatatgccttttcctatcttcaagtatgcagatgaggacaacactgtgaaggattgtagacaagtgatatggaaagaagttggatctctggatggactggggaacagagttgcccattgatttagagcattgacttctgctatattatattctttaagacattagattattgttggatctttttattttttatttgagacaagatctcacttcatcacctagactggagtggagtggtgcagtcatggctcactgcatcctccacactttgggctcaggtgatcctctcacttcagccttccaagtagctgggactacagacacaaaccaccatgtccagctaattaaaaaawttttttttttgcagagacagcgtctccctacgtcacccaggctgggtctttttgttatagtaaacttatcttgcc

SEQ ID NO: 671809 - DNA, 2114 bp, Homo sapiens
tagtaagactttggaaaagatcagccactgtgaaaagtacatcaaccatcagcttgagcacagggttcaagaatatcctgcagctcaaacccagctgagtgatgtaaggagccagcaaggaagtggtggagtaattgaaaggaccagacttctgtctgaggctacagaagacagaacatgtaaaactagaaatggaagaaaagtgcagcagcatgactgatggtgattctttggttaagaggtggtgattctttggttaagattaaacagagcttaacaaaactgaagcaagaaactgttcagatggacattagaattggtgttgtggaacacacattactctaatcaaaactggagaaacccagtgtgactaaggacatacacgtgaccattatyccagaatcagcaatagattcatattaaaacagggttttttcatgcttctgattagtcgttctttatttcaaattacatctcatgttgcatagatttaaaaacataattatacctcttaaggcatgttcaatgggtatttttatacatacacacatatctatcaggtgattatggtggttaaagcctttacattgaatataatgcttaataaaataattacattttttaaaaaaagaaggattgaggagatttatagggtagatgggcatggtagctcacatctgtaatcccaacacttgagaggccaaggtgaaaggatcccttgagtccaggagtttgagactagcctgagcaacatagcaagaccttgtctctgtaaataaataaatagctaggcactgtggcgtgcacctgtagtgtgagtgctacactacagctactcgggaggccaaggcagaaggatcactagagactaggagttcgagactaccctgggcaacatagggagaccctgtctctaaaaaaaaaaaaaaaattccatgcctggtggtgtgtgcctgcagtcatagcaactcaggaagttgaggcaggaggatcacttgagcccaggagttttagattacagtgagctatatcacatcactgcactccaggctgggcaacaaagtgagaccttgtctctaaagatgtgaaaataaaaatacaatttaaaaataaataaataagtaaataatttcaaaaagagagagatttataggacacaagaggagaaaccacttctctggaggcagttggaaactaacatgagcaaatatgagattcacagtggctgtcatgagagtccttgacaactacctgccatggtgtttcaggctgagctcttgagttttgaacttcctgatctttgttttttcaggtcttccaacagttgaataagctcataattattataataaactttgtatcttaattacatggagtaacttctgttttcctggatgattactgattgatataatatagaaaatgtatttgataaaattcaatatccgatccttaatcaaaaaataaaacccataataaactaaaaatagatatttaaaaatatgataatatatcattaggttctatcatgtttaatgataaaacattacaggcattccagcaaaagtcagaaatagtacatgatgcatgctaataccattattatttgctgacgtatttctgtaaactttagtccacgaacatcagggtgtaattacaggataggagaacaaaatattcattattgtcagatgtgattttcttttactctataaaacccaaatgaattaaaatcagtagaaacttatgaatttttcttcatgccaacaaaaacaaagtccagttatgaaatgtggcggggaaaatttacaatagtaatatatatgcacatacatatgtgtgtgcatacctatttatatcatgatcaaacttaacaaatccatagaaagtgcatgaagtaatcaataaaacttttcttagagagacaagttttgaataaatggaaagacacattacattcttggatgttgaagattaggtattatgaaggtatcaagggccttcagattaattttcaccaaactagtcaattacactggttgtttcaattttttaataaacagcaccattcaaattttcactccctcaagtatagcataaaaagtttatggtgt

SEQ ID NO: 671810 - DNA, 2114 bp, Homo sapiens
tagtaagactttggaaaagatcagccactgtgaaaagtacatcaaccatcagcttgagcacagggttcaagaatatcctgcagctcaaacccagctgagtgatgtaaggagccagcaaggaagtggtggagtaattgaaaggaccagacttctgtctgaggctacagaagacagaacatgtaaaactagaaatggaagaaaagtgcagcagcatgactgatggtgattctttggttaagaggtggtgattctttggttaagattaaacagagcttaacaaaactgaagcaagaaactgttcagatggacattagaattggtgttgtggaacacacattactctaatcaaaactggagaaacccagtgtgactaaggacatacacgtgaccattattccagaatcagcaatagattcatattaaaacagggttttttcatgcttctgattagtcgttctttatttcaaattacatctcatgttgcatagatttaaaaacataattatacctcttaaggcatgttcaatgggtatttttatacatacacacatatctatcaggtgattatggtggttaaagcctttacattgaatataatgcttaataaaataattacattttttaaaaaaagaaggattgaggagatttatagggtagatgggcatggtagctcacatctgtaatcccaacacttgagaggccaaggtgaaaggatcccttgagtccaggagtttgagactagcctgagcaacatagcaagaccttgtctctgtaaataaataaatagctaggcactgtggcgtgcacctgtagtgtgagtgctacactacagctactcgggaggccaaggcagaaggatcactagagactaggagttcgagactaccctgggcaacatagggagaccctgtctctaaaaaaaaaaaaaaaattccatgcctggtggtgtgtgcctgcagtcatagcaactcaggaagttgaggcaggaggatcacttgagcccaggagttttagattacagtgagctatatcacatcactgcactccaggctgggcaacaaagtgagaccttgtctctaaagatgtgaaaataaaaatacaatttaaaaataaataaataagtaaataatttcaaaaagagagagatttataggacacaagaggagaaaccacttctctggaggcagttggaaactaacatgarcaaatatgagattcacagtggctgtcatgagagtccttgacaactacctgccatggtgtttcaggctgagctcttgagttttgaacttcctgatctttgttttttcaggtcttccaacagttgaataagctcataattattataataaactttgtatcttaattacatggagtaacttctgttttcctggatgattactgattgatataatatagaaaatgtatttgataaaattcaatatccgatccttaatcaaaaaataaaacccataataaactaaaaatagatatttaaaaatatgataatatatcattaggttctatcatgtttaatgataaaacattacaggcattccagcaaaagtcagaaatagtacatgatgcatgctaataccattattatttgctgacgtatttctgtaaactttagtccacgaacatcagggtgtaattacaggataggagaacaaaatattcattattgtcagatgtgattttcttttactctataaaacccaaatgaattaaaatcagtagaaacttatgaatttttcttcatgccaacaaaaacaaagtccagttatgaaatgtggcggggaaaatttacaatagtaatatatatgcacatacatatgtgtgtgcatacctatttatatcatgatcaaacttaacaaatccatagaaagtgcatgaagtaatcaataaaacttttcttagagagacaagttttgaataaatggaaagacacattacattcttggatgttgaagattaggtattatgaaggtatcaagggccttcagattaattttcaccaaactagtcaattacactggttgtttcaattttttaataaacagcaccattcaaattttcactccctcaagtatagcataaaaagtttatggtgt

SEQ ID NO: 671811 - DNA, 586 bp, Homo sapiens
taggtctgaataccatagtttgtctatcagttgttctttcaagtaaaagctgtgttccacgtaaagaaaaaaacataaccaaaacagcgagttcaacaggtaactggaacgatggcctctgcttttcccacaacagtgatcacgtgactccgatgtggagaaatgcttcmtccagttcccacttcatggtgcagaatattaaaaagacaagcctgcacggattgaggctaaatagttaataatgagcctcactgcttgattctggacactgttaggtgaaaacggcttttctttttcctgcaggtgggtggtggtgcagaagaccacagctgtttgtgtggttggcactcagcttgtttcaggttagggattgagtagtttcacccactattgcctttatacaccagcaataggatatctacacagttaaaaaaaaaaaaaggcttagcattatgataaaaatagttttccctctgtgggccccctgaaggggcctcgggaccccagcagtgtggatagcaggcgcggggacctggcaagagggtttggtaaaccttctgttgcagcctgggtgtgaagtgaaggg

SEQ ID NO: 671812 - DNA, 1190 bp, Homo sapiens
tcgaggtgcccggcccaccccccaggccaagcgactatcctcctgggaggcgctggactgacaccctggctcacatccttcctccamttctccctctgttttaaatcccaaagctttcctgcacctttacactgcattttatgctttattaccttctcagcccctttttcctgaaggcagagaactgtgcttctggaagaatcctcccttcctaacacgaagaccccctgggcatcagcagaccagggctagagacgtcactaggtggccgtctcaaatcagggataggagcttcaggctccgtgttatgggaggggctctggttgcgactgtcccatgtggatcatgaaggatgttgacccgagacaatgctggacatggtgaggaacatgtgggcacatcaggaaacgctgcggcccccccccatcacacaccggagcctctgtgggacccctggtcggtgcatcccggcactccgctcccacctgctctctgtggcttgagaggagacggagatctgaagaccaaggctctttcccaaatgccccaaatctaaaggcaaaagtgtgcaggctggtggttgtggatgcgtgaaaacccgacaatgggatggctacatctggaattcattcttcactctccttcccacccttctttccattgtcctggaatagacgcgacctaagtggattcaaatctatactaggatttaacattctccatggatcagaagtgatggtttgttggaggagacctgatggggttaggagctgcacattaaagatgttttgtgtctggagactgacccgctgtcagcaaactttggaaggtcactgtgagtgggggacaggtgagacagagaggatggaagcttcaccagtgcagaagggtctccgtaggggattggctctgccatggcacctgacacccttgcaggaacccacatcggccacaggtcaggcttgccgttgcctggctggtcatagcaagtggcgtgtgacccttggacattgtgggaggagtagcctcctgcttttaatgagggtgggagtctccacctcaccccgcaggagacagctgcaggcttccaatctgctgctggagaatggggggacttcccgacagcagagcctatggctgctcatgcagtcatggggtaactgagtacccccctttttctaagaggtggt

SEQ ID NO: 671813 - DNA, 3082 bp, Homo sapiens
  misc_feature 2512, 2513, 2514, 2515, 2516, 2517, 2518, 2519, 2520, 2521,2522, 2523, 2524, 2525, 2526, 2527, 2528, 2529, 2530, 2531,2532, 2533, 2534, 2535, 2536, 2537, 2538, 2539, 2540, 2541,2542, 2543, 2544, 2545, 2546, 2547, 2548, 2549, 2550: n = A,T,C or G
  misc_feature 2551, 2552, 2553, 2554, 2555, 2556, 2557, 2558, 2559, 2560,2561, 2562, 2563, 2564, 2565, 2566, 2567, 2568, 2569, 2570,2571, 2572, 2573, 2574, 2575, 2576, 2577, 2578, 2579, 2580,2581, 2582, 2583, 2584, 2585, 2586, 2587, 2588, 2589: n = A,T,C or G
  misc_feature 2590, 2591, 2592, 2593, 2594, 2595, 2596, 2597, 2598, 2599,2600, 2601, 2602, 2603, 2604, 2605, 2606, 2607, 2608, 2609,2610, 2611: n = A,T,C or G
tactgtttgccaacttctgccacgcaaatactccaattgtggccaatttcaagctaccaatgccctaacaattggctcaaaaaaattccctggaattttaagagtggacccttgccagctgaaagggctggtccagcacaccactgccacggctcctctggcacgtaacagaaagagtgctcaagaaatacttgttcaagtacaaaatgactttccagtaccttgagtagtgctaagaacggtcataaattcctcccatttttcagattttttgaagggataastcaagcaaagtttccccgctgtatcttctgtccttctcccatctttccagttcaggcaataaaatgactaaataccttgttctttaacatctttcaatttcctacaagactgcaaaaatgaaatgactagaatggatatgatagctgaaacgtgacattgaaagcaaagtgtgtcataagtaagtttcgatgtatttagtgccccacacaacaatgaagggttgctgcaatgtaaaaaccaaattttctgctttgtgaaaatggaagaaaaaccctagagtccttccttaggagtaagataattggttttatggatatagcatgcgtaatattcctaactgattaccctggcacagttaaatcagctattggtatccaatagtctaaaaagcatgcaagttgagagaaaaaagagctgcttccagtttagtggttgcaacaggcttcaggagagagataacattgagttggaccgaaaaagatgtgtaaaattttagctatacaatgttgggaacactttaggaatagaggaaacctctaaaaatcataccatttctctgtattttctaaatgtaaattctttcctggacaactataaatgatataataatctacagatttatgtaggtgaagatgtcttagctattaaaggatagatagcttgccccttgacaagggggataagaattaaactgctaaagtcttcatttctctcctttttccagttaacctaagtcttacttttaaagggactaagagttctagaaaggaattccaccatgaaattttcatagcacattcaatttttaaggaaaatagctaacataaatttcccttgaagttaaagtcttttatacttcaaagtgtttggggatgtgatttgataagtctgatttaaaagtttgcttgaagtcttatggagtttattacatgttttgttgagagggcatggttgaaagctgagtgaagatttgagggatttttcagactgtctacgtttcaatagcaaacatcttgagagtttattgtaaacagatgatgatttattacctccattgtctaaaaccagaaagtcggaactcagattccctctcatcacctgcctccaatcaatcaccagtcttgttcatcatacttcattaatatttctcacatctatccactcttctgtaccccatttactgctgagttgaggctaccacctgtcatcttgcagaaacctgtggatgcatctcttctagctgtgcttttccttattggttatgattaattttctgctgcctataaaagtaagtacaaatcacagcaacgtaaaataaagatacatatatttttttcctccagtagaggaggtctgaagctaaagagactcctagggctggtacgccatctccatggacaagaggactgtgtttccgctttgccattctaagcatgtggcttccatcctcaaggctgcctcacgatagcaaaatgggcactgttgctaaggccatcccattcacagcaaggaggaagagaacaggggcagagtatgccttgccatcagtccccctctaagaggtttttccaggagccttatccccacaaattctacttgcagctcacggagccccctatttgcaatggaagccaagaaaaatagtttaattggaaatattgctgttcccaataaatagaggttctattgataaagaagaggaaaggggatattgaggaggcaaccggcagtgcttgaccatgtatcaatatttgggtgacattgcaactcttagtaaaatgaacattgatcacatcagtcacccaagtgaaatcctctcattgctccttgttgttctctaagtttccatacaaggccctgcaggatctgcttctgctttatctcttgacattctacatctcactctctgtgctctacccatggactcaagctcctgcctcctccccaaactcccaggacttgacacaagttatatcctcactccccgctgccctccttggctgtttacttgctaatttagatccagcatagactttgtcagaagtcttctgtgaccactcaaggatgggttaggcatcccatttctgtttctttaccccttgtatgcatttagtacgttctactctatttatcttctactcatctatgtccccgaatagatggtaagctcatggagaaataggaaattgtttcagtcatctttgcatctcctgcacctagcacaggnnnnnnnnnnnnnnnnnnnnnnnnnnnnnnnnnnnnnnnnnnnnnnnnnnnnnnnnnnnnnnnnnnnnnnnnnnnnnnnnnnnnnnnnnnnnnnnnnnnntttggagactgaggcaggtggatcacttgaggtcaggagttcgagaccagcctgccaaacatggtgaaaccccatccctactaaaaatatgaaaattagaagggcatgatggcatgtgcctgtaatcccagctacttgggaggctgaggcaggagggtcacttgaacctgggaggtagaggttgcagtgagccaagatctcaccactgcactctagcctgggtgacagagtgagactccatcacaataaataaatacataataataataaatttattgggaattgttttatggcccagaaaagggtctgtgttggaaaatgttctgtgtgaatttgaaaatattatttgctgggctgttattaggtaactagttctataataaatatgtgaaatataatctctttttctgactttaaaattttagttgaaattattcaagtctgcttgaataagatactcatatgcaaaga

SEQ ID NO: 671814 - DNA, 3082 bp, Homo sapiens
  misc_feature 2512, 2513, 2514, 2515, 2516, 2517, 2518, 2519, 2520, 2521,2522, 2523, 2524, 2525, 2526, 2527, 2528, 2529, 2530, 2531,2532, 2533, 2534, 2535, 2536, 2537, 2538, 2539, 2540, 2541,2542, 2543, 2544, 2545, 2546, 2547, 2548, 2549, 2550: n = A,T,C or G
  misc_feature 2551, 2552, 2553, 2554, 2555, 2556, 2557, 2558, 2559, 2560,2561, 2562, 2563, 2564, 2565, 2566, 2567, 2568, 2569, 2570,2571, 2572, 2573, 2574, 2575, 2576, 2577, 2578, 2579, 2580,2581, 2582, 2583, 2584, 2585, 2586, 2587, 2588, 2589: n = A,T,C or G
  misc_feature 2590, 2591, 2592, 2593, 2594, 2595, 2596, 2597, 2598, 2599,2600, 2601, 2602, 2603, 2604, 2605, 2606, 2607, 2608, 2609,2610, 2611: n = A,T,C or G
tactgtttgccaacttctgccacgcaaatactccaattgtggccaatttcaagctaccaatgccctaacaattggctcaaaaaaattccctggaattttaagagtggacccttgccagctgaaagggctggtccagcacaccactgccacggctcctctggcacgtaacagaaagagtgctcaagaaatacttgttcaagtacaaaatgactttccagtaccttgagtagtgctaagaacggtcataaattcctcccatttttcagattttttgaagggataactcaagcaaagtttccccgctgtatcttctgtccttctcccatctttccagttcaggcaataaaatgactaaataccttgttctttaacatctttcaatttcctacaagactgcaaaaatgaaatgactagaatggatatgatagctgaaacgtgacattgaaagcaaagtgtgtcataagtaagtttcgatgtatttagtgccccacacaacaatgaagggttgctgcaatgtaaaaaccaaattttctgctttgtgaaaatggaagaaaaaccctagagtccttccttaggagtaagataattggttttatggatatagcatgcgtaatattcctaactgattaccctggcacagttaaatcagctattggtatccaatagtctaaaaagcatgcaagttgagagaaaaaagagctgcttccagtttagtggttgcaacaggcttcaggagagagataacattgagttggaccgaaaaagatgtgtaaaattttagctatacaatgttgggaacactttaggaatagaggaaacctctaaaaatcataccatttctctgtattttctaaatgtaaattctttcctggacaactataaatgatataataatctacagatttatgtaggtgaagatgtcttagctattaaaggatagatagcttgccccttgacaagggggataagaattaaactgctaaagtcttcatttctctcctttttccagttaacctaagtcttacttttaaagggactaagagttctagaaaggaattccaccatgaaattttcatagcacattcaatttttaaggaaaatagctracataaatttcccttgaagttaaagtcttttatacttcaaagtgtttggggatgtgatttgataagtctgatttaaaagtttgcttgaagtcttatggagtttattacatgttttgttgagagggcatggttgaaagctgagtgaagatttgagggatttttcagactgtctacgtttcaatagcaaacatcttgagagtttattgtaaacagatgatgatttattacctccattgtctaaaaccagaaagtcggaactcagattccctctcatcacctgcctccaatcaatcaccagtcttgttcatcatacttcattaatatttctcacatctatccactcttctgtaccccatttactgctgagttgaggctaccacctgtcatcttgcagaaacctgtggatgcatctcttctagctgtgcttttccttattggttatgattaattttctgctgcctataaaagtaagtacaaatcacagcaacgtaaaataaagatacatatatttttttcctccagtagaggaggtctgaagctaaagagactcctagggctggtacgccatctccatggacaagaggactgtgtttccgctttgccattctaagcatgtggcttccatcctcaaggctgcctcacgatagcaaaatgggcactgttgctaaggccatcccattcacagcaaggaggaagagaacaggggcagagtatgccttgccatcagtccccctctaagaggtttttccaggagccttatccccacaaattctacttgcagctcacggagccccctatttgcaatggaagccaagaaaaatagtttaattggaaatattgctgttcccaataaatagaggttctattgataaagaagaggaaaggggatattgaggaggcaaccggcagtgcttgaccatgtatcaatatttgggtgacattgcaactcttagtaaaatgaacattgatcacatcagtcacccaagtgaaatcctctcattgctccttgttgttctctaagtttccatacaaggccctgcaggatctgcttctgctttatctcttgacattctacatctcactctctgtgctctacccatggactcaagctcctgcctcctccccaaactcccaggacttgacacaagttatatcctcactccccgctgccctccttggctgtttacttgctaatttagatccagcatagactttgtcagaagtcttctgtgaccactcaaggatgggttaggcatcccatttctgtttctttaccccttgtatgcatttagtacgttctactctatttatcttctactcatctatgtccccgaatagatggtaagctcatggagaaataggaaattgtttcagtcatctttgcatctcctgcacctagcacaggnnnnnnnnnnnnnnnnnnnnnnnnnnnnnnnnnnnnnnnnnnnnnnnnnnnnnnnnnnnnnnnnnnnnnnnnnnnnnnnnnnnnnnnnnnnnnnnnnnnntttggagactgaggcaggtggatcacttgaggtcaggagttcgagaccagcctgccaaacatggtgaaaccccatccctactaaaaatatgaaaattagaagggcatgatggcatgtgcctgtaatcccagctacttgggaggctgaggcaggagggtcacttgaacctgggaggtagaggttgcagtgagccaagatctcaccactgcactctagcctgggtgacagagtgagactccatcacaataaataaatacataataataataaatttattgggaattgttttatggcccagaaaagggtctgtgttggaaaatgttctgtgtgaatttgaaaatattatttgctgggctgttattaggtaactagttctataataaatatgtgaaatataatctctttttctgactttaaaattttagttgaaattattcaagtctgcttgaataagatactcatatgcaaaga

SEQ ID NO: 671815 - DNA, 412 bp, Homo sapiens
aatatttataaaaagcacaccttgaaatatcttgaaataagaagaaaaaaacatattatcaacacaaatcttttattagaacatttcaggcaaactgatgaacaaacattttaagatattacgataagtggctccatatgaattattttctgggatttgtagtacataagacaactctgttggctttgtgacagttaaagaagcaagtttttttctgtaaactgatatttccaggcaaacaaaattccagcactactgcctcctttgtccagaagacaggttaatacccaaaggcaaatgatttaggcattttcatcacmaagatcaatgtttaatttcttcacctaaatagattcctctttacccttttgacctacctacagagtcttgtcattcagcacccctagaatca

SEQ ID NO: 671816 - DNA, 700 bp, Homo sapiens
gttttaagagttctgttcctaaagcaaggatctgtatttatagcagcctgtcagaggagaaaagtgtttctcgaaccaaaaataggtagatggcattacagagtccgaagactgcctggtttcctgctgggaatgaatggtcatgcaacatctgtctcattctttttagacccaccagtggtttagaaatagcacttatattgaagagaagcaaaaggcatattcctgcaggagaaccaggaagcactgggaattagaaaacacgggttgtggtctcagatctatcactgataagtggcgtgacttgagtagaaatgctagactcctctttttattttttttttttttgaggccactatttcctggatttatcttaagatgaaataatatgaaaacaactttaggaaatattaaacactatattcatgcagtgtctgcttgcacagagattacattttagaaatcartagagaaccttagcccaaggggttgaaattgaaagttctgtcttagttataactttatatatgttttaatgatttgcttgggtgaccaggtgactgagccaaacacggcaattgttgtgaactgtcaaaacagctaaaatgatttggttggatggattcagagtttacagagagccctatcagctaggctgtaagctccatgaaggcaccgagcaccattctttaattcacca

SEQ ID NO: 671817 - DNA, 700 bp, Homo sapiens
gttttaagagttctgttcctaaagcaaggatctgtatttatagcagcctgtcagaggagaaaagtgtttctcgaaccaaaaataggtagatggcattacagagtccgaagactgcctggtttcctgctgggaatgaatggtcatgcaacatctgtctcattctttttagacccaccagtggtttagaaatagcacttatattgaagagaagcaaaaggcatattcctgcaggagaaccaggaagcactgggaattagaaaacacgggttgtggtctcagatctatcactgataagtggcgtgacttgagtagaaatgctagactcctctttttattttttttttttttgaggccactatttcctggatttatcttaagatgaaataatatgaaaacaactttaggaaatattaaacactatattcatgcagtgtctgcttgcacagagattacattttagaaatcaatagagaaccttagcccaaggggttgaaattgaaagttctgtcttagttataactttatatatgttttaatgatttgcttgggtgaccaggtgactgagccaaacacggcaattgytgtgaactgtcaaaacagctaaaatgatttggttggatggattcagagtttacagagagccctatcagctaggctgtaagctccatgaaggcaccgagcaccattctttaattcacca

SEQ ID NO: 671818 - DNA, 1029 bp, Homo sapiens
ccaagatttttttggcttaatcataaatgggcttcatttttcttaccataagaagtctgggcacttgtatggtggctctatggcaccatcagcaaccccagattcttccagctttccattctgacatctttaccagaggcttccaatctcgtggatacctcatggtcttaagatggctgcctcacgccctccggatggccacttcatgttccaaacaggaaaaggaagaagggaaacaggaagaggtgggacctatggcagagaagccaacctgctgcagaaatctttcattcatggcttattggtctaacttaaaagagggctgaaataattattagccaaaagtatgaagagaatgagaatgaggtatgcagccagtggtggttggcatggcatggttttatcctttcggtttttttcttttttattgtttttttttgagayggtgtctagctttattacccagactggagtgtagggggcgatcatagctcactgtaacctagaactcctaggcacaagcgatcctcctgcctcagcctcctgagtagctaaggcaacaagtgtatgccaccatgcccagctacattttttatttttcatagagatggggcccactgtgttgtccaggctggtctcaaattcctggccttaaatgatactcccatctcagcctcacaaagtgctgggattacagacatgagccactgtgcctggcctttttctttacctaggcacagttgtcgggaaatgtgtgaagctggcagaagcacccatcactataatatcccagtcttttcccagaagtcctgactcctcctgttgaaaactcctgacctccagggacttctgaatccccaaacacacacacacacacaaacacacacacacacacacacacacacacacaaacacacacacaaacgtttcctaacattttcaaaacagccatactctggcttttctatgcttctccagggagtttgccaaagaaagggaacgggtggagaaccggcgggcttttctgaa

SEQ ID NO: 671819 - DNA, 1088 bp, Homo sapiens
acacagcaaggaagccagtgcagctgaaacagagtgagaggtggggacagctggaggagaggaagacaggaaggtgatggagatcagatcaagcaggggcttataggctgtggtgtggacattggtttttattttgcgcgaggtggggagaatgttggctattgctactgttgcggaggtggggcttgaagtcacaaaccacccagcagcatgttttttggtcggttgagctgtcaccatcagtcagcagagaatgggggtggccgggcagacccttcttcctggtccaagggagaactcatcctccaaatgcrggagcttaactctgtgctcttcctcttcagaagaggtgatcctcgccgaggatgaaactgacggggagcagaggcatccctttgatggtaactgctctaaacccacctcaggggtgggtcccaggggagaagggagaagctgtggtggggagtcgggggagagcaggtgactggttctaaggatcttgcagagggtagacgttcctcttggaggaattttaggacttccatgcagagtttccctattctggcctccacttttttgttttaaccatggacctggttttttctgctttgtgccttggtttttctcatctgcaaaatgggtatgatataaacaataccctagctcacgagattgtttctcagaatgatattcgttatggcaaatagaacacctgggatagtgcctggcatggggtcagcacgtttctgtttgctaaataagtaataattccaccaataatccagtttactgtgaacggctgctgtctcccatgttagaaacttaacgagacagaaccatgactttctttcttttcttttttttttaattgagacagagtctcgctctgtcacccaggctggagtgcagtcacacgatctcacctcactgcaacctctggctcccaggttcaagcaattctctgcctcagcctcatgagaagctgagattacaagcatgagccaccatgcctggctaatttttatattgttgatagagatggggtttcgccatgttggccgggctggtcttgaactccttgcctcaaa

SEQ ID NO: 671820 - DNA, 622 bp, Homo sapiens
ttttttttttgagacggagtctcactctgttgcccaggctggagtgcagtggcgcgatatgggctcactgcaagctccgcctcccgggttcacgccattctcctgcctcagcctcccgagtagctgggactacaggagcccgccagcacgccaagctaatttctttgtatttttttagtasagacaggctttcaccatgttagccaggatggtctccatctcctgacctcgtgatccacccgcctcaactcccaaagtgttgggattacaggggtgagctaccgcgcccggccaagagtacgattctttcactaccacgcccagaaccaagtttcactcccttggcaatgacattaccacactgggaatacataatttacttaataaagccagtaatctacttaattaatacagtaaatgtattaagtaaatttatttaataagtaaatttactttaataaataatattagcttacttaataaggtaaattatgtattctttttttttttttttttttttgagatagtcttgctctgttgcccaggctggagtgcagtggcatgatcttagctcactgtaacctccacctcctgggttcatgtgattctcctgcctcagcct

SEQ ID NO: 671821 - DNA, 593 bp, Homo sapiens
ctctccttgattacaaaagaatttacccatagttttcttctggtgcctttcattttctaggcattttgaaatttttattgggttaaaacagaaagactctgggccgggtgtgatggctcacacttgtaatcccagcactttgagaggccgaggcaggtggatcacgaggtcaagagattgagaccatcctggccaacatggtgaaatcccacctctactaaaaatacaaaaattagctggggcgtggtggcgcgtgcctgtagtcccagctactcaggaggctgaggcaggagaatcacttgaacccaggaggcagaggttgcatcgagccaagatcgtgccactgcactccagcatggtgacagagcaagactccatctcaaagcaaaatcaaaaccaaaaaacaacaataaaaaaaacccagaaagactctgtacatagaactacctacacaacaaattctcttggaagttttatatacttcttaaaagcttaactgaaataaactcaygcaaacctggtcattgcccagcgatccctatatcatcctctcctacacaagccagaagtgggagtaatcctcgacatctccg

SEQ ID NO: 671822 - DNA, 600 bp, Homo sapiens
ttgctaaccaatcagaaggcaggcgctgagacagtaacaaccagccgacagttgcggaggactgccgggactcccacagagctcgacaagtgggatcacagtcatcaccagccactgagaagagtgtcccctacccacagagtgcaagtttagaatccagatttccttttttttttttgttttttttttgtttttttttttgagacagagtctcactctgtcccccaggctggagtgcaatggcacaatctcagctcacgtgcaacctctgcctcctgggttcaagcaattctcgtgtctcagcctcctgagaagctaggattacaggcatgcaccacaacacccgctaatttttttatgtttagtagaggygagatttcactatgttggccaggctggtcttgaactcctgacctcaagtgatcggcccccccttggcatcccaaagtgctgggattataggcatgatgagccaccgcgccccaccagaatccaaattttcaataaaggtctccactaacaaggaagcaaagtcacttaattcagttgatttttaaaaatcatgttttacaatattatttgttcaactactagatgatg

SEQ ID NO: 671823 - DNA, 600 bp, Homo sapiens
ttgctaaccaatcagaaggcaggcgctgagacagtaacaaccagccgacagttgcggaggactgccgggactcccacagagctcgacaagtgggatcacagtcatcaccagccactgagaagagtgtcccctacccacagagtgcaagtttagaatccagatttccttttttttttttgttttttttttgtttttttttttgagacagagtctcactctgtcccccaggctggagtgcaatggcacaatctcagctcacgtgcaacctctgcctcctgggttcaagcaattctcgtgtctcagcctcctgagaagctaggattacaggcatgcaccacaacacccgctaatttttttatgtttagtagaggcgagatttcactatgttggccaggctggtcttgaactcctgacctcaagtgatcggcccccccttggcatcccaaagtgctgggattayaggcatgatgagccaccgcgccccaccagaatccaaattttcaataaaggtctccactaacaaggaagcaaagtcacttaattcagttgatttttaaaaatcatgttttacaatattatttgttcaactactagatgatg

SEQ ID NO: 671824 - DNA, 600 bp, Homo sapiens
ttgctaaccaatcagaaggcaggcgctgagacagtaacaaccagccgacagttgcggaggactgccgggactcccacagagctcgacaagtgggatcacagtcatcaccagccactgagaagagtgtcccctacccacagagtgcaagtttagaatccagatttccttttttttttttgttttttttttgtttttttttttgagacagagtctcactctgtcccccaggctggagtgcaatggcacaatctcagctcacgtgcaacctctgcctcctgggttcaagcaattctcgtgtctcagcctcctgagaagctaggattacaggcatgcaccacaacacccgctaatttttttatgtttagtagaggcgagatttcactatgttggccaggctggtcttgaactcctgacctcaagtgatcggcccccccttggcatcccaaagtgctgggattataggcatgatgagccaccgcgccccaccagaatccaaawtttcaataaaggtctccactaacaaggaagcaaagtcacttaattcagttgatttttaaaaatcatgttttacaatattatttgttcaactactagatgatg

SEQ ID NO: 671825 - DNA, 864 bp, Homo sapiens
aatcatgttcataggaaacatgtcagatttccccccaaaagattctcactatgctctgttctgctctgattataacaatagtgcaaatcacttattcgagagcttagcaaagtctagttaagtggagaaaagaagctgaatttcattttctaaaagatatcccacaacggttttgtgaataatgtttgctttttttgtagcaatccttcacctgattttgggatttaggactggggtagattgaaaaaatggacacagattctctacaacctctcccacccaaaactgttgtctattccctcatcccttgagggaatctgagctaatttgcattaaccctatagactaggaaagaagtaatctgtgccagttctgaacctcaagaggacctttagcttctgcccttgccccaagaaacattcctccaccatgggaacaagcctgactagcttcctggaggataagaattcatacttatgtaaagagagactcttagctattacagttaatgctctagaactatcattaagcccagaaaatattatctaagtcaatatgagaagggccacccatgaaagcctaggacaaattgccgatccatggaatgtgatccaaatgaaatggttggttttgtgccactacattttggagggactttttatatagcaacagatagcagaagaatgatttcctctcctgcacattgaggaagaggatccaaatacccattttccatgaacackatatttttgtaacctctgacatttcatggttaaccccttgcttctttataatattaagcatgtacaaatagatgaaggaagatgcctcaggattggaaagcagagacattttagggatatt

SEQ ID NO: 671826 - DNA, 611 bp, Homo sapiens
tgttcagagaggaagagacccccatgctctttgtgccctgaggattctgtaacagttcttccttaaaacccagaagcaaactctaacatagtgctttgtactaaaacttgtttaatgcatacctaatagctgttcagccagctgatcattcwattgacctaaaatacatgagttccgtctcctacttggattctgaacaagctgaaaaattttttgtcaactctttccaaaggatcgaattctggaaaacgttcttctaatgcaaggtagacaataaaacaacctgaatatgatattataggactgtgatttgctcaaaagattttaaataaagttgtcatgtaagttataaatcaaaggataatctaaagtgaaaacaacttcaaattatttttgcaggataatattaccaaaatactcagtttgtataaatccatatgatttcaattttcataagaaatttggaaatttaatttattctcaattcttatttaatttgttctcaattctaaatgtctgggatagaatcacaaatttctctattaatagtaacaccattctgattaatcaaacatatgtagaaaaacaatttttttacacgtacagacatc

SEQ ID NO: 671827 - DNA, 611 bp, Homo sapiens
tgttcagagaggaagagacccccatgctctttgtgccctgaggattctgtaacagttcttccttaaaacccagaagcaaactctaacatagtgctttgtactaaaacttgtttaatgcatacctaatagctgttcagccagctgatcattctattgacctaaaatacatgagttccgtctcctacttggattctgaacaagctgaaaaattttttgtcaactctttccaaaggatcgaattctggaaaacgttcttctaatgcaaggtagacaataaaacaacctgaatatgatattataggactgtkatttgctcaaaagattttaaataaagttgtcatgtaagttataaatcaaaggataatctaaagtgaaaacaacttcaaattatttttgcaggataatattaccaaaatactcagtttgtataaatccatatgatttcaattttcataagaaatttggaaatttaatttattctcaattcttatttaatttgttctcaattctaaatgtctgggatagaatcacaaatttctctattaatagtaacaccattctgattaatcaaacatatgtagaaaaacaatttttttacacgtacagacatc

SEQ ID NO: 671828 - DNA, 611 bp, Homo sapiens
tgttcagagaggaagagacccccatgctctttgtgccctgaggattctgtaacagttcttccttaaaacccagaagcaaactctaacatagtgctttgtactaaaacttgtttaatgcatacctaatagctgttcagccagctgatcattctattgacctaaaatacatgagttccgtctcctacttggattctgaacaagctgaaaaattttttgtcaactctttccaaaggatcgaattctggaaaacgttcttctaatgcaaggtagacaataaaacaacctgaatatgatattataggactgtgatttgctcaaaagattttaaataaagttgtcatgtaagttataaatcaaaggataatctaaagtgaaaacaacttcaaattatttttgcaggataatattaccaaaatactcagtttgtataaatccatatgatttcaattttcataagaaatttggaaatttaatttattctcaattcttatttaatttgttctcaattctaaatgtctgggatagaatcacaaatttctctattaatagtaacaccattctgattaatcaaacatatgtagaaaaacaatttttytacacgtacagacatc

SEQ ID NO: 671829 - DNA, 644 bp, Homo sapiens
tgaaagataattagaagtatctgtagttagccttcacagaatgggctttggaagctgagctatattcaggatcatcttakatatatatatatatatatatatatatatatatatatatatatatatatataaaactgcagtaaaaatgagacctctgtactcttcttttaaaagatggacataagattaattaagtccaacatagatctgacatctatcaaatttgagccatgcactagaaaaagagatttctttctaaatttaatattaaataaatttataagttctccacttttcaatcagtaaaataacaattgtgtagtcaaattgtattaagggtttctcaactaataaaaatgtactaattcccacaaatggtccttagaatctgttctgagcttttccttttctaccgtattaaaattatccgatcatttcttagattgaggttattaatctggggcacgtgaacagaattcaggaagaataggataagaaatgaaaaaaagtacatcattatttccatccatctgtaactcaaatttagcatttttttcaataggattattggcataaactatggtgatagtggcagtgtgtgtgacagatatttcatattgcattacagtttgacagataaatca

SEQ ID NO: 671830 - DNA, 644 bp, Homo sapiens
tgaaagataattagaagtatctgtagttagccttcacagaatgggctttggaagctgagctatattcaggatcatcttatatatatatatatatatatatatatatatatatatatatatatatatatataaaactgcagtaaaaatgagacctctgtactcttcttttaaaagatggacataagattaattaagtccaacatrgatctgacatctatcaaatttgagccatgcactagaaaaagagatttctttctaaatttaatattaaataaatttataagttctccacttttcaatcagtaaaataacaattgtgtagtcaaattgtattaagggtttctcaactaataaaaatgtactaattcccacaaatggtccttagaatctgttctgagcttttccttttctaccgtattaaaattatccgatcatttcttagattgaggttattaatctggggcacgtgaacagaattcaggaagaataggataagaaatgaaaaaaagtacatcattatttccatccatctgtaactcaaatttagcatttttttcaataggattattggcataaactatggtgatagtggcagtgtgtgtgacagatatttcatattgcattacagtttgacagataaatca

SEQ ID NO: 671831 - DNA, 658 bp, Homo sapiens
ggtgctccttacagcccattttcacttggaaatgagaattatctccagttcattctatttttggatatacttccttatctcttatcaagatatccaacccattagcctgtctctgtttgccacggttattggcccacttggcctctccaggtatatcttaattccactccagattctctttctctgggctctatggatatccttcttcctgtgtctctggctctgggcccttcctgaccctggtggacttttttttttttttttttttttggkctttattactcaccccatgccccttaagaatgccagtaaatgtcatggtacttggcagacactggcctgaaatgacagtggtttgtgtaccctgagatttttgatgctgcagtattggtaatgaaagttcatctttgattgtagttgggaaagtgggacctagaagggtaggtgtggttattcattgctaggatttaagctctttgccttttggctgtcttgtttcttccctccaccacaacaatcattctctctgcccacattctgggggcagaacagggatatccctttgctggtggtcgtggcagctgggaaacaggacctcttagttttccatgcatgtctatatccaggctaagtcaaatgaggatggcaagtgcgtgct

SEQ ID NO: 671832 - DNA, 1797 bp, Homo sapiens
tgagaagtgcccataaggacagataaaatctcatctgtggtcatttgctccatcaccgctgtcgagtgctttgatcccttgagtcaatgctgccagtgctgaagcaactttagccagttactgtgaatgccccaattgcacagttgctggctggctcaggccaccctgaaggtcagtatggagtcacaagatgattgttttcttctggctggtgtacagacctctgagttgagatgtcacagaattgttgtggcctgtcaccttctgtgaagccttccctgggttaccccctctactcccactcccctcccccatcatgtactagctgagtcaatgctcacagggtgctcagtgtgcacctctttatgcagtatctcacatgttgtatagttatgtatttttaggtatctttttcaaccttgttgggatagagaatgtgaatgatgcctgtatcttcagctctagtcatagtacttgtcatcaagtgcaaaatatatatttttggggtggatagatgggtgaatataaataagatggacattagacttacatcaaagttttagagaaatttcattataaaagtattaaacaaatgtgtgttatttttgtattgttatttacagctgataaggttgccagatggctgaattccaagtcgcgggtggtgtggagatgctatttaaaaggctcttttttttttactttttggtatatctaggcaatccatctcttctttttttaagaggaaaaatacatgtgaccaaaactcaagatccatacagacgcatgcatgttggctctcccccaggaatagaagtgtgattttgaggaccattgaagtagaagacccaaagtcaaatagctgactgagaccttcatttagtcagcacattgtatcaagagcctcttatgtgctgggaatagtcctggtggttgctatttggggcagaaaaaattagagaaccagttggagtagatgtcaccaaagaagagcaagacagtgaaaatagctgggggaaaaataggacagagaccccgttttcttaggacattagtatgtctccaaagccagcttggggaactgtgtctgaagtctacaaaacaatccattctcttacttcattaggtattgagcatagcggtttttcacattctaccctacgttgctttgcttttcayagatactactgcgctgtgttttattttattattttggaaagtggcactatttccccctgaactctcctgccagggctgactttcagttgatcactgagccttagcctctgctccttaagaagccctgatgtcgttgccatgtgtcttaggcatcccctcttcttttccctgcctccctgggattggggggagagaggatctgtgcctgggaccatggcctgacctggcccagctcctgcagtggagttgaagacaaagtatgaggctttctgaggacaactgaagctcctcaatgctgtcttattgttctccttttgtggcatgaggattctgactttgggatgtttgatcacagtcctgcctgggcagctgcactgccaagctcgtgtagcaagtgtctgagtcaatcatgcagggcgttaagactcttcataactcttcagtcttctgtcagcagctcctttcctacaagtatcctggaggctgggccaggacaggggatgtgttccagtggccagtctgggtgtggaccagaggctgagcacacacctgccccacaagagaggggaagcttgagccatggctgagacatcaaactaaagccaatggctagactct

SEQ ID NO: 671833 - DNA, 602 bp, Homo sapiens
catgactaaaatatcaacacattctttcttcctacacataactattaatcttaaatgttccaagagaagatgtttaaaaagtaaccctttgcagaactagcccttctctctggagctgtaggcctctcttcttcccagccccctccttttcttttcttttatcttactcgtcaccttgcagtcatgagtattgtagcatgtaggagtggactgctgagagaagggaagaaggatgcattttgcattcacttgtacatcagccttgaagcctggctggyggcaatattgtggacaatagatctttcaaacaaatagacccttgtctgttccttccttctgtaattgttggcagagttctttgttatgtgtctggtttcttgaaactttgaatgaataaactaggacacgggattaatgtaaagaactggcatctttgctgacttattcaacagactgtgtgtacatagaaaagagaaataagcactttcagaagtgttgtctgcacatgcctgggattttacaaaatttaaacaatgtgaaatgcagtaccttgaaaaaagccaggctagtctctggactctgtagtttactttctaaataaa

SEQ ID NO: 671834 - DNA, 901 bp, Homo sapiens
cccagcactttgggaggccacagagggcgaatcacctgaggtcaggattttgagaccagcctgaccaacatggagaaaccccgtctctactaaaaatacaaaattagacagacgtggtggcacatgcctgtaatcccagctacttgggaggctgaggcaggagaatcgcttgaacctgggagacggaggctgcggtcagccgagattgcgccattgcactccagcctgggcaagaagaacgaaactctgtctcaaaaaaaaaaaaraaagaaaaaaagcccaaactaaacatatccttccagtaagagaatcctttattgccagtaatggtaattatttgataaggtgtgtctctacccccttttgaccttcataacttgtaaaaatggtacaagatgattcttttaagaaaagtataaaatcacatgtatggttcagaaataccactctggcaggaatttgaggaggtgacagatattcaagaaaattgaaagagaaactttccattccatgtgagattatctaacttttgattggccagggagaaatgtgtcttattattccaagtgaaagtaaatgtatctgcctgcctagatctcagcctagtattgattggagaaaatactgatctgatgctttatgcttcgagaaagaaagcatattgagtatatgatcttctcacacatatgatcagtcttttcattagatttgttttaccgtgatgtattttgttcctcaatagaatgccatgtatatgattgttactggtactcatagtaaatctaataatatccaccattttcagagcacttactaagtgtcagaacaagtgctttgcatgccatcttatgtatactaagcctatggggtagattttattattgtacccattatgcaccca

SEQ ID NO: 671835 - DNA, 1144 bp, Homo sapiens
attaagagtaacaattaagagatccttttgaagtgcccatgtttaagttttatttgtttggttttgtatttttttctaaatattctttcagatcaaaccaagtctaaactggttactatttgacttaatgaaaggcctgacatgaaggaaggatgtaaataattttgagagaaaatacttttgaaatgttaaaacatttcttttgagcaatgttatttttattataaaggaaatagcactttcacctctgggagtgaataggggcttctcaatttgatacctaaaggatatttcctctcaagacaaacaaacaaaaatgtgcttactggggctgcaccttcagcccagcattggatatgttaattgctgacatacttgaggtctcactaagagaaaaatatcattagactgctggttcccaaaatacattcccttaaatatcagtcctatggagtggtccttgggaataaaaatcagggaacatattcaatggtaaatatatatatatatatatatatatatatatatatatatatatatataatatttatatatatattatatatgtattatgtagctctttattattattattattatttttgagacagagtctggctctgttgcctaggctggagtgtagtggcatgatctcagcttactgcaacctccacctcctgaggttcaagccattctcccgcctcagcctcccgagtatctgggattacaagcacctgccatcacgcctggctaagttttrtatttttagtagaaacagggtttcaccatgttggccaggatggtctcaaattcctgccctcgagtgatctgccttcgacctcccaacatgctgggattataggtgtaagccagggtagctttttaatactgctccctctctcttaggtattcacagtgcatattagcaaattaaatgttctgtgaagtcttgtattaagtacatcttttaatattttatttaagacttcccaaattcacttgaccattcactttgtaatattccttgacagaatacttgttaatatccagctcctgggaacacaatttgggaaatactacactaggaaaaaaaatctaggttggggaaatctaactaaacaagagtgtttatttacattagtaa

SEQ ID NO: 671836 - DNA, 1144 bp, Homo sapiens
attaagagtaacaattaagagatccttttgaagtgcccatgtttaagttttatttgtttggttttgtatttttttctaaatattctttcagatcaaaccaagtctaaactggttactatttgacttaatgaaaggcctgacatgaaggaaggatgtaaataattttgagagaaaatacttttgaaatgttaaaacatttcttttgagcaatgttatttttattataaaggaaatagcactttcacctctgggagtgaataggggcttctcaatttgatacctaaaggatatttcctctcaagacaaacaaacaaaaatgtgcttactggggctgcaccttcagcccagcattggatatgttaattgctgacatacttgaggtctcactaagagaaaaatatcattagactgctggttcccaaaatacattcccttaaatatcagtcctatggagtggtccttgggaataaaaatcagggaacatattcaatggtaaatatatatatatatatatatatatatatatatatatatatatatataatatttatatatatattatatatgtattatgtagctctttattattattattattatttttgagacagagtctggctctgttgcctaggctggagtgtagtggcatgatctcagcttactgcaacctccacctcctgaggttcaagccattctcccgcctcagcctcccgagtatctgggattacaagcacctgccatcacgcctggctaagttttgtatttttagtagaaacagggtttcaccatgttggccaggatggtctcaaattcctgccctcgagtgatctgccttcgacctcccaacatgctgggattataggtgtaagccagggtagctttttaatactgctccctctctcttaggtattcacagtgcatattagcaaattaaatgttctgtgaagtcttgtattaartacatcttttaatattttatttaagacttcccaaattcacttgaccattcactttgtaatattccttgacagaatacttgttaatatccagctcctgggaacacaatttgggaaatactacactaggaaaaaaaatctaggttggggaaatctaactaaacaagagtgtttatttacattagtaa

SEQ ID NO: 671837 - DNA, 489 bp, Homo sapiens
acttctattcgacccaaattataaaataatttataaacctaggcaattctaatcaaaataataatgatttatttaacatttgagaagttaatttatgtatttataagagcaactgacaaggatagacaaactgcaagaaaacaaacaatgatgcttgtggaaaaaaagagaaaaagatactttaagagctacagtaataaaaggtatgtgctgttggttgtgctaataaacagatcaacacaatagaaaagagggctcacataccaattcctaaacacagacttaagattcaattgaaattaccttgcactataatgggtaagggataactagtcactayatcagttagaaatgtttagttgtctactaaaattatacaaattcctacctcctaccatgcacaagtagcagtttccaataaatatatgcttaatgtataaagcacaattaaaaaatacaaataacttacaagggagcctcttaataaaa

SEQ ID NO: 671838 - DNA, 1674 bp, Homo sapiens
tgggaagaaagtcacacactctccaaacaataaataaaatgaaacagacagaaacataggtcaataaagggaagataattctacatgattgcgtgatacagagagttatttaattagaacatgaacttaatataaagagcaattagaagaaataataaaacagcagaaagagataagaagagagattacaaaaagaacaagtagaagaccaaaacaacacgactatgcaattattaaataaattgaaaataccactacaattaaatcacataggaaaagattaagataataaatagcatacacataaaactgacaaaaatgttaatgcatttagtgatatcatccgacataaatgtaattgttgcttatgttagggaatcaagaaatgaaacagatctactcgaagatataatccagagaacttctagggtataatttaaaaaaataatttgcagacataagaaccctctgagttccatagtgaatggagatatgtacacctatagtttttaatgactaaagactaatttctcaaatatatgtactaaaaacaagaaaaaatagaagaygtgtgcctaaggaggagggtatggtagaaatatttcagcttgacttaaaattacttaacaatattaaatgaaagaaaatcaaagaaggcttataaatttctgaagaaacgtatgacttcatattaatatatgtctcttccctgtgctggcttccctgggtggagtgtatgtcatccctcccttgcacaagagggcaagagatgtagtggcaaatctgaacatcaactatacaagggctggcattactactccttccctctttatttagctgaaatgcgggaaggttaccttgcttgagtgagagggcatgtagagtgtcattgaggcataagatacatgagcaaaaagccatctcagctgttccaaccttggcagttggaatcatttcagataaagctctggatattctagaaaagagatcaagtatcctaccagcctctttctgcatttctattccacaaaatggtgagaaaaaataaaaggtttgctattttaagccaagaagtcgtagggtttttaatgcagtcgtagatatttaagacaacgtatgtaatcaaaatatcattttaaaataagagcaacaaatagatatttgcaaatatatccttttaaatgaaggaatgaagtgctaattaataatccttggtaaaattactatccaatcaagattgaattaaagttttttaaaataaaaagagtgttaagagctagttatgagcatttaattcattcaaaaaataatgatgctactgaaaacttacttctggatataaaacagaattatatgaacttgggtaatgtgaaaataatcacataactaagcaaaattgagggcagagaaaattggagaactaggcaattgctaatatcatttcttagtaaagaggcaaaccacagagcttacaagagccatcttaatgcctttgaaaagttcttaaccttagtgaactctgtcagaaagtagtattatttatgtactacacacatttgtttcaatatcaacaattctctcgttttcattttaacttcttatgtaaaaatttagcaaacataaattgagttattatattcaaaatatccatagcataattctatttttagaaat

SEQ ID NO: 671839 - DNA, 1674 bp, Homo sapiens
tgggaagaaagtcacacactctccaaacaataaataaaatgaaacagacagaaacataggtcaataaagggaagataattctacatgattgcgtgatacagagagttatttaattagaacatgaacttaatataaagagcaattagaagaaataataaaacagcagaaagagataagaagagagattacaaaaagaacaagtagaagaccaaaacaacacgactatgcaattattaaataaattgaaaataccactacaattaaatcacataggaaaagattaagataataaatagcatacacataaaactgacaaaaatgttaatgcatttagtgatatcatccgacataaatgtaattgttgcttatgttagggaatcaagaaatgaaacagatctactcgaagatataatccagagaacttctagggtataatttaaaaaaataatttgcagacataagaaccctctgagttccatagtgaatggagatatgtacacctatagtttttaatgactaaagactaatttctcaaatatatgtactaaaaacaagaaaaaatagaagatgtgtgcctaaggaggagggtatggtagaaatatttcagcttgacttaaaattacttaacaatattaaatgaaagaaaatcaaagaaggcttataaatttctgaagaaacgtatgacttcatattaatatatgtctcttccctgtgctggcttccctgggtggagtgtatgtcatccctcccttgcacaagagggcaagagatgtagtggcaaatctgaacatcaactatacaagggctggcattactactccttccctctttatttagctgaaatgcgggaaggttaccttgcttgagtgagagggcatgtagagtgtcattgaggcataagatacatgagcaaaaagccatctcagctgttccaaccttggcagttggaatcatttcagataaagctctggawattctagaaaagagatcaagtatcctaccagcctctttctgcatttctattccacaaaatggtgagaaaaaataaaaggtttgctattttaagccaagaagtcgtagggtttttaatgcagtcgtagatatttaagacaacgtatgtaatcaaaatatcattttaaaataagagcaacaaatagatatttgcaaatatatccttttaaatgaaggaatgaagtgctaattaataatccttggtaaaattactatccaatcaagattgaattaaagttttttaaaataaaaagagtgttaagagctagttatgagcatttaattcattcaaaaaataatgatgctactgaaaacttacttctggatataaaacagaattatatgaacttgggtaatgtgaaaataatcacataactaagcaaaattgagggcagagaaaattggagaactaggcaattgctaatatcatttcttagtaaagaggcaaaccacagagcttacaagagccatcttaatgcctttgaaaagttcttaaccttagtgaactctgtcagaaagtagtattatttatgtactacacacatttgtttcaatatcaacaattctctcgttttcattttaacttcttatgtaaaaatttagcaaacataaattgagttattatattcaaaatatccatagcataattctatttttagaaat

SEQ ID NO: 671840 - DNA, 598 bp, Homo sapiens
catttaaataatactgctattaataaaaatacctaattttttgagtgtttacagtagactctaggcatggtgataagtgctttgcatggctacctcatttgtctgtattcactttttcacttatttacttcttattttcccttgagcctacaataattaggctttgtttcgaagaagtctattaaactactctttatcaaggtccttaatgacttctatcttgccatatsaaatgtttaattgtggcattctcttcattttatatccaggcaacatttattaatattactattttctctcctttgagactctgtattcacttggtttttgggctatcccagacccctagttttccttcacctggttttcaacagctggttttctgtgtaattgacaacttaacttttcttttctcaattgaaaaaaacagagtatctgaaaatgaatcttggcttcttttatctacttacattcactatctagaaggtcatctaatatcagctttaaataatatttacacgttgttatatctcacttttatatctgtagctctaaccacgcccctgctttatatttctgtattcaactgcctaatata

SEQ ID NO: 671841 - DNA, 598 bp, Homo sapiens
catttaaataatactgctattaataaaaatacctaattttttgagtgtttacagtagactctaggcatggtgataagtgctttgcatggctacctcatttgtctgtattcactttttcacttatttacttcttattttcccttgagcctacaataattaggctttgtttcgaagaagtctattaaactactctttatcaaggtccttaatgacttctatcttgccatatgaaatgtttaattgtggcattctcttcattttatatccaggcaacatttattaatattactattttctctcctttgagactctgtattcacttggtttttgggctatcccagacccctagttttccttcacctggttttcaacagctggttttctgtgtaattgacaacttaacttttcttttctcaattgaaaaaaacagartatctgaaaatgaatcttggcttcttttatctacttacattcactatctagaaggtcatctaatatcagctttaaataatatttacacgttgttatatctcacttttatatctgtagctctaaccacgcccctgctttatatttctgtattcaactgcctaatata

SEQ ID NO: 671842 - DNA, 598 bp, Homo sapiens
catttaaataatactgctattaataaaaatacctaattttttgagtgtttacagtagactctaggcatggtgataagtgctttgcatggctacctcatttgtctgtattcactttttcacttatttacttcttattttcccttgagcctacaataattaggctttgtttcgaagaagtctattaaactactctttatcaaggtccttaatgacttctatcttgccatatgaaatgtttaattgtggcattctcttcattttatatccaggcaacatttattaatattactattttctctcctttgagactctgtattcacttggtttttgggctatcccagacccctagttttccttcacctggttttcaacagctggttttctgtgtaattgacaacttaacttttcttttctcaattgaaaaaaacagagtatctgaaaatgartcttggcttcttttatctacttacattcactatctagaaggtcatctaatatcagctttaaataatatttacacgttgttatatctcacttttatatctgtagctctaaccacgcccctgctttatatttctgtattcaactgcctaatata

SEQ ID NO: 671843 - DNA, 673 bp, Homo sapiens
atgtataaagtacacaaaaatttcaatgaaaacaaacgaataagaaattcactgaaatgatgtacctacaaatatatttttaaagtttacccttgctaaatttttaaaaatgcaaactgcttttatagcaagatactatttttcacccaccaaattaggaaggattgaaagggtcagtaattctcagtgatgaggacaatgtggaaaaacacactctaatacactgctttgtggtattgagaattaatgcaatctttatgtgtgggaaacttgttaaacgtatttatgtccattgacctaacaattcaatttctaaaactgtttcctagggaaacaattagtaatatgctcaaatatttacccatataatgctaaaggtggactatgtggggtttttagttttatctmaaaatttaaaataccctagatacccaaaaggaagaattaagtgttatgtgtattcaccagaatcttatgcagctaataaaaattataagagaatcattaatgacatagtgtgggttttttattaaaaaaagcctttttagagaaatatgatgaaacctgacagtagagtttgaatatttccctataataaataggacttaaaaattaacacgaggatgtaacctgagttgagcttctttctttataaaaggatgcataattgatc

SEQ ID NO: 671844 - DNA, 1351 bp, Homo sapiens
taggttcaaccaagcctggcttataaagaacctgagggagagagagagaaagaaagagaaagagaacgagtctatacactctgatgcaaactctgatttttctgtctccaaggggatttcttatcccagagaggaattttccccgttccttgggttgttctcctaatctatcaaatcctcaaatcattaagtcagttctaaagtgtggttgcaaaaaatgctttgaacaatggtaacaccgttggcatgtgaatatagtctcccagaaaagccatattcaaatttctgacattttcacaagtgtaagttctgatatattcatttaaaagtctgttcgaatttgtatcttaaaacaaccttgtgtgttatttctaaatctcttattttcaaaagaaacaggctcagaaggtttagggactataaatattcattgacattggttcaattgccaaatcagtattacagtaagtcagtatcaaatcatgaagaaatacacaatgaactcagaagcatggtggaaaaaaaaaaaagcccctatgtgtatggcgttatcaatgtaaggttattttcgcattttggacatatttttcaaactcagaaattcattccatattgattctgttttttcataacatgccaaaatgaaattctaaaaactcaatgttacctcttcagagaagcctttattctctctgtccctccagactataaatggtttctttctgtgttccaccaacacttggcttatgacttttttttaacattgccacattactttctagttgtttatttgtatcaatctccaatttatacactatgagttccttgagggcaggggccccttctggttcctcttttctagcccatagcatggtgcccagtacataataatatgttcaacaaatgtttgatgattgaatatatgcagaaaatttaaattatgagacagtrtaaataaataaaaaggaaaaggagtttacaacatataaacacacagccagcccaatcaaatgattatctatctatcgtcttctctttatctctcagaaaagtgtcaggcattttgattcagaaattctaaacagcatgcagccatagccacctcagaaggacctgagctgaggacaccacctgaggattatggttgttaatagaattatttttagtccctctgtttagctgaatgcattcctttgtggggaatttaaagtgcttcattcacatgtccgcttaattgtcacaatcctgtggctgtgtagggacaagattagcactgcatttcatgaatgaggaagctggagaaggttgactcattcaatgccactcaggtagctcttaggaaagagaagat

SEQ ID NO: 671845 - DNA, 1400 bp, Homo sapiens
ccctggactcttgggagggggcgtggccctgctgacaccttgatctcagacttctggcctccagggctgggagaggataattctctgttgaagctccccagtttgcagcactctgatgagtacgggggtgagagggcaacagatgttctggaaccagcaggggccctgggaaggggtgggggacacagagactcttttcaaacttcccgtttggcacccatactttgggctttgtgtttctttttttctattttttttttttttttttttgagatggagtcttgctcttgttgtccaggctggagtgaaatggcacgcgcttggctcactgcaacctctgcctcctggcttctagtgattctcctgcctcagcctcccgagtagctgggattacaggcactcaccaccatgcctggctaattttttgtatttttagtagaaacggggtttctccatgttgcccaggctggtctcaaactcctgaactcaggtgatccgcccacctcagcctcccaaagtgctgggattataggcgtgagccaccgtacatggctggctttgtgtttctaaagcagctgctggggctggtgggggtggaggctgtcgtggccacaaggaccccctcctccgtctggaagctgcagggaagggaggcatttgtccctgtcaccgagttagctgggaggcacggatgccctgagccacccactcttccgcccgcctcctggctgctgtcacccctcacactgcctgcagcagcaaataatttttatattctccattaacagagcagcagcgctgagtaaatctaatccgtaaataaccctccccgggctggtgccaaggccccaggcgtgtcccccagcttccttgtgttctgtgcctsgtctctggggccctgggagtccctgggagcttctctccctgatgatcatgaccaggctgtgactcttgagttccagagctgcctcatggggccaggggacaatttgaggttgtgggaggagtcggggcggtggccacagggagagagggagacacatcgggatcttagcaccgtcatgggagccgtgaatcttgaccgtggtggagtgggagccagaactctccattgcagaaggggagggagcccaatccgtgaatggtggggttggtggggggcagctgcaggggtcggaggctgagtgtgtcaggctctccccgaccccagcacttgggcagcaggtggcccaagggtagagggcagagcacccccagtgggtcggacagatggacagatgaatcaaagtccctggtcaaagcctcctttttccacccgctcctgcgggtggcagcgggggcagttggctgcccactgtccatctaactggaagcctttgagagccaaggtggacctgggc

SEQ ID NO: 671846 - DNA, 1400 bp, Homo sapiens
ccctggactcttgggagggggcgtggccctgctgacaccttgatctcagacttctggcctccagggctgggagaggataattctctgttgaagctccccagtttgcagcactctgatgagtacgggggtgagagggcaacagatgttctggaaccagcaggggccctgggaaggggtgggggacacagagactcttttcaaacttcccgtttggcacccatactttgggctttgtgtttctttttttctattttttttttttttttttttgagatggagtcttgctcttgttgtccaggctggagtgaaatggcacgcgcttggctcactgcaacctctgcctcctggcttctagtgattctcctgcctcagcctcccgagtagctgggattacaggcactcaccaccatgcctggctaattttttgtatttttagtagaaacggggtttctccatgttgcccaggctggtctcaaactcctgaactcaggtgatccgcccacctcagcctcccaaagtgctgggattataggcgtgagccaccgtacatggctggctttgtgtttctaaagcagctgctggggctggtgggggtggaggctgtcgtggccacaaggaccccctcctccgtctggaagctgcagggaagggaggcatttgtccctgtcaccgagttagctgggaggcacggatgccctgagccacccactcttccgcccgcctcctggctgctgtcacccctcacactgcctgcagcagcaaataatttttatattctccattaacagagcagcagcgctgagtaaatctaatccgtaaataaccctccccgggctggtgccaaggccccaggcgtgtcccccagcttccttgtgttctgtgcctcgtctctggggccctgggagtccctgggagcttctctccctgatgatcatgaccaggctgtgactcttgagttccagagctgcctcatggggccaggggacaatytgaggttgtgggaggagtcggggcggtggccacagggagagagggagacacatcgggatcttagcaccgtcatgggagccgtgaatcttgaccgtggtggagtgggagccagaactctccattgcagaaggggagggagcccaatccgtgaatggtggggttggtggggggcagctgcaggggtcggaggctgagtgtgtcaggctctccccgaccccagcacttgggcagcaggtggcccaagggtagagggcagagcacccccagtgggtcggacagatggacagatgaatcaaagtccctggtcaaagcctcctttttccacccgctcctgcgggtggcagcgggggcagttggctgcccactgtccatctaactggaagcctttgagagccaaggtggacctgggc

SEQ ID NO: 671847 - DNA, 1400 bp, Homo sapiens
ccctggactcttgggagggggcgtggccctgctgacaccttgatctcagacttctggcctccagggctgggagaggataattctctgttgaagctccccagtttgcagcactctgatgagtacgggggtgagagggcaacagatgttctggaaccagcaggggccctgggaaggggtgggggacacagagactcttttcaaacttcccgtttggcacccatactttgggctttgtgtttctttttttctattttttttttttttttttttgagatggagtcttgctcttgttgtccaggctggagtgaaatggcacgcgcttggctcactgcaacctctgcctcctggcttctagtgattctcctgcctcagcctcccgagtagctgggattacaggcactcaccaccatgcctggctaattttttgtatttttagtagaaacggggtttctccatgttgcccaggctggtctcaaactcctgaactcaggtgatccgcccacctcagcctcccaaagtgctgggattataggcgtgagccaccgtacatggctggctttgtgtttctaaagcagctgctggggctggtgggggtggaggctgtcgtggccacaaggaccccctcctccgtctggaagctgcagggaagggaggcatttgtccctgtcaccgagttagctgggaggcacggatgccctgagccacccactcttccgcccgcctcctggctgctgtcacccctcacactgcctgcagcagcaaataatttttatattctccattaacagagcagcagcgctgagtaaatctaatccgtaaataaccctccccgggctggtgccaaggccccaggcgtgtcccccagcttccttgtgttctgtgcctcgtctctggggccctgggagtccctgggagcttctctccctgatgatcatgaccaggctgtgactcttgagttccagagctgcctcatggggccaggggacaatttgaggttgtgggaggagtcggggcrgtggccacagggagagagggagacacatcgggatcttagcaccgtcatgggagccgtgaatcttgaccgtggtggagtgggagccagaactctccattgcagaaggggagggagcccaatccgtgaatggtggggttggtggggggcagctgcaggggtcggaggctgagtgtgtcaggctctccccgaccccagcacttgggcagcaggtggcccaagggtagagggcagagcacccccagtgggtcggacagatggacagatgaatcaaagtccctggtcaaagcctcctttttccacccgctcctgcgggtggcagcgggggcagttggctgcccactgtccatctaactggaagcctttgagagccaaggtggacctgggc

SEQ ID NO: 671848 - DNA, 1776 bp, Homo sapiens
ctgctctcaacacaatgtacccacagcctgattctctgatctgccgtcccatcggggggtcatatctgtttaagagtccctctttaataaaaagggtgtccactgacacccttctggtggtctgtgaccgaccaccacttaccctccatctctgaccccgttcttgtctttcagagcatgcattaaagatgtatttttgtttttttctcccttttcctcagcagtgtccccagagcctggcacagaggttgcataaaaatattgcagctggaataaatgaaccaaactcaggtgctgattacggagtctcacacactgccccgagatacgagacctcggcatcggggcacccaccccggcccgagtgcagacctcatcggctccgcacggtgacacttttggggacctatccactcatctttactctgctcggcagacagcaacagcctgtcccaaatagccttcccgttttagagcgttttggagaacaatggaaaggacgctgcaggcaccacctgctcctgccacggcccctctgccagcttggggaggcccagggacgctgacctcacagggcctagggcgggcgggggggcaccccagaggctttggtttcaggctgtgtctgtccccgcacacagggaaggctttcgagatggagaaaagagggacacagtctttgtcgggaaatcgcagcaggtggagcatccaagcctcctgtggccacgggcttcaccccaccctggatccctcctccccacctgcagcacacaggggaactgagtcctggtggtgttgagaggatgctggaggcgagagggccccagaaaggagagtcggtgctgggggcagtaggtggatgaagcttttttgtcaagggcaccctctgttcaggacacaagccctcggcacagcaggcaggtggacactccttctgcagagggaacgccggggcccagggagggatggcctggccgcgtccccccgagccctggctgctgggcctgggtttctccgggtgtcccagcccccgtcccaccacagacacccagggcccagtcctgggtcccaccccacctccacccactccctgcaggtgacttcatcctctagttccaacacctgccagctgacggcccctgaccacctgccttggggcggcctccccagacccagcaccttcacctggacgtctggtgttcaaatccaaccccctcccagctcaacgcctccttccaggggctcgggtgatctgcgaatcctattggctctgcactgaaaatgcatccagaatccacccrcttctcactacacctgacccctgccctggtccctagcttctgcccttaccccgtctcctccccacagcaatcaccagagggcgcctgtgagcacctgagtcagggcccatccctcccctgcccacacccctccatggctcccacctccctcagggtcaaagcccaagtccttcccgagacccacaagggcctgcacaccctgcctcccctcctccccctctcccctgcctccctctgctccagccacaggggcctcttcatgttcttgccgcacaccaggcacaggagggtcacctccctgagggaggctcaggtctcccgtgtcccctctgccgactccaggcctggtggggctgggcactgagtgacccaggccaggactgctgggtcccagtggccatccagggccgtgagccccagcgcctagcacgtctgccagccaccaccaccacaagcaatgctctcggggctcaga

SEQ ID NO: 671849 - DNA, 598 bp, Homo sapiens
cttttgcctttatatcacattccaactcttcacttgcactgaacattcataattctaagagtttagcattgtcaaggactcagctagcatgaactaagagaaaacggagattcaattcattcactccattttttttttttactttttattattgtggcaacaatatgagtgtacataatgctactggactgtactttcatttgacccatctttgctgctctaggatcaccaaatccttcacctctatggcatttaaggtaagagattttcttaccttcacctctatgccatttaaggtaagagattacttttgagaggaactgtgcctatctccctggtggacaaccacactttcttttcttccayagtctccactcaacagtctgccccccacaggagaggggagtgaatgaaaagtagcctttgtgctagaacaaccaatcaaccttgaagaataaaaccctctggatacaaccatcaggaccaaatgcgtgctgaagagaaaaatcatgaccagattattccaacagccagctctcttcttaagagatcaacacatccttagcacttgttgaaagaggaggcctaatttctgaaa

SEQ ID NO: 671850 - DNA, 605 bp, Homo sapiens
cccataaagcccgatagtataaacatcacctttaatgcttcttggaaacacayttaacacttctctatcccactcctcaaggaagcccagaaaagatgttcctgtgtggatacactacacctgtttgtcaattacaaatggctggatcaagtttattttatctctgcctatgattattatcacataccagtaaaattctaagagactcacagggccaacaataggatatctggaagactatgaacaagtaagaacttgagcaaacagtgtttctccttccctcgtacccaaattccgatttagttagcagttatggagaaaccatgagacttcgagtacctgccttatcccaaagggtaggcatgtttgtccataatttgttccaatccatgtcatcactgacatgttcattttagaagctcaagcttttgtggtagggattgttttaaaaactaggtggatgaccagggagccatggatttcctcagaggggagagaaaggactcttatccaagtcagtattcagataacacacacttgtcaaagatgaagtgatcccttgaaggtgctgagaaggaaaagctaaaatgggacacccactgttt

SEQ ID NO: 671851 - DNA, 242 bp, Homo sapiens
catttaagggaaaaaatttttgagaatcttagtaaaacatatgcattaaagaaaaaaattgaatatgctaaagcaattgagttatagttgtgagtttgaaacattttrttttaatttttaaaactttctgaactatatatttctttctttctttttttttttttttgacagtatcactctgtcacccaggctggagtacagtggcactatcttagctcactgcaacttctacctcctgggtt

SEQ ID NO: 671852 - DNA, 611 bp, Homo sapiens
gctcaaccaagaaggacaaggtaagggaagagttggtaagaaggggagcacacattgatcgatcatataccatgtgccagctatggggttgggtgctctccataagtcatmgaaattaatctcatgacaactctgtattgtagatattgttatatacccattctgctgatgaagaaaacaagactcagagtttacttaaccaaggtagcacatctaacatcaggactaaaattggattccagctctagctaaccccactatatcaagccacctttcaaaagttaaatttgagatcttaagacactgaaccattataacctccagtttcccctagcaaaaatgtgattagttatgagtttgtcataagaagtcaagttatagtggtcattttcttcatatgatcagcttctcagcttacccaaagcagaaatgtagaaaatgagcttaactggatgctgcttcttggagcatttctcatggtccttatgtaggtggtatctgaatttgccatgtaacttgaaaattagatttttgaaggctattaaaagaaaaattctgaagagtgtggttagcccaggggaaaacacccaagatgctaaaaagcatttgca

SEQ ID NO: 671853 - DNA, 611 bp, Homo sapiens
gctcaaccaagaaggacaaggtaagggaagagttggtaagaaggggagcacacattgatcgatcatataccatgtgccagctatggggttgggtgctctccataagtcatagaaattaatctcatgacaactctgtattrtagatattgttatatacccattctgctgatgaagaaaacaagactcagagtttacttaaccaaggtagcacatctaacatcaggactaaaattggattccagctctagctaaccccactatatcaagccacctttcaaaagttaaatttgagatcttaagacactgaaccattataacctccagtttcccctagcaaaaatgtgattagttatgagtttgtcataagaagtcaagttatagtggtcattttcttcatatgatcagcttctcagcttacccaaagcagaaatgtagaaaatgagcttaactggatgctgcttcttggagcatttctcatggtccttatgtaggtggtatctgaatttgccatgtaacttgaaaattagatttttgaaggctattaaaagaaaaattctgaagagtgtggttagcccaggggaaaacacccaagatgctaaaaagcatttgca

SEQ ID NO: 671854 - DNA, 596 bp, Homo sapiens
cagcatccaagctccaataaaactaagcttagttattttcttagtacttacatgtgttctggattttatagattttgttttttttttttacttgtttgtttggttggttggttggttggttggttggtttttgagacagggtttcagtctgtcacccaggcttgagtgcagtgacctgttctcatctcactgcagcctcgacctcgggctcaagcaatcctcctgcctcagtcccccaagtagctaggactacaggcacccaccaccattcccagctaattttttttattttttgtagagacaaggttttgccgtgttgctcaggctgatctcgaactcctgggctcaagccgtccgtctgcctcagcctcccaaagtgctggggttacagtagtgagacaccgcgcatggcctcatatttttttattttaatgaaaatgcratttgatgtttttttccttgttgctctgtgagattttcagaagtacaatagatacttgtctttaaactgatgcccatattttgaagattttgatttatatttatattttgagaattttcatttttttttaagaaaataaaaatatcagttggca

SEQ ID NO: 671855 - DNA, 2454 bp, Homo sapiens
tgcctcagggcctttgcatgtgctgtttcctcagcctgggattctcttccatgagttaaccctatggctttctgcctccctttcttcaagttttttctcaagtgttactttctcaatgagactatcctcattaccccctaattaaaatttcaaacttcgtccacctccactgaattcttttttttacataatatttgttactttctcacattcttcataacttgcttacttatgtttgtttttgttgtttctcccctccccccaacatctagaatctcccaacttctagaacatatgctcttgatgggcaagggtctttgtctattttagttgatgtttgttgattaatttcaaaatggtgtctgtcacatattaggttcttcatatgttttgtacaaatgaactaatactcattaactaagatgagcaatgattacaagtgactagtaggtagcttttattttgcaaaagatgtaatttctatataagcatattttagtcagaggagtaaaaagttgccattcctgaaaaattactcaaagatatactctagcaaattgaaagacaactgaaaataagatgaaaaggcaaagtataaaataattaaggctgaatatcaataccaataaaatatagaacgaaatcttgttcattttgttaacctttttaaatataatacacatttcaaaaacaattattgaaagagaaaacataatgtaataaaataatgtaatcataaagtggatctaaaagtaacagattaaatcagtacaaactgggaaatagaaaaaaaagatataagggacaaagtaaaaatggggagaataagttcccactatttacaaacagcatcaatggaataagcattattttagagtaatgatgccatgagaagaaaatgttcaagtacttttcttaaacctgacttccacataacagaccttcaaatccttgaagacagttgtcatgtcccacccagtgcttagtatgtgtgaagcatgatagactttgaactgtcccacatagaacagaagttcaagttcttctctcatctgagtcccctactcaagctcctcctgcagattggatgccagaattggacaaaaacttcagctgtggtccctgcaacacaaaggagagcacacacaccctctcacttgctctagatattttgcttttatgagtcaccttaagatcatgtttttgaggctatgttaatgactctcatggagttcttaccaaatttaattcctcagaattacgctacatatactctactgtgtacaaccaagtgtaggacctcattcttttccaactaaataacaatttgatagattttagctcgtggctatatcatgtcagtgcaattttgattcagcatattcatgaatcataaagttaatttcaactacaaatttgggagagtatgttatttctttatttaagaaatataagttattgggaaaatgctgaaaaagataatggaaaggacggaaccacgcaacaatccactagaaacctcccttgtgattgacatcaatgcactaataagcactattgaggtagcgattgagctacttaactgttttcgaatttcatatttttctatattaagaataagaacaatttaagattttcccaatttaagaatgagtcctggacaattatttctttaggttcttcatctgctaaccctatcatagaaataaattcggatatgctgttgtcattagaaacacgctggctttcttgtgacctttctcgggatatttacacattatcgcttaataatttattctaaaatctctttcaagattcatatcaatagtttgcataatttttcttcctactttttgaaaactaggaaattaatttgatatagctacacaaaagctgttcaaaaaaggtcaaacaagttcaaggaaattagtatgatatgctgcattattataaagcacactgctagatttctctgtaattatacttttaattctaaatcaattactttgagaatctatattaaactttgaatgatgaccaattaaaaacgtctttaaatggcattgcccttcaaaatggaatcagtgctaatgaaataaactgcttttgatattgtgaaaatctgattacatgattgcttctgtagctaattggacaaacttgcatattgaatgcttctaaatatctgcttctcttccacctacttttctatcatttggcagtgatgaggagggagaaaagaagaggtctcttagttgaacttaagatcttcaaaagcctttccatggtttattcatgcttgtcctatcctttggtgttgttataggaagatatttaaacttgcttgggtgttaytaacattcctggagttatgattagtcttgaactgtagcctgtagtggaattccacagaagggtaaagtcatagtatcttatgttattcaaacttatcta

SEQ ID NO: 671856 - DNA, 604 bp, Homo sapiens
aggctggtctcaaactcctgacctcgtgatctgcctgcctcggcctcccaaagtgctgggattacaggtgtgagccaccacaccaggcccattttatattctttatagcatatgtcatcatcagaaaatgtcttgtgtttttgtaagcttgcattttccattgtccacctctgcactagaatgtgagctccattaataccacagaccgtggctattttgagggcttctgtgttttcaacacctactgcccatatatatttactgaataaatggatgaataaaattcaatattcttacctgcaaccaaattggtataaagttatttatacactcttttttaaagctctatatratagactaaaaataaatatactaagaaaaaggcgtaatccttacttgaaaccttgagcaaaaaaccaggaaccaccccacaatgtccacgtgcttaattatttattattggcttttaaattccattaactaatagcataggcagtaagtaggatgatgctgagcctgcttaatgagcaacatttacaaaaaggcaaatgctcttctcacacaccctgggccccagcttcaagacaaatccgtctagagaagc

SEQ ID NO: 671857 - DNA, 663 bp, Homo sapiens
gaagttctgtggggccctgtcctgcacacctgcctggtcccggctgcccagcctctgcacatgcggggccttcctcctggaacaccctcactgcctcctctcactcccctgcccagccaggtccttctatgtcctcatgggttctgtggtccttccctgcttgtccccaccctcactggtcccctactctgttctccactgccccagggctcctgtcttcgaggaggtgattgtgaggggcagtcccagcctggactgagagcccttgaagacaggggccaggcctgagtcgcccaygtccccttgaccagccatggccacactgtgcgctgagctgcactggcctctgttcccacaacacaagactagggcaagaacatcccccagcgatggacaaggacggcgaggctcattccagcagcccgtgaaccctagagggtgcaagaggataagcggaggtgccaggtgggccgcgggaagggcgctctggccacctctaaagagcatgttgagaacccaacacaggctggctggattcggcagtggtggtgcaatcgatgtgcttatattggagggaggatggaagtggagagagtggcgtgagaagagggatgtggaatgggggaagggggccctgatgtgctctgagtgtggctgagtcaa

SEQ ID NO: 671858 - DNA, 663 bp, Homo sapiens
gaagttctgtggggccctgtcctgcacacctgcctggtcccggctgcccagcctctgcacatgcggggccttcctcctggaacaccctcactgcctcctctcactcccctgcccagccaggtccttctatgtcctcatgggttctgtggtccttccctgcttgtccccaccctcactggtcccctactctgttctccactgccccagggctcctgtcttcgaggaggtgattgtgaggggcagtcccagcctggactgagagcccttgaagacaggggccaggcctgagtcgcccacgtccccttgaccagccatggccacactgtgcgctgagctgcactggcctctgttcccacaacacaagactagggcaagaacatcccccagcgatggacaaggacggcgaggctcattccagcagcccgtgaaccctagagggtgcaagaggataagcggaggtgccaggtgggccgcgggaagggcgctctggccacctctaaagagcatgttgagaacccaacacaggctggctggaktcggcagtggtggtgcaatcgatgtgcttatattggagggaggatggaagtggagagagtggcgtgagaagagggatgtggaatgggggaagggggccctgatgtgctctgagtgtggctgagtcaa

SEQ ID NO: 671859 - DNA, 594 bp, Homo sapiens
caccgcatattctcactcataggtgggaaatgaacaatgagaacacatggacacaggaaggggaacatcacactctggggactgttgtggggtagggggaggggggagggatagcactgggagatatacctaatgctagatgacgagttagtgggtgcagcgcaccagcatgtcacatgtatccatacgtaactaacctgcacattgtgcacatgtaccctaaaacttaaagtataayaacaacaacaacaaaaaatttcattcaaatcaatgttaattcaacctaatgaatgccacactcttaagctcatcgccaaccctgactttggtcagaataaagtgaccatgacaagggcatatggaacccacattcttttaaaagatttagagattatatttctgatatggctaaccagataacttggaccaatcttttcactaggggtgaatgaaaaagataagtggacaaaataattattaaatcttcataaaagttgcaaagatctaacaagattgtgatgagtacatgggccaaggtctaagaagacacatctggaggggcatgcccagtctttgggcggcttttacctaggg

SEQ ID NO: 671860 - DNA, 698 bp, Homo sapiens
gaaaggaggtaagagggaaagaagactccttcaccttactgagtgtctttaagttcggctccgttcttgacccaccccacccatctgaattagcttgcttcagaagagccagtgggactgygcactaatcacagggtgtttcccagggtctcaggcaccagtcccggagtttttcccagcaggctgtgcaccaatcatagcgcctcacccagaaatgccatgcaccatcatgaggtttctcccaaccgggccatgcaccaattacagggcttcttacaacggggccccgtgcccctggaccagtcctgactacacaccttcctcagcagctaccatgccagggccagagggtaacgaggcaggcacttgtccttgaaaaaaggaagaaatatcaccctccctctgtgaatacatgtgattgttctcactgtctcccttgaaagctttattctcggaagtacacgctactatgctacggcagatgtacaatctgggaagttttccaaattcgtcactggaaagcatggagtattcagcattagcgcctccgtggaagtttctgtctctgcctcagtcagtctggctggcagcactgaagagtagacggttgtccagaggctgggtaagtgggagctggaatcctgtgacagaggcactcccagccagcttctcaatttgcagagctgttaaggttttcc

SEQ ID NO: 671861 - DNA, 1080 bp, Homo sapiens
tttgtaatagcaatgatcactttctgcaattatattatttctgtgtatgtttgggtattttttatttatctactttattttcatcttccaccatgaaaatataagatcgaaatggcagagtaaagatgtgctttgtcttgtacactatatcaacagaacyttgacattgctgacagacagttgatgcacattaaatatttgatgaataagtggatgaattaatgaatggaaatagagcaatagggttagctctagggtagtgtggtatcatgcaagtgggtgtgtaagttgggagagacctgagcatgtttaaatatactagggaattatgtggttggaacaataaattaaatactgagatactcaagcaagatgtcatgggacctaatacaggagataagactatgtgattcgcattaaacgctcatgtagcatgttatacgagatcttcagacttgctatataattattcagcactcaaggtggtgcttaagaaaattgaggaactaaagactcctttgtgttacctgatctgtagaaataatttaaaaccttgtctagttttctttttttttctcctgtcataagcttgttaagagattcctccatagaaactttttttggtaaaataataactgctgttcagtgcatcatttctaacaatgtgatgttagctacaaatatttaggtagcacatcctttcaaaataggcgctttcgggctaggcgcagtggctcacgcctgtaatcccagcactttgggaggccgaggccggcggatcacaaggtcaggagatggagaccatcctggctaacacggtgaaaccccgtctctactaaaaatacaaaaaatttgccgggcgtggtgtcgggcgcctgtagtcccagctactcgggaggctgaggcaggagaatggcgtgaacccaggagacggagcttgcagtgaaccgagattgcgccactgcactccagcctgggggacagagcgagactctgactcaaaaaaaaaaaataggtgcttgcgataacttggagtgctgttcttactgatgcttacactttggtagctcacctctccta

SEQ ID NO: 671862 - DNA, 3690 bp, Homo sapiens
ggcctcagcggacccagctttcttctccccttccccatttcctggcttacagttttagaataactgtagaatgtgctaagaatgcagtatcttgatatatagaggaactttctagaaaagcctgggctttgtcctcattccttgtagaacgggatgtcctataatgcttttgctcagtgacccacccacgggatgccctggagctaaaacccagagcggtgtgctttcagagtccttcagctgtagtgcaaagtggagcatgtgtagatgagtatatattctctttataccagaagtaagtatagtttcattcagtgaaagtcactgtccctaatctataaaatactcaaagtttaaaaaaaatactctatgttaaaaactgtgagcattgaaagctgacttatctattcagagatcacatatagtaaagggtattacagtataaaataccaagaaagcagatcagctgatgaaaattactgattttgaacgtctttttaatcattatatgacatcctgataagttttcctgaggaattaaatgcttctgggatcttaaagtacattttctacaaagaagtcatagtgttttcttaaaataagctaccaattaaagcaagaatgtggagtagatggcattggtagatacaatcaactaaaacattgtttttattttcactccagagtacggtgagcttatattcacaattagtaaaaggaagcagagttgattttctacaacttcttctgtttcttctctcaaaaccttcagagagaggaaaaggcaaaggaatgcagtattctcccatttaagtcaacattacaaatgcagttaaagggaatataatattgctaaataagacctcatcatgatgtgtattctatgacagtttattttgactcctttaactgagcgttgtgtgagtttctttatttgttagccactcggttacgaagatcaggatgtttttagctttttagacacaatatttgtcgaagctcttcttctcatactatacttttctaaaatgaatttgaaagtagtgagatgtcttatcaactttccataaaattctcatttccttgagcctgtgtaaacagctgactaaacacatggctattcactgtcaggacttgctcctcagcatctgccacggaaaagattcgattgcacacatacgaacccaatgccagcaccccaagggacagggcaatagaaatgggagggaaatgatcaagtcaatgaatgatacactccattaatcttaatgttaggacattaatattgcttggcaactgcctaaaatcaacaataagcgatcaaccaatttgttgcctaaaagttgttgatttaaccatcaataacttaacagcataaccataacaataactttaatttactaactttaaataactaaagttctttaacaataacgataacagcatatatgtacatcagttacgcattaaaagatggatattttttgtgtacatctgaatggagaatattagataatgtagaaagacatgagatgaagttgataatacaaccccttagagctttaataaatgagctctctcagtcaagccacagtaacgaccttttctctgtgatatgagccaggactctgcaggtgtacagaggagataaactgcaattataaagtacaattaacaggtagtagcggtctcatttattatacacacctacgcatgtttccaagcctgatgatcactaagtattcacagcaagtaatcacccactggacaaaacagcattacttcaccttctgaaaaagtagtttctactactttgaaaagcttgttggtgatgagacgaaaactgaaataggttacaattctaatacacacacagtacaggtaacacaaagagtctttcattatttaacattcttaagcatcacccaaaatgccaaaaagaaatacggtaagtttcaaggttttgcataaagtactacactgagcttttaaagtgaagggcttagtcacccaaataccgtcttaggccttatagtatctctcctgagttcccagtatataatttattataccaaacagatcattctccagagttcttttgatatttctagatctctctcaacttataacctaatcagctccctcaatcccacataggcctcaagctaatctcaatcacttttcttccattcatttttcattcacttatttacaaatatgtattttgcatgaattgtctgccagcactgttttaggggcagaaagaatatgatagtacctaagaaaggccctcattcttatatctctttaaaggaagataaaaacttttaacaaggtaaatatttaaaaatactttaaaggagaccaggcgtggtgactcatgcctgtaatcctaacactttgggagggagaagtgggtggattgcttgaggtcaggagtttgagaccagcctgggcaaaatggtgaaaccctgtctggactagacatacccgcccctaaaaaaattagccgggtgtggtggcacgtgcctgtaatcccagctacttgggaggctgaggcaggagactcacttgaacctgggaggcagaggttgcagtgagtggagatcatgccactgcactccagcctagtcaacacagcaagactccatctcaaaaacaaaaaacaaagaaactttaaaagacacaaaatgctataatagcagagagtgataattgctacaaggaaaataaaatatgattatggaaaacaaatgaactggttgatccaactcctgtctgtgtccactgctaccattttggagtgagctcttgttaggtcgccactcacccaggctccagtgataccctaattggtttccttctgttaatggccttcattgctttttctgcagcgcagtcaatctgtcaggtagggctctctagaagcagagcctgcaatagcaattattgagcaacttttcttgagagaataaccttatgagaggggaatagtaagtagggtgagacaaagatgagatctatctaagccaggatgatctcagcacaagactggctcagcctgacacccagagttttggagcatggattgcattacagagttggcctgacgttgaggctagaggaatagccctttataccatgtgtcagtcagtcactggctacaggttgtccaggcgaggcarctcccttaagtctgaagaagtgctcaggagagaacagggcacttgtgagcccttagctaccaacaatagtatgcgggggtgcaatgcagaggcctagtaaagtgggactgaatggagcagcaccctttaatttaaaagaagaagaaaatggatattgattagaaacacagcagcatctgccacagttagaaaaagcatgactatgtggtgtttctgtaagaacatgagagaatgtcagtgaagcacatcataacagtgattggagcatgagttctcagtcaatggcagttattttgattgtgacagagattgagatgtttataacttgaatagctggcactagaattcctattacagaagaattcctaatgttgaagtactagtttgatgagctgcttgggataaaattgaaacttcaaagttatgcccattggcaggagttaaagcagcaaagggggcaccaaaactatcttgtgtgagaaaaggagaccaatttagtttttgc

SEQ ID NO: 671863 - DNA, 3690 bp, Homo sapiens
ggcctcagcggacccagctttcttctccccttccccatttcctggcttacagttttagaataactgtagaatgtgctaagaatgcagtatcttgatatatagaggaactttctagaaaagcctgggctttgtcctcattccttgtagaacgggatgtcctataatgcttttgctcagtgacccacccacgggatgccctggagctaaaacccagagcggtgtgctttcagagtccttcagctgtagtgcaaagtggagcatgtgtagatgagtatatattctctttataccagaagtaagtatagtttcattcagtgaaagtcactgtccctaatctataaaatactcaaagtttaaaaaaaatactctatgttaaaaactgtgagcattgaaagctgacttatctattcagagatcacatatagtaaagggtattacagtataaaataccaagaaagcagatcagctgatgaaaattactgattttgaacgtctttttaatcattatatgacatcctgataagttttcctgaggaattaaatgcttctgggatcttaaagtacattttctacaaagaagtcatagtgttttcttaaaataagctaccaattaaagcaagaatgtggagtagatggcattggtagatacaatcaactaaaacattgtttttattttcactccagagtacggtgagcttatattcacaattagtaaaaggaagcagagttgattttctacaacttcttctgtttcttctctcaaaaccttcagagagaggaaaaggcaaaggaatgcagtattctcccatttaagtcaacattacaaatgcagttaaagggaatataatattgctaaataagacctcatcatgatgtgtattctatgacagtttattttgactcctttaactgagcgttgtgtgagtttctttatttgttagccactcggttacgaagatcaggatgtttttagctttttagacacaatatttgtcgaagctcttcttctcatactatacttttctaaaatgaatttgaaagtagtgagatgtcttatcaactttccataaaattctcatttccttgagcctgtgtaaacagctgactaaacacatggctattcactgtcaggacttgctcctcagcatctgccacggaaaagattcgattgcacacatacgaacccaatgccagcaccccaagggacagggcaatagaaatgggagggaaatgatcaagtcaatgaatgatacactccattaatcttaatgttaggacattaatattgcttggcaactgcctaaaatcaacaataagcgatcaaccaatttgttgcctaaaagttgttgatttaaccatcaataacttaacagcataaccataacaataactttaatttactaactttaaataactaaagttctttaacaataacgataacagcatatatgtacatcagttacgcattaaaagatggatattttttgtgtacatctgaatggagaatattagataatgtagaaagacatgagatgaagttgataatacaaccccttagagctttaataaatgagctctctcagtcaagccacagtaacgaccttttctctgtgatatgagccaggactctgcaggtgtacagaggagataaactgcaattataaagtacaattaacaggtagtagcggtctcatttattatacacacctacgcatgtttccaagcctgatgatcactaagtattcacagcaagtaatcacccactggacaaaacagcattacttcaccttctgaaaaagtagtttctactactttgaaaagcttgttggtgatgagacgaaaactgaaataggttacaattctaatacacacacagtacaggtaacacaaagagtctttcattatttaacattcttaagcatcacccaaaatgccaaaaagaaatacggtaagtttcaaggttttgcataaagtactacactgagcttttaaagtgaagggcttagtcacccaaataccgtcttaggccttatagtatctctcctgagttcccagtatataatttattataccaaacagatcattctccagagttcttttgatatttctagatctctctcaacttataacctaatcagctccctcaatcccacataggcctcaagctaatctcaatcacttttcttccattcatttttcattcacttatttacaaatatgtattttgcatgaattgtctgccagcactgttttaggggcagaaagaatatgatagtacctaagaaaggccctcattcttatatctctttaaaggaagataaaaacttttaacaaggtaaatatttaaaaatactttaaaggagaccaggcgtggtgactcatgcctgtaatcctaacactttgggagggagaagtgggtggattgcttgaggtcaggagtttgagaccagcctgggcaaaatggtgaaaccctgtctggactagacatacccgcccctaaaaaaattagccgggtgtggtggcacgtgcctgtaatcccagctacttgggaggctgaggcaggagactcacttgaacctgggaggcagaggttgcagtgagtggagatcatgccactgcactccagcctagtcaacacagcaagactccatctcaaaaacaaaaaacaaagaaactttaaaagacacaaaatgctataatagcagagagtgataattgctacaaggaaaataaaatatgattatggaaaacaaatgaactggttgatccaactcctgtctgtgtccactgctaccattttggagtgagctcttgttaggtcgccactcacccaggctccagtgataccctaattggtttccttctgttaatggccttcattgctttttctgcagcgcagtcaatctgtcaggtagggctctctagaagcagagcctgcaatagcaattattgagcaacttttcttgagagaataaccttatgagaggggaatagtaagtagggtgagacaaagatgagatctatctaagccaggatgatctcagcacaagactggctcagcctgacacccagagttttggagcatggattgcattacagagttggcctgacgttgaggctagaggaatagccctttataccatgtgtcagtcagtcactggctacaggttgtccaggcgaggcagctcccttaagtctgaagaagtgctcaggagagaacagggcacttgtgagcccttagctaccaacaatagtatgcgggggtgcaatgcagaggcctagtaaagtgggactgaatggagcagcaccctttaatttaaaagaagaagaaaatggatattgattagaaacacagcagcatctgccrcagttagaaaaagcatgactatgtggtgtttctgtaagaacatgagagaatgtcagtgaagcacatcataacagtgattggagcatgagttctcagtcaatggcagttattttgattgtgacagagattgagatgtttataacttgaatagctggcactagaattcctattacagaagaattcctaatgttgaagtactagtttgatgagctgcttgggataaaattgaaacttcaaagttatgcccattggcaggagttaaagcagcaaagggggcaccaaaactatcttgtgtgagaaaaggagaccaatttagtttttgc

SEQ ID NO: 671864 - DNA, 1175 bp, Homo sapiens
ttttcaaatgaacaattttgttcaagtccaatgttctccagattagccactgaaggcctaaattatccttggtatagagatgggtgcaagtgctaggatcgtagcaagggtacgtataagaaatgggaggtttttytggaggaaaaaaaggaaaagaggatttacactcagaaaattccatgggagctggcaatggtcagttgaaagtaatatttgtgcactttatgtcttaggcccccaacctgatagttggcaacctccaaatgcagacttgacaacttgtgcccacaggcaaatggaaaaccagaatattccctctgcatcaaatccaacctctcagggccaaaaaaaaaaaaaaaaaaaaaaaagatgaagaaccttatcccattttattggtgactgacaggaaagtttaggaaagtttgtccagatggatgctggtttggtaagaattgcagctcatcagttgtggagcaagctgagacactcttagaggagcaaagcctgtgttctgcactgattctccttctgataacagacaacactttagacatatctcataaaacagaagcacaaaagagaacaaaaaggaatgaaaagaaatggcagtatttttccaagggtgccaaacaaatgggaattggtagcaaaagctgagtaccaagctgatagtcaataaccaaggatctcaatacaaagagaacagagttgaagcccaactctgttctctcacagacactgtgtcaacacagacttgacaggcctcaagaagcaaggcacaagaggcctccatagatagcgcacttgatcaggttccaaagtccatagtgatgagcagttaagaatgtgtctcagtggagcttctaggaaaattacagaaatacagaccaggcatggtggctcatgcctataaacccagcactttgggaggctgaggcaggtggatcacctgaggtcaggagttcgagaccagcctggccaacatggtgaaaccctgtctctacaaaaaatacaaaaattagacaggtgtggtagcacatgcctgtagtttcagctacttgggaggctgaggcaggagaatctcttgaacctgggaggcagagattgcagtgagcccatatcgtgctgctgcactccagtctgggcgacagggcaagattcagtctcaaaaaaat

SEQ ID NO: 671865 - DNA, 1175 bp, Homo sapiens
ttttcaaatgaacaattttgttcaagtccaatgttctccagattagccactgaaggcctaaattatccttggtatagagatgggtgcaagtgctaggatcgtagcaagggtacgtataagaaatgggaggtttttctggaggaaaaaaaggaaaagaggatttacactcagaaaattccatgggagctggcaatggtcagttgaaagtaatatttgtgcactttatgtcttaggcccccaacctgatagttggcaacctccaaatgcagacttgacaacttgtgcccacaggcaaatggaaaaccagaatattccctctgcatcaaatccaacctctcagggccaaaaaaaaaaaaaaaaaaaaaaaagatgaagaaccttatcccattttattggtgactgacaggaaagtttaggaaagtttgtccagatggatgctggtttggtaagaattgcagctcatcagttgtggagcaagctgagacactcttagaggagcaaagcctgtgttctgcactgattctccttctgataacagacaacactttagacrtatctcataaaacagaagcacaaaagagaacaaaaaggaatgaaaagaaatggcagtatttttccaagggtgccaaacaaatgggaattggtagcaaaagctgagtaccaagctgatagtcaataaccaaggatctcaatacaaagagaacagagttgaagcccaactctgttctctcacagacactgtgtcaacacagacttgacaggcctcaagaagcaaggcacaagaggcctccatagatagcgcacttgatcaggttccaaagtccatagtgatgagcagttaagaatgtgtctcagtggagcttctaggaaaattacagaaatacagaccaggcatggtggctcatgcctataaacccagcactttgggaggctgaggcaggtggatcacctgaggtcaggagttcgagaccagcctggccaacatggtgaaaccctgtctctacaaaaaatacaaaaattagacaggtgtggtagcacatgcctgtagtttcagctacttgggaggctgaggcaggagaatctcttgaacctgggaggcagagattgcagtgagcccatatcgtgctgctgcactccagtctgggcgacagggcaagattcagtctcaaaaaaat

SEQ ID NO: 671866 - DNA, 613 bp, Homo sapiens
tgggataggtttggagagagtatttggctttctttaattagtactaaactagaagcaggggcaatcttagagaagttggcagtcattgaccaacctctgattgttttcggcaaattgctactgaatttgtggcttgcattcctgaactggctgctgcagagattgtggtttgccttcccaagctggttgctgcagtggttgtgggtcagagttccattgtcgtacgtggtttggccactgtctgttttaatattcagtctctattactaaaaggtatacaaatggctaggcttctcacttcagttcttcatgtacaagctccttttagaggtttctgcactaaactattgtaaaaaaaaaaaaagaaaaaaaaggccaactccatttatccaatgtcaaccttgacgttaagaatgatgaatgtggcagctgtttccttctgttattgatctttttactgacccttcccattgtgctttgtcaatgactgagtatcttccctggaccgctctctatctgaagtcatcctcatctctcagggattttcagcaccrtctgtcagccaggcactgtgactctgtcgtcagtgaccatttttattgactttagtctc

SEQ ID NO: 671867 - DNA, 613 bp, Homo sapiens
tgggataggtttggagagagtatttggctttctttaattagtactaaactagaagcaggggcaatcttagagaagttggcagtcattgaccaacctctgattgttttcggcaaattgctactgaatttgtggcttgcattcctgaactggctgctgcagagattgtggtttgccttcccaagctggttgctgcagtggttgtgggtcagagttccattgtcgtacgtggtttggccactgtctgttttaatattcagtctctattactaaaaggtatacaaatggctaggcttctcacttcagttcttcatgtacaagctccttttagaggtttctgcactaaactattgtaaaaaaaaaaaaagaaaaaaaaggccaactccatttatccaatgtcaaccttgacgttaagaatgatgaatgtggcagctgtttccttctgttattgatctttttactgacccttcccattgtgctttgtcaatgactgagtatcttccctggaccgctctctatctgaagtcatcctcatctctcagggattttcagcaccgtctgtcagccaggcrctgtgactctgtcgtcagtgaccatttttattgactttagtctc

SEQ ID NO: 671868 - DNA, 1027 bp, Homo sapiens
ggaatgaaagaatggttactccataggcagagcagcggcaggagctgctcgactgactatacttacagttatttcttgatcatatgctaaacaaagggtggattattcatgagttttccgggaaaggggtgggcaattcctgcaactgagggttcctaccctttttagaccctatagggtaacttcctgatgttgccatggcatttgtagactgtcctggcactggcaggastgtcatttagcatggaaatgcattataattagcatataatgagcagtgaggatgaccagaggtcactttcgtcaccatcttggttttggctggctcctttactgcatcctgttttatcagcaaggtctttgtgacctgtatcttatgcggactttctatctcatcctgacttagaatgcctaagctagtgggaatgcagcctcacaggtctcagccttattttacccagcccctattcaagatggaatcgctctggttcgatcacctctgacaggggcagtgtacattcacatcttggcctttgctgcctcatccttccagatctttcagatgcttgccctctggcattctaggataggaagactgcttccaaagtgacgcaggatttttctcggacacttttccaactgcagacttctggctggcgatgcccctgcccatgcctagctctgccccaggcaggaggtgccctgcccacttgggcttgcactctggtggggatcctgcagccaccgagactgcatgctcagccccagtaggagggggtgtgtgatcaagtgagtgcctcatcttgccagcaactccaagtgctggcgcaggagcgggctccctttggggcctgcagctggatcaggcctgtcggaagtgactccgggggtgaactctggcatgcagatgaagggaacttggtggcgcccaaacaggaaagcactcgactctgaagccccagaggggatgttacagccatgctaacagctcttttagtcccaccgtcagcagcctgacaaacgggca

SEQ ID NO: 671869 - DNA, 1027 bp, Homo sapiens
ggaatgaaagaatggttactccataggcagagcagcggcaggagctgctcgactgactatacttacagttatttcttgatcatatgctaaacaaagggtggattattcatgagttttccgggaaaggggtgggcaattcctgcaactgagggttcctaccctttttagaccctatagggtaacttcctgatgttgccatggcatttgtagactgtcctggcactggcaggagtgtcatttagcatggaaatgcattataattagcatataatgagcagtgaggatgaccagaggtcactttcgtcaccrtcttggttttggctggctcctttactgcatcctgttttatcagcaaggtctttgtgacctgtatcttatgcggactttctatctcatcctgacttagaatgcctaagctagtgggaatgcagcctcacaggtctcagccttattttacccagcccctattcaagatggaatcgctctggttcgatcacctctgacaggggcagtgtacattcacatcttggcctttgctgcctcatccttccagatctttcagatgcttgccctctggcattctaggataggaagactgcttccaaagtgacgcaggatttttctcggacacttttccaactgcagacttctggctggcgatgcccctgcccatgcctagctctgccccaggcaggaggtgccctgcccacttgggcttgcactctggtggggatcctgcagccaccgagactgcatgctcagccccagtaggagggggtgtgtgatcaagtgagtgcctcatcttgccagcaactccaagtgctggcgcaggagcgggctccctttggggcctgcagctggatcaggcctgtcggaagtgactccgggggtgaactctggcatgcagatgaagggaacttggtggcgcccaaacaggaaagcactcgactctgaagccccagaggggatgttacagccatgctaacagctcttttagtcccaccgtcagcagcctgacaaacgggca

SEQ ID NO: 671870 - DNA, 1027 bp, Homo sapiens
ggaatgaaagaatggttactccataggcagagcagcggcaggagctgctcgactgactatacttacagttatttcttgatcatatgctaaacaaagggtggattattcatgagttttccgggaaaggggtgggcaattcctgcaactgagggttcctaccctttttagaccctatagggtaacttcctgatgttgccatggcatttgtagactgtcctggcactggcaggagtgtcatttagcatggaaatgcattataattagcatataatgagcagtgaggatgaccagaggtcactttcgtcaccatcttggttttggctggctcctttactgcatcctgttttatcagcaaggtctttgtgacctgtatcttrtgcggactttctatctcatcctgacttagaatgcctaagctagtgggaatgcagcctcacaggtctcagccttattttacccagcccctattcaagatggaatcgctctggttcgatcacctctgacaggggcagtgtacattcacatcttggcctttgctgcctcatccttccagatctttcagatgcttgccctctggcattctaggataggaagactgcttccaaagtgacgcaggatttttctcggacacttttccaactgcagacttctggctggcgatgcccctgcccatgcctagctctgccccaggcaggaggtgccctgcccacttgggcttgcactctggtggggatcctgcagccaccgagactgcatgctcagccccagtaggagggggtgtgtgatcaagtgagtgcctcatcttgccagcaactccaagtgctggcgcaggagcgggctccctttggggcctgcagctggatcaggcctgtcggaagtgactccgggggtgaactctggcatgcagatgaagggaacttggtggcgcccaaacaggaaagcactcgactctgaagccccagaggggatgttacagccatgctaacagctcttttagtcccaccgtcagcagcctgacaaacgggca

SEQ ID NO: 671871 - DNA, 1027 bp, Homo sapiens
ggaatgaaagaatggttactccataggcagagcagcggcaggagctgctcgactgactatacttacagttatttcttgatcatatgctaaacaaagggtggattattcatgagttttccgggaaaggggtgggcaattcctgcaactgagggttcctaccctttttagaccctatagggtaacttcctgatgttgccatggcatttgtagactgtcctggcactggcaggagtgtcatttagcatggaaatgcattataattagcatataatgagcagtgaggatgaccagaggtcactttcgtcaccatcttggttttggctggctcctttactgcatcctgttttatcagcaaggtctttgtgacctgtatcttatgcggactttctatctcatcctgacttagaatgcctaagctagtgggaatgcagcctcacaggtctcagccttattttacccagcccctattcaagatggaatcgctctggttcgatcacctctgacaggggcagtgtacattcacatcttggcctttgctgcctcatccttccagatctttcagatgcttgccctctggcattctaggataggaagactgcttccaaagtgacgcaggatttttctcggacacttttccaactgcagacttctggctggcgatgcccctgcccatgcctagctctgccccaggcaggaggtgccctgcccacttgggcttgcactctggtggggatcctgcagccaccgagactgcatgctcagccccagtaggagggggtgtgtgatcaagtgagtgcctcatcttgccagcaactccaagtgctggcrcaggagcgggctccctttggggcctgcagctggatcaggcctgtcggaagtgactccgggggtgaactctggcatgcagatgaagggaacttggtggcgcccaaacaggaaagcactcgactctgaagccccagaggggatgttacagccatgctaacagctcttttagtcccaccgtcagcagcctgacaaacgggca

SEQ ID NO: 671872 - DNA, 1027 bp, Homo sapiens
ggaatgaaagaatggttactccataggcagagcagcggcaggagctgctcgactgactatacttacagttatttcttgatcatatgctaaacaaagggtggattattcatgagttttccgggaaaggggtgggcaattcctgcaactgagggttcctaccctttttagaccctatagggtaacttcctgatgttgccatggcatttgtagactgtcctggcactggcaggagtgtcatttagcatggaaatgcattataattagcatataatgagcagtgaggatgaccagaggtcactttcgtcaccatcttggttttggctggctcctttactgcatcctgttttatcagcaaggtctttgtgacctgtatcttatgcggactttctatctcatcctgacttagaatgcctaagctagtgggaatgcagcctcacaggtctcagccttattttacccagcccctattcaagatggaatcgctctggttcgatcacctctgacaggggcagtgtacattcacatcttggcctttgctgcctcatccttccagatctttcagatgcttgccctctggcattctaggataggaagactgcttccaaagtgacgcaggatttttctcggacacttttccaactgcagacttctggctggcgatgcccctgcccatgcctagctctgccccaggcaggaggtgccctgcccacttgggcttgcactctggtggggatcctgcagccaccgagactgcatgctcagccccagtaggagggggtgtgtgatcaagtgagtgcctcatcttgccagcaactccaagtgctggcgcaggagcgggctccctttggggcctgcagctggatcaggcctgtyggaagtgactccgggggtgaactctggcatgcagatgaagggaacttggtggcgcccaaacaggaaagcactcgactctgaagccccagaggggatgttacagccatgctaacagctcttttagtcccaccgtcagcagcctgacaaacgggca

SEQ ID NO: 671873 - DNA, 657 bp, Homo sapiens
ttccacttatacaatttgtgcttttcctagtgtcaaaggctttccagccagaatgattccatcttgagtgaaggctaagaaaataaggctgggacttgctgggctgcattcatagaaagttaggcattcctagcctctagatgtttactgctaagagaacagattgataatgtttactaaacaggcccagacttgggattgtcttgatatcctgatatcttgagaacagaagcattcctaattttgctttaaagataataatatcgatccttgcaaaacataagaaaattaatcctttatcacaaacccttgtagcatagcacatcttcccatgatctttatttatcctatatataaacaagcgttgtacctagggtggacgcgttcctcttcttccttttgggaactcctggctctgtctatggagtagctgttctttygccactttactttcttaataaatttgcttttgctttgcaccgtggactggccctgaattctttctttcacgagatccaagaaccctctcttggggtctgtatagggacccctttcttgtaacactagcaaggaagtcccttccagagagctctctctggtttagcagcacacttatattggtgcaggatgggaacattccataaagacatattcaca

SEQ ID NO: 671874 - DNA, 1135 bp, Homo sapiens
tgtcataaaatgcacgaatacccatatattaaccagactttttcttaaatggtctcactctgttgcgtaagctggagtgcagcagtgtcatcatggctcactgcagccttgacttcctgggcttgagagatcctcctaccccagcctcccaagtagctgggactacaggcacacacaaccaggcccaggtaattttttttttcatggaaacagggtcttgctacattgcccaggctggtctcaaactcctgggctcaagcaatcctccctcctcagcctcagaaatattttggttgcaaacagctgtaaccacattcaagctaaaggaattggttttttcacacattgagatttaggaacaatgccacatctctcagcactgtttgcatttgcttagcttcattctcaagcaggccttttccctatggtgccaagatggcctctgccatctccatcgatcacttgttccaagtaaaagcaagagagacctatcttgccccaatattggaatattataatctcgtagagggtctatgatcctaatacrattccatgcctacccttggactcacaactagagtaaggaatataaggagccatggttgatgagattagacctggtcaattgctcatgcttgtagtcagaggcagcagtttcacaattaaaagaggttgttggattaaaaaaaataacagagtgttactacattctttctgtgactttaacaaaaaggtaaatggccactgtagtggatattttgcccatgggtgagacggaagtagggctttgagtggtcatagcaggtagaaaattttatggaaaacaatgcctaataaagaaagaaagatgtggagaaagctagtgctttacagaacttcctggggtgaaggaaatcttccatacttatccaatatggtagcaacatattgagcacttgaaatgtggctcatgtaactaaaaaactatatttttagttttgtttaatttaaatatatttacatttaaatagccacagtgcagccttcctcatggtgactttgaagagtcagtctatacgtatctttacaataaagtcattgttccttttagtctttattagtcctttgaatgatattataattaaacaaaaaccaa

SEQ ID NO: 671875 - DNA, 1135 bp, Homo sapiens
tgtcataaaatgcacgaatacccatatattaaccagactttttcttaaatggtctcactctgttgcgtaagctggagtgcagcagtgtcatcatggctcactgcagccttgacttcctgggcttgagagatcctcctaccccagcctcccaagtagctgggactacaggcacacacaaccaggcccaggtaattttttttttcatggaaacagggtcttgctacattgcccaggctggtctcaaactcctgggctcaagcaatcctccctcctcagcctcagaaatattttggttgcaaacagctgtaaccacattcaagctaaaggaattggttttttcacacattgagatttaggaacaatgccacatctctcagcactgtttgcatttgcttagcttcattctcaagcaggccttttccctatggtgccaagatggcctctgccatctccatcgatcacttgttccaagtaaaagcaagagagacctatcttgccccaatattggaatattataatctcgtagagggtctatgatcctaatacgattccatgcctacccttggactcacaactagagtaaggaatataaggagccatggttgatgagattagacctggtcaattgctcatgcttgtagtcagaggcagcagtttcacaattaaaagaggttgttggattaaaaaaaataacagagtgttactacattctttctgtgactttaacaaaaaggtaaatggccactgtagtggatattttgcccatgggtgagacggaagtagggctttgagtggtcatagcaggtagaaaattttatggaaaacaatgcctaataaagaaagaaagatgtggagaawgctagtgctttacagaacttcctggggtgaaggaaatcttccatacttatccaatatggtagcaacatattgagcacttgaaatgtggctcatgtaactaaaaaactatatttttagttttgtttaatttaaatatatttacatttaaatagccacagtgcagccttcctcatggtgactttgaagagtcagtctatacgtatctttacaataaagtcattgttccttttagtctttattagtcctttgaatgatattataattaaacaaaaaccaa

SEQ ID NO: 671876 - DNA, 1206 bp, Homo sapiens
cagctgacaggccttgcctaggaagcctcctgaatgctggcatgaaggtttgaggtccaggaactaatgtttcacttattgttcatttgtggcctcctgatgtgtcatctctgcttttactccacatagtttctttgttccccttattttcattaaacattctttcctgtttacttaaacctctgcagagagggcagcctgaatkttgaaattccacctcatcttgcagttcagtcacctcacaccaatttacttccttgcctaggaagcctcctgaatgctggcatcaaggtttgaggtccaggaactaatgtttcacttattgttcatttgtagcctcctgatgtgtcatctctgcttttactccacatggtttctttgttccccttattttcattaaacattctttcctgtttacttaaacctctacagagagggcagcatctgcagcatctacaattgaaggaggtgatgaaccaggaaaacctaatgccttggatcttgtaggtcagaggtccaagcctggtccagtcctctctgcctggggtacagggataggaattttatgctcaaaacatggaacctagagagtgaggaccacattctttaagaagtaccaataaaaaatgggtgaggaatgagcttggttcagccagtgaattagataacatgattctgattttaaatttgaggaaacagtctcagagaagttcaaatcttagtctggcttgtgatcagacagaccaaagtatgaaccctgacttatctttcagtatctgtgaaacttttggaaagttactcaccctttctgaatgttcaattatgttgttagaaagcgaaaataaaatgcaacccacataaaaacgcttagcatttacccaactagaagcatataacccacctcccactttttacaccctgccccacagtcaaaggccaaggggagagatggccttgtctatgaatgcacttagacgggcttcaaaagtgtggattacaaaccaaagaaggacagagctgcagaaagctgggtgccctgcatgagagatttatagagatttgatgtttgtttttttacccttgagaggaaaaaagcatcagaaatgaaaataagtatatataagagcaagctagcagtaacattgattaacctctgttattttctttgctctgtgtaatgacatccctgccttttcctacaatagg

SEQ ID NO: 671877 - DNA, 1206 bp, Homo sapiens
cagctgacaggccttgcctaggaagcctcctgaatgctggcatgaaggtttgaggtccaggaactaatgtttcacttattgttcatttgtggcctcctgatgtgtcatctctgcttttactccacatagtttctttgttccccttattttcattaaacattctttcctgtttacttaaacctctgcagagagggcagcctgaattttgaaattccacctcatcttgcagttcagtcacctcacaccaatttacttccttgcctaggaagcctcctgaatgctggcatcaaggtttgaggtccaggaactaatgtttcacttattgttcatttgtagcctcctgatgtgtcatctctgcttttactccacatggtttctttgttccccttattttcattaaacattctttcctgtttacttaaacctctacagagagggcagcatctgcagcatctacaattgaaggaggtgatgaaccaggaaaacctaatgccttggatcttgtaggtcagaggtccamgcctggtccagtcctctctgcctggggtacagggataggaattttatgctcaaaacatggaacctagagagtgaggaccacattctttaagaagtaccaataaaaaatgggtgaggaatgagcttggttcagccagtgaattagataacatgattctgattttaaatttgaggaaacagtctcagagaagttcaaatcttagtctggcttgtgatcagacagaccaaagtatgaaccctgacttatctttcagtatctgtgaaacttttggaaagttactcaccctttctgaatgttcaattatgttgttagaaagcgaaaataaaatgcaacccacataaaaacgcttagcatttacccaactagaagcatataacccacctcccactttttacaccctgccccacagtcaaaggccaaggggagagatggccttgtctatgaatgcacttagacgggcttcaaaagtgtggattacaaaccaaagaaggacagagctgcagaaagctgggtgccctgcatgagagatttatagagatttgatgtttgtttttttacccttgagaggaaaaaagcatcagaaatgaaaataagtatatataagagcaagctagcagtaacattgattaacctctgttattttctttgctctgtgtaatgacatccctgccttttcctacaatagg

SEQ ID NO: 671878 - DNA, 590 bp, Homo sapiens
gagctcagacaaactttgtaccaggccaattgtmttttctttgagctcattcattttccctaaaataatttactttccctctagatgtgcccacagtcccccttttccctgtcccctgtgaataggatatttaagaattaaccaactagagggcatttaaggcttaaccaaagctcttctttgagtctcatatttttaggactcccatctccatgtgcatattaataaattgtgtgcatttttcccttgttaatctgtctattgtcagctcatttcagcagtgaactatcagagggcagaggggaagatttctctctgcccctacagtaatttgatatttacagaaactttatagaacataactactgtgaataatgagaatcaactgtatatgtcacctttgaatacctctcttctctcttcactgcattcctttggcacagagatggagccaaactctagtggctagggaagtaaataaaagactgggtctgagtcacctgtttccctaaaggtagcatcaccctctgaaggtgccccttacaggcctctctgggaagggtttcacaatctcctcccacactttacag

SEQ ID NO: 671879 - DNA, 590 bp, Homo sapiens
gagctcagacaaactttgtaccaggccaattgtcttttctttgagctcattcattttccctaaaataatttactttccctctagatgtgcccacagtcccccttttccctgtcccctgtgaataggatatttaagaattaaccaactagagggcatttaaggcttaaccaaagctcttctttgagtctcatatttttaggactcccatctccatgtgcatattaataaattgygtgcatttttcccttgttaatctgtctattgtcagctcatttcagcagtgaactatcagagggcagaggggaagatttctctctgcccctacagtaatttgatatttacagaaactttatagaacataactactgtgaataatgagaatcaactgtatatgtcacctttgaatacctctcttctctcttcactgcattcctttggcacagagatggagccaaactctagtggctagggaagtaaataaaagactgggtctgagtcacctgtttccctaaaggtagcatcaccctctgaaggtgccccttacaggcctctctgggaagggtttcacaatctcctcccacactttacag

SEQ ID NO: 671880 - DNA, 590 bp, Homo sapiens
gagctcagacaaactttgtaccaggccaattgtcttttctttgagctcattcattttccctaaaataatttactttccctctagatgtgcccacagtcccccttttccctgtcccctgtgaataggatatttaagaattaaccaactagagggcatttaaggcttaaccaaagctcttctttgagtctcatatttttaggactcccatctccatgtgcatattaataaattgtrtgcatttttcccttgttaatctgtctattgtcagctcatttcagcagtgaactatcagagggcagaggggaagatttctctctgcccctacagtaatttgatatttacagaaactttatagaacataactactgtgaataatgagaatcaactgtatatgtcacctttgaatacctctcttctctcttcactgcattcctttggcacagagatggagccaaactctagtggctagggaagtaaataaaagactgggtctgagtcacctgtttccctaaaggtagcatcaccctctgaaggtgccccttacaggcctctctgggaagggtttcacaatctcctcccacactttacag

SEQ ID NO: 671881 - DNA, 590 bp, Homo sapiens
gagctcagacaaactttgtaccaggccaattgtcttttctttgagctcattcattttccctaaaataatttactttccctctagatgtgcccacagtcccccttttccctgtcccctgtgaataggatatttaagaattaaccaactagagggcatttaaggcttaaccaaagctcttctttgagtctcatatttttaggactcccatctccatgtgcatattaataaattgtgtgcatttttcccttgttaatctgtctattgtcagctcatttcagcagtgaactatcagagggcagaggggaagatttctctctgcccctacagtartttgatatttacagaaactttatagaacataactactgtgaataatgagaatcaactgtatatgtcacctttgaatacctctcttctctcttcactgcattcctttggcacagagatggagccaaactctagtggctagggaagtaaataaaagactgggtctgagtcacctgtttccctaaaggtagcatcaccctctgaaggtgccccttacaggcctctctgggaagggtttcacaatctcctcccacactttacag

SEQ ID NO: 671882 - DNA, 1094 bp, Homo sapiens
ttgaatatcagtattttaaaagaatagctgtcaacatcagtggcatcctgaaaaagatgtacaaagaagctcatattacccagaaaaatctcacattgtctttcatacttcagaaataaaaagggaaaaggaaaggtaattgtcctttaaacatacatttatatagatgccagagaaaccaaataaaataggaagctatttttcaactgacatgttctaagtcaatataatggcattacatattttctcaatttgtttaatttgattttaaaagtcacaaacatttgaatctacgggtatgaatttcattcacattatatataatgtaaaatatttacttccatgatttwaaaaatcttgtctattttgtgtagttttcttttgaaaatttaatgtgttttctcacatcttgttaatgtacttctaaaaattcatttaccgagtacacaatgagtaagcatcaaattacatctaaataatctgttgattggacagtttctcctcatacactacagaacaattaggcacaatagaaaaaaatctctatgtcaaatataagtgatttttaaaagtgattattaatcataataacataagaacaattggagcagggccttcaatattgtcacatttatgacagtacagttatctttgtgttacaagtatcttaaataagaatagtaaggttttattttatatgagaactatttttacaatttagctaattataaaaagtttgctttgagatatagtctaggttattttggtatgttcttttctctttttcatcttggctagtattactgttagattgtaatagcaatatttatcctccatggcatataacatctgccatttcagtcttccgaagtgatgttgttggggttcagaacacaatactccaacagatggcaccttggcctgctgaatactttgaactaaaggagactggaggcttcagaatcaagggcaaggtcgctgaccttctcctgccctcctgtctccctcccctctcattactctgaagctgaaaccagaattccttttccccaaggcaagtcacagaaactagagcccctcttccccaaagcaag

SEQ ID NO: 671883 - DNA, 1094 bp, Homo sapiens
ttgaatatcagtattttaaaagaatagctgtcaacatcagtggcatcctgaaaaagatgtacaaagaagctcatattacccagaaaaatctcacattgtctttcatacttcagaaataaaaagggaaaaggaaaggtaattgtcctttaaacatacatttatatagatgccagagaaaccaaataaaataggaagctatttttcaactgacatgttctaagtcaatataatggcattacatattttctcaatttgtttaatttgattttaaaagtcacaaacatttgaatctacgggtatgaatttcattcacattatatataatgtaaaatatttacttccatgatttaaaaaakcttgtctattttgtgtagttttcttttgaaaatttaatgtgttttctcacatcttgttaatgtacttctaaaaattcatttaccgagtacacaatgagtaagcatcaaattacatctaaataatctgttgattggacagtttctcctcatacactacagaacaattaggcacaatagaaaaaaatctctatgtcaaatataagtgatttttaaaagtgattattaatcataataacataagaacaattggagcagggccttcaatattgtcacatttatgacagtacagttatctttgtgttacaagtatcttaaataagaatagtaaggttttattttatatgagaactatttttacaatttagctaattataaaaagtttgctttgagatatagtctaggttattttggtatgttcttttctctttttcatcttggctagtattactgttagattgtaatagcaatatttatcctccatggcatataacatctgccatttcagtcttccgaagtgatgttgttggggttcagaacacaatactccaacagatggcaccttggcctgctgaatactttgaactaaaggagactggaggcttcagaatcaagggcaaggtcgctgaccttctcctgccctcctgtctccctcccctctcattactctgaagctgaaaccagaattccttttccccaaggcaagtcacagaaactagagcccctcttccccaaagcaag

SEQ ID NO: 671884 - DNA, 1094 bp, Homo sapiens
ttgaatatcagtattttaaaagaatagctgtcaacatcagtggcatcctgaaaaagatgtacaaagaagctcatattacccagaaaaatctcacattgtctttcatacttcagaaataaaaagggaaaaggaaaggtaattgtcctttaaacatacatttatatagatgccagagaaaccaaataaaataggaagctatttttcaactgacatgttctaagtcaatataatggcattacatattttctcaatttgtttaatttgattttaaaagtcacaaacatttgaatctacgggtatgaatttcattcacattatatataatgtaaaatatttacttccatgatttaaaaaatcttgtctattttgtgtagttttcttttgaaaatttaatgtgttttctcacatcttgttaatgtacttctaaaaattcatttaccgagtacacaatgagtaagcatcaaattacatctaaataatctgttgattggacagtttctcctcatacactacagaacaattaggcacaatagaaaaaaatctctatgtcaaatataagtgatttttaaaagtgattattaatcataataacataagaacaattggagcagggccttcaatattgtcacatttatgacagtacagttatctttgtgttacragtatcttaaataagaatagtaaggttttattttatatgagaactatttttacaatttagctaattataaaaagtttgctttgagatatagtctaggttattttggtatgttcttttctctttttcatcttggctagtattactgttagattgtaatagcaatatttatcctccatggcatataacatctgccatttcagtcttccgaagtgatgttgttggggttcagaacacaatactccaacagatggcaccttggcctgctgaatactttgaactaaaggagactggaggcttcagaatcaagggcaaggtcgctgaccttctcctgccctcctgtctccctcccctctcattactctgaagctgaaaccagaattccttttccccaaggcaagtcacagaaactagagcccctcttccccaaagcaag

SEQ ID NO: 671885 - DNA, 1094 bp, Homo sapiens
ttgaatatcagtattttaaaagaatagctgtcaacatcagtggcatcctgaaaaagatgtacaaagaagctcatattacccagaaaaatctcacattgtctttcatacttcagaaataaaaagggaaaaggaaaggtaattgtcctttaaacatacatttatatagatgccagagaaaccaaataaaataggaagctatttttcaactgacatgttctaagtcaatataatggcattacatattttctcaatttgtttaatttgattttaaaagtcacaaacatttgaatctacgggtatgaatttcattcacattatatataatgtaaaatatttacttccatgatttaaaaaatcttgtctattttgtgtagttttcttttgaaaatttaatgtgttttctcacatcttgttaatgtacttctaaaaattcatttaccgagtacacaatgagtaagcatcaaattacatctaaataatctgttgattggacagtttctcctcatacactacagaacaattaggcacaatagaaaaaaatctctatgtcaaatataagtgatttttaaaagtgattattaatcataataacataagaacaattggagcagggccttcaatattgtcacatttatgacagtacagttatctttgtgttacaagtatcttaaataagaatagtaaggttttattttatatgagaactatttttacaatttagctaattataaaaagtttgctttgagatatagtctaggttattttggtatgttcttttctctttttcatcttggctagtattactgttagattgtaatagcaatatttatcctccatggcatataacatctgccatttcagtcttccgaagtgatgttgttggggttcagaacacaatactccaacagatggcaccttggcctgctgaatactttgaactaaaggagactggaggcttcagaatcaagggcaaggtcgctgaccttctcctgccctcctgtctccctcccctctcattactctgaagctgaaaccagaattccttttccccaaggcaagtcacagaawctagagcccctcttccccaaagcaag

SEQ ID NO: 671886 - DNA, 625 bp, Homo sapiens
tctttaattcatcttgagttaatttttttataaggtgtaaggaaggggtccagttccagttttctgcatatggctagccagttttctcagaaccatttattagatagggaatcctttccccattccttgtttttgtcaggtttgttgaagatcagatggttgtagatgtgtggtgttatttctgaggtctctgttctgttccattggtctatatggcaagaggaccctttaaactttataagtttacatatacaatgtgtgtgtatgtcaacatacatktgcatgaagtgtgtaggaaacatggggggagtggcccctttattcttgttatatgtggatatatgtatacccacagtatatatctgtatatattagtatatacacagtatatatatatgaatatatgtatatatacacacgtagtatatatatggcatttcattgagatgtcttaagactgacaaattttaggactattatcttggcttttctctttaatctatctcagtgtttcttgattagggccaatttttaaatgtctctgaacatttttggttgtcacaactggggacgggatggggaaaggtgttaccggcatcctacaatgcacaggacagctccggca

SEQ ID NO: 671887 - DNA, 1621 bp, Homo sapiens
tgccctacctcatcctctgctagggagctgatcacctgaacccagtgagacagaaccaattccagactgtgatatagattttttaaaactagacttttttttttagagcagttttaggttcacagcaaaattgggtagaacttatagagttcccatatattccctgtcaaccccccgcaacctcccttactatcaatatcccaccccagggaagtgtattttttacaattgatcaatctacatcaacacaccattatcatccaaagttcatagtttacagtagggttcactcttggtactgtgcattttatgggttttgacaaatgaaaagagatatgtgtccaccatcatagtatcataaagagtattttcactgccctaaaaattttctgtgctcctcctactcatccctccctacctcaagcccctggcagctactgatctatttactgtctccatagttttgccttttccagaatgtcatactgtacattactgtttttgagagtctcttttccatctcagattcatccctgttcctagagagtagctctcctagagttccccctgagaacctggggtgttcactgaggccctttcctcttggcgagccttttaagattgcaaaacctctgctgtattcagacacttttgcttagttgcttaatgtcctgctccatgcagcctcagaatttggcaaatattttgataggaaaacagtgtcaagtgtccattaacctttctcattgggtttccagcctcatgagatttggatttttccagtccccaaaactggaaccaaaaattckgctgtctttactgcctcttagaggccttctgcccaagtctgttgcctggattctttccctcttgccaagtactctgaactagcaaatgccccaaaggaaaaatcagttataaaatgtcgacattcctctctaagttttctcattctccaggacttgttgcccaagtctgagtttcctcatcgcttcttcaatgacttcaaatagatgctattttgtgtatattatccagcttttctagttgtctcagtgagagcaatgaccttcatctcagctgaaaggggaggtcccaatatacattcctgacagatgtttctgtatttccttattactttgttaagattacaaatattattttaaaaatcccccaaatctacttgttctactaaccatgtctttggtgttttttggtatgtcattcacaagtataaatctctactttaatatggcatgttcctatataaaaaatatttggtcatttgttgtgtaaatacttgttgtataagtttttttaaatgaattttaaaataagtctctgggagtcagaattaccatattgtatagtgtatacaaatttcaactaaccaatagaaatgttggggaaatataattttatattaatattttaataactatattttgtttcaatattgagctttcattttacttgggtgacggaaaataaatctcagtcaattttgggatttcccaaggatttcatttaagaaccaaggggcttacatagtgccaaggcatcagactggggaaggatcttatgctcagtgtcacctgtcatgtttgctataatttgaatg

SEQ ID NO: 671888 - DNA, 608 bp, Homo sapiens
tgattcccrcagccaccctcagagtttccgagagagccactgcaagagtggcatctgtccacttcagttgtccccaggggcggctctgtccccagggacatacggccatgtgtagagagattttggtggcgtgtgcctgaagtcccagctacttaggaggctgaggcaggatggcttgagactaggactttatgaccatcctgggtaacagagtgagaccttgtctcgaaaaaaaaacaacaaaaacccaaccaacagatgtcttggttgtcacaacttggaggtggaggtggtggcagcacctagtgggccggggccagggctgccgctcaccccccgtggtgtccagggacacctccactgtggagtgacctggccccagacgccaggagggccgaggtgagggtcctgctctggcccacagtcagggccgcccccgcgtctgcccccagggaaagcactggcttctagtgtggtgtgcggggcagagccgagtctgtgcctaagcccgcttgcctgctggcaggggctttccctgtggtggccctgggctctggggaccctcctgtccctatgtgttctgcacttgggaccacccacgtcacctc

SEQ ID NO: 671889 - DNA, 608 bp, Homo sapiens
tgattcccgcagccaccctcagagtttccgagagagccactgcaagagtggcatctgtccacttcagttgtccccaggggcggctctgtccccagggacatayggccatgtgtagagagattttggtggcgtgtgcctgaagtcccagctacttaggaggctgaggcaggatggcttgagactaggactttatgaccatcctgggtaacagagtgagaccttgtctcgaaaaaaaaacaacaaaaacccaaccaacagatgtcttggttgtcacaacttggaggtggaggtggtggcagcacctagtgggccggggccagggctgccgctcaccccccgtggtgtccagggacacctccactgtggagtgacctggccccagacgccaggagggccgaggtgagggtcctgctctggcccacagtcagggccgcccccgcgtctgcccccagggaaagcactggcttctagtgtggtgtgcggggcagagccgagtctgtgcctaagcccgcttgcctgctggcaggggctttccctgtggtggccctgggctctggggaccctcctgtccctatgtgttctgcacttgggaccacccacgtcacctc

SEQ ID NO: 671890 - DNA, 661 bp, Homo sapiens
tggatatgcttgaaattccattgttacatttatcttgtctgcatttttctgcatttatttctaatgtgtctgctaggccagtacctctctgggaacataatataaaaacaactattaagtaaatagaaaagcttaaacaatacgcatataactccagcttgaagcattttttaatgctttataaatcactagaaaacacgtgacaggaactattcctgatcagtcttaggatgtgcaggatgccccaagaagcttttcctgtttactacttttttgagtgtatgaatatatgttttttgactttgagatagttaatatccagaagagttctttggctatggaaatagccttgaaggcttgggtctgggaaaatartagagagaaagagttactagggcttagtagaagaattgagggaaggatgcagggaaaagcggacaataaatagaaagaggaagctggtgaaggtagactttggcagctggggcagcggcacttgggccgcttatgtgaggtagcccgcagaggcacctttgggtggagagagaataaaatctggttttgacacgtttgttttagatggcaatgaaatgtctagcctatatattttgtagacactgagaaataagggactgaaaagaggaagaggtgtcagggctga

SEQ ID NO: 671891 - DNA, 1971 bp, Homo sapiens
acacaagtaaaatggacataattcaacataaaataaatgttatttataattctaactataaccttaaatatgaagaacatgtatttcctcttagtaattctgatcctaaactatttgtaagtttgataaacctattcccatttctttactcaaatttttcatcttttaataatctcataatatgattgattattttaaggagaaatttaattttttttctttattgttttgcagctacaacatcgatttctcagttcatcttcatgttctttagctgcatcatgcagagaagaataacttgatactgtcactagtgtcagtttcaatgctatcatgtttacattattcttgttcagaaagtgtttgggacagagggaggcttgttatggcagtggctgttttatcatacaacaatattttgtctttacsacagctcttgtaggcatggtttttatattttaaagactgtaattatgtgttttctatattaattaactaatgcaataattggtgtaaacatttctgaatggaaatactttagaactaaaaaccagcgtagtatactagaatcctagagtatctctaaaatctaattataatgataattttttaagaagcacaccctgatattcaactagtttaactttctttaaatcacaaatatagagaatttgaagctgtatcatatatatttcagagatctacattaatatttacacaaagacaaacacaaactcttagtattaaaacaatcatttaaaatactgcaggcaacacatttcagagttcttaaagatgataattcaaagctttttaaaaggtagtactagataagcaatatcagatgacaataaggaactagcactaaagattcaatattgctggttttatgtgatattttgtgatcatgaagatgcccatggatatgccataatatacaggacaccatcccttatggaattatgatacttctgtgcctgtatctcaggttcttctgagaaaaatatcagttcttcacctaagaagctcatctacagaaagaactcataaattttgggattccaatttggagatagtaattgagttaccatattagttttctcttgctgtacaacaaaatactacacatttaacagattaaaacaccatacatttattatctcacagttctgtaggtcagaaatctggcacagaataagtggattctctctgttcagggtctcacaaaaccagaggcaaggtatcagaatgggtcagctgttatctggaagatctggggaataagcctctttcaatctcatttagtttgttggctgaatgcagttccttgaggttgtaggactgagatccctattttcttgttgacaggcccctgggggctgctatctgcttctggaagttgcctgcatttttttttctcctgaggccagtctctatcttcaaaccagaaaagggacattgcatgagtccctcttgtactttgaatttcattgacgcctcctctatcacatccctctggattcctttcctgcctccttcttccacatttaaggactcaggtaattacactggacccaccttgataatcctggataatctctctattttaatatcaaccaattaaatttggtttcatctgcgaaatcctttttactgtgctactaactgtggctataacaccacaaattgaaaattatggtaaccaaaattctgagtaccacagttactttccaaaggatatttgtacatttgatacaaccactttttttcaaacatttcctttacccaatagcaaatacatgtagagcaatttcagtatataagaaaacttaattgaatgcagtgtacttttttatagattttaatatcgtatatcatatttgattatctcaaaatagccttattaattagtatcataatgtattcttccttcagaagctagaaaaacagattcatttcaaagcctatgca

SEQ ID NO: 671892 - DNA, 1971 bp, Homo sapiens
acacaagtaaaatggacataattcaacataaaataaatgttatttataattctaactataaccttaaatatgaagaacatgtatttcctcttagtaattctgatcctaaactatttgtaagtttgataaacctattcccatttctttactcaaatttttcatcttttaataatctcataatatgattgattattttaaggagaaatttaattttttttctttattgttttgcagctacaacatcgatttctcagttcatcttcatgttctttagctgcatcatgcagagaagaataacttgatactgtcactagtgtcagtttcaatgctatcatgtttacattattcttgttcagaaagtgtttgggacagagggaggcttgttatggcagtggctgttttatcatacaacaatattttgtctttacgacagctcttgtaggcatggtttttatattttaaagactgtaattatgtgttttctatattaattaactaatgcaataattggtgtaaacatttctgaatggaaatactttagaactaaaaaccagcgtagtatactagaatcctagagtatctctaaaatctaattataatgataattttttaagaagcacascctgatattcaactagtttaactttctttaaatcacaaatatagagaatttgaagctgtatcatatatatttcagagatctacattaatatttacacaaagacaaacacaaactcttagtattaaaacaatcatttaaaatactgcaggcaacacatttcagagttcttaaagatgataattcaaagctttttaaaaggtagtactagataagcaatatcagatgacaataaggaactagcactaaagattcaatattgctggttttatgtgatattttgtgatcatgaagatgcccatggatatgccataatatacaggacaccatcccttatggaattatgatacttctgtgcctgtatctcaggttcttctgagaaaaatatcagttcttcacctaagaagctcatctacagaaagaactcataaattttgggattccaatttggagatagtaattgagttaccatattagttttctcttgctgtacaacaaaatactacacatttaacagattaaaacaccatacatttattatctcacagttctgtaggtcagaaatctggcacagaataagtggattctctctgttcagggtctcacaaaaccagaggcaaggtatcagaatgggtcagctgttatctggaagatctggggaataagcctctttcaatctcatttagtttgttggctgaatgcagttccttgaggttgtaggactgagatccctattttcttgttgacaggcccctgggggctgctatctgcttctggaagttgcctgcatttttttttctcctgaggccagtctctatcttcaaaccagaaaagggacattgcatgagtccctcttgtactttgaatttcattgacgcctcctctatcacatccctctggattcctttcctgcctccttcttccacatttaaggactcaggtaattacactggacccaccttgataatcctggataatctctctattttaatatcaaccaattaaatttggtttcatctgcgaaatcctttttactgtgctactaactgtggctataacaccacaaattgaaaattatggtaaccaaaattctgagtaccacagttactttccaaaggatatttgtacatttgatacaaccactttttttcaaacatttcctttacccaatagcaaatacatgtagagcaatttcagtatataagaaaacttaattgaatgcagtgtacttttttatagattttaatatcgtatatcatatttgattatctcaaaatagccttattaattagtatcataatgtattcttccttcagaagctagaaaaacagattcatttcaaagcctatgca

SEQ ID NO: 671893 - DNA, 644 bp, Homo sapiens
atagcagcattgcactctagcctgggtgacagagggagacttcatctcaaaaaataataataataataagtggagagtacacctgatgtaattaccacccctgtggcaagctaagtaagtaaatataaagtttgtaacagtcctcaaagctatacagaataattatgcaaaatattttagaaactattttataaaatgataacgtatgactatactttttaaaaagtgaatttagctacactgtataaaagttgacatttatataatatcaaaataggtagagatgtaatcagttcaatggaaaaagttagaaaaactagcttatttagaatctcctggcagggacaataawgctgtttaagtgactaagcatcttaattactgctgtacatacagccactgcttctttagtgttgtgctattgaatttttttgccatgctacaaacataattattttgaaagtattacattgtagcaacaggttcaagccaacttttagcagtagaattgtaggatcaaaaatgtgtgtatattttttagaacttagtgtgagcggtattgacaaaatgtccaccaaaactgttgcatcaatttaaactcccaattttttttaaagaccattgatgttagcttaggatgtgaa

SEQ ID NO: 671894 - DNA, 610 bp, Homo sapiens
catataatccttattcttaatactccatcactgtgagctgagactttctgctagtgtttagggtagatttacaacataaatatatggctaaaatatgagaagcatttttcttgattcaatatttttcctcgcacacagttgtgttaatccaagaaatctcaagaaactactaactaacttagagaagccactaaargacaattcattctaattttcacgtaaatcaaagacttatctgactaatgctgaataagttggggagagatttcatcatctttaaaaattcagattaaaaataattgtaaaaccacaagaaactaagtaatattcagtcacacatacccgaagaacagcagaatatacattcttcaagaaaacagtgaacatgtaacatgatagattgctttctgagccataaaacatgtctcagtattttaaacttacttacataatacaacatttattatctgccttcagtgggattcaattagaaattataatcttcaactaaagcaaggctttgagaaacaaattatagatttgaacacttttaaagaaacagagctcatgttatttagaaaactattaaattacaattaaaccacagaaa

SEQ ID NO: 671895 - DNA, 610 bp, Homo sapiens
catataatccttattcttaatactccatcactgtgagctgagactttctgctagtgtttagggtagatttacaacataaatatatggctaaaatatgagaagcatttttcttgattcaatatttttcctcgcacacagttgtgttaatccaagaaatctcaagaaactactaactaacttagagaagccactaaaggacaattcattctaattttcacgtraatcaaagacttatctgactaatgctgaataagttggggagagatttcatcatctttaaaaattcagattaaaaataattgtaaaaccacaagaaactaagtaatattcagtcacacatacccgaagaacagcagaatatacattcttcaagaaaacagtgaacatgtaacatgatagattgctttctgagccataaaacatgtctcagtattttaaacttacttacataatacaacatttattatctgccttcagtgggattcaattagaaattataatcttcaactaaagcaaggctttgagaaacaaattatagatttgaacacttttaaagaaacagagctcatgttatttagaaaactattaaattacaattaaaccacagaaa

SEQ ID NO: 671896 - DNA, 636 bp, Homo sapiens
aatgagaaaatacacaaggccttgccacaaaatacttttcacagactgaaaatttgtgttcccccaatactgatatgttgaaaccccacctttaatgtaatggtattgggaggtggggcttttgagaggtgatcaggtcataatggtgaagttctcatgaatggggttagtgcccttacaaaacagtgtgcttctcttggccatgtgagggcagaaaaagaagatagtcatctacaagccaagaagccagccagacaccagacttgctgggactttgatccyggagttcgtagcctgcagagttatgagaaataaatgtctgttgtttataagccacccagttcatggtattttgttattgcagcctgatctggctaaaacaatactataaaccaacattaggtccacttacgtgctaataatagtaccataactagaatcaatagtagtaataacagtaatggtagaagttgtaaatttctaaaagtaaagaaggcagatagaaacactacatcattgcttctcctttccagtattccataaaaagataaaaatggaaagtataaaatggcgttaacccttaacagagcatagaagagaatggtccatggacaaaaatttcgacaattattggaa

SEQ ID NO: 671897 - DNA, 856 bp, Homo sapiens
ccagtttctatggaactcagcacgcccccattgctgttaaatatgcctcgggctgtggccaccacagtatgaccatcttcatcttcatcctcttccacagctgaaggactgaaagttcagaaatggctagtgagtgaattcctaataatacacaggtgctytgcttttactactactgtattacgtgctttcacttttatttctccatataatcaagaagttactttaacaagataagtttctggcaacagattttactgacagggttatcgcagagaatattatttcttttttgtttgtttgtttggttttgagacagagtctcactctgtcgcccaggctggagtgcagtggcacaatcttggttcactgcaacctccatctcccaggttcaagtgatttttctgcctcagcctcccatgtagctgggactacaggcgcacgccaccaagcctggctaatttttgtatttttagtagagatggggtttcaccatattggccggggtggtctcaaactcctgatctcgtcgtgatccacctgccttggtctcccaaagtgctgaggttacaggcgtgagccaccgcgcctggcgagaatattatttctagagaaattccattctagaaaatttcaaaaattctagagaaatgtcaaaaattcaatttttgaaggcaattagtcaaacgaccttcattaatgaattgcaacctgaaagtgtaaaatctgatgccttgaacacccaactacaggtgaagcatccctaacctgaaaatctgaaatgctccaaaatcggaaacttttttttgagtgtcaaaatgaagctcaaaggaaatgctcattggagcattttggc

SEQ ID NO: 671898 - DNA, 1477 bp, Homo sapiens
atggtcctgcctcagcattccctgaggaccaagcgcccgctctggctgtaggaggcaaggcttccaaggttccatgaggcgaagacccttgtatgggcatatcccaaacatccacgaaagagagacagtagattaacttagtaatcacagaacgccaaaggcaaaggggatgtggtatcaatgactgcttcaaaagtagaggctatcaacttcctgaaagtacagttttgagccagggctcaaaggtgagcagaaagaccaacgaaacagaattacatgaaggtagctgccgtttcactccagcatgaccggagtgccagggacgacatcctacgacacaacatcaagggagcagagcgcagcctgagctgcagagcagaggccagctctgtccgcccctgaccatctgtggatgtgcagagctaggaaggcagtgaccgccataaccatcctttctcttggaaagcagactcaggtggccatcctgacctttggttctccctgcctgcaagtgcttctgctttatggtggcgtgaaaatggaactggctgtaggaggctgagatgagcttttatgtatggccagaatccatctggtcaatcgccgtggaatgaaagacaggaaagaggagctgcagggaggctccaggtgggctcactttgtctcatttgctcagccatctcactaactgctgctctttaaacagtcagaggttattctatttttcttcttagcatcattgtggaacaaataatgaatgaggaacatagatacttaatgtttttagatgtcctccacatgcaccttaccagtaggtcaggaggttacaaaaggtcatggctggttaagagtatgggctcctggctgggtgcagtggctcacgcctgtaatcctaacactttgggaggtggaggcggatggatcacttgagatcagaagttcaaaaccagtctggccaacatggtgaaaacctytactaaaaatacaaaaaatttagccaggcgtggtggcacacacctgtagtcccagctacttaggaggctgaggcaggagaattgcctgaacccagggggtggaggttgcagtgaaccaagatcgcaccactgcactccagcctgggcgacagagggagactcttgtctcaaaaaaaaaaaaaaaaaaaagcatgggctcagaggtcggatgaccagcagctaaattgaggctcacctcactctagctgtgaccctgggcaaactgcttactgtcactcaacctcagttcttagtaaaacagggatgatgacaatacctaccaaccatacacgactgttagctttattattttaccaacatcttgtacctcctggaggaccttctatgtaacagcattcattgcaacaacactcttcagtttaaaggttgagttaaaaagatcactttaaagtcccaagtcaaataaactacaacaaactcacatgagaaaaatcacagggcca

SEQ ID NO: 671899 - DNA, 1477 bp, Homo sapiens
atggtcctgcctcagcattccctgaggaccaagcgcccgctctggctgtaggaggcaaggcttccaaggttccatgaggcgaagacccttgtatgggcatatcccaaacatccacgaaagagagacagtagattaacttagtaatcacagaacgccaaaggcaaaggggatgtggtatcaatgactgcttcaaaagtagaggctatcaacttcctgaaagtacagttttgagccagggctcaaaggtgagcagaaagaccaacgaaacagaattacatgaaggtagctgccgtttcactccagcatgaccggagtgccagggacgacatcctacgacacaacatcaagggagcagagcgcagcctgagctgcagagcagaggccagctctgtccgcccctgaccatctgtggatgtgcagagctaggaaggcagtgaccgccataaccatcctttctcttggaaagcagactcaggtggccatcctgacctttggttctccctgcctgcaagtgcttctgctttatggtggcgtgaaaatggaactggctgtaggaggctgagatgagcttttatgtatggccagaatccatctggtcaatcgccgtggaatgaaagacaggaaagaggagctgcagggaggctccaggtgggctcactttgtctcatttgctcagccatctcactaactgctgctctttaaacagtcagaggttattctatttttcttcttagcatcattgtggaacaaataatgaatgaggaacatagatacttaatgtttttagatgtcctccacatgcaccttaccagtaggtcaggaggttacaaaaggtcatggctggttaagagtatgggctcctggctgggtgcagtggctcacgcctgtaatcctaacactttgggaggtggaggcggatggatcacttgagatcagaagttcaaaaccagtctggccaacatggtgaaaacctctactaaaaatacaaaaaatttagccaggcgtggtggcacacacctgtagtcccagctacttaggaggctgaggcaggagaattgcctgaacccagggggtggaggttgcagtgaaccaagatygcaccactgcactccagcctgggcgacagagggagactcttgtctcaaaaaaaaaaaaaaaaaaaagcatgggctcagaggtcggatgaccagcagctaaattgaggctcacctcactctagctgtgaccctgggcaaactgcttactgtcactcaacctcagttcttagtaaaacagggatgatgacaatacctaccaaccatacacgactgttagctttattattttaccaacatcttgtacctcctggaggaccttctatgtaacagcattcattgcaacaacactcttcagtttaaaggttgagttaaaaagatcactttaaagtcccaagtcaaataaactacaacaaactcacatgagaaaaatcacagggcca

SEQ ID NO: 671900 - DNA, 802 bp, Homo sapiens
ttggtagaatttactaaaaatacaagttatctgtatttgccttataaaggccttcatatagtgtccaatattttctaaccagatgtacagtgaaaatgattgatgctcaaatacattttcatggtcaatgcaacaaccgttgagcaaaaaaattaacatttattgcagacactgggcagttgtcaaacaatattmatgtcattaaatcaataaatgggcacagaataatggaagcaaggtcgtggatgaacagatggcagtgtaatggagtcaatcttttactgatttaaccactctcctcttatttctaatgtcccttccatcacgatgagttctctttgggatgatgtgtatctaactgaagctcctcctcaacagctgctgagaattgagtgttgatggtaattatccgtatgatttttaatcagacacttttcacagattcaagtggaatgataactctatgggaaattgataggacagccagagttatgtaaattttggaaaaaaaaattaatcaacaccgaatacaaatattatgtctaaaggctaacaactggatgatcataataactcaatggctaataaataaactagggaaatccaagccggaattagaagtaaaaattggccattatataattatgaccaagaagttctttcttaattagcaaggggtacagctgtatgtttatttcaaagtaattttttgtttgcagttacaatgttgaatgaaaggctaaaacaattccttccttagccctttccctttgatgtgaaaaattaactctgagtaccctca

SEQ ID NO: 671901 - DNA, 1064 bp, Homo sapiens
  misc_feature 278, 279, 280, 281, 282, 283, 284, 285, 286, 287, 288, 289,290, 291, 292, 293, 294, 295, 296, 297, 298, 299, 300, 301,302, 303, 304, 305, 306, 307, 308, 309, 310, 311, 312, 313,314, 315, 316, 317, 318, 319, 320, 321, 322, 323, 324: n = A,T,C or G
  misc_feature 325, 326, 327, 328, 329, 330, 331, 332, 333, 334, 335, 336,337, 338, 339, 340, 341, 342, 343, 344, 345, 346, 347, 348,349, 350, 351, 352, 353, 354, 355, 356, 357, 358, 359, 360,361, 362, 363, 364, 365, 366, 367, 368, 369, 370, 371: n = A,T,C or G
  misc_feature 372, 373, 374, 375, 376, 377: n = A,T,C or G
cttcctctttgtatgtttaggtctgggaaatttgtttggaattagcaacctgggatgaggtttattaagacagaatgactatgarcttgcctgcaaagtggccgctcctttcttcccttcttttctatcaggtcattcgcccattgagaggtggtatctatttctgtgcccccatgaatctgcatttgcagattccaagattaggacataagaagctatttagcttttgcctgggtctcgtggaatgcaggggaatctggggaaagccaagctctctnnnnnnnnnnnnnnnnnnnnnnnnnnnnnnnnnnnnnnnnnnnnnnnnnnnnnnnnnnnnnnnnnnnnnnnnnnnnnnnnnnnnnnnnnnnnnnnnnnnnaatccccaataagtaagttcctatggacagaggctgtgcatgtttgttgttttagtcctgatacctatcacagctgcctgacaacccagtgcccagcaatacagaaaaatgcacagactgaataatacaggaaattgtagtctgggcgcggtggctcaggcctgtaatcccagccctttgggaggccgaggtgggtggatcacgaggtcaggagatcgagaccacgatgaaaccacgtctctactaaaaatacaaaaaaaattagccgggcgcggtggcgggcggcctatagtctcagctactcgggaggctgaggcaggagaatggcatgaacccaggaggcggagcttgcagtgagccgagatcgcgccactgcactccagcctgggcgacagagcgagactgtgtctcaaaaaaaaaaaaaaaatacaggaagttgtaaccaggaggacccattgaaagtggagtgtattctttcactcagtattcactgggaatgcactatacactagttccaatgcttgtgttgggaattcagtgaagagcaagaaagacaaagtagcccctggcacttacattctagtaagggaaatagtcattaaacatatatactatatagggtgtcagagagtgacaagtgccacgaagaaaataaagcagggaagggagttacagagtgatagaagg

SEQ ID NO: 671902 - DNA, 1064 bp, Homo sapiens
  misc_feature 278, 279, 280, 281, 282, 283, 284, 285, 286, 287, 288, 289,290, 291, 292, 293, 294, 295, 296, 297, 298, 299, 300, 301,302, 303, 304, 305, 306, 307, 308, 309, 310, 311, 312, 313,314, 315, 316, 317, 318, 319, 320, 321, 322, 323, 324: n = A,T,C or G
  misc_feature 325, 326, 327, 328, 329, 330, 331, 332, 333, 334, 335, 336,337, 338, 339, 340, 341, 342, 343, 344, 345, 346, 347, 348,349, 350, 351, 352, 353, 354, 355, 356, 357, 358, 359, 360,361, 362, 363, 364, 365, 366, 367, 368, 369, 370, 371: n = A,T,C or G
  misc_feature 372, 373, 374, 375, 376, 377: n = A,T,C or G
cttcctctttgtatgtttaggtctgggaaatttgtttggaattagcaacctgggatgaggtttattaagacagaatgactatgaacttgcctgcaaagtggccgctcctttcttcccttcttttcyatcaggtcattcgcccattgagaggtggtatctatttctgtgcccccatgaatctgcatttgcagattccaagattaggacataagaagctatttagcttttgcctgggtctcgtggaatgcaggggaatctggggaaagccaagctctctnnnnnnnnnnnnnnnnnnnnnnnnnnnnnnnnnnnnnnnnnnnnnnnnnnnnnnnnnnnnnnnnnnnnnnnnnnnnnnnnnnnnnnnnnnnnnnnnnnnnaatccccaataagtaagttcctatggacagaggctgtgcatgtttgttgttttagtcctgatacctatcacagctgcctgacaacccagtgcccagcaatacagaaaaatgcacagactgaataatacaggaaattgtagtctgggcgcggtggctcaggcctgtaatcccagccctttgggaggccgaggtgggtggatcacgaggtcaggagatcgagaccacgatgaaaccacgtctctactaaaaatacaaaaaaaattagccgggcgcggtggcgggcggcctatagtctcagctactcgggaggctgaggcaggagaatggcatgaacccaggaggcggagcttgcagtgagccgagatcgcgccactgcactccagcctgggcgacagagcgagactgtgtctcaaaaaaaaaaaaaaaatacaggaagttgtaaccaggaggacccattgaaagtggagtgtattctttcactcagtattcactgggaatgcactatacactagttccaatgcttgtgttgggaattcagtgaagagcaagaaagacaaagtagcccctggcacttacattctagtaagggaaatagtcattaaacatatatactatatagggtgtcagagagtgacaagtgccacgaagaaaataaagcagggaagggagttacagagtgatagaagg

SEQ ID NO: 671903 - DNA, 1064 bp, Homo sapiens
  misc_feature 278, 279, 280, 281, 282, 283, 284, 285, 286, 287, 288, 289,290, 291, 292, 293, 294, 295, 296, 297, 298, 299, 300, 301,302, 303, 304, 305, 306, 307, 308, 309, 310, 311, 312, 313,314, 315, 316, 317, 318, 319, 320, 321, 322, 323, 324: n = A,T,C or G
  misc_feature 325, 326, 327, 328, 329, 330, 331, 332, 333, 334, 335, 336,337, 338, 339, 340, 341, 342, 343, 344, 345, 346, 347, 348,349, 350, 351, 352, 353, 354, 355, 356, 357, 358, 359, 360,361, 362, 363, 364, 365, 366, 367, 368, 369, 370, 371: n = A,T,C or G
  misc_feature 372, 373, 374, 375, 376, 377: n = A,T,C or G
cttcctctttgtatgtttaggtctgggaaatttgtttggaattagcaacctgggatgaggtttattaagacagaatgactatgaacttgcctgcaaagtggccgctcctttcttcccttcttttctatcaggtcattcgcccaytgagaggtggtatctatttctgtgcccccatgaatctgcatttgcagattccaagattaggacataagaagctatttagcttttgcctgggtctcgtggaatgcaggggaatctggggaaagccaagctctctnnnnnnnnnnnnnnnnnnnnnnnnnnnnnnnnnnnnnnnnnnnnnnnnnnnnnnnnnnnnnnnnnnnnnnnnnnnnnnnnnnnnnnnnnnnnnnnnnnnnaatccccaataagtaagttcctatggacagaggctgtgcatgtttgttgttttagtcctgatacctatcacagctgcctgacaacccagtgcccagcaatacagaaaaatgcacagactgaataatacaggaaattgtagtctgggcgcggtggctcaggcctgtaatcccagccctttgggaggccgaggtgggtggatcacgaggtcaggagatcgagaccacgatgaaaccacgtctctactaaaaatacaaaaaaaattagccgggcgcggtggcgggcggcctatagtctcagctactcgggaggctgaggcaggagaatggcatgaacccaggaggcggagcttgcagtgagccgagatcgcgccactgcactccagcctgggcgacagagcgagactgtgtctcaaaaaaaaaaaaaaaatacaggaagttgtaaccaggaggacccattgaaagtggagtgtattctttcactcagtattcactgggaatgcactatacactagttccaatgcttgtgttgggaattcagtgaagagcaagaaagacaaagtagcccctggcacttacattctagtaagggaaatagtcattaaacatatatactatatagggtgtcagagagtgacaagtgccacgaagaaaataaagcagggaagggagttacagagtgatagaagg

SEQ ID NO: 671904 - DNA, 1926 bp, Homo sapiens
gatgtcattacacagagcaaagaaaataacagaggttaatcaatgttactgctagcttgctcttatatatacttattttcatttctgatgcttttttcctctcaagggtaaaaaaacaaacatcaaatctctataaatctctcatgcagggcacccagctttctgcagctctgtccttctttggtttgtaatccacacttttgaagcccgtctaagtgcattcatagacaaggccatctctccccttggcctttgactgtggggcagggtgtaaaaagtgggaggtgggttatatgcttctagttgggtaaatgctaagcgtttttatgtgggttgcattttattttcgctttctaacaacataattgaacattcagaaagggtgagtaactttccaaaagtttcacagatactgaaagataagttagggttcatactttggtctgtctgatcacaagccagactaagatttgaacttctctgagactgtttcctcaaatttaaaatcagaatcatgttatctaattcactggctgaaccaagctcattcctcacccattttttattggtacttcttaaagaatgtggtcctcactctctaggttccatgttttgagcrtaaaattcctatccctgtaccccaggcagagaggactggaccaggcgtggacctctgacctacaagatccaaggcattacgtttgcctggttcatcacctccttcaattgtagatgctgcagatgctgccctctctgtagaggtttaagtaaacaggaaagaatgtttaatgaaaataaggggaacaaagaaaccatgtggagtaaaagcagagatgacacatcaggaggctacaaatgaacaataagtgaaacattagttcctggacctcaaaccttgatgccagcattcaggaggcttcctaggcaaggaagtaaattggtgtgaggtgactgaactgcaagatgaggtggaatttcaacattcaggctgccctctctgcagaggtttaagtaaacaggaaagaatgtttaatgaaaataaggggaacaaagaaactatgtggagtaaaagcagagatgacacatcaggaggccacaaatgaacaataagtgtaacattagttcctggacctcaaaccttcatgccagcattcaggaggcttcctaggcaaggcctgtcagctgtcctatttcttccactagatttctttcttttgttttgtttaagctagtttcaatgacaggcaactatctcttgtaatgaaatgatcctaagataaagtgttattgtaaagttcaaatgtaattagataaggaaatgtgcgtacatgtggttagcacatatctagaaaatgatggttattaaagagtaactggttacaattatctcaatcttatcactattaaaatttccccaaggtcagcctgcttttttcaggacaaggattataatatttcacgagattcaaattagtcgtatatttttaatttgaaaagaaaactacaaaagatgttataattcagtgtaagcacattttatagcaaatttattgtttgatttcattttcatgttatattaaaattttttgtatcagtgcttgtccaacatggtacaatggaaacaatcacattggaataatcaaatttttgaattacttataatatgctctttcattttaccagattttttgaaataaaaaatgaatattgaagaatattcatagtatctatagctattttctgttcaatttctgaaagaatgaggaatagtagcttttcaaaagctggattttggtttttgtttaattataatatcattcaaaggactaataaagactaaaaggaacaatgactttattgtaaagatacgtatagactgactcttcaaagtcaccatgaggaaggctgcactgtggctatttaaat

SEQ ID NO: 671905 - DNA, 1926 bp, Homo sapiens
gatgtcattacacagagcaaagaaaataacagaggttaatcaatgttactgctagcttgctcttatatatacttattttcatttctgatgcttttttcctctcaagggtaaaaaaacaaacatcaaatctctataaatctctcatgcagggcacccagctttctgcagctctgtccttctttggtttgtaatccacacttttgaagcccgtctaagtgcattcatagacaaggccatctctccccttggcctttgactgtggggcagggtgtaaaaagtgggaggtgggttatatgcttctagttgggtaaatgctaagcgtttttatgtgggttgcattttattttcgctttctaacaacataattgaacattcagaaagggtgagtaactttccaaaagtttcacagatactgaaagataagttagggttcatactttggtctgtctgatcacaagccagactaagatttgaacttctctgagactgtttcctcaaatttaaaatcagaatcatgttatctaattcactggctgaaccaagctcattcctcacccattttttattggtacttcttaaagaatgtggtcctcactctctaggttccatgttttgagcataaaattcctatccctgtaccccaggcagagaggactggaccaggcgtggacctctgacctacaagatccaaggcattaygtttgcctggttcatcacctccttcaattgtagatgctgcagatgctgccctctctgtagaggtttaagtaaacaggaaagaatgtttaatgaaaataaggggaacaaagaaaccatgtggagtaaaagcagagatgacacatcaggaggctacaaatgaacaataagtgaaacattagttcctggacctcaaaccttgatgccagcattcaggaggcttcctaggcaaggaagtaaattggtgtgaggtgactgaactgcaagatgaggtggaatttcaacattcaggctgccctctctgcagaggtttaagtaaacaggaaagaatgtttaatgaaaataaggggaacaaagaaactatgtggagtaaaagcagagatgacacatcaggaggccacaaatgaacaataagtgtaacattagttcctggacctcaaaccttcatgccagcattcaggaggcttcctaggcaaggcctgtcagctgtcctatttcttccactagatttctttcttttgttttgtttaagctagtttcaatgacaggcaactatctcttgtaatgaaatgatcctaagataaagtgttattgtaaagttcaaatgtaattagataaggaaatgtgcgtacatgtggttagcacatatctagaaaatgatggttattaaagagtaactggttacaattatctcaatcttatcactattaaaatttccccaaggtcagcctgcttttttcaggacaaggattataatatttcacgagattcaaattagtcgtatatttttaatttgaaaagaaaactacaaaagatgttataattcagtgtaagcacattttatagcaaatttattgtttgatttcattttcatgttatattaaaattttttgtatcagtgcttgtccaacatggtacaatggaaacaatcacattggaataatcaaatttttgaattacttataatatgctctttcattttaccagattttttgaaataaaaaatgaatattgaagaatattcatagtatctatagctattttctgttcaatttctgaaagaatgaggaatagtagcttttcaaaagctggattttggtttttgtttaattataatatcattcaaaggactaataaagactaaaaggaacaatgactttattgtaaagatacgtatagactgactcttcaaagtcaccatgaggaaggctgcactgtggctatttaaat

SEQ ID NO: 671906 - DNA, 1926 bp, Homo sapiens
gatgtcattacacagagcaaagaaaataacagaggttaatcaatgttactgctagcttgctcttatatatacttattttcatttctgatgcttttttcctctcaagggtaaaaaaacaaacatcaaatctctataaatctctcatgcagggcacccagctttctgcagctctgtccttctttggtttgtaatccacacttttgaagcccgtctaagtgcattcatagacaaggccatctctccccttggcctttgactgtggggcagggtgtaaaaagtgggaggtgggttatatgcttctagttgggtaaatgctaagcgtttttatgtgggttgcattttattttcgctttctaacaacataattgaacattcagaaagggtgagtaactttccaaaagtttcacagatactgaaagataagttagggttcatactttggtctgtctgatcacaagccagactaagatttgaacttctctgagactgtttcctcaaatttaaaatcagaatcatgttatctaattcactggctgaaccaagctcattcctcacccattttttattggtacttcttaaagaatgtggtcctcactctctaggttccatgttttgagcataaaattcctatccctgtaccccaggcagagaggactggaccaggcgtggacctctgacctacaagatccaaggcattacgtttgcctggttcatcacctccttcaattgtagatgctgcagatgctgccctctctgtagaggtttaagtaaacaggaaagaatgtttaatgaaaataaggggaacaaagaaaccatgtggagtaaaagcagagatgacacatcaggaggctacaaatgaacaataagtgaaacattagttcctggacctcaaaccttsatgccagcattcaggaggcttcctaggcaaggaagtaaattggtgtgaggtgactgaactgcaagatgaggtggaatttcaacattcaggctgccctctctgcagaggtttaagtaaacaggaaagaatgtttaatgaaaataaggggaacaaagaaactatgtggagtaaaagcagagatgacacatcaggaggccacaaatgaacaataagtgtaacattagttcctggacctcaaaccttcatgccagcattcaggaggcttcctaggcaaggcctgtcagctgtcctatttcttccactagatttctttcttttgttttgtttaagctagtttcaatgacaggcaactatctcttgtaatgaaatgatcctaagataaagtgttattgtaaagttcaaatgtaattagataaggaaatgtgcgtacatgtggttagcacatatctagaaaatgatggttattaaagagtaactggttacaattatctcaatcttatcactattaaaatttccccaaggtcagcctgcttttttcaggacaaggattataatatttcacgagattcaaattagtcgtatatttttaatttgaaaagaaaactacaaaagatgttataattcagtgtaagcacattttatagcaaatttattgtttgatttcattttcatgttatattaaaattttttgtatcagtgcttgtccaacatggtacaatggaaacaatcacattggaataatcaaatttttgaattacttataatatgctctttcattttaccagattttttgaaataaaaaatgaatattgaagaatattcatagtatctatagctattttctgttcaatttctgaaagaatgaggaatagtagcttttcaaaagctggattttggtttttgtttaattataatatcattcaaaggactaataaagactaaaaggaacaatgactttattgtaaagatacgtatagactgactcttcaaagtcaccatgaggaaggctgcactgtggctatttaaat

SEQ ID NO: 671907 - DNA, 1926 bp, Homo sapiens
gatgtcattacacagagcaaagaaaataacagaggttaatcaatgttactgctagcttgctcttatatatacttattttcatttctgatgcttttttcctctcaagggtaaaaaaacaaacatcaaatctctataaatctctcatgcagggcacccagctttctgcagctctgtccttctttggtttgtaatccacacttttgaagcccgtctaagtgcattcatagacaaggccatctctccccttggcctttgactgtggggcagggtgtaaaaagtgggaggtgggttatatgcttctagttgggtaaatgctaagcgtttttatgtgggttgcattttattttcgctttctaacaacataattgaacattcagaaagggtgagtaactttccaaaagtttcacagatactgaaagataagttagggttcatactttggtctgtctgatcacaagccagactaagatttgaacttctctgagactgtttcctcaaatttaaaatcagaatcatgttatctaattcactggctgaaccaagctcattcctcacccattttttattggtacttcttaaagaatgtggtcctcactctctaggttccatgttttgagcataaaattcctatccctgtaccccaggcagagaggactggaccaggcgtggacctctgacctacaagatccaaggcattacgtttgcctggttcatcacctccttcaattgtagatgctgcagatgctgccctctctgtagaggtttaagtaaacaggaaagaatgtttaatgaaaataaggggaacaaagaaaccatgtggagtaaaagcagagatgacacatcaggaggctacaaatgaacaataagtgaaacattagttcctggacctcaaaccttgatgccagcattcaggaggcttcctaggcaaggaagtaaattggtgtgaggtgactgaactgcaagatgaggtggaatttcaacattcaggctgccctctctgcagaggtttaagtaaacaggaaagaatgyttaatgaaaataaggggaacaaagaaactatgtggagtaaaagcagagatgacacatcaggaggccacaaatgaacaataagtgtaacattagttcctggacctcaaaccttcatgccagcattcaggaggcttcctaggcaaggcctgtcagctgtcctatttcttccactagatttctttcttttgttttgtttaagctagtttcaatgacaggcaactatctcttgtaatgaaatgatcctaagataaagtgttattgtaaagttcaaatgtaattagataaggaaatgtgcgtacatgtggttagcacatatctagaaaatgatggttattaaagagtaactggttacaattatctcaatcttatcactattaaaatttccccaaggtcagcctgcttttttcaggacaaggattataatatttcacgagattcaaattagtcgtatatttttaatttgaaaagaaaactacaaaagatgttataattcagtgtaagcacattttatagcaaatttattgtttgatttcattttcatgttatattaaaattttttgtatcagtgcttgtccaacatggtacaatggaaacaatcacattggaataatcaaatttttgaattacttataatatgctctttcattttaccagattttttgaaataaaaaatgaatattgaagaatattcatagtatctatagctattttctgttcaatttctgaaagaatgaggaatagtagcttttcaaaagctggattttggtttttgtttaattataatatcattcaaaggactaataaagactaaaaggaacaatgactttattgtaaagatacgtatagactgactcttcaaagtcaccatgaggaaggctgcactgtggctatttaaat

SEQ ID NO: 671908 - DNA, 554 bp, Homo sapiens
tcatacttcagaaataaaaagggaaaaggaaaggtaattgtcctttaaacatacatttatatagatgccagagaaaccaaataaaataggaagctatttttcaactgacatgttctaagtcaatataatggcattacatattttctcaatttgtttaatttgattttaaaagtcacaaacatttgaatctacgggtatgaatttcattcacattatatataatgtaaaatatttacttccatgatttwaaaaatcttgtctattttgtgtagttttcttttgaaaatttaatgtgttttctcacatcttgttaatgtacttctaaaaattcatttaccgagtacacaatgagtaagcatcaaattacatctaaataatctgttgattggacagtttctcctcatacactacagaacaattaggcacaatagaaaaaaatctctatgtcaaatataagtgatttttaaaagtgattattaatcataataacataagaacaattggagcagggccttcaatattgtcacatttatgacagtacagttatctttgtg

SEQ ID NO: 671909 - DNA, 554 bp, Homo sapiens
tcatacttcagaaataaaaagggaaaaggaaaggtaattgtcctttaaacatacatttatatagatgccagagaaaccaaataaaataggaagctatttttcaactgacatgttctaagtcaatataatggcattacatattttctcaatttgtttaatttgattttaaaagtcacaaacatttgaatctacgggtatgaatttcattcacattatatataatgtaaaatatttacttccatgatttaaaaaakcttgtctattttgtgtagttttcttttgaaaatttaatgtgttttctcacatcttgttaatgtacttctaaaaattcatttaccgagtacacaatgagtaagcatcaaattacatctaaataatctgttgattggacagtttctcctcatacactacagaacaattaggcacaatagaaaaaaatctctatgtcaaatataagtgatttttaaaagtgattattaatcataataacataagaacaattggagcagggccttcaatattgtcacatttatgacagtacagttatctttgtg

SEQ ID NO: 671910 - DNA, 1268 bp, Homo sapiens
tgaataaataaataaataaataaataaaagtccttgaatttatgcmaatgacatagcaatcacttcaactcttaaataatctaaccatcatgagataagagaatggatttttttctactcgtttgtatcttgtctttttgaaagagactacttgttaataatatgcttctgacaaaacaaaaactaaggaaagtgtatgatacaggcctgagtctctttcctcaagttcacgttttaaaaataaagcataatcagggataatgtagcctctacttgtaaaggaaggctggctttatgtattaatgaaataggcagcttcttacacaatgtgatttcaacagagccaggaagtatgtcttatctctaaataactccctaaataactccttctaacaccaatatctgaaatgttgtgactgatttctttctgtcctgccctgaagttctttcctgactgcaaagaacagcacattttgaatgtttcaaactgtcatacatgttctctccagaagagtggagtgatgccccaccagacattctaagtcacaggataacgtgacatatttcatgattgtcagttttaccatgtggcaagtagttaaaaagacgaagtttacagttccaagaacacaaactatgttatggaataggacgaaacacaaggagtaaagtagtcccttgtttttgctttaggttactcaccttgctatccgtaattgtattcactgaagtattgaggaacacattaacgttggtttcagatttgttgactttaagttctacatctgaagtatgttggcactttgaccttgcataattcaaagtcatgtctctgcaccactgtttcattctatataaagtgattgacaataatagttttcccaccaaagttggacttccatttctgtcaattggccaaactgggtttcctaaaaagccttgtagctctacaaaatatcaggaaattatatcaagtctacttttaagtaaatgtgaagctctcaaggaagccctgatggcaatccagaaatagataaaagcagtacaggagctagagttgccctggggaacagaaactgacctgggttacccagagtttggggtattaacaactactcaggggaaagtaaaagtaggccttggacacataaaatgttgggaaggctgagccagacttcttgcatatagccgagtcacaataggctaagaacatgaatttaggaaggaaagcaaaaaaatctacaagcagtatgaaaaaaaaaatctcc

SEQ ID NO: 671911 - DNA, 1573 bp, Homo sapiens
  misc_feature 3, 4, 5, 6, 7, 8, 9, 10, 11, 12, 13, 14, 15, 16, 17, 18,19, 20, 21, 22, 23, 24, 25, 26, 27, 28, 29, 30, 31, 32,33, 34, 35, 36, 37, 38, 39, 40, 41, 42, 43, 44, 45, 46,47, 48, 49, 50, 51, 52, 53, 54, 55, 56, 57, 58, 59, 60,61, 62: n = A,T,C or G
  misc_feature 63, 64, 65, 66, 67, 68, 69, 70, 71, 72, 73, 74, 75, 76, 77,78, 79, 80, 81, 82, 83, 84, 85, 86, 87, 88, 89, 90, 91,92, 93, 94, 95, 96, 97, 98, 99, 100, 101, 102: n = A,T,C or G
ttnnnnnnnnnnnnnnnnnnnnnnnnnnnnnnnnnnnnnnnnnnnnnnnnnnnnnnnnnnnnnnnnnnnnnnnnnnnnnnnnnnnnnnnnnnnnnnnnnnnngtgtacaatgtgtcacctattatcacccagattctttgcatcatttatccaagagtctgacattaaattatgtaattttgtgcaaatacctctttctctactttcttgacttcagtggtaaaactgggataatactatgatctttgttatataattatatgaggatcaactcagataatacatgtaaaaggtgccatttcaagcctctttaggaatccatgatgaaaaaaggtgcttccttttctcatcacagccttctcattgcaatttgttaagaaatttgaagatctcagaaggaaaaattatttggccataaaatgtcttccagatgaactttatcataagcatgtggaaattttaaaaaacttaacaatggtgtttctaatgaagagaattgtgcagtccagatggttccctgatttgacatgcatgagtcagcaaccctacaacccaaatttgcctttcctttccatgctggcatgtacggagtctttgacaaggaattcgaagtttgaggtctcattttatctttgtctgctattcagccaatgtatgaaacatccatttcacttcttggtttgcatctctgtaaagaactcccctatttgaagtttctatggatggttggaaatggggacctaaaaaaacagactagagagaatctaagtgagcaagccctgattgcttcatacaatttaggttgaatagcagaaaacaaaaatctagctttataccatgatagtgtgtatactacctgaacactttggaacttgtagcataatttgatttaatatggtaatgagaaatgtcagaatttagatagaaaaaaatagcatcaattattcattggaggaaagaaaactttttaaatatagaaagttgcttattagatattccctttggttaaatcaaaactttagatttgcctaatgaagatagctatggctttggggccataatattccatttgatagactttgattaataaatgtgacttaaaggaagatttaaaatattctatctttgagaagtgttcaatcagatgaacaaaaggtcttcaaatatttaaattcactggtggagattttatacaaacttacccaaagcactgctttaatcccaactttttttttctaataaaataaaagaccttgctgtgctcaaaggcacagatcaaatcccaaggattaagatttaaatgagaaagcaattaaaacaagccttctgacagaggtttcagatggtatggtaaagaagttggacacattaccattgaaaaagatagaaaattagcttttaaaaatactaatacttcattttcctccaaaataatggttctgaattyataaggctataaaaatctctgtgagaggaaagtaatcactgggccacctgagccacacatttaaatgtcagtgagaaaagcacactggaaactgcactcttggtttgttttcactcactgtattac

SEQ ID NO: 671912 - DNA, 610 bp, Homo sapiens
ccttccctggagctggctgcgaccaattattattttagaggaacacttaagaaccacctgactaacacctgatggttgcctgacattccttgttgagggcagggggagccctctcctgccctgctcatggctgactagctaccaactgtaacccttgggtagggataactcatatcaactttaattttgtgatctagaaatgtaatgttggacatagaaaacatagaatattcatctttttctgttttatataaggctttcccctaggaatattttgtaaaccaaatttcttatatcggtttattttcttatttttattttgttattagtagaatttagtaattaaaagttctggatatttgactttccataaaccaaagtctatgatataattccctggaattgataaagatacaatacaatcggtagcattaacaaagaaattagaaactttatcagaaagtgttttatttcaaataatctaaagctgactttgaatttaatccttctgcttttattaggcatgaatttagattaggtacaaagtagatcctgaaagtattattccattgttattaggttttaaaaaatgaggaaggagtaygaaata

SEQ ID NO: 671913 - DNA, 1454 bp, Homo sapiens
ccagatatcctgtgtccmaaatgcactaccatttagtagatgaagttgggctccacagtaaaaatctttgtgttcaaatcctggctccactgctgtgtcacttttgcaaattgcctagaatctcctctatcataaaattgggataacagctttatctattgcactgggttattgtgagaattgaatgtataggtgagttagaagagtgcttggcacatggtaagcatataataaaataaaaaaatagtaaaaataaaattttaattacatcatgcccaatatcatactgactacctgtataacatttgacttcagtcatgtgacctcgtacctccttccagatttcaaaagactttcaggggagaaaaaagagtgaaaaagaattaacattaattcagtacctaacacattccaaacaccctactatttattatccagacctctacctaagcctgttaattctggatactccacatgatatcattttatacttattaaaatggacccacattcgacattgtataatttgtggcacttaagagattgaaaggacttttataactgtggtctcaaaatcactctcaattttaattttccagcatttcaatttagaacttaagagaaaaaaatattttatatctcaaacatcttaaatggcccttgaaaatataggcggtaggcactctgcctatagtatctaatggataattcagccctctttccatctcatatctttatcagcaaaattaaattttctgttctgttgatgaggaaactgaggctttgccaagttagcaattcttaccaatgtgaccttggaaaagcattaaacccagggctggccaagatcagaagcactttcctctacatcatgtggcatctagttttcccttgtttctcacctcaaagtgaggcaaaggaccttgtatggccccttgaagtaaatacatgggtctcagtgttcttcttccctaggaaggcagtgctgaatcagaaatctccagttctaaatcctttttggcagaaagcccagatttctggaatttcatttaatgtcttgtcaggctgcccatcaagaattaaagctccatgacttcatgtggctgaagcccaaaactcttaacatttcattttatctttagtttaaacacccttttgtttctgttcttatcagttagatgtttgttttatgccctgtcctttaagttttaaatcccttttccttcttggtgtctttttccttcttggtgtctttttctagttattggcctacctggcagtgagaaatagccatgtgccttagttgtgtgaaacaattctgatatcagagtctatggcctggaaattgaagagataaaagtgatctgtgataagcatcaaaatacacccacattttagttctttgctaactttttctaaagtattacaactatttatcttagttccataacatg

SEQ ID NO: 671914 - DNA, 1589 bp, Homo sapiens
caatagaaaggagatgtggttggattccattcttgctgagaaaatctaccgaaatatatatggttcccgcagtatgcactttggatggatatgtaagtaatggaagaaagacacagaagggtgacaggacaaaaccgagcatcacatttggccaattggcccttatgacaggcagggattcacacaacatctctgcagccaaaaatgtacatacgtgcaaaaacaaccttgtctgctggaggactcagggaagagaaggaccctgaagtagcttcaaagaacatcagcatccttcactctaattaaaacctacttttatttcatttatataagggtgtcaggttcgattagaagccacgtacaatttggctctgagaagaacggtagctttctctcatgaagaaaaacgaagagaagtaattcctaaatgttaccctcagagattcccagggcaccatgcgcactcacaakgtcttaatgtccctggggaggtggctacaggctctgttgtcagctgtatggagagctttcaggctcccctgaaatagaaatacagtattcttagttaactggatacacaaattcattaagcaagcaaagcatggcaaagtctatcctccatttgcagttctgtgccccaatgggagaagagtataactgcattctctgtggtttatctgtgtatactcatctgggcgtatatcgtgtacatgccttcttattgcatgcggttccaaaatacttcgttcaagtttccttattagcagcaagtgggtctgttgaagcttaacaaagccatttaataaaaatagagccacccaaatgaacatggattgaaaaaaaattttagattgatggagcgaggttggtcactgtaattacggaaggtgtatcatttcctaagctctctttgcattaagtgtatgccatacatacatcagacataattagcactttaggtgacaatgatttgatttctttccttgtaataaaagccctctgcgttggcatatacattcagaacgggaaattgaacactgttgctgtttattcacccgaggcaaaatttaggacgaactagggaaaatacaaggagggcttacagaacagccctttgtgaattttgcaaacagaaaaagaaaatagttcaataaaaagcttttaaggatcacagtcaaacgtgtgccttttaaaagcaaaggatttctatggaacgcttctctacttttaaagtcagcatttaactttcctttagatgtgaacaaacccacactaaattgatttgtagacacaactgcaaaactggacacatttaaattactgtgtatgaaccagaaaaatatttgtgctgccttctctgagggcacagaagaaaatggtttttaaaattatttctaataaatatcaatccttcctgctccttctctgccacaattaagaatcatgttaatctgcatttctgtggattaaaccatttatataaacattaaagatttttttaaaagggaaaaaggagaaactgaaatgcaagttgctgatctgttgtatatggctcataagggatactacatcctcttgaaatctgtagc

SEQ ID NO: 671915 - DNA, 1485 bp, Homo sapiens
tattttaattataacgaataactagaaataatctaaattactcatttttcaggtaatgaaacagactcagagagattaaatgatttgtcaaagtccacattattatcaattgggtttataggactagaaaaagctgagctttaaaaaacatagaacagtttgctaattgtagtttttaatttttattttttttctgagatagagtttcactcttgtcacccaggctggagttgcaatggcccagtctcggctcactgcaacctcggcctcctgggttcaagtgattctcctgcttcagcctcctgagtacctgggattacagacgtgcacaaccatgcgcagctaatttttgtttgtttgtttgttttgttttgtttttttagtagagactggatttcaccacgttggccaggctggtctcaaacccctgacctcaggtgatacacccgccttggcctcccaaagtgctgggattataagtgtgagccaccgtgctcaccccagttcgctaattttaaaataatattataatttgctttgccccattgatggacaattgatagtctaaggtttccacagttgtttataatctcttgattaaaaatatcttaatttctctgcaccaatcagctcttttccttcaaaatcacttccacccttgggatggataactttgcccttcaacatgggttgattttcaaatgtttaatggaaataaagactaattttctagggcttttaagtgctatgttaaaaagtcctctagatgcacatatctttacatttggagattacggttatcattttcaatattacatgctttgaaataactactcagaagaaagagatcaacaggaacaaaatatcacaatagccttaaccacatgggataatactttctatgttaaccatcataactatctctgcttcagagagaacaagtgttttttctttacaatgatgttccataggcaagtaatgagttactgcataatattagaaaatagtgaggaaaataagtcacattatactcatttttcccaaagtaaagcttgcaatgtcttagaaaagacttctggcttggcttcctgttggtttctggctttggtctcaatctctattgttctctactcaacatgtaatcatcattaaggcatgtgatacagtgcagccaaaacctagctataaaacagcaggtatggcatgattccctttcagaacataaatgtaaatacagagtgtgtatatgcataaagagtttggaargattttcaagtgattgtctttgggtaagattataggtattctctggtctcttggttttgcttatttatatatcctgattttctataatgaatatgtatgagttttatattttaaaaaattttaataaactcgtttttgttctacctatagacttacagagagtttgggtcagcaaatccagtgcaccgtgcttcctagccagttagattctttataaca

SEQ ID NO: 671916 - DNA, 145 bp, Homo sapiens
ccatatatatatatatakagagagagagagagtatgtattactatataagtatgcagatgtgtgtgtatttgtgagtgtgggtgttttctgtaattaattaaaaagaataaataaaggcactactcaattaagaattgtcttaag

SEQ ID NO: 671917 - DNA, 656 bp, Homo sapiens
atgaagagattaacttggataattatgctaaaagattgatattagttaatttaattcttgagaataagtttttttcttataatatttcaagactaaggtcaattttcttttgatgccattcctaatttatggacaattacatcatattgttagaattttcaaaaatatctattttattttctatggtatgaaccaagtatctacatcattccaaagctactaagaaatatgtgcctctataaattgtttctgattcctcaggaaaatttgtgacctgcttttcctctggcagtggtattaaatagcaggttggtttgaacatcagtaaccaaaaacctttattgacttcatgcaraatatcctacaaataggctgggggtggtggctcacacctgtaattccagcactttgggaggccaaggcagacagatcacttgagctcagaagtttgagaccagcttgggcaaaatggcacaagcccgtctgtacaaaaaatacaaaaatcagctaggcatggtggtgtgagcctgtagtcccagctactccagaggctgttttgtgaggattgcttgagcccaggaagtcgaggctacagtgagcagtgattgcggcactgcactccagcctgggcaacagagccagactaccccctgtcc

SEQ ID NO: 671918 - DNA, 626 bp, Homo sapiens
tccaactttgctggtagacaggacagctggttgccctgtaacctaagctctttgatgggttcaggaaactttatgctttttctagactataaatggctgtttttgtttgggaagagtaatgctcttcctaactttacatacccaaggcagaagtcagaaatctgtgttgttttggaatgacctcttttctccatgaggattatgttccgctttatacacatgggccaacactggttgagaatgagatcattttctatggctttcctagaacatctagtttatacacgaaccgagctataattatgctgtgaatttatgtgaaattgctttgtcaaattatctttaagcaaatttgattgagcactcttatgtagttaaaacaaaagcttcctccttagatgtctaaaaacttaggtcatgatcctgtctctgtcattttatggcttagtgatctttgagcaagtcactggacctctttggctttcaactttctgtaaaatgaggatgctgaactagtagtttctgtggcccacaaattacyctaaggtcaatgatgctgtgtaaattttcttttatccatataattacagtacaggtgttattctcattttacaaagaaacgattt

SEQ ID NO: 671919 - DNA, 591 bp, Homo sapiens
acaggtattatgtctatcttggttgccattagctcagcacctagcacagtgtcaggttccgaacttaaatatttgttaaaatarttaattcattgtgtattttaaccaatatattaaaacttagaagtccaaaagtcatctctaacagaagctatatgtgaccccaatcatgtaagaatgacccttaaagccagatttcaaagcagaatacaaaaccagccacatttatatcaagaaaagctatcatacacaagtgctgtcacctgatttggattattaatcttattcactatacttgaattattataactaaatggatgtttttaagaaactaaattacccctcaaatatcagaattgattatctgatgggttctttaagcaaatgtgttttgggcagtgaaagacttctaaatgagatcttacagagctggaatttaaacactggaggaaagagggtgcaggcttttacaggagctaatttgaaagtttggaagcaaggatggtattttggatatgcgattttagaatgtttaagagattgaccatgctattgtgacgccttacactgcatttctgaggagaataactg

SEQ ID NO: 671920 - DNA, 625 bp, Homo sapiens
tcttttttctttctaagacagggtctcactctgtcgcccaggctggagtgcagtggcacaatcttggctcactgtagtgtagacttcccaggctcaagggatttctcccaccccagactcccaagtagctggaactacgggtgtgcaccaccaccacacctggctaatgtttctttttttggtagacacagagtctcactatttagcactgattggtctccaactcctggcctcaagcaatcctcctgcttaggcttcccaaattgctgggattacaggcatgagccacaatgcctggcctctgctagttccgtattctctagagttgtctttactttgtgctagcgtgtccctcattgtgctgatcctctgtaaaaattaatacctttttttttttttygagacggagtttcactcttgttgcccaggctggagtgcaatggcgctatctcggctcagcgcaaccgccacctgccgggttcaagcgattctcctgccacagcctcccgagtagttgggattacaggcatgtgccaccatgcccagctaattttgtatttttagtagagatggggtttctccatgctggtcaggctggtctcgaactcctgacctcaggtgatct

SEQ ID NO: 671921 - DNA, 625 bp, Homo sapiens
tcttttttctttctaagacagggtctcactctgtcgcccaggctggagtgcagtggcacaatcttggctcactgtagtgtagacttcccaggctcaagggatttctcccaccccagactcccaagtagctggaactacgggtgtgcaccaccaccacacctggctaatgtttctttttttggtagacacagagtctcactatttagcactgattggtctccaactcctggcctcaagcaatcctcctgcttaggcttcccaaattgctgggattacaggcatgagccacaatgcctggcctctgctagttccgtattctctagagttgtctttactttgtgctagcgtgtccctcattgtgctgatcctctgtaaaaattaatacctttttttttttttcgagayggagtttcactcttgttgcccaggctggagtgcaatggcgctatctcggctcagcgcaaccgccacctgccgggttcaagcgattctcctgccacagcctcccgagtagttgggattacaggcatgtgccaccatgcccagctaattttgtatttttagtagagatggggtttctccatgctggtcaggctggtctcgaactcctgacctcaggtgatct

SEQ ID NO: 671922 - DNA, 719 bp, Homo sapiens
tgggtgggcgggtaggtatcttggcatttgtatcccaggcacttcagctaccaaggaactccatatgaacaataaaaccaatcccgaacagtcccaatactttcccttcccagacccctctgcttccaatatcctcagcccaccttccaggccccctgccccagaccctgccctagagggttcctttctagttcccrcatccccaagcaatggatggaaaggaaatctcttttcacacagacctcaatctctgggaactggtacccaagaggagtctaattgattattgattgttgattgattgattgagacggggtctcactctgtcacccaggctgaagtgtaatggcatgatcagggctcactgcagcctcaacctcccaggctcaagcgatcctcctacctccaccttccaaagtgctgggattacaggcacaagccactgcgccagacctagttgatttttgagatgggatacactgagctttatgggctagccaaccccatcccatgttgttgccctacaaagatttccaacacacttgctcatacacaggcaaccatggggaatgcaacccctagcgaataatctccggaacctgtttgcacccaagacacaatactcacctacttgcgcagaacccagaaacgtggctcattgtgtggctgtttcctctgaaatctttcatggttatgaaccgcagtgaaatctactgtct

SEQ ID NO: 671923 - DNA, 719 bp, Homo sapiens
tgggtgggcgggtaggtatcttggcatttgtatcccaggcacttcagctaccaaggaactccatatgaacaataaaaccaatcccgaacagtcccaatactttcccttcccagacccctctgcttccaatatcctcagcccaccttccaggccccctgccccagaccctgccctagagggttcctttctagttcccgcatccccaagcaatggatggaaaggaaatctcttttcacacagacctcaatctctgggaactggtacccaagaggagtctaattgattattgattgttgattgattgattgagacggggtctcactctgtcacccaggctgaagtgtaatggcatgatcagggctcactgcagcctcaacctcccaggctcaagcgatcctcctacctccaccttccaaagtgctgggattacaggcacaagccactgcgccagacctagttgatttttgagatgggatacactgagctttatgggctagccaaccccatcccatgytgttgccctacaaagatttccaacacacttgctcatacacaggcaaccatggggaatgcaacccctagcgaataatctccggaacctgtttgcacccaagacacaatactcacctacttgcgcagaacccagaaacgtggctcattgtgtggctgtttcctctgaaatctttcatggttatgaaccgcagtgaaatctactgtct

SEQ ID NO: 671924 - DNA, 719 bp, Homo sapiens
tgggtgggcgggtaggtatcttggcatttgtatcccaggcacttcagctaccaaggaactccatatgaacaataaaaccaatcccgaacagtcccaatactttcccttcccagacccctctgcttccaatatcctcagcccaccttccaggccccctgccccagaccctgccctagagggttcctttctagttcccgcatccccaagcaatggatggaaaggaaatctcttttcacacagacctcaatctctgggaactggtacccaagaggagtctaattgattattgattgttgattgattgattgagacggggtctcactctgtcacccaggctgaagtgtaatggcatgatcagggctcactgcagcctcaacctcccaggctcaagcgatcctcctacctccaccttccaaagtgctgggattacaggcacaagccactgcgccagacctagttgatttttgagatgggatacactgagctttatgggctagccaaccccatcccatgttgttgccctacaaagatttccaacacacttkctcatacacaggcaaccatggggaatgcaacccctagcgaataatctccggaacctgtttgcacccaagacacaatactcacctacttgcgcagaacccagaaacgtggctcattgtgtggctgtttcctctgaaatctttcatggttatgaaccgcagtgaaatctactgtct

SEQ ID NO: 671925 - DNA, 628 bp, Homo sapiens
aatatttaccatccaatgtttataactttatgtttggactttcttgaaatgctttattgaattaaaaacatcacattaccattggctaaaagaggagacagctgtatttgccaataacttttgcaacaaatgccagttgttgatgccaattttttttctagttcatatttccatagacagctttgagccttacaatactagcattctgcagacagacattcagtggtgatagtgtgggrgcctccagagtcctaagaattaatatggactgtattttaatttttctcagttctccggtatgcaaatgtttgagaaaccagcaacctggttaatatttgaagcctagactgctcctaaagcaattgcagaaatgctcttccaaggttatttacccacacctttgagtagggaaatgatgtttaaattgattggtcttaaaacagctatgaattgcgagtggcagaagaacatacagagaggaccagtcagaaagaaggtccacatttaaaattccacccagcacctggtcattctgtgcttctggaggcacctgatggagccttctcagggtatgtggtgaatgcataattataaaatacataagataaccaagaaaacaattaaactg

SEQ ID NO: 671926 - DNA, 628 bp, Homo sapiens
ttgttaggtttatttactggcctagtgtatgatctattctgaatagtgttccatgtgcaaattctgctgttgttaggtggagtgttttatagatatctattgggtttggttggtttatactgttaagtcttctatttccttgttgatacaccttgtttttaaaatccactattgaaagtgaggtattgaagtctccagttattactgttakgtatttattccttcatttctgtcagttttgctccatgtattttagggtctcatatgtttataattgttgtatcttcctgatggattgcccttttatcatcataaaatgtctgtattctagcagtttttttaaaaaaatctttttgtctggtattagtatagcactcctgctttctgtctgcatgatataactttttccatctttttactttcaatgtatttgtatataagtatacactcagaaggagaaaagaatcattcttatctgtggactgttcattgctgtaagagtcagccagcagaggagtccgccaagaatgaccttcattagaccccaaggggaaagggccgttttgagacgcagccaccaacatatccaagctcatttctgaaaccctcagcaattccacaagctagg

SEQ ID NO: 671927 - DNA, 628 bp, Homo sapiens
ttgttaggtttatttactggcctagtgtatgatctattctgaatagtgttccatgtgcaaattctgctgttgttaggtggagtgttttatagatatctattgggtttggttggtttatactgttaagtcttctatttccttgttgatacaccttgtttttaaaatccactattgaaagtgaggtattgaagtctccagttattactgttatgtatttattccttcatttctgtcagttttgctccatgtattttagggtctcatatgtttataattgttgtatcttcctgatggattgcccttttatcatcataaaatgtctgtattctagyagtttttttaaaaaaatctttttgtctggtattagtatagcactcctgctttctgtctgcatgatataactttttccatctttttactttcaatgtatttgtatataagtatacactcagaaggagaaaagaatcattcttatctgtggactgttcattgctgtaagagtcagccagcagaggagtccgccaagaatgaccttcattagaccccaaggggaaagggccgttttgagacgcagccaccaacatatccaagctcatttctgaaaccctcagcaattccacaagctagg

SEQ ID NO: 671928 - DNA, 584 bp, Homo sapiens
aatgatcaaacgaagggatggtcaaatgaccaaaaaaaaaaaaaaacctctgaaaatgctttcttgtcctccatcttgaatgtttcttaatttagataaataaggtaaggcttyaaaacttaacatttaatttaaagacaggtgacatcctgaaatttgtgtcagaaaaagttccagcatcttggcaatctaaatttctcctccccactcacataccatcaacaaggcatgtaatacaccacaggtattagtcacaattagatttacctattttactttaaaaaagaacaggaaagaaaatgtttatgtttcagactagcaagaaattgattaaaaaaccatatcttttcagattgtggcaatagctaaagatccacgtattccaggcttcattcttaagtcatggtctctctctctgtctctcatgcatgcacacgtgcacacacacaaaatatgctttaataaaaagggattccattccattttaaccccaaataaggccagcctgattaagataattgaggaaggagaacacatttaaaaaccaaatacgcttccttgcaaatgactattcaattcaattg

SEQ ID NO: 671929 - DNA, 584 bp, Homo sapiens
aatgatcaaacgaagggatggtcaaatgaccaaaaaaaaaaaaaaacctctgaaaatgctttcttgtcctccatcttgaatgtttcttaatttagataaataaggtaaggcttcaaaacttaacatttaatttaaagacaggtgacatcctgaaatttgtgtcagaaaaagttccagcatcttggcaatctaaatttctcctccccactcacataccatcaacaaggcatgtaatacaccacaggtattagtcacaattagatttacctattttaytttaaaaaagaacaggaaagaaaatgtttatgtttcagactagcaagaaattgattaaaaaaccatatcttttcagattgtggcaatagctaaagatccacgtattccaggcttcattcttaagtcatggtctctctctctgtctctcatgcatgcacacgtgcacacacacaaaatatgctttaataaaaagggattccattccattttaaccccaaataaggccagcctgattaagataattgaggaaggagaacacatttaaaaaccaaatacgcttccttgcaaatgactattcaattcaattg

SEQ ID NO: 671930 - DNA, 584 bp, Homo sapiens
aatgatcaaacgaagggatggtcaaatgaccaaaaaaaaaaaaaaacctctgaaaatgctttcttgtcctccatcttgaatgtttcttaatttagataaataaggtaaggcttcaaaacttaacatttaatttaaagacaggtgacatcctgaaatttgtgtcagaaaaagttccagcatcttggcaatctaaatttctcctccccactcacataccatcaacaaggcatgtaatacaccacaggtattagtcacaattagatttacctattttactttaaaaaagaacaggaaagaaaatgtttatgtttcagactagcaagaaattgattaaaaaaccatatcttttcagattgtggcaatagctaaagatccacgtattccaggcttcattcttaagtcatggtctctctctctgtctctcatgcatgcacrcgtgcacacacacaaaatatgctttaataaaaagggattccattccattttaaccccaaataaggccagcctgattaagataattgaggaaggagaacacatttaaaaaccaaatacgcttccttgcaaatgactattcaattcaattg

SEQ ID NO: 671931 - DNA, 1124 bp, Homo sapiens
cagctggaatagagtaagtgcaggggagcatagggcaggatgaggcccagaaggaagaaaggaggcggcacacgcctgcaccaggaaggctgcctagcagggaagaattgagggataacagcatatgtacgctctcctgccatacccaacatcaaccacaacacagtcctacaaaagcagggaaggcgcagactgttgatacagcagggcctggagccctgaagtgtggcactgtcttcacctggatttgactgatacatgtcccaggcctagggcagcatgccccaaatccttggttctcaaagggttcacagggaagcatctggtcttctgcattttcttccccaaaagagcgtgagtgtgttggatagagttcaaataatcagtatgtcagtatgttcagttctttgtcctccattttaaagtttaacttcctcgcagtttccataaacaaccttttccaccagttttaatcagtagttcacatctgttcccctggtcacctgctccgtcctgattcatcctggtcacctgctttgacctgagtcacccctggtcacctgctctgacctaagtcacctttagttccctgttcctcaccttttttcctgccaaactgctcaccacaccactctggcttataccctttctctctttgaaatagccaatcagaattagcttcgactgtgtggtccaatcctagccaaaaggggaataacacagcagtaggggctacctgagtcaggagtaagaaccccttcctctcccttgttcaggtgtgctctcaccattgctccatccatgagtcacacctcctatcttttgctgagaaaattctttcagtgctagttcttcttttcggcactgaggaataagcatttatttctaacaatcgtgacattttctccagtgtgcacagtcactgctaccccacagtcagattcctctaaagaaagtgtcactagccttgcaagcrggacaatcaccactgaccagctgaggctggtggccatgaaggggactgtcattccatcactcccctaagaaatcctttctgctagttattggagaggaaaaaacacatttattttattgctggtgaaactctcgaggcaaaagcaaac

SEQ ID NO: 671932 - DNA, 1532 bp, Homo sapiens
tgtcgagctgcacctgctctcccccatgggctgtccctctgtcgaactgcacctgctctccatgggctgtccctctgtcgagctgcacctgctctcccccatggctgtccctctgtcgagctgcacattgctcctttccaagggctccttccatgaacttgcctgaggtgtctcaggagggaaggagttggcagagggcaggagagaatgggacaggggaaccatttcattaaaaatgacccctccttcctgcccccaaagagctaaaccaacatcctctttgctgatgtccaaatcaaactggtgcagagttcagccatacacagggtggtccctctgatgtggtgtggctctgtgtccccacccaaatctcatctcaaattgtaatccccatgtgtcagggagggaccgggtgggaagtgattggatcatgggaacagtttcccccacgcckttcttgggacagtgagttagttctcatgagagctgatggttttaggagtgtttggtagttcttcccctcccccctctctcctgctgcactgtgaagaaggtgtctgcttccctttccccttcagccatgattataagtttcctgaggcctccccagccatgcagaactgagagtcaattaaacctctttcctttataaactacccagtctcaggtagtatctttatagcagcatgaaaacagactaatacatcctccttcctcatccgctccaaaaggcgcagaggaagctcacatggcctggctccgcagaggtgcggctccagggctcatgtttcacacactgggcccaggtacctcattgtgggtctatttttatttggaaacatgcaatgtgcttagttaaaaataaataaagaacaaattaaatgttattttgcctcaagatggttttgtggccacgtggatgtcacaacccagcaatgcagactattaaaaaaaacaacacgacaaccagaaaggatgtgatgtggtttctcggtgccttcaaggtcattattctgggttttgtttaaaaatgttttgtgggttgcttttacaagtctaccagtgagtagatggaatactgctacacagccctgatggtatgtgcacgcggcccacgtgggtgcacgcacacgctcagacacacacccagcagtgcccgcccagccctggctgcagcccctctgggtcaatgaatcaattagaaacaatcagatctgcacgccctggagaagttgcctggtgagggggaagggagacataataaggccagatgtgctgagcttcctgtcctgagtgtgcccaccacgggctctgatgcagaaccggcagacctcaaatgccacacaaacacatcccccctggcctcagccacactcagcactcggagaaggcagccctgactttccactctaattaggtaacgtgcaatgctagtggaacagtgaagcaaggagccttccaataattgcattttaatttttccaaggtgcagatgatttttttttaactagaaaacaaagaatcagtttatt

SEQ ID NO: 671933 - DNA, 1532 bp, Homo sapiens
tgtcgagctgcacctgctctcccccatgggctgtccctctgtcgaactgcacctgctctccatgggctgtccctctgtcgagctgcacctgctctcccccatggctgtccctctgtcgagctgcacattgctcctttccaagggctccttccatgaacttgcctgaggtgtctcaggagggaaggagttggcagagggcaggagagaatgggacaggggaaccatttcattaaaaatgacccctccttcctgcccccaaagagctaaaccaacatcctctttgctgatgtccaaatcaaactggtgcagagttcagccatacacagggtggtccctctgatgtggtgtggctctgtgtccccacccaaatctcatctcaaattgtaatccccatgtgtcagggagggaccgggtgggaagtgattggatcatgggaacagtttcccccacgccgttcttgggacagtgagttagttctcatgagagctgatggttttaggagtgtttggtagttcttcccctcccccctctctcctgctgcactgtgaagaaggtgtctgcttccctttccccttcagccatgattrtaagtttcctgaggcctccccagccatgcagaactgagagtcaattaaacctctttcctttataaactacccagtctcaggtagtatctttatagcagcatgaaaacagactaatacatcctccttcctcatccgctccaaaaggcgcagaggaagctcacatggcctggctccgcagaggtgcggctccagggctcatgtttcacacactgggcccaggtacctcattgtgggtctatttttatttggaaacatgcaatgtgcttagttaaaaataaataaagaacaaattaaatgttattttgcctcaagatggttttgtggccacgtggatgtcacaacccagcaatgcagactattaaaaaaaacaacacgacaaccagaaaggatgtgatgtggtttctcggtgccttcaaggtcattattctgggttttgtttaaaaatgttttgtgggttgcttttacaagtctaccagtgagtagatggaatactgctacacagccctgatggtatgtgcacgcggcccacgtgggtgcacgcacacgctcagacacacacccagcagtgcccgcccagccctggctgcagcccctctgggtcaatgaatcaattagaaacaatcagatctgcacgccctggagaagttgcctggtgagggggaagggagacataataaggccagatgtgctgagcttcctgtcctgagtgtgcccaccacgggctctgatgcagaaccggcagacctcaaatgccacacaaacacatcccccctggcctcagccacactcagcactcggagaaggcagccctgactttccactctaattaggtaacgtgcaatgctagtggaacagtgaagcaaggagccttccaataattgcattttaatttttccaaggtgcagatgatttttttttaactagaaaacaaagaatcagtttatt

SEQ ID NO: 671934 - DNA, 1532 bp, Homo sapiens
tgtcgagctgcacctgctctcccccatgggctgtccctctgtcgaactgcacctgctctccatgggctgtccctctgtcgagctgcacctgctctcccccatggctgtccctctgtcgagctgcacattgctcctttccaagggctccttccatgaacttgcctgaggtgtctcaggagggaaggagttggcagagggcaggagagaatgggacaggggaaccatttcattaaaaatgacccctccttcctgcccccaaagagctaaaccaacatcctctttgctgatgtccaaatcaaactggtgcagagttcagccatacacagggtggtccctctgatgtggtgtggctctgtgtccccacccaaatctcatctcaaattgtaatccccatgtgtcagggagggaccgggtgggaagtgattggatcatgggaacagtttcccccacgccgttcttgggacagtgagttagttctcatgagagctgatggttttaggagtgtttggtagttcttcccctcccccctctctcctgctgcactgtgaagaaggtgtctgcttccctttccccttcagccatgattataagtttcctgaggcctccccagccatgcagaactgagagtcaattaaacctctttcctttataaactacccagtctcaggtagtatctttatagcagcatgaaaacagactaatacatcctccttcctcatccgctccaaaaggcgcagaggaagctcacatggcctggctccgcagaggtgcggctccagggctcatgtttcacacactgggcccaggtacctcattgtgggtctatttttatttggaaacatgcaatgtgcttagttaaaaataaataaagaacaaattaaatgttattttgcctcaagatggttttgtggccacgtggatgtcacaacccagcaatgcagactattaaaaaaaacaacacgacaaccagaaaggatgtgatgtggtttctcggtgccttcaaggtcattattctgggttttgtttaaaaatgttttgtgggttgcttttacaagtctaccagtgagtagrtggaatactgctacacagccctgatggtatgtgcacgcggcccacgtgggtgcacgcacacgctcagacacacacccagcagtgcccgcccagccctggctgcagcccctctgggtcaatgaatcaattagaaacaatcagatctgcacgccctggagaagttgcctggtgagggggaagggagacataataaggccagatgtgctgagcttcctgtcctgagtgtgcccaccacgggctctgatgcagaaccggcagacctcaaatgccacacaaacacatcccccctggcctcagccacactcagcactcggagaaggcagccctgactttccactctaattaggtaacgtgcaatgctagtggaacagtgaagcaaggagccttccaataattgcattttaatttttccaaggtgcagatgatttttttttaactagaaaacaaagaatcagtttatt

SEQ ID NO: 671935 - DNA, 1532 bp, Homo sapiens
tgtcgagctgcacctgctctcccccatgggctgtccctctgtcgaactgcacctgctctccatgggctgtccctctgtcgagctgcacctgctctcccccatggctgtccctctgtcgagctgcacattgctcctttccaagggctccttccatgaacttgcctgaggtgtctcaggagggaaggagttggcagagggcaggagagaatgggacaggggaaccatttcattaaaaatgacccctccttcctgcccccaaagagctaaaccaacatcctctttgctgatgtccaaatcaaactggtgcagagttcagccatacacagggtggtccctctgatgtggtgtggctctgtgtccccacccaaatctcatctcaaattgtaatccccatgtgtcagggagggaccgggtgggaagtgattggatcatgggaacagtttcccccacgccgttcttgggacagtgagttagttctcatgagagctgatggttttaggagtgtttggtagttcttcccctcccccctctctcctgctgcactgtgaagaaggtgtctgcttccctttccccttcagccatgattataagtttcctgaggcctccccagccatgcagaactgagagtcaattaaacctctttcctttataaactacccagtctcaggtagtatctttatagcagcatgaaaacagactaatacatcctccttcctcatccgctccaaaaggcgcagaggaagctcacatggcctggctccgcagaggtgcggctccagggctcatgtttcacacactgggcccaggtacctcattgtgggtctatttttatttggaaacatgcaatgtgcttagttaaaaataaataaagaacaaattaaatgttattttgcctcaagatggttttgtggccacgtggatgtcacaacccagcaatgcagactattaaaaaaaacaacacgacaaccagaaaggatgtgatgtggtttctcggtgccttcaaggtcattattctgggttttgtttaaaaatgttttgtgggttgcttttacaagtctaccagtgagtagatggaatactgctacacagccctgatggtatgtgcacgcggcccaygtgggtgcacgcacacgctcagacacacacccagcagtgcccgcccagccctggctgcagcccctctgggtcaatgaatcaattagaaacaatcagatctgcacgccctggagaagttgcctggtgagggggaagggagacataataaggccagatgtgctgagcttcctgtcctgagtgtgcccaccacgggctctgatgcagaaccggcagacctcaaatgccacacaaacacatcccccctggcctcagccacactcagcactcggagaaggcagccctgactttccactctaattaggtaacgtgcaatgctagtggaacagtgaagcaaggagccttccaataattgcattttaatttttccaaggtgcagatgatttttttttaactagaaaacaaagaatcagtttatt

SEQ ID NO: 671936 - DNA, 1532 bp, Homo sapiens
tgtcgagctgcacctgctctcccccatgggctgtccctctgtcgaactgcacctgctctccatgggctgtccctctgtcgagctgcacctgctctcccccatggctgtccctctgtcgagctgcacattgctcctttccaagggctccttccatgaacttgcctgaggtgtctcaggagggaaggagttggcagagggcaggagagaatgggacaggggaaccatttcattaaaaatgacccctccttcctgcccccaaagagctaaaccaacatcctctttgctgatgtccaaatcaaactggtgcagagttcagccatacacagggtggtccctctgatgtggtgtggctctgtgtccccacccaaatctcatctcaaattgtaatccccatgtgtcagggagggaccgggtgggaagtgattggatcatgggaacagtttcccccacgccgttcttgggacagtgagttagttctcatgagagctgatggttttaggagtgtttggtagttcttcccctcccccctctctcctgctgcactgtgaagaaggtgtctgcttccctttccccttcagccatgattataagtttcctgaggcctccccagccatgcagaactgagagtcaattaaacctctttcctttataaactacccagtctcaggtagtatctttatagcagcatgaaaacagactaatacatcctccttcctcatccgctccaaaaggcgcagaggaagctcacatggcctggctccgcagaggtgcggctccagggctcatgtttcacacactgggcccaggtacctcattgtgggtctatttttatttggaaacatgcaatgtgcttagttaaaaataaataaagaacaaattaaatgttattttgcctcaagatggttttgtggccacgtggatgtcacaacccagcaatgcagactattaaaaaaaacaacacgacaaccagaaaggatgtgatgtggtttctcggtgccttcaaggtcattattctgggttttgtttaaaaatgttttgtgggttgcttttacaagtctaccagtgagtagatggaatactgctacacagccctgatggtatgtgcacgcggcccacgtgggtgcacgcacaygctcagacacacacccagcagtgcccgcccagccctggctgcagcccctctgggtcaatgaatcaattagaaacaatcagatctgcacgccctggagaagttgcctggtgagggggaagggagacataataaggccagatgtgctgagcttcctgtcctgagtgtgcccaccacgggctctgatgcagaaccggcagacctcaaatgccacacaaacacatcccccctggcctcagccacactcagcactcggagaaggcagccctgactttccactctaattaggtaacgtgcaatgctagtggaacagtgaagcaaggagccttccaataattgcattttaatttttccaaggtgcagatgatttttttttaactagaaaacaaagaatcagtttatt

SEQ ID NO: 671937 - DNA, 2617 bp, Homo sapiens
tctaccactgctcaacagggtacacatgtgttttaagttttgtcttactacacctgtgaacccacagtgtgcactgctcagatcctggtctcttttgccccccatgttgaccccatgtcacagaatcaagaacatgagggtctaaagtgagatcagagatcaattcaaacctcttcaaactccaaaaatctccacttcaacccctaagccagaaggcagcatctttgtgcaaactcgccagtgtgagaaaatcaacacttcccattgcttctaaagaactctaatgttaagaaccctcttccactaagttgcaacctcttttcctgtaacttgcagcacaccagttcagctctgcygtcgggggctgcgcagagatccctcatgccctggcatcctccaaagtatcccctgcacacctcgtccacataaagacactcagtccttccagccgtttccttcatcatccccttcccttgcctatgaacgtgcttctggctcctgaagtccttcttaaaacagacttcccacgctgaacacaagcctcctggtgccacttaacccctgaagggcttggcaggactaacaccgccttcttcatttccgaagatgaggctggtgttaatacagctcaagaacacactggtcgtgtgagtgcagccgacaattactccacacctacgggacggtcagtttgtttcatctcttatgccagccctaatctactggcagtggccgcctagagttgggaaggcctgtgagttgcgattcagtggagaagggaaggtcctgggatcaatgagtaacatcaatgaagtatgtgaaggaagtagggacagatatactcgctggcagtgatactgtcattaagctgcatttcctccatcctgtacattagttgatctgagacttagccgatgttaaatgccatctggaaagctgtaaggcacatggcgagtgcatggacttcaacattgacaaagggcttgaagcctggctctgccatttaccagtggagtgtcctgggcctcatcttcctctctataaaatgcaaatactactactattataggatggggtgaaaatgaaatgcaatcacgcattgctgcatttggccacttttcaaggtgaccaacaacttcatggactctgaattgccgcatacccttttccctcccatcttggcgccatctcaatgtctgatgagcatactacctatctccacagccaggtcatgactacagcagtcaaacaagcagtgattccagcgcccggggcaggcaggaagcaactctctcaggtagacattcctctactaataagcatccattgagtaaggttatccaactgttacaaactcctttaactgcagcagtatccagctcacagttctccatatttccccatcaggagggctgagagttttgcagaaacctgagcaaaattttccatcccctatctctgcacgatccttggctgacttctaggattgtcgcttttatttctgagagctcacaaattatgtttgatgagccattctggaatgtttcctataagcaatattaatatcgtaagttgaaatgtatgccatttgtctcatttcccttttgcaagatggcatctgcctatttttagtctttggcattccttcccttccttcattgctcttccacaattatcaatgtggtctgccactcccatttgcaaataagttcttttcatctggaccgagagagccagactcatgtgaagcaactattgacctctcctcacctcctccatcacccaggacctcagctcccaccggtacaaggtgcactgcacatccctggtgtgtaaggtgagacttgctgggccattgagacggagataagcatgcccagtgataacgttagagcaggcagtatctgtcagcgtgcccactgtgttcaaatgggggcatctttacaaccctttgcaaatccctaaggttgaaaacatgattgctttagggtgctcttcgactttctttccctttggtaaccagccctcttggctttccttcctgagccacctttcacaaggaaatgaactttacagtcactttgtaggagttgctataaacacaaggaccactgaagactaatgccaggcaggtaccaggctcaacccgcaagaggtgaaccagcttctctggacatatgattcatgttgcagcaagaagtgatctggttcctggactttatggtttactctgaacccccagattccagaagtttccacccagcatttgaacgttgctctggtcttccaggccatgggtaataatataacaaatgtggaaacagaaaatgatgcttttcatacctgactcaagacaccccaacaggctgacctgccaactccctatttcaccaaaagggcagccacgggaccagctcttcacacatggtccctggcagtgagggtgggaagaagacaccctctaggaaaagcacagtcgctcacatctcggcttctgcccccaaactgaaaataaaaactgaatgggagaccaaaaaaaggcaagagagcaaagtcagcatttcacagacagggacccatagtctgccttttttggcaagtcaaagagcagcaataa

SEQ ID NO: 671938 - DNA, 2617 bp, Homo sapiens
tctaccactgctcaacagggtacacatgtgttttaagttttgtcttactacacctgtgaacccacagtgtgcactgctcagatcctggtctcttttgccccccatgttgaccccatgtcacagaatcaagaacatgagggtctaaagtgagatcagagatcaattcaaacctcttcaaactccaaaaatctccacttcaacccctaagccagaaggcagcatctttgtgcaaactcgccagtgtgagaaaatcaacacttcccattgcttctaaagaactctaatgttaagaaccctcttccactaagttgcaacctcttttcctgtaacttgcagcacaccagttcagctctgctgtcgggggctgcgcagagatccctcatgccctggcatcctccaaagtatcccctgcacacctcgtccacataaagacactcagtccttccagccgtttccttcatcatccccttcccttgcctatgaacgtgcttctggctcctgaagtccttcttaaaacagacttcccacgctgaacacaagcctcctggtgccacttaacccctgaagggcttggcaggactaacaccgccttcttcatttccgaagatgaggctggtgttaatacagctcaagaacacactggtcgtgtgagtgcagccgacaattactccacacctacgggacggtcagtttgtttcatctcttatgccagccctaatctactggcagtggccgcctagagttgggaaggcctgtgagttgcgattcagtggagaagggaaggtcctgggatcaatgagtaacatcaatgaagtatgtgaaggaagtagggacagatatactcgctggcagtgatactgtcattaagctgcatttcctccatcctgtacattagttgatctgagacttagccgatgttaaatgccatctggaaagctgtaaggcacatggcgagtgcatggacttcaacattgacaaagggcttgaagcctggctctgccatttaccagtggagtgtcctgggcctcatcttcctctctataaaatgcaaatactactactattataggatggggtgaaaatgaaatgcaatcacgcattgctgcatttggccacttttcaaggtgaccaacaacttcatggactctgaattgccgcatacccttttccctcccatcttggcgccatctcaatgtctgatgagcatactacctatctccacagccaggtcatgactacagcagtcaaacaagcagtgattccagcgcccggggcaggcaggaagcaactctctcaggtagacattcctctactaataagcatccattgagtaaggttatccaactgttacaaactcctttaactgcagcagtatccagctcacagttctccatatttccccatcaggagggctgagagttttgcagaaacctgagcaaaattttccatcccctatctctgcacgatccttggctgacttctaggattgtcgcttttatttctgagagctcacaaattatgtttgatgagccattctggaatgtttcctataagcaatattaatatcgtaagttgaaatgtatgccatttgtctcatttcccttttgcaagatggcatctgcctatttttagtctttggcattccttcccttccttcattgctcttccacaattatcaatgtggyctgccactcccatttgcaaataagttcttttcatctggaccgagagagccagactcatgtgaagcaactattgacctctcctcacctcctccatcacccaggacctcagctcccaccggtacaaggtgcactgcacatccctggtgtgtaaggtgagacttgctgggccattgagacggagataagcatgcccagtgataacgttagagcaggcagtatctgtcagcgtgcccactgtgttcaaatgggggcatctttacaaccctttgcaaatccctaaggttgaaaacatgattgctttagggtgctcttcgactttctttccctttggtaaccagccctcttggctttccttcctgagccacctttcacaaggaaatgaactttacagtcactttgtaggagttgctataaacacaaggaccactgaagactaatgccaggcaggtaccaggctcaacccgcaagaggtgaaccagcttctctggacatatgattcatgttgcagcaagaagtgatctggttcctggactttatggtttactctgaacccccagattccagaagtttccacccagcatttgaacgttgctctggtcttccaggccatgggtaataatataacaaatgtggaaacagaaaatgatgcttttcatacctgactcaagacaccccaacaggctgacctgccaactccctatttcaccaaaagggcagccacgggaccagctcttcacacatggtccctggcagtgagggtgggaagaagacaccctctaggaaaagcacagtcgctcacatctcggcttctgcccccaaactgaaaataaaaactgaatgggagaccaaaaaaaggcaagagagcaaagtcagcatttcacagacagggacccatagtctgccttttttggcaagtcaaagagcagcaataa

SEQ ID NO: 671939 - DNA, 586 bp, Homo sapiens
ctggtttatctcaatagtttaaaacctgtgctctctttaatgaacataaaatctaataacatactttaatattattataaatttttaaaacaaaactcttatgactaaaaatgtattaaaacatattactgagacatgcaactattttcagacaaacatttgaaatataattaagttattctaaaatgaaaatgcaagtatattaacaaaattatatatacttccagttatgatacacttttctgtaaagatgtacttcatgaattacttttgctcttattcattctgagcaaggtatttaaaaccacatagaaataaaarttaataaggatcttcataaaaaattaaaagttttttttagaaattttcactctattttattttcttgattcattgcacaaaggaatttgcttcccttgaattcacttatttagccctagcaataacaaagcagattaagggctttaatgttttttctcatccaaaagtatagctgaaaaaatataaatttcataataatgctggccctcattacctcaaagtttagagttgattattttggtgccaagtagaaatagtaatttca

SEQ ID NO: 671940 - DNA, 1454 bp, Homo sapiens
cttaaattcagaaatattatgtaattttctaaggtcacatggctgaaagagtcagatttgctgattcttagtccatcagaagacattattttttatccttaaaagtatgagtgaggctgggagtggtggtttatgcctataatcctggcacttttggaggatgaggtggttggacagcttgagcccaggagttgaagaccagcctgggcaatatgacaaaactccatctctacaaaaacaaacaaacaaacaaaacaaaacaaaaagaacactacaaaaattagccagccatggtggcatgtggcatgtgcctgaggtcccagctacttgggaggcataggttggaggattgcttgagcccaagagattgaggctgcagtgggtcatgattgtgtcactacaccccagcctgggcaacagagcgagaccctatctcaaaaaaaagcatgaatgaattaatgtttcctaattgatttcaaatataataaccaatacataaatrgactaataacccaaatacttttttatttttcaaacagctttaaagatgttacaaatgaatttggaaaaccaataaaaatatcctgatattgtagatagcatcatttcttattaaattatccatcgttgatgtgatattgaccatgaatcaacaacaattgttgttatgggtcattgaataataatagccagttgtatttattaattcaggttataactttaaggatagacaatttcatagaaaaaagttttaattaagccgatgttttctaaggttttttgctatgcatgaagaacaaaatgttttgatgatttgtgagaattcttaggataaagattgtgaggaacacatccatatgggtgcataagtactgcaattagtcaacacaactctttattctgtttcataatacaagttatttgttagttgtaattggaattagttaacaaaaatgtaaatcatcagaaattgaatgggtatgctgattgttgtgtcttcttttatacttgccatgtaagtgtaatcttcctttcatcagtgttataaagctgttgtttattttatttttattttattatttttttccttaacacaagccacaccaatttaaacctgtttcaaactagaaagaaatttatttaaaaattacatctatcaagtagagttatgatttaacttctagttttctctacacatcttaagagtcattatgtcttactatgtgtactgcctgggaagattaagacagtgacttgcacatgttgggtactcaataaatatccattgaattgctcagatagcaagaggaacatgagctgcacttcagcagtaacatactaactatcctagttgatcattcctgaggtatgaatacagaagttgtgctccttcatagaggctataaatttaattctgcagttcaggagagtttatttcaacagcttcttcatta

SEQ ID NO: 671941 - DNA, 1454 bp, Homo sapiens
cttaaattcagaaatattatgtaattttctaaggtcacatggctgaaagagtcagatttgctgattcttagtccatcagaagacattattttttatccttaaaagtatgagtgaggctgggagtggtggtttatgcctataatcctggcacttttggaggatgaggtggttggacagcttgagcccaggagttgaagaccagcctgggcaatatgacaaaactccatctctacaaaaacaaacaaacaaacaaaacaaaacaaaaagaacactacaaaaattagccagccatggtggcatgtggcatgtgcctgaggtcccagctacttgggaggcataggttggaggattgcttgagcccaagagattgaggctgcagtgggtcatgattgtgtcactacaccccagcctgggcaacagagcgagaccctatctcaaaaaaaagcatgaatgaattaatgtttcctaattgatttcaaatataataaccaatacataaatggactaataacccaaatacttttttatttttcaaacagctttaaagatgttacaaatgaatttggaaaaccaataaaaatatcctgatattgtagatagcatcatttcttattaaattatccatcgttgatgtgatattgaccatgaatcaacaacaattgttgttatgggtcattgaataataatagccagttgtatttattaattcaggttataactttaaggatagacaatttcatagaaaaaagttttaattaagccgatgttttctaaggttttttgctatgcatgaagaacaaaatgttttgatgatttgtgagaattcttaggataaagattgtgaggaacacatccatatgggtgcataagtactgcaattagtcaacacaactctttattctgtttcataatacaagttatttgttagttgtaattggaattagttaacaaaaatgtaaatcatcagaaattgaatgggtatgctgattrttgtgtcttcttttatacttgccatgtaagtgtaatcttcctttcatcagtgttataaagctgttgtttattttatttttattttattatttttttccttaacacaagccacaccaatttaaacctgtttcaaactagaaagaaatttatttaaaaattacatctatcaagtagagttatgatttaacttctagttttctctacacatcttaagagtcattatgtcttactatgtgtactgcctgggaagattaagacagtgacttgcacatgttgggtactcaataaatatccattgaattgctcagatagcaagaggaacatgagctgcacttcagcagtaacatactaactatcctagttgatcattcctgaggtatgaatacagaagttgtgctccttcatagaggctataaatttaattctgcagttcaggagagtttatttcaacagcttcttcatta

SEQ ID NO: 671942 - DNA, 591 bp, Homo sapiens
atataacaaccatacacttatgggcctgaaaaggaaattgttaaatccttatgttaacaagtcaggaaaccaggaatagtttacctagctcctctgcttatctctcacaaagcggcagttgaaatattcatcacttctctgatctcatttgaagctcagggtcctctcccaagctcatgttattactagcagaattcactccttgtacctatggcgctcataatagtgtgctttttcaagaagaacaggaaagcatccctgaatttggaaaggtgtaagcccttttataggcccttttatagggaccaacagagtaggcaagacttattcaggttaatctactgttaactctgtcgaactgattaaagacttaatcacaactgaacatcaccttaaaagttgtcatagaatggaacttaatcgcagatatatcaacagtgggagtcttaggggtcatcttggaatattacccaacacaaatgccatatattytgttgaccctctatcctttcaatgtcacctccttagcaaaaacaaaaaacaaaaaacaaacaaaaaaaacccactaaactgaaacatctgccttcttca

SEQ ID NO: 671943 - DNA, 650 bp, Homo sapiens
taagattttatggaagacagaatgaatagacagcaggttttaaaacttgatatatgttgcaagggacattgtgcaactaagtgcagcagtctayatgtgatagagaagtttagaaaaagagaaattactttgcattggagcaaacaagaaagactttacatgggccttcaaacgtgaactgaattgtgtactaaaggattatctgagagtattactgaaatcagaattattaggaaggaaataaaacataagaaaatatttagaatttgtactaatattaatctatcagttttatatctgaataacttccagaaatttttatgcagcaagcactgttttaaataatttgcatatattaagtcatttaattgtcatttaattctcacaaaagtgttctgaagctagtcaggtcttatattatcatcactttgaaaacgagaaaacttaaacacagagacaatagcagattgactgactatgtcataggactgctaagtcactgaactcagttttaaatactggtagtttggtttcagagaccaaggccttaaccacattgtgttccctttcccaaaatcacacatgcctacatccacataccaaatttgatatgccaactccagaatatcgagtttccttcatgataattt

SEQ ID NO: 671944 - DNA, 650 bp, Homo sapiens
taagattttatggaagacagaatgaatagacagcaggttttaaaacttgatatatgttgcaagggacattgtgcaactaagtgcagcagtctacatgtgatagagaagtttagaaaaagagaaattactttgcattggagyaaacaagaaagactttacatgggccttcaaacgtgaactgaattgtgtactaaaggattatctgagagtattactgaaatcagaattattaggaaggaaataaaacataagaaaatatttagaatttgtactaatattaatctatcagttttatatctgaataacttccagaaatttttatgcagcaagcactgttttaaataatttgcatatattaagtcatttaattgtcatttaattctcacaaaagtgttctgaagctagtcaggtcttatattatcatcactttgaaaacgagaaaacttaaacacagagacaatagcagattgactgactatgtcataggactgctaagtcactgaactcagttttaaatactggtagtttggtttcagagaccaaggccttaaccacattgtgttccctttcccaaaatcacacatgcctacatccacataccaaatttgatatgccaactccagaatatcgagtttccttcatgataattt

SEQ ID NO: 671945 - DNA, 688 bp, Homo sapiens
aagcctggggtttccaggccagtgttttatgtgagaagcagacaggctctttgataggtctttcaaccacagaccatgtttttaaccaattatcacctggtggtgaagtccaccaggagcaatatccgatcatgtgtggtttttgttgactcttcccaagccttcatattgattaagaacggatacatgagctcatcaaagacccgcagttcttgatgcttctacatacttgatactattattgtataatcacagtcaggggcagtagatggagcagtaaaatcagggaagtgttttgaaccccaccatttcaatttgtttcttaatgatttgatatccccgtggatgagcggggcatgagcccactgctatgatgaatggaaagacacacatcatttttattcagatcacactttccactgcgttgaacttggagtggactggagagacaagaggtctgataactactagtaaactgctggaaggagcccttcagagcaacaatcaygaaagcaacattactaattttggtagatttttctagtacttcaactgcttaataagcaaaaatagtgtgtggttaggagcatgaactttgcttccaactgcttgggttcaagtctaggttttgccacttgttagctgtgtggccctgtggctcattttcttcttctgtacactgtgaata

SEQ ID NO: 671946 - DNA, 553 bp, Homo sapiens
  misc_feature 3, 4, 5, 6, 7, 8, 9, 10, 11, 12, 13, 14, 15, 16, 17, 18,19, 20, 21, 22, 23, 24, 25, 26, 27, 28, 29, 30, 31, 32,33, 34, 35, 36, 37, 38, 39, 40, 41, 42, 43, 44, 45, 46,47, 48, 49, 50, 51, 52, 53, 54, 55, 56, 57, 58, 59, 60,61, 62: n = A,T,C or G
  misc_feature 63, 64, 65, 66, 67, 68, 69, 70, 71, 72, 73, 74, 75, 76, 77,78, 79, 80, 81, 82, 83, 84, 85, 86, 87, 88, 89, 90, 91,92, 93, 94, 95, 96, 97, 98, 99, 100, 101, 102: n = A,T,C or G
atnnnnnnnnnnnnnnnnnnnnnnnnnnnnnnnnnnnnnnnnnnnnnnnnnnnnnnnnnnnnnnnnnnnnnnnnnnnnnnnnnnnnnnnnnnnnnnnnnnnntttcttgctccgccacgttggttttccctaccagggacagcctgacccttcctcttatctttcacatccctctccctctctccttttcttccctctttctcttatttcttaagtttctcccctcmccttctttctagccctgctccccagcacccctcttggttgttctccttttccaaaccctagggttggtgataccagtgtctccctcactaaatgagctttcctactgcccccatcttctaaccaagtcgttaacatctagtaggtccatggacacaggctcagcttgttgtcaacatccaagccccgtgcaggatgatcctgaagggagaggtggacatggacattcagggagacaatgacatccagaatggctgtcagagtggctgactgctaagagcagcctgggatggtgcagggtgagggagggcaggatgtggctggagaa

SEQ ID NO: 671947 - DNA, 553 bp, Homo sapiens
  misc_feature 3, 4, 5, 6, 7, 8, 9, 10, 11, 12, 13, 14, 15, 16, 17, 18,19, 20, 21, 22, 23, 24, 25, 26, 27, 28, 29, 30, 31, 32,33, 34, 35, 36, 37, 38, 39, 40, 41, 42, 43, 44, 45, 46,47, 48, 49, 50, 51, 52, 53, 54, 55, 56, 57, 58, 59, 60,61, 62: n = A,T,C or G
  misc_feature 63, 64, 65, 66, 67, 68, 69, 70, 71, 72, 73, 74, 75, 76, 77,78, 79, 80, 81, 82, 83, 84, 85, 86, 87, 88, 89, 90, 91,92, 93, 94, 95, 96, 97, 98, 99, 100, 101, 102: n = A,T,C or G
atnnnnnnnnnnnnnnnnnnnnnnnnnnnnnnnnnnnnnnnnnnnnnnnnnnnnnnnnnnnnnnnnnnnnnnnnnnnnnnnnnnnnnnnnnnnnnnnnnnnntttcttgctccgccacgttggttttccctaccagggacagcctgacccttcctcttatctttcacatccctctccctctctccttttcttccctctttctcttatttcttaagtttctcccctccccttctttctagccctgctccccagcacccctcttggttgttctccttttccaaaccctagggttggtgataccagtgtctccctcactaaatgagctttcctactgcccccatcttctaaccaagtcgttaacatctagtaggtccatggacacaggctcagcttgttgtcaacatccaagccccgtgcaggatgatcctgaagggagaggtggacatggacattcagggagacaatgayatccagaatggctgtcagagtggctgactgctaagagcagcctgggatggtgcagggtgagggagggcaggatgtggctggagaa

SEQ ID NO: 671948 - DNA, 659 bp, Homo sapiens
tggtagagggggattggctgcagcagccttgggtggcagctgggagagtctacatagtgggacagagttcttccggacggtgggtgtggtggctgctctcccgaggtcccggggttcaggcgaaggaccctggagggtagagcaggaggcaggagcttaaggaggggagtcctggcaggggaagggttgaggacatggacctcaggagggtgggagggagactcccttgccctccctgtcatcaccaatggagggccagtccagtctggacaccacccgtggcacaacaagcaagattgtcaagaaagtgattccaggaactctctgggtgccgggtgtctggcttccccagtcagttctgcaaacagtaggcacccctcaacctacttggcaccagagcaatctcttttaccaccaaccacgttgctccacatctgctcaattcaaagrgagagcagactgggaggactgtgtccactgcaatgggacacacttccaggtccaggctgggcatctcggtggggcgatgggaaggaggtctgtaccttccttcccttctctggtcaacttcgacttgctaagttttccctttctccaaaaaagctgtttccttacttcatgccacgtgatgttatacaattgtccctaacctcagcaca

SEQ ID NO: 671949 - DNA, 2261 bp, Homo sapiens
tctccatttcatctatggatagtagtggtgtcacatatattttctctgtggcttgctaaatatatatttaatagaaaacatttttatctttccactgtgggtagccacaccatgaaatgtacattttacaagatcatttgctatgtgactctaaggtgaaagcattgccaaattattttgttctgcaatatttgtgtaacatgtcctttgtaagctttagttttttaattttaatgagggaaggagtgaagaaaactaacatgtattatgtgcccaccatgtaccaaatattctactacatgctttaatttagattatctcatattgtcctcacactgacacttcatattagactcagaggaataaagaatgcgtcttagattccaactcagctctgtccaactcccacaaccatagtattgctattatggcatgctgtctcttaccatgaggccatgtgctgacacactgtggaaggtgcaataataaatgatatgtattcctaagtttggggaaacttaggaatgctaagtttggggaaacttaggaatggagcaggcagatagctttagtgaaaacaggacatagaagatactaaggagctgtgtaagccatgagatctgagcatataggaagaaagatctattgtttaaaatgaatttttccctccttgaattttctaaaattaacttaatttataaatagatatttctcagtatgtggtttatagtctgtcttatgtactgcatattcttgaaaactgagatataggttttttttctagaaaagaaaatttgtagagaaagaagaggaagatgtgttgtagactacagctaggcataatcagcctcaattcctatatagtggtcttagcttcaatacagaattctgacactaaatkgatatttttataggcatattgtttattcagaagttggggagacttaaaatgcatgtctttcctgatatatatgagctacattttactaagacaaccttaatttttataatgtaaatttttataatgctataacatactgtctggaagtaggaattggttgattgggggaggggagagccaatgtaaatcagagaagcaataattactaggtcaagaaatagggcaattaaaaaaataattcatggcaagtaggagtgagatatttacattctgaaattaattatggtactttttatttaaattaaaatcaggaagaaaagttcaggaaaaagaggttcagggaaattttatatatattcatctcaactacaaattagtaaagatcttatattcaacaaatgtgtcagagtccattaaagacattagaaaaccctatttcattgtaactaaactgcttgacattttaacctccaaacttttttataatcaaatgtagagattgtgtctgtcttgataagtctacatatagtatccatgctgcaagaataccaaaaaaaaaaaaaaatggatccttagttttacaggattgacaaagatgtctgttggccaaatcaagtgtaagagttcctgtaaagtcctcagatcaacaaatttttaaaaagaaaatcttttatgttcacttagacagcaaccagctcgaacggacaatccatttcttgtgtagtgcatccttagaagctggcttttaactctgaaggtctatggtcttggtctttggccttctagggtactgataattactgctcctactgcacctcccgtttagtccttcgctttctattctttggttcactcttccttccttgtcacttccccattaaacttttctgtcctgggccctattatctcaacttgctctcagccccaaacttccttattactcactctgataagaccagcttggttcataagtgctggtgtaaagagggccctggcctgtcctgtctcattagcaactagggtatttagcatgctttcagtgtgtttttggtgatcacataactcacaggaagaagctaatatatggtaattttagatccactgataggtgagtggaagagatcattggcctttcaatttgcaagtctgatctttcctcagcttatattagaaatctcatttgaattttggaatggtgatataaaagacgaggttttagatttgaggacttaattgctgagaacatgtttgctggaaccagataaaacttcttccagtggatggtaagcctgtcttggggtagcaaacttaaggaatgaagtaaattccattatcagatattcaatttcaatatttaaaa

SEQ ID NO: 671950 - DNA, 1863 bp, Homo sapiens
aaatctgtgaatgcattaatattaactgattaggttctggatttttttaaggccagaattctgaaatgagaataaatcagtcatgaagctattcgggcttgtatttatccacagttagatccatatgaaaattcaatataacaagaaagaaaaatggctggaagacattccttctcaaaggaatggcctggacttcagccgcctaattcccattcagttctgagggcccgagtaatgtggtctgtaattgtatacaaaccttataacaaagaaagtgacaacaaaacccatctgctcttaggtatccttgtacacaatacaaggtataacctggaatgagccatagggtattttgattaattgagcttaactgatgggtatccagtaactctgttttactaaaacctktgttgaaattctcagtgaagggtttacattcacttttaggtcaacgtaatgaaacttaagatgatttaagaccttctagaaactctgcatcatgattctaaatcataaagttcattgcatacgttgtgtagctccagagatgaagatatgggagatgtagatgtatttgatgtgtactgaccccaatttcttacaaaagcaatataaacaaaaaatacatctaactaccatgatatatcacttgtttttctatatttttatgtaatatacatgtaatcatagtatagatataatttcattgtgattataactggaaatatttttcatctttctacatggccttcttgactttcattttgtattcctgctctgtagtctctcagttgatttgttataatttatttaaacattatactataaggcacttgaatagcttccaatttttgtaactaacactgaaatgactcaattagtgcaatagtttttttacgtttttaaggttttcttgaagggtaaatttcaaacagtaagattagtggattaaatgatatatactttttaaggggtgatggtgcaggaggaaaggataaagaaaaatattttaaatttggcattagacttctagagttcctacctcattagaaattctagaatatcaaggtacattttgagcaggaagtgatatcatgaaacaataatttgcccagaggctaaaggcagccaccttcggagagtctgttaaagtgattcaggtgtgcagaaatgatttccttggccgtaggtgggttttgaaaaggaaaggaacatggcaatctactccacattgagcacctgtcctgggtgctctaaggttaaataagagacagaaaattctactctaaaggttatgaaatacttgattagtgaaaatattcatagaataaataatcagataaataaaaagagagtagtgtagattgaatcagataggaagactgcatagactgaatcttaggctgaaagatgaagaaaatgagaggttattggtaggaagaatgcaaagatgtctttcttaggatagggagagagcaaagcagaaaacttggtaggcaattgtaattttggtgggggacactgaggaaatgaataaggtgtcatcttaatggatattttagcatattagtatactctttacttattcattggttcttctatttattggtgacttttggaggacacaaaagtgtcataccttccctgatgtaaagattgtcatattccatcttatttcacagttgaactatatagtcctccttcagtatctgtggagaattggtttcagaacccctagcagatactagattccagatagaaaatgacatagtaatgggctgggcgtggtggctcacgcctgtaatcctagcaacttgggaggctgaggtgggtggatcacttgagatcaggagttcgagacca

SEQ ID NO: 671951 - DNA, 1863 bp, Homo sapiens
aaatctgtgaatgcattaatattaactgattaggttctggatttttttaaggccagaattctgaaatgagaataaatcagtcatgaagctattcgggcttgtatttatccacagttagatccatatgaaaattcaatataacaagaaagaaaaatggctggaagacattccttctcaaaggaatggcctggacttcagccgcctaattcccattcagttctgagggcccgagtaatgtggtctgtaattgtatacaaaccttataacaaagaaagtgacaacaaaacccatctgctcttaggtatccttgtacacaatacaaggtataacctggaatgagccatagggtattttgattaattgagcttaactgatgggtatccagtaactctgttttactaaaacctttgttgaaattctcagtgaagggtttacattcacttttaggtcaacgtaatgaaacttaagatgatttaagaccttctagaaactctgcatcatgattctaaatcataaagttcattgcatacgttgtgtagctccagagatgaagatatgggagatgtagatgtatttgatgtgtactgaccccaatttcttacaaaagcaatataaacaaaaaatacatctaactaccatgatatatcacttgtttttctatatttttatgtaatatacatgtaatcatagtatagatataatttcattgtgattataactggaaatatttttcatctttctacatggccttcttgactttcattttgtattyctgctctgtagtctctcagttgatttgttataatttatttaaacattatactataaggcacttgaatagcttccaatttttgtaactaacactgaaatgactcaattagtgcaatagtttttttacgtttttaaggttttcttgaagggtaaatttcaaacagtaagattagtggattaaatgatatatactttttaaggggtgatggtgcaggaggaaaggataaagaaaaatattttaaatttggcattagacttctagagttcctacctcattagaaattctagaatatcaaggtacattttgagcaggaagtgatatcatgaaacaataatttgcccagaggctaaaggcagccaccttcggagagtctgttaaagtgattcaggtgtgcagaaatgatttccttggccgtaggtgggttttgaaaaggaaaggaacatggcaatctactccacattgagcacctgtcctgggtgctctaaggttaaataagagacagaaaattctactctaaaggttatgaaatacttgattagtgaaaatattcatagaataaataatcagataaataaaaagagagtagtgtagattgaatcagataggaagactgcatagactgaatcttaggctgaaagatgaagaaaatgagaggttattggtaggaagaatgcaaagatgtctttcttaggatagggagagagcaaagcagaaaacttggtaggcaattgtaattttggtgggggacactgaggaaatgaataaggtgtcatcttaatggatattttagcatattagtatactctttacttattcattggttcttctatttattggtgacttttggaggacacaaaagtgtcataccttccctgatgtaaagattgtcatattccatcttatttcacagttgaactatatagtcctccttcagtatctgtggagaattggtttcagaacccctagcagatactagattccagatagaaaatgacatagtaatgggctgggcgtggtggctcacgcctgtaatcctagcaacttgggaggctgaggtgggtggatcacttgagatcaggagttcgagacca

SEQ ID NO: 671952 - DNA, 656 bp, Homo sapiens
atgttaagcttgataaaaagctcttaatcttctcacataaatgtagattttcttattaatatgtaaaatttttcacaatgttttcattatcatttgagaagcaacaggcaatattaaagtgtttgcccacccattacctgatgggatatctttatctctggtaggcctaaacatagaccgtgtaatgggaaatgtagaaagctgtggtgcgatgaatttaagtatagtaataaactcagccactttttgttgtccttaaaaggtcaagtaaaaataactgaatatgttgcaccaataaagtaaatactgataaaggatgcagattgctgtttcagcttcttttttgtcattcagtgagattccagagattggyattagggctatgtgccagttacaataattttaataatggtaataacaacgtccatttgctgactgctcccaaaagtcagacatcttcctgtgtatgtatcatctctaatcagcttactgtcctacacggtagatgctgtttttgcctgtaacttccagaggctcagcaacttggccaaagtcaacaaaactactaaagactaacacaaaattaaaacttgcattgttggtgcttaataaaaatagagaactaattttgcttcctgatgtccactattatataa

SEQ ID NO: 671953 - DNA, 1784 bp, Homo sapiens
tgccacattggccaggctggtctcaaactcctgacctcaagtgatctgcctgccttggcctcccgaagtgctgggattacaggcataagccaccgcacccagcccgagtatgttttcttttaactcgcaatgtctgggctctatgaaaagagggaaagacaaggatttgagattctgtctcccacactacactcctgccctgccagcccccacccttggatttgttagcctggcatagactttagagtcagggggcagaagtcaattctcaggtccaggacctacgaactcagcagccttgagcaagtcactggaccattcagaacatctgtttctctcttgtggaatggagataataatacctgtttcacaaggcaattaagaggatcgagtgaaatatgtgaaaatattgtttagtaaactccctttaggtcctcagagaagaaaagcaaacttcatctgtaggttaaaaaacatcctgtctcctgtgaagaggggaatggcttcacagagaaagttgacgggatgctaacacccacaggctgcagatatttaaatcaaaaaaggggaaaaatcaatgggaaaaggtcaggactctctcatttttctaacgagcagttattttttatttctccatggagtgcactgtcacggggaggctggaagtgctgacagtgcacgctgctgagtcaggggaggggagacgttgctgacactgttcccttttcataaacttagcaggaaggaccagccagtggactctgtcctccctttcacccttggcagggggtgcagtgggggtcacccagcttggtgatcactcaggttaggaactgtggttgaaggttgaggagaaatagggtgggggtgacagctcacagcaagccagtcagagcagtgggtccatcgtgagggtcaaacctcacacttccgaaattctctcttatatggcagtctctgagcaatggtcacagtggagaagttgggcccaggctgtgccatggttcattttctctagctacaggtagcctacctcccttgcaaatgctctgtaggcttcatagcctgggttctcctgttgtcagctgtattaacagggagtcatagatgggcttccttaaataaaaagttatctttacttatttgtcgttatcctcgaattgctgagactttttttttttttttttttgagacagagtctcactccaggatggagtgcagtggcacaattgtggcccactgcagcctcgacctcctgagctcacatgatcctcccacctcagcctcccgagtagctgggaatacaatgtgtaccaccttgcccggcaactttttggttttggttgttatttatttatttatttatttattttggtagagatgaggtcttgcaatattgtctgggctggtcttgaactcctggcttcaagcaatcctgcagccttggctacccaaagtgctgggattacagggatgagccaccatgcccggccgaattgctgggatttggaagaaagactttgtaggggatcctcccccttacaccacacacacacacacacacacacacacacacacaccccttgagacaagacgaggaaatgagaagctggctcaccttggcaggcaggcagagcagcggaggtygctacctacctgggctgggacttgtccttaagggacatcctaagggaatgcagaataagaggaagaggtaattcccagtgtttcaggtgaagactagggatccccccaaacccagtggttcttcagttggttggttg

SEQ ID NO: 671954 - DNA, 1148 bp, Homo sapiens
gaagacaccaaatccttagaaggcatctctttgtgcttccctgcccccatctttgccatgtcataggttaagcctgctcagactttaacctatgaagcaggcttaacctatgaagtggcaaagatggccacaagcagctctgggcttgcaaactaccagtttagcaatccagatagaaacagtccaccattctctcgacagctccagcaagagtcccagaaatgagtctccatggcctgacttgggtcatgtgcctgtctgtggccctttctcccaaggccaggagattggaatatgccagttggccaagcctgagtcacatgcccactgtctggagccaggtgatgaatcattccagctcattccagctgtaaccacatgaacagaacgaggagaggtggttccccaaaaggaaagcaaagtgatgtttccaacggaagggaaaaggagatactggacaacagattttcactgtacacagatttgactattgtattttctggtaggaggtagggagaagaagtgagarccagaataaaaagtcccagagagcaatgagacattcagttaatactctgtagttgactcaacactttgcatccctggaacattctgcctagtaatatggcttcaggagaaagggtcctgggccattttaggaagggagccctgcacttgctgagaaacacaactgtgaatgataaagggaacgagaaccctatttcctgactcattaaagcaagagagtgcttaataaatactacttggtgataaagttctgacaaggccactcatctaataaccacagttctgactctgattcctattctgcttaagaatctacacgagcccagacttcagctgtcattaacagaggtcatgtcgttggcaggctgcctgtcacagattccgtgcacaggagggcaaatagcaaatggggaactccggacaccacaggtgtttctctctgagtcacagcgcttcagcctcattccccttccctggagaagacttcctccattccatcactacttctacctcctaaatagcacttttctcaccatttcatattacaaaagcatgttatgacatgcttatttcaggaaactcaaataagagcatgcagagtccccatattcttctctacc

SEQ ID NO: 671955 - DNA, 1330 bp, Homo sapiens
tggaagccattatggaaagcaacaatgacacaacacaaaagagagctatagcagtgaacacccattgaattccttaaatataaacaaaagcttatttctgaatcttgcctccctccaccccaatcaaacaagaagaatgtggggaggcagcggaggggggctgtgaagagggctgggtaggagtgcagggagacagcagggctaaaaagacctccctctgcagccgggggtggaatatgcaaggggctgggccggggcagaaatgtgggcgcggagggaaagaaggtcggagccacaggggaggtgaaagagaaagccggctatggcctcctgactgagcagcgcgcctgatccgtggctcccttcctccgtgggcccgcccagccctaggggttcacgggagaggacctgttggtctccctggctctgtgagaaccactttactttgctcagggggcttaagtgcctatttgaaactcagcacttgttaacttgtcacggcataaaagaagggagagaggcctgacattttcccaacccctgaaagtgaaagaagaaagggctctttactttcagggccacatcctgaatgacggggtcagtgtctgcaactgatccgtgtgggcgcagacttctaattatttcctggataacctgttatctattatccatcgggctgcttgccagagtatgctaatgtctccatcgtttctggtctggattctgaggagcgggtttttgttttttgttttaaaggggaagtagagttggggggcaggcagctgtaagattcccggtagcaggaaggctgtcctctcctctgccgttagactgcatgatggggagcaatgcccaggaacccacgctgatgccccgcggaaaccggcagtcactcctctttctcttggctacttgacttacgctcttcygggagtcttagctttatcggaaacttctggaaaagcttctgagagagaaatgtttttctggactgctctcatttgcttggagaacaaggaaactcttcaaataacgttttgtttggggacaggagggaagggagggagtcagaattcaataggcctgttcttctgttgagtgggggcagaacttggctgtcatccaggtgagctccgtatcaaccatcagttacacccctggcctctattatttgtactaaggcacaatgaaatgtcattgagtgggaggagtacacaactatagggcataattctttttcttattataaaaatagcatacttctgattcaagcaacagagtcagaaaaataagtacatttaaaacattaaaaaatttttaaggtattgca

SEQ ID NO: 671956 - DNA, 2047 bp, Homo sapiens
ccctaaccacagagtccatcttagttgataaaggggcatctattttgatctctcagatcacgattatatcagacgattcttgaagttttcaaactcttgagatcgaacataaatcattagtatccagaagtcaagctttataacaggctatcaggaaaaatatttttggtttgctgagatgaagatgagaggaaggaaaagggaagagaggagaggtttctccaattttactatttgtgcttcttggaaattgcaactccacaacccattctttttctcattagacaaataatgcaaagagcttaactatcacaccagcatgctacgagrggctccctggtgtgcttcaatattggaccaaacacagacagatgtattcctggtgcctgtgtaacattacaactcattgatcacatgcagcaacatcaacatctcaaggagtccatttgttcaaaacacagtaaatgactccacattttccctttgagtcaacaaaagactctgcttgtcaccttgcctggagcggggtggtttttcactatgtgagtatctatctttttatttctgtcccttatgttggtgggcacatgtctgtattgctgtccctgttacaactcatcccagtgaatgttagctgtgatgccagtagttaccatctcttgactatttacccaacagataacaatgcttacaatgccttaaaaatattaccatttggcttaaacagtgatgaaagaaatatatttttctcttcattttatatgaggaaactagacaacaagagggtcagtaacttcctgaaagtcacacagatagtaagaggcagagctgggctatgcacttgtgcttatttttctcaatattcttgctgctacaaggaatcttgaaagaggagattttcaagaacgtgagcagattgtctcaggaattggaggaggataagcatctattacttatctctattcattttgactcaggcctgtgtaaaagcaggaaatagaaggcatgagtgttccccataatatttgcagttcataagttagaaattagcaatcagccccttttcacgtaggacacaataatagacactctggcacagtccctgcaatttggttatgcgaagaaaacaggaaacaagcacattttcactgtggtttcagtctgaggagggctggcatctgctgacgtgacggctagattttcttgtcaatatcgtatttactatcctgatcacatgagcggagagaggaggatgagtcacagttaactggctgctaaattaggaaaatgtaatccatttatttctttcaaattagattcccccaaagcattttagacctttttttcctcagcaaccatagccacaacctaaacagctaacacattcccaaactaggctaatctggctgtctattatagctagacaatctggctgtctattataagtaaataaattaccattttgtagcattttcttccaaaattagggcaggattttgagtatattagtcttcacctacaaatgccaaacttcttctgccctggcttgactcatgtccacccctcactgcctactttcaagagccatcaaaatacaatgtagtatgtcgatttatatttctagaaagccacaaagtagtccttaaccaataagaatcataaatcattagctctgtgaggaatctattggatcactcattttatagctaagggaaatggagacccagcgagccttaagaaatttcatggactcagctctctggttgccaagttaacaattgcagcccccttttttcgtttcttttctttttttttttttgagacagggtctcactcttgtcacccaggctggagtgtggtggcacagtcatggctcactgcagcctcaacctcccaaactcaagaaattctcccacctcagccctctgagtaaccaggactacaggtatgtgctaccatgccaggctaatttttttatttttattttttgtagatatggggtctccctatgttatccaggctggtctcaaacttctgggctcaagca

SEQ ID NO: 671957 - DNA, 688 bp, Homo sapiens
ttgagaaagaaagattttaggctaatgtactttaagattgtacacttaaatgcaatttagcttgaatttgttattcaatatagtcaataatgttatgtggtatttaatttaggccaataaagttttgaatacctaattatgttaaggcctttaagacagttgagaccttgccaaatgttcatattatgcttgtcgagttaattatcaggaagttacttatctgatcattgtttcttaatttctattgagccagtcattgtcctttataagaaattattttccagctgtagtatttcagtgctgggttttgattatagacatataaaaagggtttatttaggactkcctttaaaattaaatctgatcataattatttgactagtagaggcactctaggaaaaggttgagtagtggctgtccactttggctactcagtaaaattacccaaggggctgtttaaattcccatgtgcaggtataccctcaaactaattaagtctatctctggaggtatttttttaaagctcccaaggtcctttgaatatgcagccaaagttgagaaatacaggccttgagaacaagcaaggaaagcctcctggggaggtctttctgtagtggaatgctcctgctctttgtaattgggtagcttgagtagctgtgaagttctttaaagaagattattttcaaaa

SEQ ID NO: 671958 - DNA, 688 bp, Homo sapiens
ttgagaaagaaagattttaggctaatgtactttaagattgtacacttaaatgcaatttagcttgaatttgttattcaatatagtcaataatgttatgtggtatttaatttaggccaataaagttttgaatacctaattatgttaaggcctttaagacagttgagaccttgccaaatgttcatattatgcttgtcgagttaattatcaggaagttacttatctgatcattgtttcttaatttctattgagccagtcattgtcctttataagaaattattttccagctgtagtatttcagtgctgggttttgattatagacatataaaaagggtttatttaggactgcctttaaaattaaatctgatcataattatttgactagtagaggcactctaggaaaaggttgagtagtggctgtccactttggctactcagtaaaattacccaaggggctgtttaaattcccrtgtgcaggtataccctcaaactaattaagtctatctctggaggtatttttttaaagctcccaaggtcctttgaatatgcagccaaagttgagaaatacaggccttgagaacaagcaaggaaagcctcctggggaggtctttctgtagtggaatgctcctgctctttgtaattgggtagcttgagtagctgtgaagttctttaaagaagattattttcaaaa

SEQ ID NO: 671959 - DNA, 1499 bp, Homo sapiens
tgggctgtgtttttcttttgttcatattaaaggtggccagcctttcacttagtctatcttgtaagtaaagttctctttacaacaagtaatttccaacttctctgggttgtttttcttccctctaagctacagttaaaggggtattttaccctatctttgtagtgtgagagtgtggaagaatctcaattgagtcttctgttgtttcctttaagattctggtgaatgtcctataccaagatttaagatacctatttctatgaggtgaagaacattgggcttttaatccttaccacatttctgtaaaaaacactggaaaatgtcagaatttgacacttttcttgcttcggatgaaatcctatgtgatatgtaaaagcttctgttttcaataaatgatgttttacttttgtccagagtacctactcattaccttcgtatactctcttcatattcaaatgtaatcatgataattttcatgattgtgccattcagtcatgtatctttcattcctattacaaattctagaggtggtggtggtgtgtgtgtgtatgtgtgtgtgctgggcattgtgtgaagactaagctaatgtaccagaacctttatttgcctttttgaagtgaagttgtatcctttcatttacagttaccacgaggaatttctcctttttatgatttgttgctttatactcattttgttaggcattggtggaaaaattctatgatttgagtttcctccaccatcctttttactcaccagtgtatttcttagtcttttttgaatgaattcactgatgacaggaatgaaatttgatactcccttaataacttctctagtggaattctgttgcttccctctgaccccacaaagagtttccaagctatagaaacagagaaaggtaacactgtgcctgcatgttcttttgttgatgtgtttaatcatgtcatactctccttttaagcatatgctcatgtagcgcacaaaggtagaagctctgatattggtggaggtttagtaaggaatgtcttttggcacccttagatctaaactgaatggaaagctgaatgcaaatttggggaaatgaaagagaagactctcttctcctttccatctggggaagatgaattattacaacctcatctgagacagcagaaggaactaagcatgttagtaaatcaaccattttctctcatttttttctcactaatatgaaaataaaatcttttagataagttgtataagcaatgcaggaggtttaagagaaagatcttttggcatctggaatttttttcattctacatttgatttgcaatatcacctaatgtcacatgagycatgttctctaatatttaaagcaaatggtagaataaaatcatcagtatcccagcatgaaaaggtgtctaggcatggtgcttctgttttcctttagacatgattagatgcctttattgtgttctttgcaatctgcatcttctctcaatttgctaagaagtgttaattctcta

SEQ ID NO: 671960 - DNA, 574 bp, Homo sapiens
ccatctgcctatataattagagcacatgaggggaactgacttcggaagagattcatgagatcactaagattaaatcacaaaatttacaaagctctttgaggcatcagccttgggtcctttcttacactctttaaaagaataaacattaaatatttaacgtattcaaatccttcaagcgaaggattccaggtaaattcctgagagggattgccatgagggcaaataaaatagatgagaccacagaagataactgtttgaattcacttktgagtactgtgtttaaggctctgcacatctctcttttggagttcttattttgggaacagatttattaataaaagcagacatatctatttctgtcttcattaagggaagtgcctaaccaactaacctgtttaataaaatataaacagaactcattccctgtttagggtaatgataatcaaattatatcttaattatatactgcacaaagatattttgatgacatttaaaaaatatatctgcacagctagtaccagaactagaagtacagaaaacaaagtctttcaaatctgttctcacaaacctctga

SEQ ID NO: 671961 - DNA, 655 bp, Homo sapiens
ctaaaattgtatgtatgtatatattattatgtgtattatgtgcatctattatatgcagaaaatacatatttaaatcttccagagacactattaaaaattccagctaatataggtaagtttataaaaaaaaattctaccaggcttggtgtagtgactcacgcctgtaatcccagcactttgggagggcgaggcaggaggactgcttgagcccaggtgttcaagaccagcctgggcaacattgtgagatgtcgtctctacaaaaaatcaaaatagtagccaggtattgtggtamacacttgtagtcctagctacatggaaggctgaggcagtaagatcgcttgaggccaggaggtcaaagctgacgtgagctatgatagaactacactctagcctgggagacagagtgagactgtgtctaaaaaaaaaaaaaaaaaaaaaaaaacacgtaaataacatatttgtgtgattctaagtaaatgtctgaattatttataggtataataataattacaatatttacagataatagattagagactgtcacatactttacctatattctattctattgtatttgtttttaaggtaaaatttacataacatattatttatcatttttaccattttgaaatatgtcattcagtggcactgagta

SEQ ID NO: 671962 - DNA, 655 bp, Homo sapiens
ctaaaattgtatgtatgtatatattattatgtgtattatgtgcatctattatatgcagaaaatacatatttaaatcttccagagacactattaaaaattccagctaatataggtaagtttataaaaaaaaattctaccaggcttggtgtagtgactcacgcctgtaatcccagcactttgggagggcgaggcaggaggactgcttgagcccaggtgttcaagaccagcctgggcaacattgtgagatgtcgtctctacaaaaaatcaaaatagtagccaggtattgtggtacacacttgtagtcctagctacatggaaggctgaggcagtaagatcgcttgaggccaggaggtcaaagctgacgtgagctatgatagaactacactctagcctgggagacagagtgagactgtgtctaaaaaaaaaaaaaaaaaaaaaaaaacacgtaaataacatatttgtgtgattctaagtaaatgtctgaattatttataggtataataataattacaatatttacagataatagattagagactgtcacrtactttacctatattctattctattgtatttgtttttaaggtaaaatttacataacatattatttatcatttttaccattttgaaatatgtcattcagtggcactgagta

SEQ ID NO: 671963 - DNA, 635 bp, Homo sapiens
gcatttttgggtctaatcatattaagcagcccactccagaaaccctaacgaaagaactccatccttaatattctgcttctctagaaacactcctggtaccaaaatctgtattagtcagggttctctagagggacagaactaataggagatatatatatatatatatmtatcttgtggaatcacaagatcccttaataggccatctgcaaaatgaggagtaaggagagccagtctaagttccaaaagtgaagaacttggagtccaatgttggagggcaggaagcatccagcacaggagaagatgtaggctggaagactacgccagtctagtcttttcacgtttttctgcctgctttatattctagccatgctggcagctgatgaggtggtgcccacccacattaaggatgggtctgcctttcccagcctagtgagtcaaatgttaatctcctttggcaactccctcaaagacacacccaggatcaatagttttcatccttcaatccagtcaaattggcactcaattaaccatcacacataccagtcagttactgtacttggtaatgctcaagataaatactagagctttttgcacctaatttacattttataatcccagaagctcttagagcaaag

SEQ ID NO: 671964 - DNA, 621 bp, Homo sapiens
agagataaaggaaaaagaagacaagtgtcatttctccattgtttattcagtgccagccacagagttagacattgtttgtggtttcatttaattatttaaaatcttatgaggcattactattaatttttctattttgaagataagrcaactgagtcttaaaaatgttatgtggcttacttcaaaattccctaaccaattaatggcataacagggactcgttcacagactaactttggagctgactctgtaaagtaataagccagctaggctgtctctcactgaccttcagagcataaagcccagggcagcagcagttaaaggaaccattgttatgagcaaaactcttacagagctgcatgggagcgagaggttgggggtaggcagaataaggggtggcacagatttcactggggcccacatcaacatggaaccaggctatggtttgtaaggtccccagagaagccaagtataggaaagcagcagtgctaggttcttctgtagcacacactccagtcagaggtctgactgacatcccagatggctgaggaggactggctttactggactcagtgataggttgattggatacattgctcattcaggctatatcaaaggcccagg

SEQ ID NO: 671965 - DNA, 658 bp, Homo sapiens
ttatttcaagaggcttcctctcatctgtcaggcagcccttaaggcatcttcactcactttgaaggtgccacaagacacagtttaacaccagagatccaggcaagcatttgcagtttgcagataaggagactaaggaccagaaaggcctaacaactgatcaagagagacttggggatatagaaagtctttgctttcactgtcagcagttccccctttttggcactttgctcacatactgccttctaataaacagctctgcttaacatgttactgcatttgctggttcactgaaaggtacagcatcatcagcactgcatggaaggccagccatgttgaggtataggttattgattctccacacaactcttaaccatctgccgtgtgccaagactaaaatatgctgctcaattatgtttgttttaaataagccaggtttgtttatataaaatgtcaagatgataaaatttctagtatctcttgaaaatttttgggtagtagagacaaaggacacaatttctatattcacagatagcaatatgtaattccatatactaaagcaatctcaatcattgtcacactatcacacacacacaracatgaacacccaaggcaaagaaagaaaattgctcaaatgcataaggtaaaatctttctcaaaa

SEQ ID NO: 671966 - DNA, 629 bp, Homo sapiens
acatgaataaatggataaatgggtatttaacaaaggctatacgtaattagtagcctttaccaataaattgcaaacaagcacctaactggacttcttttcccatctcaaaggaaaaaacctaaatcactttactctgagaaataaaacttcatctgtgaatgtttggttgggatctcaatattttgccatttataaataagatcagagaagccaggagtatatcttattttgattattttcaagtacagctgttaattttgataaatttctattacaaataaccattgaaaattttgaaaatacgattaaatgaaaaatatccgtaatcgccaaggcataactactcttcatattttggtatatagccactcagacgttttgctgtatgcrtaactgtatatagaagtatatatgcattaatgtataaattatagatctataaaatcaacaaagcaataaggtaattaaatgtataatacaaaatatggcataataaaacattttgaaatgaaaacaattataattctatactactacaattgttcccacttttaatcttaccttctggtctgtattcatattgctacttaattataattataaaattcgtacttcaacaactactttga

SEQ ID NO: 671967 - DNA, 2491 bp, Homo sapiens
  misc_feature 812, 813, 814, 815, 816, 817, 818, 819, 820, 821, 822, 823,824, 825, 826, 827, 828, 829, 830, 831, 832, 833, 834, 835,836, 837, 838, 839, 840, 841, 842, 843, 844, 845, 846, 847,848, 849, 850, 851, 852, 853, 854, 855, 856, 857, 858: n = A,T,C or G
  misc_feature 859, 860, 861, 862, 863, 864, 865, 866, 867, 868, 869, 870,871, 872, 873, 874, 875, 876, 877, 878, 879, 880, 881, 882,883, 884, 885, 886, 887, 888, 889, 890, 891, 892, 893, 894,895, 896, 897, 898, 899, 900, 901, 902, 903, 904, 905: n = A,T,C or G
  misc_feature 906, 907, 908, 909, 910, 911: n = A,T,C or G
tataaaattgcagaggctgactacttagaaaatagttatttttggttgcgtaaaccaaaatgaacttatcttctttatccttcagttttcctatagagcataatttagctcttgaagatgagcataatttttacttcacaaagttagaaaaccctacccctctaactttcagcttttatatctgtaaaatgaggtaagactactacttacatagcctgtctcatcctgtttatctgcaggtattatagaagcatagccaagatgtactaacatgctctctggatttgttttctcagaagtttgtgttttctccttttttttttttcaaatctgtgtctccaccccaattttccaccacttccctggagtactttttccatagtcactcttgttaagattctaacagtattacctagcctcccactttcactattccttggaatgatccctttcctcaagctaattaactgcctctgtacctttaagggtcagtttaaatatcaccaactctagggtccctgagagccccaccagccccaccaggtgttacactcctactatcttccattaattccaaggaccctccatgcattctgtgcataccatttcatggcacttatgctgaactgtaatttctgatttacatgcctgacctgaccatatttataacactatatatattttaatactgaaagttctggcagagtacttacttgacacatagtaagtgcttattaaatgcccattgagtcaagcaatcaaataaataaaataagtgaagtattttgtgcacctttgttctaaaaccgggnnnnnnnnnnnnnnnnnnnnnnnnnnnnnnnnnnnnnnnnnnnnnnnnnnnnnnnnnnnnnnnnnnnnnnnnnnnnnnnnnnnnnnnnnnnnnnnnnnnnaggcttgtttggatgatcattcagatggcacttcaactcaagaggcatcaattcaatttgtcttatggagcagtcagccaatttagattgaggccatccagaataataacaacgtcagcaaagggaacctgcagtcttgaatttcacatttttgtagtgtgagagggggcatatgaagatactgtgacagtatcatcgtgctaataatttaccaaaaacttaactggaaggaaagcccaaatgataagacatttaatctcctcctataacaaactgttatacctgtatttttaaatttgattgcatcaaccaacaagctgtagctcagcatttgagatatgcatagctgctggtcattaggatcaaaaaaatctcagtttcttcacttgtaaaatgaataggttgcagatgatattcaaaattgctactgaatctgacattctatgatggtagaaaatcttcaacttgatggtcagttccgatgctacacagatattatagactaagttgctttttttgttttttcctttttttaataaagaagttacgtctgtgccagcagaatttgttactatgttcacaggtctttttctttcttttattttttgaccttccctggcacacctcagtcaatgtgcttgttttctgtgttcagcattggtatagtgggaagtgccagggaaaaagacaggcagaacaattaagccaaaatcttaaccttgtaaaatttgtgactaaccttgattcagtcacgttgggaatttacaaaagatggaaggagctgttgacctcatataactcctgctttcagtcctgcaaaactcctagatgcaaagaaataataagaccctagatatcagcttggaaactaaagacgaagaaaacaataaaatcaataaaatacaatcagtaaaatttataatagctcataaaacgtcctgtcacagtagcaggtgatagagcatgcaccaaaactcctgtcttctaagtccagtggtctttttactacatgactcttttacagcaaaatacttttttcttaggtaaaacaaaagtaaacttctgtcactctctggtctgaatttctaatcagtggagtccaagacagagatgttttactctttggggaaaattatcctggaaagagccagattctgtctaaagtaccatcaagaatgtcagatgtcttgatgtaggatttggaaaatggattttccttaactccacctcactaaatatgttcatgttaactcactgcttctgcttgctgacagctgaggttcctattgccaagatctctgcaaatggcctggatctttggctcaaggatcaattcaaacgatagagccccaggctattttcaaagacaaatgtgatgggatatctttgattcactttgggttgtttgggttcagcctaagggtgaggggattgttcagctcccacastgaatgatcaagtggctgcagctcagtgtcaaggctttcttgtttgagtagcccaggcttagtaagtggccttcagtctcattggttacacacagagctgggcctgggagagggggatctacatgagaagga

SEQ ID NO: 671968 - DNA, 614 bp, Homo sapiens
ttttttttttttcctgttctttgctcaatgcttgggaggcatatcataaacctaccttaggcaataattctttgaagaattgaatggcataaagcctggtcgtgcttccgtgtatggttaccaaaatgatgttagctctactacagtgtaagcacctgtcggctgggtatccaatagacacttcaagttactacaaatgaactcaaggccttctctctgaaaacctgcccttctccctctattttttaaaaaagtaaattgacctttgtttgtcattcattccccactcagactcttccacccaccacgcagccaaatcaatgcaatatcctgagcctctctaatctgacaccttctcttcattgccccacatttaatctagctcaggtgttcactgtttctcaccataattttgcagccagctcctaacaagtttgccccctactagaccattctctctaattgctatcacakagagatttttacaaatctatcaatcagttctttccttgcaatccatcaatgacttgtcattagcctctcaataataaagtcctaactttccagcttggcagtggtacattcctacctccctctgtaacttaatttaacac

SEQ ID NO: 671969 - DNA, 647 bp, Homo sapiens
acctctaaaattcaggatttactgaagcccatcctagtagtttttggttgcctaatcaaagaatgaaaccttccaagatagattagaaaaagaatatttatgaagtaaaaacatctcatataaggcaatacttctagggacaatatacaatgtaattggaataagttatatattaaaataagttgtacactgaatatccttgttaactggatttttttcttgaagcagagcagcaatggtagaaatatgacacatatcagttgggaaaactggtatacacatacagaagaatgaaattggacccttatctcacactaaatacaaaaatcaactcaaaatggactaaagacttaaacataagacctgaaactgtaaaactaatagaagaaaacttagagtatagttccatgacattaatctaggcaatgattttttttggayatgatcccaaaagtacagacaacaaaagcagaaatatataaatggaattgttttaaactaaaaagctctatgtagcaaaggaaacaatcaaaagagtgaagagacaccttatggaatgggagaaaacatgtgaagactttgcatctgctaaagggttaatatccaaaacatataaagaactcaaacaaatgggcaaatgtcataag

SEQ ID NO: 671970 - DNA, 1048 bp, Homo sapiens
caactcttagataagaacaggctaaggatgatggaacaggaagttttactgagggacaggattaactggttaggagggtggtaagtgggcctagattaaataccaatattctccattgtaatgcatatatatatatttatatattttttgagatggaaatatatacatatatgtatatatatgtatatatatgtatatatatgtgtatatatgtgtatatatatatgtgtgtatatatgtgtgtgtgtgtgtgtgtgtgtatgtgtgtgtgtgtatatatatatatatatatatatatatatatatatatatattgagatggagtctcactctgctgcccaggctaaagtccaatggcatgatctcagctcactgcaacctcggcctcccgggttcaagcgattctcctgtctcagcctcttgagtagttgggatatatgtgtgtgtatatatatatatatatatacrtatatatatatatatatatacgtatatatatatacacgtatatatatatatatatatatacgtatatatatatatacgtatatatatatatattgagatggagtctcactctgctgcccaggctaaagtccaatggcacaatctcggctcaccacaacctctgcctcctgggttcaagcgattctcctgtctcagcctcttgagtagttgggattacagatgcttgccaccatgcccagctaatttttgtatttttagtagaaacggcatttcaccatattggccaggctaatctcgaactcctgacctcaagtaatctgcccactccggcctcccaacgtgctgggattataggtatgagccaccacgctcagccaagccaccacatccagcctctaaggcatatttccccacacccattaagtctgtgtgacgtcaaaagttaggacctggagtttaacttctctcattggacacctcattaaccaatgtaataatgcctccagagaaatatgaggttacaatgaataacaagaaattttatgagttacctgctataaaagaaaggtaatactttgaa

SEQ ID NO: 671971 - DNA, 1048 bp, Homo sapiens
caactcttagataagaacaggctaaggatgatggaacaggaagttttactgagggacaggattaactggttaggagggtggtaagtgggcctagattaaataccaatattctccattgtaatgcatatatatatatttatatattttttgagatggaaatatatacatatatgtatatatatgtatatatatgtatatatatgtgtatatatgtgtatatatatatgtgtgtatatatgtgtgtgtgtgtgtgtgtgtgtatgtgtgtgtgtgtatatatatatatatatatatatatatatatatatatatattgagatggagtctcactctgctgcccaggctaaagtccaatggcatgatctcagctcactgcaacctcggcctcccgggttcaagcgattctcctgtctcagcctcttgagtagttgggatatatgtgtgtgtatatatatatatatatatacgtatatatatatatatatayacgtatatatatatacacgtatatatatatatatatatatacgtatatatatatatacgtatatatatatatattgagatggagtctcactctgctgcccaggctaaagtccaatggcacaatctcggctcaccacaacctctgcctcctgggttcaagcgattctcctgtctcagcctcttgagtagttgggattacagatgcttgccaccatgcccagctaatttttgtatttttagtagaaacggcatttcaccatattggccaggctaatctcgaactcctgacctcaagtaatctgcccactccggcctcccaacgtgctgggattataggtatgagccaccacgctcagccaagccaccacatccagcctctaaggcatatttccccacacccattaagtctgtgtgacgtcaaaagttaggacctggagtttaacttctctcattggacacctcattaaccaatgtaataatgcctccagagaaatatgaggttacaatgaataacaagaaattttatgagttacctgctataaaagaaaggtaatactttgaa

SEQ ID NO: 671972 - DNA, 1048 bp, Homo sapiens
caactcttagataagaacaggctaaggatgatggaacaggaagttttactgagggacaggattaactggttaggagggtggtaagtgggcctagattaaataccaatattctccattgtaatgcatatatatatatttatatattttttgagatggaaatatatacatatatgtatatatatgtatatatatgtatatatatgtgtatatatgtgtatatatatatgtgtgtatatatgtgtgtgtgtgtgtgtgtgtgtatgtgtgtgtgtgtatatatatatatatatatatatatatatatatatatatattgagatggagtctcactctgctgcccaggctaaagtccaatggcatgatctcagctcactgcaacctcggcctcccgggttcaagcgattctcctgtctcagcctcttgagtagttgggatatatgtgtgtgtatatatatatatatatatacgtatatatatatatatatatacgtatatatatatacacgtatatatatatatatatatatacgtatatatatatatacgtatatatatatatattgagatggagtctcactctgctgcccaggctaaagtccaatggcacaatctcggctcaccacaacctctgcctcctgggttcaagcgattctcctgtctcagcctcttgagtagttgggattacagatgcytgccaccatgcccagctaatttttgtatttttagtagaaacggcatttcaccatattggccaggctaatctcgaactcctgacctcaagtaatctgcccactccggcctcccaacgtgctgggattataggtatgagccaccacgctcagccaagccaccacatccagcctctaaggcatatttccccacacccattaagtctgtgtgacgtcaaaagttaggacctggagtttaacttctctcattggacacctcattaaccaatgtaataatgcctccagagaaatatgaggttacaatgaataacaagaaattttatgagttacctgctataaaagaaaggtaatactttgaa

SEQ ID NO: 671973 - DNA, 1048 bp, Homo sapiens
caactcttagataagaacaggctaaggatgatggaacaggaagttttactgagggacaggattaactggttaggagggtggtaagtgggcctagattaaataccaatattctccattgtaatgcatatatatatatttatatattttttgagatggaaatatatacatatatgtatatatatgtatatatatgtatatatatgtgtatatatgtgtatatatatatgtgtgtatatatgtgtgtgtgtgtgtgtgtgtgtatgtgtgtgtgtgtatatatatatatatatatatatatatatatatatatatattgagatggagtctcactctgctgcccaggctaaagtccaatggcatgatctcagctcactgcaacctcggcctcccgggttcaagcgattctcctgtctcagcctcttgagtagttgggatatatgtgtgtgtatatatatatatatatatacgtatatatatatatatatatacgtatatatatatacacgtatatatatatatatatatatacgtatatatatatatacgtatatatatatatattgagatggagtctcactctgctgcccaggctaaagtccaatggcacaatctcggctcaccacaacctctgcctcctgggttcaagcgattctcctgtctcagcctcttgagtagttgggattacagatgcttgccaccatgcccagctaatttttgtatttttagtagaracggcatttcaccatattggccaggctaatctcgaactcctgacctcaagtaatctgcccactccggcctcccaacgtgctgggattataggtatgagccaccacgctcagccaagccaccacatccagcctctaaggcatatttccccacacccattaagtctgtgtgacgtcaaaagttaggacctggagtttaacttctctcattggacacctcattaaccaatgtaataatgcctccagagaaatatgaggttacaatgaataacaagaaattttatgagttacctgctataaaagaaaggtaatactttgaa

SEQ ID NO: 671974 - DNA, 1564 bp, Homo sapiens
caatcagcatttcctagctgagacccagactcagctaccatatttatgtaacgtcaccttctcatataaggcatatgatctaaaggaacaaatgggtatatctcctaacagaaaatatcaacaccacactaccttgtgttccttgcagatttagtagttattcaccttctctactctgttctattcccctttgtatgtcgttttttacacactcatgacactactccttcgttaggtataaatcacgacagcagatttttttttcctaaaaatccctaagaggctaactggaatttaagttaaaaagtaattyacacagatgctctaaaaaaaaaaaaaaaaggccagtgacatttttaaaatttttaaatttaaccataaccttaccaaaagcaaatggaaatcaactaattgaccatcaaaaatgctgcagtaagactaaccactgaagtaaaatttcttagtttatataaactaaaacagcaagcaactagacaagtgttgaaaaagtaatggacagaatatttattcatacttcaccttacaaaaacaagcaaacaaacaaaacccttgacagacagatttacatggttatttaaaaatgtcaacccaccaggctttacagcacattttaaaagccataaaacaaaggttatttcatattaagactgcataaatatatagcaactttttaaaatttgattttcagttaggctttatttttctttcttcttatttttctttgtagagacaaggtcttgttatgttgcccaggttggtatcaaactgctggcctcaagcaatcctcccacctcccaaagtactgggattacaggtgtgagccaccatacctggcccttatttcacttttaagaaagagaaacaggcttctggtttcaatttagctaagagaaaaacacaaaacttcatcaaacatcaattctatacattttcaaaactgttattaaaatataaatttatgtcttgggtaaaaggttacagatttagaaaacaaaaggatttaatattatgtcaatatagtttgtgattcttatgatattgaattcaactgaattccaatgcattaagaagctgtattagtccattctcacactgttatataaagaaatacccgagactggacaatttaaaaaggaaagaggtttaatggcctcacagttctgcatgactgaggagggctcaggaaacttacaatcatggcagaaggggaagcaaacatgcccatcttcacaaggtgggaggagagagaaaaatgagtagcaaagaagcaacagccccttataaaaccatcatgtcttgggagaactcactatctccagtacagcatcagggaaactgcccccatgatacaattacctccacctggtctctccctggggattatggggattacaattcaacatgagatttgggtgaggacacaaagcctaaccacatcagaagctattcttccaattactgcatatacttgacaaattatagctttctcaatctgttttctggctggtaaaatatacttaaaatatttacacatgtataattc

SEQ ID NO: 671975 - DNA, 1372 bp, Homo sapiens
taggattctatgccattataatctgtagattacaccattaatatatacgtgtatgcttatattgtctttcacatcatctaaatgaacactgaaaatgactccaatgataaggtactatttgaatattattgtgtgctaggcactcttttaagaaattgagacgtagtatattatttatctttacagtcctgttgaggtacacgcaatcctgtgaagtaaatgctgttattcttattttacagatgagaaaactgaggcttagagaggcttaatgagtggtagtggagtacacacttgaatccaagcctgtcctactccagtcagctatcataactgtaacttctcatatcagtagtgtcttttgacatgagcagtattaaggtggggcaaaaaatcgcctcaatttccctagaaaagatgaaagagaccttggcagtctaatttggcatctaaattcatgagtttttttatgagcttttaaaacagttcttgcaatgatatattttccttttagcttttcttttttcaaggtcttcctctactaacttgtcacttttgggcttcacagcgccgagttcctataaaactgttgagtaaagtaaagataatgaagtgcccttttgaaaatcttttaacaatgtttagatgctcatcacagcattatttgtagtaatataaaattggaaacaaatagcttagaaaagaggaatgatttattctaaatccttacaatagaattttgtggtcatcaaaaattagattgataaggagctttttgtaacatggaaatatgttaaatagataaaaggtaaaacctggcaaataaagcatgatcataactattgtttttgtgttgccttattttttaataaaaactttcatttaaaaaggccagaaaaaaatagtgagggacattataaagatttgtatagggagaaccaacctattttaggagtagagagattcgaytgtgaagaattcactatgtatagaatctggtttgttaagttgaggaacaaattatgatattttgcccgaagatttttttcttctaaatatggaggaagcttactgattctaatgctttatgttattctagccaattcttggaagatttacttgaggctctgttgctgctttacaaagatgactagaaatgatagtacatgcttataaaattaggctgggttgctgctttacaaagatgattaggtaattataatgatagtacatgcttataaaatatactgtttaataaaaatttaattcctcaaaataactttatggtaaatactactgttatcttcctttttatagataatggaaactgaggtgcacttagattaattaaaatctgcccaaatatagatgg

SEQ ID NO: 671976 - DNA, 700 bp, Homo sapiens
agtggtgtgttagtcacatggaatgctagtcccagtgtgtgttggccacgtggcatgctagtcacatggggagccagtcaggtggggacaggtcacgtgtaagacccagggttaggtctggataacccaaggcctgtcccttgtctgcacaaagccttgggctctgctccaggctcagggcagcctctgtcctggtgttgtgcaggatgccaccactcttcagaccaggaaaggaagaaaactcccttcacccgggctctaccagcyatcaggttgggcatccatggaaatagtcaaagcctacatgtggagtcctttgtcatccacaacacaaacaggcctctgctgctggtttatttatctaaggattgcagcaagattttttacccttccctccgaaagtcatgaggccttagcatggagaagccagtgcctggatggtttgtggaggttgaaggtggaaaagccaggcttaacaaataaacaatgaaaaatggggctgggggtaggctggggagagggaaagcgataagactcagcctttcaggagaaaagaaaaacgccctcattgattgtcttgacaacaaaaactgtaggcagcttctgcaggaaattttttttaaacaatatctctagattttagggagcaggtgctgaggcttaactgtcctgggaaccccaagttccaactggaatgctg

SEQ ID NO: 671977 - DNA, 700 bp, Homo sapiens
agtggtgtgttagtcacatggaatgctagtcccagtgtgtgttggccacgtggcatgctagtcacatggggagccagtcaggtggggacaggtcacgtgtaagacccagggttaggtctggataacccaaggcctgtcccttgtctgcacaaagccttgggctctgctccaggctcagggcagcctctgtcctggtgttgtgcaggatgccaccactcttcagaccaggaaaggaagaaaactcccttcacccgggctctaccagccatcaggttgggcatccatggaaatagtcaaagcctacatgtggagtcctttgtcatccacaacacaaacaggcctctgctgctggtttatttatctaaggattgcagcaagattttttacccttccctccgaaagtcatgaggccttagcatggagaagccagtgcctggatggtttgtggaggttgaaggtggaaaagccaggcttaacaaataaacaatgaaaaatggggctgggggtaggctggggagagggaaagcgataagactcagcctttcaggagaaaagaaaaamgccctcattgattgtcttgacaacaaaaactgtaggcagcttctgcaggaaattttttttaaacaatatctctagattttagggagcaggtgctgaggcttaactgtcctgggaaccccaagttccaactggaatgctg

SEQ ID NO: 671978 - DNA, 1271 bp, Homo sapiens
tacagcttaagagtcagattctggcctctaagaggtttgtcctaataatttggattcagtaatctaaagcttttacatttcagattctagaacccctttccaatgagatcttagctgattgcacccatttgggtaagaagttttaaagacttggagggcacagtctggataaagagaaaaaaatatcagatatacaattgatgtttaattcctcattactttcaggataaagttcgttcttctggcatatagtatagtagctcttgatcgtagtccgtccacctatatcattctctagtcatacgtaacttgggtcatacaccacacagtgatgtttcagtagatgatggacctcatatactatggtagtcctatgagattttaataccctatttttactgtactttttctatgtttaaatgcacaaatacttaccattgtgttacagttgcctatagtattcagtgcagtaacatgctgtatagctatgtaacctaggagcaataggctataagataaggcctaagtgtgtagtaggctatactatcagggttgtataagtgcactctgtgatgctgacaaacaacaaaattgtctaatgatgcatttctcagaatgtacctctgtagttaagtgatacgtaactaattgttttccctgaagttggtatgtgtaccctccttcctttataactttacataaaggcagttctcctttccttctggttaatccttcagattttgaattcatttacccagtcactctttcaccagatatatgtaatgaaagtttactctgtgctgtgtactcacttatccatgggaattcttctttacatcctttttccttcttggattgaatctcaggtgtctctctttgtgtacgcataatatcctggtcattgctctacaataagccctatcaactcagtatgatagctgctagattatctcctttctctactaatttgtaagtcatttgagaacaggcagtagatcacttatttccatattccttgtgcttgatatagtgcccaataaataactatagagtaaatcattatataataaattgattttaggctgtgacaatagcgtaaatatataaaaagaaactatgtatatctttgagccttatgtagtaatctgtccaaagtatgtctggaagaatgtgtagtggtatatagcctagaaataatgtagagtctttcttcrgggatcttgtgtactgtgttttaaacttctttttttttttttgagacgaagttttgc

SEQ ID NO: 671979 - DNA, 944 bp, Homo sapiens
ctttaatgtttatctataaagtaccatattgcccatatgttcttcagatctaactatgtggataatttattattattattattttttgagacagagtttcactctgccattcaggctgcagtgcagtggtgcgatctcaattcattgcagcctcgaccgcccagattcaagcaatcctcccgcttcagcctcccaagcagctgggactacaggcacacaccatgtcgataatttaaatcaaccttattcattttaactgctacatagcattgcagcatataaatataccayagtgtgtaatccattctcctctttgtaggcatttacacgatttacaattttgtatgattagaaaataaaccacaatgaatattgttgcacatgagttcaaaagtttctgtgaagaacaaacctaaaagtagaaggttagagcatacatattttcagctttagagaatactaccaaactcctatatataatttttaccaatatgctctctcagcagtagcactgagagttcttatttcttccaaaccttgactatacttaatgttaccagaccttagaattttgtcatgatgatgggcatgaagtggtaaaacaaggacattttataaaagtatccatacataataaaaacataacattcataaatgtaggcaatataaaaatttatcaggtaaaaaatattagattataacagctgtgagtggtagctcacgactgtactcccagcacattaggaggccaaggtgggcggatcacttgaggtcaggagttcaagaacagcctggccaacatgggaaatcctgtcttgaccaaaaatacaaaaattagccagatgtggtggtgcacacctgtaatcacagctactcgggtggctgaggcaggagaatcacttgaaaccgggaggcagaagttgcagtgagccgagaccacacca

SEQ ID NO: 671980 - DNA, 1352 bp, Homo sapiens
ccatgagctcctctagggcaggaagtatgacttatcatttttgcgtcctagctcccagcacagggtggcacatagatagcaggtgctcattaaatataagcgatggttgagaatgctaacaaacattaactaatcccagtactagctgtagaagcagttagaggggttttcttggggcggggggcaagatcccatttttctgcgaagacattgatatatctcattacctttcatgaattgaggagaaaatagtgtgacatctttagaaagcataatactgaatgctacctgaatttcctcgaggtggtcaatggtcgggacatcaaagataagtctatccaaagagtctcagattgaagcaacataagctttaatatgctgtcttctgccctgctatggacattttggagtggatgaaaaggcattagatgcatacagatttgtagttgtttataatatacataacatcagcaacctgtcttagtatccatggcaccatcttagaggtgccctggtataatggatagggcatctctgtctcaaagggtctggtctttgcatgcaagctggggccaggaactgaaacccaagtcaaatcagatgtgaagtttcccaagatagcccgaggcaacacagccagaatgaagaccgtaaatttctcgccagaacaacatccaattaggaaatatgagggagagaaaaaaattatttataatagcaattttaaaagatgaattatccatcaataaacttaacaagatgtgtgcaaattcttttggaaaaaattaacattactaaaggacaccaaggaaaatgaasaaaaaaaggtatatcatgttcttggataggaagacaatatcataaagatgttatttctccctaaattaatctggaaatgtaatgcaatttaaatagaaaaaaacaacagattttttggggggacaggggttggggaaaactagacaaactgactctgaaatccatacagaaaaataaacaactagaaataccaaggagaatctgaaaaggaacagtagaaagagaggaactggctccaccagtattaaaactggtattaagctgcagtaatttaaagcgtacttgtgcatcaagaaacagatcaataagtgaaaagctcagaaataaaactaaatgtatccagaaatctactatagaataaatgtggcatttcaaatcagtggggtacaaaattattcaataaacgttggaataattgatagttaccttgggaaaaacttgttaggtccatatctcacacattgcattaaaaaaattccagatggatctgaaaataatggaggaaaataatagaggaaaatagaggaattttg

SEQ ID NO: 671981 - DNA, 569 bp, Homo sapiens
ttaacagagtgctgaatttatttcaacagagtgcttacatgcttagaaaatctatcattcaccttcttagcctgccctgagatttctaatgattcacttatgtagctttcgcttgcccagtgtaagatgagcctagtccctgtggatttgtagggatttctgtttatgaggttttgttgtgtgttgttctaccttaagtgaaagattaaattaagcatgatcctaattcttaacacattatcatcatcagtccatgcaaaacatccctcctgctttatctctttaatttttgcctttatcctttactcctacatcactaactctgatgcatattatatmatgtcctgaaataagcatatttcatgaactcatgaaaattgtgatgagtttgtatatacttctaatataatttcaatatgcttcttacttttgtcacttcattaccatgtttaagacatatgaattcctgcatgaatatctacttcaaagcttctaacgatttcagtctttatccactatgttttttgttttttaagatgcagtctcactctgttgcccaggctggagtg

SEQ ID NO: 671982 - DNA, 994 bp, Homo sapiens
tttctgaagaaatgattggagagaaagtgggtaaacgtgtgggtttgccctttctcttccaatcttcccatataatgtttttctaattaagactaatattcttccttgcaatcaaaagggtgagagttacattctgcaccactcaacagccatgcttcagagaggggtcttgggtactggcagtgagcgatatcaacaatgcaacaacaacagtaaagcttacggagcatgactatgtgtactcaatatgagtrcttatgtgcattagatgttttagtgcacaagagccttatatagggtgtattgccacctttattttacagagaaggacaaagaggtgaattaacttgtccaaggtcacagagcagctaagacaaaaatgaatgaagaaacgatttccaaataaatatagtcagtctttgattggtttttcgtcctgtcttccacattcattgtgaaaaatgcaaactgtacaaaactgcataaagtagaaagttaaagctccctgtaaccctgcccctaaggtgagagtttgaacttgcgctccgtggtttttcccccagcagagctagaatacttcctataggcaacctgaaaagctctcaggtatctgacttctacaaaggggctggtcctctcttaagccagtttagaaacagaagaatataaagccactttcttaccatttctgctatagaaagtgaacgccaaaccattctggctacaaagagagtcacacccatttggagtgaaagctttcatgagtttacatcactgcttagaaggacaggccaaaaaatacagcaggaggacaatgagagtttaccttcatccacgaacaataaaacgagaacaatgtagaagagaaatctggttgttcatttctcctcatttttatgtctcataagagaaatcatttgggttttctctgtaaaaaaacaaaacaaaaccaaaaaccctagttttagcagcaaaactaatcacaacaaaacga

SEQ ID NO: 671983 - DNA, 742 bp, Homo sapiens
tataattatacttaacattgactttaatgtagagaaggcagtttcacatgtaatatatcacttatctttcacaacagccgtgtgaggtagaattatttttttcattttatagatcaagggactgagggtcaaagagtttaagcaactagcccaaggtcatagagtggaacaggttggtctgcaactattttttgatttctcctacttgggaagggcaatggaaagggaacccaaaagacaagccagcagcttaaaagaggcaatgcaagctctgtccttaaagggcatctgctcccctggggaacatgtgtctgcccaggggaaagtcctttaataatgtacaacagcaaccaagagggcgcccagtgacttgttttataggctataactgggtcccatattaagaaacaattttcttggctatatttggggcaggaagaagatgatgaagcaagccaggtacagtctatgaagtaaagccacagaatcgtgtcttaytgataaacgacacataaaatcaattcaatgggtcacaagcaacaggttttccaaacatgaaacagagcagaattcactgcaatagtaagagccagtgtttgtctgtaggctttgtttcagttttatatgtacacacatgcatgcacctccatagccatgccatttgggaactgggtcacaaaatgtatttctttctgtggatgtttgggaaagcatttgaaaatcactgcttttgagccgagat

SEQ ID NO: 671984 - DNA, 1323 bp, Homo sapiens
atataattatgcttgtatagaaagatacttgggattccttaggagttaaaaccacacaattggctgggtatggtgactcatgcctgtaatcctagcattttgggaggctaaggcaagcaggtcatgtgagcccaggactttgagaccagcctgggcaacagcaagatcccatctcttatgaaaagaaaaattaagaattttttttttttgagatggagttttgctcttgttgcccaggctggagtacaatggcgtgatctcggctcaccacaacctccgcctcctgggttcaatcgattctcctgcctcagcctcctgagcagctgggattacaggcaagcatcaccacgcctggctaattttttgtatttttagtagagacggggtttctccgtgttggtcaggttggtctcaaactcctgacctcaggtgatccgcccgcctcggcctcccaaagtgctgggattacaggcgtgagccaccacacctggccaaagaaatttttttaaaaagcacacaagcatggtgattctttaccctgacctgaagacatgaacttcttgtcagcaggatttcaatccaggatcctatgcggagggagagaagctgggccagtgaccactggcagctcctggacactaagaaaatctccgtggcagaagacaagggagcccagatattgccaacagccattgtttaaaaagaaaaaaagagtcatagagcttcagtaacatggctctgctttgccaatatcagcaggaagacaggtgcagagagatctgagacctttccccatagacagtgcccaagaaatgtccccaaagcttgtgctggttgccaggctgggctgaatctggagcatttccaggcatactcaaaraggcccaaaagtgacatgtgaacttagcatatctgttttcaaccttcttcttctttttttttttttttttgacacagggtgtctttatattgcccaggctggcctggcctcaagcgatcctcccaccttggcctcccaaagtgttgggattacaggcatgagccggcacgcccagcctgtttgcaatttaagagtagaaattgttttcatcaaacagaaaacatctgtgtctgtttgaatttcaaacaaagtaatgctcttcaggtctgatttgagcaaattcattttcagtggggaactctacatctttgtttaatttagggagagtatgaagggattgcttgagttgctccatttttattttctcatgggatagagaaatgtatgtgattcaatggctaatttcgtttcatggtagtttgtgggttttgtttttattttcg

SEQ ID NO: 671985 - DNA, 1323 bp, Homo sapiens
atataattatgcttgtatagaaagatacttgggattccttaggagttaaaaccacacaattggctgggtatggtgactcatgcctgtaatcctagcattttgggaggctaaggcaagcaggtcatgtgagcccaggactttgagaccagcctgggcaacagcaagatcccatctcttatgaaaagaaaaattaagaattttttttttttgagatggagttttgctcttgttgcccaggctggagtacaatggcgtgatctcggctcaccacaacctccgcctcctgggttcaatcgattctcctgcctcagcctcctgagcagctgggattacaggcaagcatcaccacgcctggctaattttttgtatttttagtagagacggggtttctccgtgttggtcaggttggtctcaaactcctgacctcaggtgatccgcccgcctcggcctcccaaagtgctgggattacaggcgtgagccaccacacctggccaaagaaatttttttaaaaagcacacaagcatggtgattctttaccctgacctgaagacatgaacttcttgtcagcaggatttcaatccaggatcctatgcggagggagagaagctgggccagtgaccactggcagctcctggacactaagaaaatctccgtggcagaagacaagggagcccagatattgccaacagccattgtttaaaaagaaaaaaagagtcatagagcttcagtaacatggctctgctttgccaatatcagcaggaagacaggtgcagagagatctgagacctttccccatagacagtgcccaagaaatgtccccaaagcttgtgctggttgccaggctgggctgaatctggagcatttccaggcatactcaaaaaggcccaaaagtgacatgtgaacttagcatatctgttttcaaccttcttcttctttttttttttttttttgacacagggtgtctttatattgcccaggctggcctggcctcaagcgatcctcccaccttggcctcccaaagtgttgggattacaggcatgagccggcacgcccagcctgtttgcaatttaagagtagaaattgttttcatcaaacagaaaacatctgtgtctgtttgaatttcaaacaaagtaatgctcttcaggtctgatttgagcaaattcattttcagtggggaactctacatctttgtttaatttagggagagtatgaagggattgcttgagttgctccatttttattttctcatgggatagagaaatgtatgtgattcaatggctaatttcgyttcatggtagtttgtgggttttgtttttattttcg

SEQ ID NO: 671986 - DNA, 636 bp, Homo sapiens
cgtggtgtgatcagggatcactgcagcctcaatttcccaggctcaagcaatcctcctgcctcagcctcctgagtagctgggactacaggcacatgccaccacacctggctacttgtagtttttgtagagatggggtttcaccatgttgcccaggctggtctcaaactcctgagctgaagctcaagagctcaagttcaagcttgagcccgcctcggcctcccgaartgctggagttacaggcgcgagacacccgcccggccgtggtccttacttttaagacgtgaactcttcgatgtcccagctggatgcctggagtgtcattaacaaagtgttagagtgctttcccactcaggctgagccataactaatgcccgccccctccgttgctgcttgaactcaatctctgctcagcttcttccaccgcacagaagctggtacctggtcatccttgggtagtctcacctttcaaatgtgcaacacagctcttaaccaagtgctcagaggacacccccacgaggattttttggagtccttcctctgcaaagctcctgtctccagtgttctaaccagcagattccagctgctcagctgcccgaaactctgtactctgcctcctcagcttagttaagttctcct

SEQ ID NO: 671987 - DNA, 636 bp, Homo sapiens
cgtggtgtgatcagggatcactgcagcctcaatttcccaggctcaagcaatcctcctgcctcagcctcctgagtagctgggactacaggcacatgccaccacacctggctacttgtagtttttgtagagatggggtttcaccatgttgcccaggctggtctcaaactcctgagctgaagctcaagagctcaagttcaagcttgagcccgcctcggcctcccgaaatgctggagttacaggcgcgagacacccgcccggccgtggtccttacttttaagacgtgaactcttcgatgtcccagctggatgcctggagtgtcattaacaaagtgttagagtgctttcccactcaggctgagccataactaatgcccgccccctccgttgctgcttgaactcaatctctgctcagcttcttccaccgcacagaagctggtacctggtcatccttgggtmgtctcacctttcaaatgtgcaacacagctcttaaccaagtgctcagaggacacccccacgaggattttttggagtccttcctctgcaaagctcctgtctccagtgttctaaccagcagattccagctgctcagctgcccgaaactctgtactctgcctcctcagcttagttaagttctcct

SEQ ID NO: 671988 - DNA, 645 bp, Homo sapiens
agaccagcctgaccaacaaggtgaaacaccatctctaccaagaatataaaaattagctgggtttggtgatgggcacctgtaatcccagctacttaggaggctgaggcgggagaatcacttgaatctgggaggcggaggttgcagtgagccgagattgcaccattgcactccagcctgggtgacagagcaagactccatctcaaaaaaaaaaaaatyatacaactagcagatataagtggcagccactacctctagggctagagaaaagtatccaaagaagagatgatcttaaaagacgaccctggtaaagctgatattttgaactggttagagaaggtgcagttgtcacccacaggatgtctgagaatcccactgaaatgatgcacaccaagcctggaaaacaggaacctgccccccaaaattccaatgacactcactgtgaaaccaacagcttcaccagactcaccagctaggggacattgaaacttactgggaagctacttctgggatgagaaatctcactagaaagctccctctgtggtgctggcaaaactcactaagaagccactcattagggtacacactactggtgaccctcaccaatgacagctcagctgcatgtcactgaagcaaaagagaaaatca

SEQ ID NO: 671989 - DNA, 645 bp, Homo sapiens
agaccagcctgaccaacaaggtgaaacaccatctctaccaagaatataaaaattagctgggtttggtgatgggcacctgtaatcccagctacttaggaggctgaggcgggagaatcacttgaatctgggaggcggaggttgcagtgagccgagattgcaccattgcactccagcctgggtgacagagcaagactccatctcaaaaaaaaaaaaatcatacaactagcagatataagtggcagccactacctctagggctagagaaaagtatccaaagaagagatgatcttaaaagacgaccctggtaaagctgatattttgaactggttagagaaggtgcagttgtcacccacaggatgtctgagaatcccactgaaatgatgcacaccaagcctggaaaacaggaacctgcccccmaaaattccaatgacactcactgtgaaaccaacagcttcaccagactcaccagctaggggacattgaaacttactgggaagctacttctgggatgagaaatctcactagaaagctccctctgtggtgctggcaaaactcactaagaagccactcattagggtacacactactggtgaccctcaccaatgacagctcagctgcatgtcactgaagcaaaagagaaaatca

SEQ ID NO: 671990 - DNA, 645 bp, Homo sapiens
agaccagcctgaccaacaaggtgaaacaccatctctaccaagaatataaaaattagctgggtttggtgatgggcacctgtaatcccagctacttaggaggctgaggcgggagaatcacttgaatctgggaggcggaggttgcagtgagccgagattgcaccattgcactccagcctgggtgacagagcaagactccatctcaaaaaaaaaaaaatcatacaactagcagatataagtggcagccactacctctagggctagagaaaagtatccaaagaagagatgatcttaaaagacgaccctggtaaagctgatattttgaactggttagagaaggtgcagttgtcacccacaggatgtctgagaatcccactgaaatgatgcacaccaagcctggaaaacaggaacctgccccccaaaattccaatgacactcactgtgaaaccaacagcttcaccagmctcaccagctaggggacattgaaacttactgggaagctacttctgggatgagaaatctcactagaaagctccctctgtggtgctggcaaaactcactaagaagccactcattagggtacacactactggtgaccctcaccaatgacagctcagctgcatgtcactgaagcaaaagagaaaatca

SEQ ID NO: 671991 - DNA, 1044 bp, Homo sapiens
tctttaccatcaaaaaaaaatacaacagaatagaaaatacagataactgtgaagcatttactaaaaggcttgcatcctctacctattatggaaattttaattgaaagaaatgaacaattcatgcaagtacacacacatagccacgtatattatatttttgcataccctaaaaaaaacgcacagtctaaatcattattttcccttgaatatatactgaggctacctcaatagaaatcagactgtggttatattttccagaatagatattaagggcatagagtaattataataaattacttaagtgcagaggagcaaacctcaaaagtgtcatttactatacctatagayggatttttctaccctctcagctgtatcttgaaagtatgaaattcttttgaaaatcaatgggaatttactgacatttaaaaaatctgacctagcataccatcttctatatagataataattagcacataccagaagttcagtaaatattaaatgaagtctagggcaaagcaggattatttatttcctattttgaagggttaaaaggccccacttagctacaaggaatgctgaaaatgtgttataactgcacaaaatttctacaaaaaatggagttcagttagtaagtaaaaagacaatgaatactaaataggcatctagcattctctgacacacacctcattgcaaaacaacagaatagtcaacgtactttttcaccagcatcactgcctaaattgtatcattcttttatatttttattattcatatgaaattatatctagttcgctgttatccgaaatgttataatttttattcaattgctgcactataatccaagtcactatggtaaacatctgcattttattaatttttctccaagaacaaactccaacgtagtgactctatgttgaaccatactaggttctttaactattaagttataacgctctgtgatttagaaagatatctctttatggacctaaaaggaagcattaaggacataagaaatcggagtcatttgatttgtttataaatact

SEQ ID NO: 671992 - DNA, 1044 bp, Homo sapiens
tctttaccatcaaaaaaaaatacaacagaatagaaaatacagataactgtgaagcatttactaaaaggcttgcatcctctacctattatggaaattttaattgaaagaaatgaacaattcatgcaagtacacacacatagccacgtatattatatttttgcataccctaaaaaaaacgcacagtctaaatcattattttcccttgaatatatactgaggctacctcaatagaaatcagactgtggttatattttccagaatagatattaagggcatagagtaattataataaattacttaagtgcagaggagcaaacctcaaaagtgtcatttactatacctatagacggatttttctaccctctcagctgtatcttgaaagtatgaaattcttttgaaaatcaatgggaatttactgacatttaaaaaatctgacctrgcataccatcttctatatagataataattagcacataccagaagttcagtaaatattaaatgaagtctagggcaaagcaggattatttatttcctattttgaagggttaaaaggccccacttagctacaaggaatgctgaaaatgtgttataactgcacaaaatttctacaaaaaatggagttcagttagtaagtaaaaagacaatgaatactaaataggcatctagcattctctgacacacacctcattgcaaaacaacagaatagtcaacgtactttttcaccagcatcactgcctaaattgtatcattcttttatatttttattattcatatgaaattatatctagttcgctgttatccgaaatgttataatttttattcaattgctgcactataatccaagtcactatggtaaacatctgcattttattaatttttctccaagaacaaactccaacgtagtgactctatgttgaaccatactaggttctttaactattaagttataacgctctgtgatttagaaagatatctctttatggacctaaaaggaagcattaaggacataagaaatcggagtcatttgatttgtttataaatact

SEQ ID NO: 671993 - DNA, 1044 bp, Homo sapiens
tctttaccatcaaaaaaaaatacaacagaatagaaaatacagataactgtgaagcatttactaaaaggcttgcatcctctacctattatggaaattttaattgaaagaaatgaacaattcatgcaagtacacacacatagccacgtatattatatttttgcataccctaaaaaaaacgcacagtctaaatcattattttcccttgaatatatactgaggctacctcaatagaaatcagactgtggttatattttccagaatagatattaagggcatagagtaattataataaattacttaagtgcagaggagcaaacctcaaaagtgtcatttactatacctatagacggatttttctaccctctcagctgtatcttgaaagtatgaaattcttttgaaaatcaatgggaatttactgacatttaaaaaatctgacctagcataccatcttctayatagataataattagcacataccagaagttcagtaaatattaaatgaagtctagggcaaagcaggattatttatttcctattttgaagggttaaaaggccccacttagctacaaggaatgctgaaaatgtgttataactgcacaaaatttctacaaaaaatggagttcagttagtaagtaaaaagacaatgaatactaaataggcatctagcattctctgacacacacctcattgcaaaacaacagaatagtcaacgtactttttcaccagcatcactgcctaaattgtatcattcttttatatttttattattcatatgaaattatatctagttcgctgttatccgaaatgttataatttttattcaattgctgcactataatccaagtcactatggtaaacatctgcattttattaatttttctccaagaacaaactccaacgtagtgactctatgttgaaccatactaggttctttaactattaagttataacgctctgtgatttagaaagatatctctttatggacctaaaaggaagcattaaggacataagaaatcggagtcatttgatttgtttataaatact

SEQ ID NO: 671994 - DNA, 661 bp, Homo sapiens
gaatcatgtaatgcatgttccagatcagttacttgttcactacagaaaaaaaaaaaaatcataatttgttttatcccagaagagaattagtgtgttttcttctttgggcatccctgtggaattctagagctcaagggcctggtataagaattcaaatgcacaatattcatagcatacctgaattgagtgagcagttcatttccaaaggtaagagaaaaggaatctgatcacttgtaaaatattaagaagctctcaccttgaatttaagactaaaacatattycttactatttaaatataagaaagagggttctgtttaatgtgaagctgtattacaaattgaatcacatactttccaaggatcataggagagaatacgtgtgttgttttagcaacagtttataaaaataattgtattacttgttattggatggtatttattttatagaaatttcagaagttacgtaagaatcatagtaaaaggatagccataattcatttttgatataaatatgtcacaaaaatacacccaaggacttcacaggcataatgaccaaatgatcatataaattgacacgtctgatattggttttaagttaaaatctgaaaaataataatgcttaaaaaaactgcacaggccaaaatgaacaaattggtgatat

SEQ ID NO: 671995 - DNA, 1948 bp, Homo sapiens
catcaaaattaacagtgtcaaaagggcaatccttataataggagagaacattttattacacatgctttatcaaataatatacatgtgtatctgacagaggactcatgcaaaatgtgaaaataattcttacaaatcaatacataattgatatgaaaatcaatgtaaaagtggagaaaagayatgaacacttttcaaaagaaaatatgtaaatgaccattgcacatatgaaaagcttctcaatgaattcatgattaggataatgaaactcgaaacgacaatgatacccacaccatagagaatggctaagtctcgacaaggatagtgaacaatcatgactattatgtctttctcattggagtgcacgttgctataactactctgtaaactcatttggaagtatttactaatgctgaacatgtgtatattatgacatagcaattccagtctaagaaatatacccaaatggaaatacatgtttatgttaattgaaacatgcaatagaatgttcatatcatcactattcataaaacctctagaataatgaataactaatttgtggtgtatatatatatatatatataaaatgttcaattgtgcacagaaatgagaatgagcaatgtagaactactcgtcacaatatattgaatgaaagaacccaggaatggaaacataacatgcataggattttattcatataatgtaacaaaaatagctgtacgttatgttgttagaagtcagaatactagctgttcattctttgagtgtgttgggggaagttcatggaggaaaagagaatgaaggattcttatggggtcctgacaatgttttattttgttgttattgttgtttctgtttaatctggattctggttacttaggttaagtttgtaaaacttgagttagaaattaagtttgtaaaaatttatttatgatttgtacatttgcttatgtgcttatatgtattttctacttcaataataaatctaaaacaccacaaagtacagaaaaaacagctacacacttattactttctcatgtaaatttttgaaataatgcaatcggcagtgtttaagcactttattgtatccttagctacaaagccataaaaatccactatattgggaaagagatattaagagttacaagaaaaaaagttatgtcctacagatagaagttttgattccagatctctgtgttgcagtagagaaaatataaccaagaatagtggtggaaaggtaactaacataactctacttgtttggaaatataagcatattctattattagcagatatcccattggctttgtttgaagcttccaaatgctttagccataattaacaaattgtgttccatctcctcagggagagtctcaaaggaggaaagaaacccataaatttttcttactgggttactttagggacacatggaaagcacagaaagattccttattagagtttagtagactacacctgtttctgtgactacacctcagagttccagttactcttcatggtcctgtattcctttatctttaatttctaacaactgatctaggtgatttagccacagccttaacaatctgcttctaagtgaagtttctgagctagtgcaatgttgcagccatcttcagtataatctttggtgaaagctagataatgacttctctgtagttagctgatatttctttgaatagtaaaaacaaaaagcaagaactcaagttctgaaaaagaagttagtgttgttagcaagctcccactttggttcctaagatttttatgatgatttccaaccaagatgtcaaatatgatcttgtgatttgtagttaattggatttgtttcagaactttaacctcaagtaacagatttgcatgatgatttccagttacctcttaattaaagaaattatgtcagtatttttatgatttttgcattttctctttcagaggc

SEQ ID NO: 671996 - DNA, 1948 bp, Homo sapiens
catcaaaattaacagtgtcaaaagggcaatccttataataggagagaacattttattacacatgctttatcaaataatatacatgtgtatctgacagaggactcatgcaaaatgtgaaaataattcttacaaatcaatacataattgatatgaaaatcaatgtaaaagtggagaaaagacatgaacacttttcaaaagaaaatatgtaaatgaccattgcacatatgaaaagcttctcaatgaattcatgattaggataatgaaactcgaaacgacaatgatacccacaccatasagaatggctaagtctcgacaaggatagtgaacaatcatgactattatgtctttctcattggagtgcacgttgctataactactctgtaaactcatttggaagtatttactaatgctgaacatgtgtatattatgacatagcaattccagtctaagaaatatacccaaatggaaatacatgtttatgttaattgaaacatgcaatagaatgttcatatcatcactattcataaaacctctagaataatgaataactaatttgtggtgtatatatatatatatatataaaatgttcaattgtgcacagaaatgagaatgagcaatgtagaactactcgtcacaatatattgaatgaaagaacccaggaatggaaacataacatgcataggattttattcatataatgtaacaaaaatagctgtacgttatgttgttagaagtcagaatactagctgttcattctttgagtgtgttgggggaagttcatggaggaaaagagaatgaaggattcttatggggtcctgacaatgttttattttgttgttattgttgtttctgtttaatctggattctggttacttaggttaagtttgtaaaacttgagttagaaattaagtttgtaaaaatttatttatgatttgtacatttgcttatgtgcttatatgtattttctacttcaataataaatctaaaacaccacaaagtacagaaaaaacagctacacacttattactttctcatgtaaatttttgaaataatgcaatcggcagtgtttaagcactttattgtatccttagctacaaagccataaaaatccactatattgggaaagagatattaagagttacaagaaaaaaagttatgtcctacagatagaagttttgattccagatctctgtgttgcagtagagaaaatataaccaagaatagtggtggaaaggtaactaacataactctacttgtttggaaatataagcatattctattattagcagatatcccattggctttgtttgaagcttccaaatgctttagccataattaacaaattgtgttccatctcctcagggagagtctcaaaggaggaaagaaacccataaatttttcttactgggttactttagggacacatggaaagcacagaaagattccttattagagtttagtagactacacctgtttctgtgactacacctcagagttccagttactcttcatggtcctgtattcctttatctttaatttctaacaactgatctaggtgatttagccacagccttaacaatctgcttctaagtgaagtttctgagctagtgcaatgttgcagccatcttcagtataatctttggtgaaagctagataatgacttctctgtagttagctgatatttctttgaatagtaaaaacaaaaagcaagaactcaagttctgaaaaagaagttagtgttgttagcaagctcccactttggttcctaagatttttatgatgatttccaaccaagatgtcaaatatgatcttgtgatttgtagttaattggatttgtttcagaactttaacctcaagtaacagatttgcatgatgatttccagttacctcttaattaaagaaattatgtcagtatttttatgatttttgcattttctctttcagaggc

SEQ ID NO: 671997 - DNA, 1948 bp, Homo sapiens
catcaaaattaacagtgtcaaaagggcaatccttataataggagagaacattttattacacatgctttatcaaataatatacatgtgtatctgacagaggactcatgcaaaatgtgaaaataattcttacaaatcaatacataattgatatgaaaatcaatgtaaaagtggagaaaagacatgaacacttttcaaaagaaaatatgtaaatgaccattgcacatatgaaaagcttctcaatgaattcatgattaggataatgaaactcgaaacgacaatgatacccacaccatagagaatggctaagtctcgacaaggatagtgaacaatcatgactattatgtctttctcattggagtgcaygttgctataactactctgtaaactcatttggaagtatttactaatgctgaacatgtgtatattatgacatagcaattccagtctaagaaatatacccaaatggaaatacatgtttatgttaattgaaacatgcaatagaatgttcatatcatcactattcataaaacctctagaataatgaataactaatttgtggtgtatatatatatatatatataaaatgttcaattgtgcacagaaatgagaatgagcaatgtagaactactcgtcacaatatattgaatgaaagaacccaggaatggaaacataacatgcataggattttattcatataatgtaacaaaaatagctgtacgttatgttgttagaagtcagaatactagctgttcattctttgagtgtgttgggggaagttcatggaggaaaagagaatgaaggattcttatggggtcctgacaatgttttattttgttgttattgttgtttctgtttaatctggattctggttacttaggttaagtttgtaaaacttgagttagaaattaagtttgtaaaaatttatttatgatttgtacatttgcttatgtgcttatatgtattttctacttcaataataaatctaaaacaccacaaagtacagaaaaaacagctacacacttattactttctcatgtaaatttttgaaataatgcaatcggcagtgtttaagcactttattgtatccttagctacaaagccataaaaatccactatattgggaaagagatattaagagttacaagaaaaaaagttatgtcctacagatagaagttttgattccagatctctgtgttgcagtagagaaaatataaccaagaatagtggtggaaaggtaactaacataactctacttgtttggaaatataagcatattctattattagcagatatcccattggctttgtttgaagcttccaaatgctttagccataattaacaaattgtgttccatctcctcagggagagtctcaaaggaggaaagaaacccataaatttttcttactgggttactttagggacacatggaaagcacagaaagattccttattagagtttagtagactacacctgtttctgtgactacacctcagagttccagttactcttcatggtcctgtattcctttatctttaatttctaacaactgatctaggtgatttagccacagccttaacaatctgcttctaagtgaagtttctgagctagtgcaatgttgcagccatcttcagtataatctttggtgaaagctagataatgacttctctgtagttagctgatatttctttgaatagtaaaaacaaaaagcaagaactcaagttctgaaaaagaagttagtgttgttagcaagctcccactttggttcctaagatttttatgatgatttccaaccaagatgtcaaatatgatcttgtgatttgtagttaattggatttgtttcagaactttaacctcaagtaacagatttgcatgatgatttccagttacctcttaattaaagaaattatgtcagtatttttatgatttttgcattttctctttcagaggc

SEQ ID NO: 671998 - DNA, 932 bp, Homo sapiens
tgctttccttgccccttttcaaccacagaagctgattgtagtcattgtgaaactatattggttgtgaatgctaatatttattgagagtgttctgaaggctcaggaaacactataccccaggaatgaaactatgacatatgtataaatgactgctctaaggtctgacaaactagcatatccttgctcacttygtagtcctgccattatcttctatctactttacctgtaagaaatgactgcaatgtcatccttccacaaaatttacacctagtgagcaagcccacagaatggaaattattttgctttacctctactcacatctggctttactttacgtattctgctttagtaagttttgttaaaacatttatttgaagattcattaaaagtggaaattaattgttttttcaaaaaacacacacttgtccctccaaggatatttttatgtgaattaaccagaatgatccaatcataacatagtagccacactgaaaatttcagacatcagtttctaatctttactaatcaattatgcaaagagaacccaaccctctttttttgaataagcaaatgcttgcagtcaaaatctgtactaaatttcctcttaaaaaaataaatctatttttagatacaaaaccctgattacactgtagacaaaattttcttaaaaaaataagctatttgaattacagaatcttaaaatgtagtttcctgtgtatgatcttttggggagaatgttctggaagaaaatttaatatgcttcaaaaatgtgtctaaataaatagctgtctcacaaaatttaaaatttctgcagaattccagaatcatttatttttttgagggtttttcaaattatggtgtcaaaattgttaggtaacgttttagtcaaggttgctatctctttttttgttttgtttctctttcaaattagc

SEQ ID NO: 671999 - DNA, 932 bp, Homo sapiens
tgctttccttgccccttttcaaccacagaagctgattgtagtcattgtgaaactatattggttgtgaatgctaatatttattgagagtgttctgaaggctcaggaaacactataccccaggaatgaaactatgacatatgtataaatgactgctctaaggtctgacaaactagcatatccttgctcacttcgtagtcctgccattatcttctatctactttacctgtaagaaatgactgcaatgtcatccttccacaaaatttacacctagtgagcaagcccacagaatggaaattattttgctttacctctactcacatctggctttactttacgtattctgctttagtaagttttgttaaaacatttatttgaagattcattaaaagtggaaattaattgttttttcaaaaaacacacacttgtccctccaaggatatttttatgtgaattaaccagaatgatccaatcataacayagtagccacactgaaaatttcagacatcagtttctaatctttactaatcaattatgcaaagagaacccaaccctctttttttgaataagcaaatgcttgcagtcaaaatctgtactaaatttcctcttaaaaaaataaatctatttttagatacaaaaccctgattacactgtagacaaaattttcttaaaaaaataagctatttgaattacagaatcttaaaatgtagtttcctgtgtatgatcttttggggagaatgttctggaagaaaatttaatatgcttcaaaaatgtgtctaaataaatagctgtctcacaaaatttaaaatttctgcagaattccagaatcatttatttttttgagggtttttcaaattatggtgtcaaaattgttaggtaacgttttagtcaaggttgctatctctttttttgttttgtttctctttcaaattagc

SEQ ID NO: 672000 - DNA, 932 bp, Homo sapiens
tgctttccttgccccttttcaaccacagaagctgattgtagtcattgtgaaactatattggttgtgaatgctaatatttattgagagtgttctgaaggctcaggaaacactataccccaggaatgaaactatgacatatgtataaatgactgctctaaggtctgacaaactagcatatccttgctcacttcgtagtcctgccattatcttctatctactttacctgtaagaaatgactgcaatgtcatccttccacaaaatttacacctagtgagcaagcccacagaatggaaattattttgctttacctctactcacatctggctttactttacgtattctgctttagtaagttttgttaaaacatttatttgaagattcattaaaagtggaaattaattgttttttcaaaaaacacacacttgtccctccaaggatatttttatgtgaattaaccagaatgatccaatcataacatagtagccacactgaaaatttcagacatcagtttctaatctttactaatcaattatgcaaagagaacccaaccctctttttttgaayaagcaaatgcttgcagtcaaaatctgtactaaatttcctcttaaaaaaataaatctatttttagatacaaaaccctgattacactgtagacaaaattttcttaaaaaaataagctatttgaattacagaatcttaaaatgtagtttcctgtgtatgatcttttggggagaatgttctggaagaaaatttaatatgcttcaaaaatgtgtctaaataaatagctgtctcacaaaatttaaaatttctgcagaattccagaatcatttatttttttgagggtttttcaaattatggtgtcaaaattgttaggtaacgttttagtcaaggttgctatctctttttttgttttgtttctctttcaaattagc

SEQ ID NO: 672001 - DNA, 932 bp, Homo sapiens
tgctttccttgccccttttcaaccacagaagctgattgtagtcattgtgaaactatattggttgtgaatgctaatatttattgagagtgttctgaaggctcaggaaacactataccccaggaatgaaactatgacatatgtataaatgactgctctaaggtctgacaaactagcatatccttgctcacttcgtagtcctgccattatcttctatctactttacctgtaagaaatgactgcaatgtcatccttccacaaaatttacacctagtgagcaagcccacagaatggaaattattttgctttacctctactcacatctggctttactttacgtattctgctttagtaagttttgttaaaacatttatttgaagattcattaaaagtggaaattaattgttttttcaaaaaacacacacttgtccctccaaggatatttttatgtgaattaaccagaatgatccaatcataacatagtagccacactgaaaatttcagacatcagtttctaatctttactaatcaattatgcaaagagaacccaaccctctttttttgaataagcaaatgcttgcagtcaaaatctgtactaaatttcctcttaaaaaaataaatctatttttagatacaaaaccctgattacacwgtagacaaaattttcttaaaaaaataagctatttgaattacagaatcttaaaatgtagtttcctgtgtatgatcttttggggagaatgttctggaagaaaatttaatatgcttcaaaaatgtgtctaaataaatagctgtctcacaaaatttaaaatttctgcagaattccagaatcatttatttttttgagggtttttcaaattatggtgtcaaaattgttaggtaacgttttagtcaaggttgctatctctttttttgttttgtttctctttcaaattagc

SEQ ID NO: 672002 - DNA, 932 bp, Homo sapiens
tgctttccttgccccttttcaaccacagaagctgattgtagtcattgtgaaactatattggttgtgaatgctaatatttattgagagtgttctgaaggctcaggaaacactataccccaggaatgaaactatgacatatgtataaatgactgctctaaggtctgacaaactagcatatccttgctcacttcgtagtcctgccattatcttctatctactttacctgtaagaaatgactgcaatgtcatccttccacaaaatttacacctagtgagcaagcccacagaatggaaattattttgctttacctctactcacatctggctttactttacgtattctgctttagtaagttttgttaaaacatttatttgaagattcattaaaagtggaaattaattgttttttcaaaaaacacacacttgtccctccaaggatatttttatgtgaattaaccagaatgatccaatcataacatagtagccacactgaaaatttcagacatcagtttctaatctttactaatcaattatgcaaagagaacccaaccctctttttttgaataagcaaatgcttgcagtcaaaatctgtactaaatttcctcttaaaaaaataaatctatttttagatacaaaaccctgattacactgtagacaaaattttcttaaaaaaataagctatttgaattacagaatcttaaaatgtagtttyctgtgtatgatcttttggggagaatgttctggaagaaaatttaatatgcttcaaaaatgtgtctaaataaatagctgtctcacaaaatttaaaatttctgcagaattccagaatcatttatttttttgagggtttttcaaattatggtgtcaaaattgttaggtaacgttttagtcaaggttgctatctctttttttgttttgtttctctttcaaattagc

SEQ ID NO: 672003 - DNA, 1054 bp, Homo sapiens
ctgaaatccccgtttggatcgtggggtggtttcccctgctgttcttgtgatactgagggagttctcatgagacctgatggtttaaaagtggcagtttcccctgtgcactctctcgctctcttgctgccaggtgagatgtgccttagcttttctttgcctcctgccatgattgtaagtttcctgaggcctcccccagccatgaggaatggtgagtcaataaaacctttcttcttgataaattacccagtctcaggtattctttatagcagtataaaaatggactaataaaactggtgtcatgaagaccccaagcctaatgtcttagcattgtaaaatatagttgtggagaccttacaaagagtgtatgtaattttatcatgatcttgattgaacaagtatcaagattctttcttatgtgtacagattcaagtgtagtaatgcacaatgtccttctagtaaggatgacaattttatttttgtcagtgcccctagagagcagtggcatcctcctggggaaagttttgccattgcttttaaatagaaaaaacatgataaaatcattcgaatctgtgataggattctaccttttaaagagttaaagagatagtgggaatgtgagtaaaatgaaacttcgttctgaagcgaggacttagaccaatgaaagaatggtatgagtttttcagagagacgaaaaaacagtctatcttctgtgagccctcatggaccaaagaatacaaccctccacccccacatatttcatatgaagatttctgaagattttccagtgtcacttcctctttccttcctggtttttgggggagttctatgattatctgtcaatgaaaaaggaagttctrtaatcttccaatctctttctctctctcctctctcacacgcacacaaaaaaatataagaaatcttttcaaaattaaaggccagaaatctacattgtgtcattttaggtgtaattctatagaaaaaaagatgttttgcagaaattatgctgcctttatgaactttaattagtaacacttgtaataatctacacgttatt

SEQ ID NO: 672004 - DNA, 1654 bp, Homo sapiens
caacacttgaagctggacacctggtgactttcctccaaagggccctaaggcctctgcaccactgttctatctagtcaaacttggacagaaaaggaacaagagattaattctaccttgactcctttctttgtggcgtttgagaagctaccatttgaacttctgatttacaaaactgaactatcagtgctaacctactaggccaagattttatgaaaagtaatttaaggctttaacacaatccatggttgaagccacagttttatacagagctgccataacaatatttctttcctgctttagttgttgtttcaagaccagaaatgcagtaacatatatggatagcatacatagtttgttttagaattctaagaaagaatgcatggtttcaaaaaaaascaactcttttttttcttcagagccttttgccccattgaaactgaaaaagaaaaaaaaatatgcaagcttttttgaaagtacagacaaaattggcatttcacttatgggaaaattttgcaaaattacattgactaaaagtactgtgaagccacacagaaaggccaaaaattattggcattgcttttgtgtaaaaaaccttttacatagactccacctgtaattcagccaagtacataattcaggtcattggtgacacacgtatccacatgttggagctggtcagtgaacgttgtcatgaaacatggatagaatattaccatatggacagaccaaaccgcacagattacagctaaggaaactttgcattaacatgcctgggaacaggctttcctgagctgatccctgcccccacccaccctcagtgggaaagccaattgcttactgattacgacagcgacatcacttggcaaacattttggcctgagctcaatgtgtgacatcagtctcctttagggttttccacataaaacaaattctccaaagaaaacacagaaattgagccttaatttgaaatccattattacatcctctgaggtctcattaactacctcaatcacgtagttcttaatttttgttttatttccaggtagatacaaaccaacacttagaatgtgagcagtaaacctttaccgtgtttatttcagagtttcaaccagatacccctttgtatctattttcaaccaacctcccttttactggggttatgatatctttgtttcactgctgggagggttgctagtttgggagtggtttacaacactttgtttgaggaaggaagtaaacattgttctttgacccttcaggataagttagtctcacttttgtgggaggcagctgtgtccttgagagaaagcactcagtgaagttggaaggactcagtcatggtgtgttttgccatgtcacttgaaagcaaggcacactacgggtatttcacactcttgtgtgtaagcacctcctctgagtgtttatttacctgaagtcattagtttcccccacttcctgtttcgttagatggtattcatttaatactactttgatgcacatggccttaaagcagatagaagtcagttatgcctcatgaggcctgcagtctcccagcagaaggcaggaaagcatgaagggtggacgtgaatgggcccacactaccaagatactggaattgtgatgttcaggcaaagcaagggaagtcacatatgca

SEQ ID NO: 672005 - DNA, 1599 bp, Homo sapiens
  misc_feature 534, 535, 536, 537, 538, 539, 540, 541, 542, 543, 544, 545,546, 547, 548, 549, 550, 551, 552, 553, 554, 555, 556, 557,558, 559, 560, 561, 562, 563, 564, 565, 566, 567, 568, 569,570, 571, 572, 573, 574, 575, 576, 577, 578, 579, 580: n = A,T,C or G
  misc_feature 581, 582, 583, 584, 585, 586, 587, 588, 589, 590, 591, 592,593, 594, 595, 596, 597, 598, 599, 600, 601, 602, 603, 604,605, 606, 607, 608, 609, 610, 611, 612, 613, 614, 615, 616,617, 618, 619, 620, 621, 622, 623, 624, 625, 626, 627: n = A,T,C or G
  misc_feature 628, 629, 630, 631, 632, 633: n = A,T,C or G
tgggaaggaaaagcaatcaggtagcattgtcactctatctgaattttgacctctgaaattaaaaggcattgtatggaaaccgctgaattgtgcagttttaagagtatggttttatgacatctgttgaaagttaagtcatgatggacggtcctaaatggttttttagtacccacatgaggtaattaatctctctgcatcccttttcagatcctgtgttaggtccagcatgtatgaacacaaggctgatcatgtcataattctgtatagaattacaataacaaaatatttgtttgcagtggatctccattttgttctgtcaaagaactagatgcccatgacaaaggtcaaatggagatctggcatccatttcaatacttgtaagacatagtcttgagaatatgtaatacaaatarctccttgccagaaaaactgaaaggaaatgattgcatttgagtacaatgtattctacaacaatagtttagtgtgtatgaaatttaaaactgctggctttcaaaatattttttttaagtagannnnnnnnnnnnnnnnnnnnnnnnnnnnnnnnnnnnnnnnnnnnnnnnnnnnnnnnnnnnnnnnnnnnnnnnnnnnnnnnnnnnnnnnnnnnnnnnnnnntctgaatagtgggcttataggcaaatttgatttttctttatacatctttgaatcttccaaattcactataataaacacaccataatatctccaagttttatacttggaaaaatgttgcttcttcattactttttagcttctttacttaaccaatgttgatacaagcagcttcacatatcagttatcaaaaaaatacctcaaatacataaaaaaaaattgtcagcttgatttttctttcttatttatttatttttttccttttggagatggagtttcgctctttcacccaggctggagtgcagtggtgtgatctcagctcactgcaacctctgcctcctgggttcaagtgattctcctgcctcagcctcccaagtagctgggactacaggcatgtgccaccacacccggctaatttttgtatttttagtagagacgcggtttcactgtgttggccaagctggtctcgaactcctgacttcaggtgatgcatctgcctgggcctcccaaagttgtaggattacaggcacgagccaccatgccaggcctgatttttaaggtctagaagatgagcatattattcctagtcttttctcttgataagtattaggcaaatgtgtcagaactaaataatggttgtcagtacttcattgatgtgagagacaatctactaatcaatctctctctctccccccataccccttctctctcttctcttcccagtagaaataccattagccagtttacgaggggaacaaggtccccgtggagagcctggcccaagaggaccacctgggccccctggtttgccaggtcatgggatacctggaattaaaggaaaaccagggccacagggatatccaggagttggaaagccaggtatgcctggaatgccagggaagccaggagccatgggcatgcctggggcaaaaggagaaattggacagaaaggggaaattgggcctatgg

SEQ ID NO: 672006 - DNA, 610 bp, Homo sapiens
ggaaagaatatttgtgatgatcctaatagatttacagaaggtagaagtaggacctagtggaagggaggagaggtaagagtaacacagaagagaagtgatactgaggccgagtagataatgagggttgtgtggacttggtgattatgtggggggtagacgtggtggtattgataagtgccagaatgaaatgtatccttgggaaaaaggaatgacttttatgaactcacttttaatggagattagaagaaagtggtgtcccarattaattggcaaattgcagttgtttcagattttgtgtggcaaatctcttagtgctcgcgggttgatttgatctattgtcagcattaggcttctttgacatgcagttaagctatttgagtggcacatagagtgctggggagatattctaatgcattttgaatatcagaaaaaaattattaattgcagggtcatttacactttgatttaaaaaaccaatctaggtcttaatgctttttctttcagagttatgaggacttgggaatccttagacaagtggaataggacatataagagtataaaagagaggcccagtagtaaaggataagcttgcgagtggtctgtattaact

SEQ ID NO: 672007 - DNA, 1655 bp, Homo sapiens
cattgccagctgcatcgctgaggtagtgaaggtgatggccggagtcaacggatttggtcgtattggatgcctggtcaccagggttgcttttaactctggaaaagtggatattgtcgccatcaatgaccgcttcattgacctcaactacatggtctacatgttccagtaggattttacctatggcaaattccatgcaccgtaaaggctgagaatgggaagcttgtcatcagtggaaatcccattaccatcttccaggagcgagatccctccaaaatcaaatggggcaatgctgacgctgagtacgttgtggagtccactggtgttttcacccccatggagaaggctggagctcacttgcaggaaggagccaaaagggtcatcatctctccccactttgttgacgcccccatgttagtgatgggcatgaaccatgagaagtatgacaacagcctcaagatcatcagcaatgccttctgcaccaccaactgcttagcgcccctggccaatgtcatccatgacaactttggtatcgtggaaggactcatgactacagtccatgccatcactgccacccagaagactgtggatggcccctctgggaaactgtggcgtgacagctgcagggctctccagaacatcatccctgmctctactggtgctgccaaggctgtgggaaaggccctctctgagctgaatgggaagctcactggcatggccttctgtgtcaccactgccaaggtgtcggtcattaacctgacctgccatctggaaaaacctgccaaatatgatgacatcaagaaggtggtgaagcagacatcggagggccccctcaagggcatcctgggctacactgagcaccaggctgtctcctccaacttcaacagcaacacgcactcttccaccttcaatgttagggctggcattgccctcaacaaccactttgtcaagatcatttcttggtatagcgatgaatttggctacagcaacaaggtcgtggacctcatggcccacatggcctccaaaaggaagaccaccagaccaccagccccagagagagcatgagaggaagagagaggtcgtcactgctggggagtccctgccacactcagtcccccactacactgagaatctcccctcctcactttccatgtagaactcctgaagagggaggggcccaggagccccaccttgtcatgtaccattaataaagtcccctatgcttagccaaaaacaaacaaacaaacaaacaaacaaaccttggtcaactcttgttagtctagtgagttgtcttcttcttctttttttctttttttttttttttgaggcagggtctcactctgccacccaggctacagtgcagtggcacaatctcggcttatcacagccttgacctcccaggctccagcaatcctacaggcatgcaaccaccatgctgggccaatttttgtattttttgtagagatggggttttgccatgttgcccaggctggtcttgaactcctggactcaggccatcttcccccctgggcctcccaaaatgcggggactacaggcctgagccactgcgcccaggagtcttctttcacttattttgtcatgccatattttgtgtcctatatgagtattatgacagcaggtatcactaatatcttatt

SEQ ID NO: 672008 - DNA, 1297 bp, Homo sapiens
tgcagagaagacaggactccaggtaattaatatagcaggaatgctgaacatttaaactcatcttttctttcattcctgttgggtattttcttagtctctctataaaaacaattgaatcttttaatttgtttgcatttctgttgtgctaccctttgcttcactaaacatgattttaaacatttcaaggcatatgtttttagaaatccaaatggtaattagaaatcataatatgtgtgtcatgttttcagtctacatatatgtgtttgaagcaactgatgtggaaaataagaaaatatggttgtcatttttaattatattattcaaattcttatgtatacttcaattgtagataaatttattatggaaagaactatttgggacacaatgataatagttttagatgttattccatttattatatggggaagaattatagcagagtgggtaggagtacctattttggaataaaacttcccaagaattagattctaaatatgctacatttttagctgtatagccagtaatacgttacctaaagcttaagcctcccttccctaagtgcacaagataaataataactccaaatctgatcagagggtagttgtagagtatttaaagcaataataattaatgcttcccattatcattagaagacctacattactgcacaawgccttttttcaagaatgtaaacttgtgtttaacaaattatttttggttaatttaattgacagaactaaaaagaacaaaaatcagcagctcacaattttggatttcagaagcaaaatatttcagtagaattaagttatagaaaaatagcctatattaagataatgttggagaaaatttgaaaaatattacaaaatattgaagaaaatagaaatcctctacaaatattgagttttggctgctcttgatgtgggggtagccattattcttttctttacttctctaataaacccattttcagttttagaaaaacaaatattgagttttgtgcatgttcttctagatcaatagtttcaaatatgtgcatgtatataacacatataaacaaaatttgtatcactttccatgtactgattttcagctttctgtatccatttacaagtttaatgttgtcatcgacaactctaatataaattttttcttggtacatggacaaaatcaagactcacttcacaatgttttggacttgaaatataaactcaccaacttacaaatctacatgcagtgatatctcttttgcgtgcaaaacttcaaaaactggatttctgtaatgtgtcaaatgtgtcaa

SEQ ID NO: 672009 - DNA, 2408 bp, Homo sapiens
taattaaaatttattgtattatatttgtcaacagctttcactttaaaaaacatttctctgaaatatgacattttaatatggagagacctaatgcattcattaatataacttctgaataatatttttcacaaaaagacttcttacatgacaaaaaacctaacattgacaaatataagctaaataagtttgaaataatgctattgagtgtttccatgtgacaaattcaattgcattctcagaaatactctaaatatcctaactaagccattaggttcttctgaatgtacttatttgctgtggtttctttttgtattttgttttaaattttgggttgcttgttttgtttattgtttaagttcttgtcagctgaatgcctgcaaatatagatgtttataaagtattttcagattcttttttccttaatctacaattttctaggagaaaataatatttatttatttattcttcatatacagattggaaataaattatattttaaaaaaagaatgcatcataggtacttagaatgttttaaggtttctgagataatggatcatctcctgtactaactcatcttagaatatcacccagtcctcacccctactatctgctccattaacctttaatttaggaaactaatacattttaattcaagaagatgaaatttaattgtttttagtataaagaataaaggcccattcttatgtagccacatatgtaagagaaacatgtgaaacattgtcaccaaaatccctcatgatacagtttaagctggaaaaagccacaatattgactccatcaggggacacctgcaggactggaggaataaatcaggagagggggactgggttgattttaagaaagccttttaagaaatagtagttttaattttctttgatgatattcttggaaaggaaatcaaggaatggaattgatttgatatttttatgttattgcttttttttgctgttttttttctattacttggacaactaggcccaagtaacgtgttcttaaaagcatgagagagtaccaagaaagcaccactagcaattctattgaattttttcagagatcatgcatttggttttccccccacacttgccccacatttccttttattcattgtaaacttcaggaaagtaaatgccttaggggagccattaagttcttcagtttcctaaatccctcaagaaacaaagaagaattttcaataatatatgtactatatccttttaatgagaggattaactccagggactttattcccattttgttagggaaccacaaacacagaaaagccagggtgacaccactttaaaatcagctccatcttaaaactagcaatgcacattccttccctgtcactgcccatggtcataagatgattacagttaaggaagcagttgaataaagcgtgtaaggacaaactcctctgataaaaaaaaagtctagatgcttcagtattgtgtaacaactttgcttttaaggtaattatagttatgctttgatttgcttagacactaaaatgccaaggatagttttctttaaatcaacagaatgataaattttgctacgatgtcagctcacctgcaggtagacatagcttagcctcatttttacacaggtaagatttcaacataaataaagcttaaagatgagacgttcctctgcttgctttctgaggacaccatgatctgtatttgagtagctttcaatgaactacctcttatcacactctgtgacttgccttgaattcctttgtgcatcagatccaggaaccctctcttgaggtctacatcttgactcctttctcctgcaacaatttgaactaagacaaatayataactaaactttttgtctaaaattatcttctaatacaattgtgtttttcattttcattttatttatttatttttgagaaggggtgtcactctgtcgcccaggctggagtatagtggtgcaatctcagcttgctacagcctcgacctcttgggctcaggcaaacctcccacttcagcctcctgagtagctgggaccacaggttttttgtgtgttttggagagaaggggttttgctatgttgcccaggctggttttgaactctttagctcaagaaatccaactacctccacctaccaaagtgctaggattacagtatgcctggcctgacaagtttatgttttgattttttttttaattttactttaagttctgagatacaagtgcagaacatgtatgtaggtttgttacataagtatacggtgtgtcatggtagtttgctgcacctaccaacccgtcatctaggttttaaggcccacatgtattagctatttgtcctaaggctttcccttccccacaccttgacaggccctggtgtgtgatgttcccctccatgtgccatgtgtt

SEQ ID NO: 672010 - DNA, 2297 bp, Homo sapiens
ttaattataaaatgtttattagtctcatggctgattttgtttttctgctctcacttttgtttcataaaattttaaaaagtacatgaaaacagcaaaacatagtgcacaaatattgcatgtagatgaattaggtgacaccaccacaccagaatgaataacctacaccactttctgataatgcttcaaaatgtctgtttatcagctcgtaaacacatagttaacttagtaagttacggggcactaaccaatacatgaaccgtagaattgtgtggttgataaaaggttaatataagatagctcatggcatagcataaaattttggttattaaatgagcaaaagacactgactgtatagtacaataattgttatgccatctataagtacatgtacaaataaggcacaaaggaaaataattaggaaaaattataatgttaacaaaatgttaacgacagttttgaattgttttcatttactttttttgaattttgttatcttctgattcttttccaattaacatggtttacatatacgatagtatcgcacttttaaatattaagaaatttaattgtgaaaaatgtattattccatctttgatgatgtcagtcacagagtaactattttttctggaaatgccttctccaccacgcctgtaaaatattgagaacatcacaagaaaagaccaattcataatttccttcatttgtgtggcttctaaggtaaaaaggaaaatctttgcacaaagcctaacatggctacatttagtccttgaacttttgtgcttggaaacatgccaaacaatctgccttggcaaatggcccccagggcctaccaaaaggtgcattgtcatcagcctctggtatatgagatcctctggaattatccgagtgagagggaaagaataatctccttatggtcacagtggctgccggtcttctttgacacataacttcttggtaatctttccattagaccagaacctaaacaaaatttctagattggtttatcataactcagaataaaacataatgaatgcaccaaaatgtaaaaacaacttatctcaaggaaaacaaatattataaaaattttcatctccttaaatagttttcttattttatttataacaaaaatttgaagttgacaaatttccatacagataatataagaagaaagttttttcatgaatgttgacttacacacagtaagtattattctcaaaattggaagattttgtttcacattttacttcagatgaaataaaatggggactttcgcagaataatatattaatatatattaatgtatatattaatatatacacatatcatttactctctaccctaagtaatgtcagggtttgtgagacaaatgtagagttgccagaatcagagtctacaagcaaagtatacattttgaaaatataattttttggaagaaattagattttgattagttatgtcaggaaaacatcacatcttttataaattaatacttatatattgtctataattttaatgtacctgactaaaaaccccaagggtgaaatttattgaaaattattattaaataatattggaaacaaaagggcagtaaattatataataaaactgtttcctctcattttttattacatgtccacctcttttctcaagttttctgaaattatttataaacaagattgtagtattataagccttctctctgaaggaatatatctttgtagaatcagtgtcaacattgaattgatctgactttggataagttactccaaccttccatactctttttttccctcacctaaactatgtggataatagtagtatctatggtataatattttcaggtggattaaatatattaataaaggaagccattcagaacaatgtcaggttcattctaattatgcaatatgctacattttattataacatatgcaaatgttaatttgaacttatatctatattggcaataaaattagtctctttagtcatattctataaatttattagcratttgtagaatgttaaactaattattaaatgctaggtcattcatataaacagaaattttttttgattgttttgtttattttttttgagtcggagtctggcacagttgctggggctgcaatgcaatagtgtgatcccagctcactgcaacctctggctcactgcaacctccggctcccatgttcaagcgattctcctgcctcagcttctccagtagctgggagtacaggcgcccctgctacgtatcaactttgatttctcagcagtttagagcaggtgaacatgatggg

SEQ ID NO: 672011 - DNA, 2297 bp, Homo sapiens
ttaattataaaatgtttattagtctcatggctgattttgtttttctgctctcacttttgtttcataaaattttaaaaagtacatgaaaacagcaaaacatagtgcacaaatattgcatgtagatgaattaggtgacaccaccacaccagaatgaataacctacaccactttctgataatgcttcaaaatgtctgtttatcagctcgtaaacacatagttaacttagtaagttacggggcactaaccaatacatgaaccgtagaattgtgtggttgataaaaggttaatataagatagctcatggcatagcataaaattttggttattaaatgagcaaaagacactgactgtatagtacaataattgttatgccatctataagtacatgtacaaataaggcacaaaggaaaataattaggaaaaattataatgttaacaaaatgttaacgacagttttgaattgttttcatttactttttttgaattttgttatcttctgattcttttccaattaacatggtttacatatacgatagtatcgcacttttaaatattaagaaatttaattgtgaaaaatgtattattccatctttgatgatgtcagtcacagagtaactattttttctggaaatgccttctccaccacgcctgtaaaatattgagaacatcacaagaaaagaccaattcataatttccttcatttgtgtggcttctaaggtaaaaaggaaaatctttgcacaaagcctaacatggctacatttagtccttgaacttttgtgcttggaaacatgccaaacaatctgccttggcaaatggcccccagggcctaccaaaaggtgcattgtcatcagcctctggtatatgagatcctctggaattatccgagtgagagggaaagaataatctccttatggtcacagtggctgccggtcttctttgacacataacttcttggtaatctttccattagaccagaacctaaacaaaatttctagattggtttatcataactcagaataaaacataatgaatgcaccaaaatgtaaaaacaacttatctcaaggaaaacaaatattataaaaattttcatctccttaaatagttttcttattttatttataacaaaaatttgaagttgacaaatttccatacagataatataagaagaaagttttttcatgaatgttgacttacacacagtaagtattattctcaaaattggaagattttgtttcacattttacttcagatgaaataaaatggggactttcgcagaataatatattaatatatattaatgtatatattaatatatacacatatcatttactctctaccctaagtaatgtcagggtttgtgagacaaatgtagagttgccagaatcagagtctacaagcaaagtatacattttgaaaatataattttttggaagaaattagattttgattagttatgtcaggaaaacatcacatcttttataaattaatacttatatattgtctataattttaatgtacctgactaaaaaccccaagggtgaaatttattgaaaattattattaaataatattggaaacaaaagggcagtaaattatataataaaactgtttcctctcattttttattacatgtccacctcttttctcaagttttctgaaattatttataaacaagattgtagtattataagccttctctctgaaggaatatatctttgtagaatcagtgtcaacattgaattgatctgactttggataagttactccaaccttccatactctttttttccctcacctaaactatgtggataatagtagtatctatggtataatattttcaggtggattaaatatattaataaaggaagccattcagaacaatgtcaggttcattctaattatgcaatatgctacattttattataacatatgcaaatgttaatttgaacttatatctatattggcaataaaattagtctctttagtcatattctataaatttattagcaatttgtagaatgttaaactaattattaaatgctaggtcattcatataaacagaaattttttttgattgttttgtttattttttttgagtcggagtctggcacagttgctggggctgcaatgcaatagtgtgatcccagctcactgcaacctctggctcactgcaacctccggctcccatgttcaagcgattctcctgcctcagcttctccagtagctgggaktacaggcgcccctgctacgtatcaactttgatttctcagcagtttagagcaggtgaacatgatggg

SEQ ID NO: 672012 - DNA, 609 bp, Homo sapiens
gaataaaagcttttggtgtcacaattttttttcattaaattttgttttgattatccagtctaaattgtcatctgtatagatttcatcagatacttttttttactttttaaatgtcaatcttattgatcaagaaaggtaaaaaagagggaggctcattttctattctgatttgtttaaaatgccagatcacataaatttagatagggcccttattttctacgagagcagtggagctgggtgatgaccaaggactacatataatgcagcaagcacgctgtacagtccttacactatctaaatgcacctactcaaccaaagcagataggcactgtggaacgagaagggtgcagccaacacyaatgctaaagacaggctaacttggaaattcttgcattgaaactgcaaaggaatttccaaatacactaaaaattctcttttagagtatctgctagccatcatcagtaaaaggaaaataataccttgattttaatgaggttttattgtttggttggttttcgggtggttatttggggtattttatttgtttggttggtttgttgaggggtttttttgcttatttattttatgaaaactttagtataacacact

SEQ ID NO: 672013 - DNA, 639 bp, Homo sapiens
tacaggccagcttccttcccagctaagttacgtgtgaactggccactgctgacccctccacacccagtttttcccagttaaaaatctccccgtttttcagcttgagaacgttggtgattttcttattcaaggtttgctcattcaacagaaataatatatatgtatttttaattaaggtgttctaggagatcttttgaagagttatgtaaatataatatgagaatgtgtttgggattttttttttttagaaactcaagccttctgagtttagaaactcaggccttctttatttctaaaagaaaaaaaawtttttttttttcccctcagactaggtagggtcaaattgtgtctctgaagttccacagcaaacatttgaacaatacatctccaggccttgctgttcaaagccccttgcaatcaaatctaatcttaacccagcttcccagctgcaggtggtgatgtgttggtgaactggctctctggagggggaaaaaaatgttctgacttgtagagtctgccgatttccatggtgcaaatacttccacagtggcagatttcaagctcccagggtgacattgtcaaatgcagcattggaagagagatgcacagttggctctcatcagccagtaggaccagccc

SEQ ID NO: 672014 - DNA, 1113 bp, Homo sapiens
ttttgttttaatttattttttgtagaggtcatgtcccactgtgttacccaggcttgtcttaaactctagggctcaagtaatcctcccacatcagcctcccaaactgttgggatgacaggcgtgagccactgcaccaggactctcctcattttataaatcaggaaactaaagaagggagaggttgagtccttgcccccaggtctgtcttactcctaagcctgggcttcaccagctgtgtggtgcgcctccatactgcgccaaggcagcccactcagacctgttctgcagcccaggagggcaatgccaaggccagcctgagaggtagcaagcctccagtctcagggggtgtgcaaaccaaggaggtcaaggatgctgtggggatggggcccagggtggcctgtatgctcctctccctgctgcactaggggggccctgagttacatgacccacttgacccccggctggtcacttctgctgtgggcaccagccagggcacatgggacgatttggcccagatgtatcagctgccttggggaccagcttgggttgaagctcggaattccaggggctccacagggcctagcagggccctgccctcaccttgggaaggtagtgacctctcctgtgccagggctgtacacaccaaggggctgagcagccagcagagcagaaaacattgctctaattagtctaattaggctctgcgcagtggcatctgaatctgccccaaaatattgtaggtttctgtccccacaggggcccagctgggcctagctgcttggtggtgccagtgggtgggaagcctgccaggccggaatctgccatgagccctttcctttccttccttctttcctcccttagacatttattgagcacctactttgtgccaggcacactctgcttgatgccttaatggttggtgttctatgtcttaaggctcctggggtgggggtcacctcctctccttcagtccactgtgctgaagagtagggctctgacagtcctrggtgcaaatccagagactaccatgtgctcactgtgtggcctcaggcaggttgcttttcactctgtaaaatgggctgaccactcagaccatgtagaatgtgtccatgg

SEQ ID NO: 672015 - DNA, 673 bp, Homo sapiens
tttttctttttcttttttttttaagacagtctctctctgacccccaggctggagtgcagtggcgtgatctcggctcactacaacctctgcctcccgggttcaagtgattctccttcctcagcctcccragtagctgggatgctgggattacaggcacccgccaccatactaagctaattttttgttgttgtttgtttgttttttttttgagacagagtcttgctcggtcgccaggccagaatgcaatggcacgatctcggctcatgcaacctccacctcccgggtttaagggattcccctgcctcagcctcccaagtagctgggattacagccatgcgccaccatgcccagctaatttttgtatttttagtagaggcggggtttcaccatgatggccagaatggtctcgatctcttgacctggtgatctgcccagctcagcctctcaaagtgctgggatgacaggcgtgagccaccgccacgcccggcctaatttttgtatttttagcggatagagtttcgtcatgttggccaggctggtctcaaactcctgacctcaggtgatccacccgccttggcctcccaaactcttgggattacaggtgtgagccaccacgcccagcgccttctgtattttcttcctcgcaacgttcagttcctggcccatgtattct

SEQ ID NO: 672016 - DNA, 673 bp, Homo sapiens
tttttctttttcttttttttttaagacagtctctctctgacccccaggctggagtgcagtggcgtgatctcggctcactacaacctctgcctcccgggttcaagtgattctccttcctcagcctcccaagtagctgggatgctgggattacaggcacccgccaccatactaagctaattttttgttgttgtttgtttgttttttttttgagacagagtcttgctcggtcgccaggccagaatgcaatggcacgatctcggctcatgcaacctccacctcccgggtttaagggattcccctgcctcagcctcccaagtagctgggattacagccatgcgccaccatgcccagctaatttttgtatttttagtagaggcggggtttcaccatgatggccagaatggtctcgatctcttgacctggtgatctgcccagctcagcctctcaaagtgctgggatgacaggcgtgagccacygccacgcccggcctaatttttgtatttttagcggatagagtttcgtcatgttggccaggctggtctcaaactcctgacctcaggtgatccacccgccttggcctcccaaactcttgggattacaggtgtgagccaccacgcccagcgccttctgtattttcttcctcgcaacgttcagttcctggcccatgtattct

SEQ ID NO: 672017 - DNA, 640 bp, Homo sapiens
gctacartaaatggaaaaaccagaagagtcattccttttttaaactgtactgaaaatcctgtatgttcaggagccattttctccagagattccaacaataatacttggaattcaatatccatttctacagtggtctctctcccattttgtccccctcccttcaccactgccccagtaatgcaggctaaatattaagcttattacccccacagaaagcgtggttctgccaactgaacattgtgccagataccaagaattgaggcgattatgccctgcatgctgcttggtatactgaagatgggcgttcttttactttatttttatttcatttcattttttttttttattaaagagagttctactgtagacaaacaacccagggattgtttgaagaaaagggatatcccctcagacctggggatgcatttctccctcagtggctaaacctctttgtcattattacctccagagagagacacccagggatctgctcacaccacccatctccaggcaagttgaagcatgtcctggaaagccacctgaaccctggacagctccgcctgactagagaaatggtggcaaaggaattcttgctgtggtcccagcggtgagcataacagagttacctctctccacccca

SEQ ID NO: 672018 - DNA, 1444 bp, Homo sapiens
tgagacacagcgagacctcacagaacttgtgcctgcttgctttaaacccaccaattagtgctccccttgggaaacctgcttgggtagcactctgaacctcaataaagactttggtccacagacttctcttactctgtctctctgactgtccacccactggtggagtgtgcatgtcccagatagcttccacttcctgctggctcttctctctgggatctgtaagtaataaactgctcccgctatttcatgtgttttgttgaattgcttcttctgtgtctcagctgactgacacaccaaacccaacttctttccccgtcagggctctcctagaggatggctatcttagtagaagtaaactagacacagatcaaataacagcctcagggtgtctgccagtataatcaagtttcttgtaagagaaacctcaagaccaaattagagaaaagaaatataacaactttataaaaactaaattctatgatacaattatttatactttgtaccatcttcaagcctcaaaaagatttttattgtttaaaaaatattttatttttaagatatactttattgagataataacttaataagtaaaatatttaaaaagataatttctttgattcaaagtcttttatatttttgtgtctgtagttgaaaaataaagctaataggtttctttcttacccatagaatctctctcagcattgtattaatccagccaggtctctgtgcaaagatgacataaaaaagtcattcctgtgatgccctccttctctaacttctaaaaagggaatcctccagtgaattttaacttcttactttttttgtatttcatcctctcttccctaggaagagaaataaagtggctaaggtcatattgcaggtcatatttctaacgttctgcaattctgatggttctttgaagaaaagatcagagtgctactgaatatatagcaggaagtcctaaccttcttcagaggaagcaaattttcaggtgtgtcttcaaagacaaataggagttctgtggaagattgaagaagagagatgtatagatgtgtaaagaacagtccaggtagggatcagtatttgtgaagacacttgtaaatcatcatagaaaacagtcacacattctctctggtgcggaaccaattccctggttctcaacatactttcttcctttggcctccccctttcttgcttcctttattcctctctcttcctattcccatttcttctgcaagttsccgtttctctgctcacttcttaatggctgcttattctcagggctttgtccttggacctatttgttcctcaatttaacttgtagattttgctctccactccatggatttaatcactatttgctaactgtatatagagagttggttttttttagtatatagataataataataattaaatccatagtcttatttatttatttatt

SEQ ID NO: 672019 - DNA, 1128 bp, Homo sapiens
gttttaaaaagaggtatatttacaagatatggccaagggtaggtaaatcacaagggatttgcaatactctraagctagttcccacctctatgactaaaagaacaagagaaaggagttgccaccggaatcacaaaaagagactcatagagacaggtctacctggagaagagttatgactttcagttctatcccacagagaagaacaaaaatgattatcccaacctcaccttcctctttatatattatcttctgctgggactctctaaaccaaacctgactaggagcaaagagtaagggagaccattaactcagccttctagagcagaaaatgggatggagaagggtggagaaaggatatgaaggggcaaacaaaagatatacagtgcaaaagcaggacctctggaatattgcttgaatagtctttatgtttttgtttgccacctcaggcagtttacttgaaaggaagtgctcaagcagacagattgaaatcaaagacccaagaaacctccttggttgggtcacctttttagagcttcttttggaaggctggaacaatcctgactcaactcagctggtgaagagagatggtcagtgtgctgacctgtatggggccaaaagggatgaaatcaagtcaacctttttgaagaaaaaacagttaacattattgttatgcgaaaaccctttgttcaaatgaaatctcacctcaagcttcaggtcttcacacatgaaggtgcagctgctctggatgaagtgtctgtggaatgaaggggaaggggaatatggaagcctccaagaactcttgaactcttgggctagagctctgatggcacagttttggaatagctggtcttttttaaaggctcttttcatgtaccgagggaaaccaagacctggtgagcagaagtgtattgtccacagtcacccaggaagctagtggccactctactgccaaagccaggtctcttcactcttagtctcattgttctttccatcttctcctggtgggtatcatagcctggacatttttttccttaaattgcaaatattctgtgtgcacaggctgtttcctccagaatattcttatggtgctgaggcaggagagctgcccatgctatttgctcatagaca

SEQ ID NO: 672020 - DNA, 1128 bp, Homo sapiens
gttttaaaaagaggtatatttacaagatatggccaagggtaggtaaatcacaagggatttgcaatactctgaagctagttcccacctctatgactaaaagaacaagagaaaggagttgccaccggaatcacaaaaagagactcatagagacaggtctacctggagaagagttatgactttcagttctatcccacagagaagaacaaaaatgattatcccaacctcaccttcctctttatatattatcttctgctgggactctctaaaccaaacctgactaggagcaaagagtaagggagaccattaactcagccttctagagcagaaaatgggatggagaagggtggagaaaggatatgaaggggcaaacaaaagatatacagtgcaaaagcaggacctctggaatattgcttgaatagtctttatgtttttgtttgccacctcaggcagtttacttgaaaggaagtgctcaagcagacagattgaaatcaaagacccaagaaacctccttggttgggtcacctttttagagcttcttttggaaggctggaacaatcctgactcaactcagctggtgaagagagatggtcagtgtgctgacctgtatggggccaaaagggatgaaatcaagtcaacctttttgaagaaaaaacagttaacattattgttatgcgaaaaccctttgttcaaatgaaatctcacctcaagcttcaggtcttcacacatgaaggtgcagctgctctggatgaagtgtctgtggaatgaaggggaaggggaatatggaagcctccaagaactcttgaactcttgggctagagctctgatggcacagttttggaatagctggtcttttttaaaggctcttttcatgtaccgagggaaaccaagacctggtgagcagaagtgtattgtccacagtcacccaggaagctagtggccactctactgccaaagccaggtctcttcactcttagtctcattgttctttccatcttctcctggtgggtatcatagcctggacwtttttttccttaaattgcaaatattctgtgtgcacaggctgtttcctccagaatattcttatggtgctgaggcaggagagctgcccatgctatttgctcatagaca

SEQ ID NO: 672021 - DNA, 1514 bp, Homo sapiens
aaaaaatctaatgttagcagggcctagatcatatagggccttgggaacatggaaagatttttaacttttatttccagatgccttaggaaaccgttgaaaggcttgaaaagggctagtgacttttgtgtatctgtttaaactattctgatggtattatctctaacagattttataagactattggagtggtcctgacaaaagataattatgcctaggacaagggcaatggcagtggggatgtagataagtggacaaattttaaatctcttctggagatataatattcagaacttgctgggaagagtgtgaaaagggtagaaccaagaacaacatcaggttttctttgtctgaactatagtgtagatggtggtgccatgaaaaagaatagaggcataacagcttcttttgtaggaaaccgtttattatattgggaggtaaacaagagttttattttgtacaaatgaagaaaaagatgccagttagacatccaaagggagatgatatgtagacaattggatatatgatgctggtgctctgaagcaagataaggactaaaggtataatccaggggaatcattaaaataaaggtggtgtttaaaaccacagaattgtagattgtctaaggagaaaatatagaagagaaatataaagaagagaaagtgtagataaagaaaagaagattttaaaagagcagataaatcctagagaaaccttccacaatgccaatatttagatacctggtagaggagagaaagccatattaaatgccagtaccataccctgacaaacactcctctcatctctcagcccatagatgttgctcctattatgatgtggcattgtcttagtctgggacctccataaaaatagaacctggataagaattgcattcaggtcgtttacttaggaaatgattccaggaaataggagagaagatctagtgagaataaaatggggtaggagagaaagtcagtgcaaaggcgcacagggcattgaacatcactgtgggcarcttgtgcgtgatttcactcagatcttatgaggagctatacaaaaagtctcacaattggctgcccaaggggcaaaagagagaaatgtttgaccattgtctcatggttctttttgattgaaggtttccctacaagacattaatattcccacacttctagattgccatgcaagactgctgagagtacaagctttagcaggcatcttaggtgacagcatcagaaaagctggaggttatagaaagagagcttaacatatcaatattccatcacatatcaatattcaatatttttgagtcacaaaaaaatccccctcgagtgttagctccctccagaaaccttttttacatcaacaggcatcaatactttctataccccaccaactagtatgaggtgatatcccaagccatctattggatcattcactgttactactatgacctctagaagattgtctagaatatacttaatatatatttattttataaagaaaggcaaaaagcaatc

SEQ ID NO: 672022 - DNA, 623 bp, Homo sapiens
tagtaaggctttccctgaccccctagctaaaacagctccctctggccccaagtcacctcctatcacactattttctttatagcagttagctacatctaatgttattttgtctatatacttgtttacatgtttagtgtttgtgtcctagtggtatgaacggtctctgagaacagcggccttgtgcctggaacagagtctggcaaatacaggctcctcaataaatattcatcaaactgagtcactgaaatttaacagttatggactgaccgcatagtgtagcagactgggatgaaggccaagtcttatcatcaatgagtataaaatgctagaagggtgatatacaagtcacaactgactttaatatgagaaaatctaccactgccaaatgaaaagcaaaaatggaagagtttaagattaaaagttcaaaaccttaaaaggttgtatgaaggtggcagcactgagttgggctttctaagtttcagaaatagagaaagaagagagatattccagtggtttaatttgccagggtcataagatacttayagagcaatgggagaactaactgtaagatcgaatggtgagttaaggtcaaggaatcttccttatcaggtgggtaaatctga

SEQ ID NO: 672023 - DNA, 1388 bp, Homo sapiens
gtttggtcagttgagagattcgctggggtttcttggcttttcaaagatatgctattatttagggatttttttggacatagagaagtctgcagggcttgggtattctaaatatagaaatgcactcggctactttttatgttatcactagtcataactgtcacacaaatatcttgtgtgagtgtttataaattatggcatgaatgtcaaaccacaacataaaatcactgcaacccaaacttgaaggctttatagacttttcaccatgacctctggtaacagtggaactctaaatacccaaactcttatggtagattcttccttaccttcatgctttactgtcttatatctctgaagccttcatcagtaccttgacctacaggccatgtactcttcaaatcaagtacagctttagggccggctagtgatgtgtcctctaaaaatatttactctgcagatttttaaataaaagctaatgtaaaaggttccttggacccctgttctagtgaagtcatctccaagggagagtacacaagattctccaccaaggaaaataaaactatgccttttctttttttaagaaagaaataaaagttcactaatgtttaataaattgacatggcagccctctcagcctgttaggccatcagctggagaatcccttcttgcttggaaacgctttttgttcttctcaggtcttcagccgatcagatgaggcccacccacattatggtaggcatgtgtcaggtgccatgtgtgccatgtacagggcctgctggggaaagactgggaggagctccacaatgcagagagcataaccacagtgctctcatctgctcacatcctccaagcaattgtcttgcattgaccttgtgtgcacttcattcagggtgttttgggtgttttttaaaggataaactcattactttcataaaaataaacaacaaccacatgtcaaagcttttatttaacttataatttaatgaggaccataagtgagatgatagaactaattcaaaggagaatacaaaaaacacacacatataaaccatcagcataatttgatgaaacaaatgaacartagatgaagcccttgtccacagggcaataatcaattacattttactgtacataatcatttgcatttctatgaaatggagactttcatccttaccaactttttatgactcacagagttgtaaaatagtgcgatggtaataaaatgttgcataggcaagacactcaataatcttttcttgcctatttcaaagtctttcacaatatttcctggcaagtagaattacaaattaaattatctggtttttaacgaactaatgcttacatgaagaaaaaccctgtgctttcgagataccaagcaaacaagaagaaaa

SEQ ID NO: 672024 - DNA, 665 bp, Homo sapiens
caagtttgaaccaacttgtctccttgaactcctaacttcatgtgaactcagggagactactaggctctgcctcctctctctcagcagggtcctttaggaagaaaatgttgagacagagctaggattacaagagacttattagtagatataaactgtgaaagataataatggagaaacaggagaattatagtaaaggtttcagactgcatgaagatatgacatctaaaaaggaaagtggagtggaagcaggattgggcagtgagagctttaaaccacaagacaggtctaataaggtttcaaccattcagtcatgatctgtaaagcaaagactgcctgttagaggagtctcacacttgaagaagtggccagacccgttctttctttgtctgggtgctacttgggaagaacatggtctggctgaaaagttgaagtggaacctgaagayacttagaactgtaaactttggagataaataagcaaattatttttctaagggagatcaaaacagcatacctccacaaccaccatagttgcattttattgaagtaattttagcttctcttggtggaaaatgatcattaaaactaaatatctactttgttgtgtcataccacacattctgtattgattaaaccaacaattatccaataagaatatattgggtg

SEQ ID NO: 672025 - DNA, 1784 bp, Homo sapiens
tgtatttattttttgaaatctgtgcgtaaagtggacctacagagtttcaacccatgttgttcaaaggtcaatgttataaggaaattggcaggataataatcaagatcaatactataaaagtactgattcaggctgggtgagggggcttacacctgtaacctcagcattttggtttgccaaggtgggcggatcacttgaatccaggagttcaaaaccagctgggcaacatagtgagatcccatttctacaaaaatacaaaaattagccaagcatggtggggcatgcctgtagtctcagctactcaggaggctgaggttggtggaccacttcagcccaggaggttgaggctgcagtgagccgagatagcaccactgcactccagtctgggtgaaaaagcaagaccctgtctcaaaaaaaaaaaaaaaaaaaaaaaattgatagggcagaaacatttcttagtcctcatctacstttgctttaaaattccaatagatgtaaatggcatggcacaaatattttaccatatacaaatagaaatttacattctataaagacaatgtctttaggcaactaatcaactaaatgtcactcttcaagaaatagtgttgatatatatgtgtgtatttgtatgtatttatatgtgtgtatataatagacaatagaaaaaacaactcaactataagaaatatgctaacattgcaattactaaagaatagagagtttgattttactctagtttatactcatcttgtcactgtgttgctaaagttcctatagtattctactatgtggcagaaaagacatatgacacatacatagtgatactttaaggataatatatttaacaacccagtgcattttgtgtgtgtgtgcatgtgagttggtggcatttatggtaaaatgtgtaaagcaggaagtgcttcctagtggacagttatatatataagtcttgctgtttcacgtatcatttgctctttccacactttcaggtaaaaaataaaataataaaggagatacatttagctataacataatcaaaacataccaatattaagtaaattattaattattcaaccctagagaaagtgtctttgatttttttctagtccaaacgttcataatgttgaaaatatacaaataaaactcctatatgcatagatataggaatatgtgtgacaaaatttattgtgtaacaatgtttatattttctatttaatataatcttaacattttactctaatatattttgttacattaaagaacacatatttcaaaattaaaatcagtcttcaatttcaaagacgtatttttaaagtatatatgatattttaaaaagcgaatttttaaatgtttacccattataaaacattgttttgtttctaaaataatcattcactttttttaattaattaatttattattattatactttaagttttagggtacatgtgcacaatgtgcaggttagttacatatgtatacatgtgccatgctggtgtgctgcacccactaactcatcatctagcattaggtatatctcccaatgctatccctccccgctccccccaacccacaacagtccccagagtgtgatgttccccttcctgtgtccatgtgttctcattgttctattcccacctatgagtgagcaatatgcggtgtttgcttttttgttcttgcgatagtttactgagaatgatgatttccaatttcatccatgtccctacaaaggacatgaactcatcattttttatggctgcatagtattccatggtgtatatgtg

SEQ ID NO: 672026 - DNA, 628 bp, Homo sapiens
ttttaaaaaacacaaacaaaaaaagattatagcctaatcagtggtaacagacaagcatataatcatatggccagaaatttcatttccagaaatctatcccacaaaatatgtaaaaagcaaaatatttgaaactggtatgatatacaaatgtatgaaaattgaccaaaaatatcatatagtcaaataaagtttaacagcatgttaaaaatacatatattccaatgcttatatttgcataagcatggaacatttctggaatagaaaaggaacttgatkatgggtaatttcaaaaagtggccctgaggagagaaaagaaaaccagaatttgctttctcatttgtatatttgttttttttgttttaaattttttatctttccaattgacagcttgtggatattttgcttttttgcaataaaaattactacttttataataaaaattttaaaaaatcagataaaccagagtatatgaaagagaacagaaatgtgattaaggggaaaccagagaaagaaactatctgatacaatgtaatagcctttacatgtgggatgtaggtggaagtatttttgcatgtttaaaaagaggaaaattaattcagaaacgttaaaaaaaaactgaagatctttt

SEQ ID NO: 672027 - DNA, 697 bp, Homo sapiens
aagcgggggatcycacccaatgaaccactatcgacaaggtgcctgatggcactgtgagagaggccaggcactgtgagagtctgcactgacctcaccagaacccccatgaccaggggagcatgacattaagtagcaaataaaaaacaccatcactggttgagaaagagacctcaagagaaatcataaaaccttcatgttatattacctttaacggtaattttttcctactttgtgaacaagggtcgcatattttcatttcgtattgggccccacagatcatgtagccggtcctaatacaaccttctttggccagcttctacatcgattttcaccctgaaggcttttcgtttattttttgctcatgtttatttcctctacttttctattctcttttaatcaccgcactttttgtgttataagtttggtctttatatgctttttattttttatttttttaattttttttattatactttaagttttagggtacatgtgcacattgtgcaggttagttacatacgtatacatgtgccatgctggtgtgctgcacccactaactcatcatctagcataaggtatatctcccaatgctatccctcccccctccccccaccccacaacagtccacagagcgtgatgttccccttcctgtgtccatatgatctcattgttcaattcccacctatgagtgagaata

SEQ ID NO: 672028 - DNA, 697 bp, Homo sapiens
aagcgggggatctcacccaatgaaccactatcgacaaggtgcctgatggcactgtgagagaggccaggcactgtgagagtctgcactgacctcaccagaacccccatgmccaggggagcatgacattaagtagcaaataaaaaacaccatcactggttgagaaagagacctcaagagaaatcataaaaccttcatgttatattacctttaacggtaattttttcctactttgtgaacaagggtcgcatattttcatttcgtattgggccccacagatcatgtagccggtcctaatacaaccttctttggccagcttctacatcgattttcaccctgaaggcttttcgtttattttttgctcatgtttatttcctctacttttctattctcttttaatcaccgcactttttgtgttataagtttggtctttatatgctttttattttttatttttttaattttttttattatactttaagttttagggtacatgtgcacattgtgcaggttagttacatacgtatacatgtgccatgctggtgtgctgcacccactaactcatcatctagcataaggtatatctcccaatgctatccctcccccctccccccaccccacaacagtccacagagcgtgatgttccccttcctgtgtccatatgatctcattgttcaattcccacctatgagtgagaata

SEQ ID NO: 672029 - DNA, 697 bp, Homo sapiens
aagcgggggatctcacccaatgaaccactatcgacaaggtgcctgatggcactgtgagagaggccaggcactgtgagagtctgcactgacctcaccagaacccccatgaccaggggagcatgacattaagtagcaaataaaaaacaccatcactggttgagaaagagacctcaagagaaatcataaaaccttcatgttatattacctttaacggtaattttttcctactttgtgaacaagggtcgcatattttcatttcgtattgggccccacaratcatgtagccggtcctaatacaaccttctttggccagcttctacatcgattttcaccctgaaggcttttcgtttattttttgctcatgtttatttcctctacttttctattctcttttaatcaccgcactttttgtgttataagtttggtctttatatgctttttattttttatttttttaattttttttattatactttaagttttagggtacatgtgcacattgtgcaggttagttacatacgtatacatgtgccatgctggtgtgctgcacccactaactcatcatctagcataaggtatatctcccaatgctatccctcccccctccccccaccccacaacagtccacagagcgtgatgttccccttcctgtgtccatatgatctcattgttcaattcccacctatgagtgagaata

SEQ ID NO: 672030 - DNA, 697 bp, Homo sapiens
aagcgggggatctcacccaatgaaccactatcgacaaggtgcctgatggcactgtgagagaggccaggcactgtgagagtctgcactgacctcaccagaacccccatgaccaggggagcatgacattaagtagcaaataaaaaacaccatcactggttgagaaagagacctcaagagaaatcataaaaccttcatgttatattacctttaacggtaattttttcctactttgtgaacaagggtcgcatattttcatttcgtattgggccccacagatcatgtagccggtcctaatacaaccttctttggccagcttctacatcgattttcaccctgaaggcttttcgtttattttttgctcatgtttatttcctctacttttctattctcttttaatcaccgcactttttgtgttayaagtttggtctttatatgctttttattttttatttttttaattttttttattatactttaagttttagggtacatgtgcacattgtgcaggttagttacatacgtatacatgtgccatgctggtgtgctgcacccactaactcatcatctagcataaggtatatctcccaatgctatccctcccccctccccccaccccacaacagtccacagagcgtgatgttccccttcctgtgtccatatgatctcattgttcaattcccacctatgagtgagaata

SEQ ID NO: 672031 - DNA, 1168 bp, Homo sapiens
gatcctgggtgtgtctgtgagggtgttggcaaagagactaacatttgagtcactggactgggagagggagaaccaccctcaatctggatggacaccatctaatcagctgctagcctggctaggataaaaagaggcagattaatgtggagggaatatactggctgagtctctcggcttacatctttctcccatgctggatgcttcctaccctctaacatcgaactccaagtacttcaggactcttggacctaatcaagagtcgggtggcttaccagcaggtttccaggggctcttgggcccttgaccaaagactgaaggctgcactgttggcttccttacttttgaggtttggaaattggaggggcttccatgctcctcagcttgcagatggctcattgtgggagttcaccttgtgatcgtgtgagtcagtactccttaataaactccctttcgtatatacmtctatcctattagtcctgtccctctagagaattctaatacagggttttgttttttttttaaatcagtatttccttttttttgaaacatgcatttacttggaacaatagattgttctcacaaaaaaacaatagattggaggggatgatttctagagatggagtctcgctctgtcatccaggctggagtgcagtggtacaatctaggctcactgcaacctccacctcccagattcaagcaattcttctgcctcagcctcccaagtagctgggactacaggtgcacactgccatgctgggctaatttttttttgtattttagtagagatggggttttaccgtgctgcccaggctggtctcgaactcctaagctcaggcaatgtgcccgcctcggcctcccaaagtgctgggatcacaggggtgagacactgcgcccagcccattttatatttgtttgctatatttatatcacccaggaactatgctgtcatgtgattataggaatttacttttatgtattgtaccagctggagtgttttagttacaagtaaaggaaaagagactcacattggcttatacaataagaccattttttacctttcatgccaagaagtgtccttgtaaggtgaactccagctgtaggatgcatctgagacatgatagaatgtctgtttggagatttgggagaaagagttcattgctcttaagca

SEQ ID NO: 672032 - DNA, 1368 bp, Homo sapiens
attaaaatatatttttatttattgtcattttgtaacaatagctatttcaactttttattacagtatattacagtaagctctacaaggacactgagtttatcacagtaagctctacaaggtatattacaatatattacagtaagctctacaaggacactgagttttggccagggcttcagtctagacttgtctatttccagggtgctctactgtgttctttctcaagcctgtgttatgatttttttctattgctgtaggagttaaatggttagttatgagacaaaaagcaacagcaatatatgtgcatttatcttctcctgacattttcactgtcaatcaggagctctgggaaaaaacctcatgagtgaaatttatttgattttctttatcatgcagtaatactggagataaaaaacttaatctgagcaatgctatgaaatcactgctttaaacttttaatatgtgtttctttcaggcagtattttcatggactgttctctaaggtttactgttatagagaaatgtcttgagtgaataaataaaaaaatcctaatatataaatatattggtaaatgttgaatgatactgcgctagccatgtttcccttcagttttgcagattgtacccatgggttttattggtttttaaattcatctctatgactgtagaggtgaattcacttttgtgccttctttttctgcagaagaaataaaatcatgtatctctacactaaatgctttttactgttctctggtaagtttctttcataattcaacagagaaaaggcttatcagtttatcatttataatgtctcaatttttgtagtttcatctgttttgaaatgtttctgtgtgggtaatttgaagtacatattctgcaagtacaaaacactgctattttttttcctaaaagtgttatttaaaataatcaaattgcttttccatgttatctacctcattttggaacaaagaaccacaaatgatgagaaaactctttattaccacaatataaaagaataagaaaaaactttccaaatattattttcctgtctgactctctcttcttcctttgtgggattaaaataataataataataataataataataataataataataatrataaatcttttatatatggtcaaagccacatttttatgtttgggccttaagaaagcttgcatgatccttctgcttttaataaaattttctaaatataattgttaaatatatcataaaacaatcaatgctgtttttaatatttacatattaatctggatttatctctaaaatataaatagtttaccttatgaagttacagagcataatatcttcacttgcattatttactacacatcatttggaaa

SEQ ID NO: 672033 - DNA, 1070 bp, Homo sapiens
  misc_feature 2, 3, 4, 5, 6, 7, 8, 9, 10, 11, 12, 13, 14, 15, 16, 17, 18,19, 20, 21, 22, 23, 24, 25, 26, 27, 28, 29, 30, 31, 32,33, 34, 35, 36, 37, 38, 39, 40, 41, 42, 43, 44, 45, 46,47, 48, 49, 50, 51, 52, 53, 54, 55, 56, 57, 58, 59, 60,61: n = A,T,C or G
  misc_feature 62, 63, 64, 65, 66, 67, 68, 69, 70, 71, 72, 73, 74, 75, 76,77, 78, 79, 80, 81, 82, 83, 84, 85, 86, 87, 88, 89, 90,91, 92, 93, 94, 95, 96, 97, 98, 99, 100, 101: n = A,T,C or G
cnnnnnnnnnnnnnnnnnnnnnnnnnnnnnnnnnnnnnnnnnnnnnnnnnnnnnnnnnnnnnnnnnnnnnnnnnnnnnnnnnnnnnnnnnnnnnnnnnnnnctgtttttctcaactctgagagcttttgtttttgtttgttatttgtgttatttttcatttctcttagctttttggtaaaattagttaaacatttcatctgtttggtttcacattcttcttgtatgtttttatcagctataggagggttatatgacaattgtttatctcttctcatgcactactaggtgcctttacctgggcagaaaggaaaatgagagagcctcctgtttcagtgttcatggctcaagtgctctgtcctcttgttataaaagactctaaatttggtctttctgagcagtctgttctttttctgtcagccctcagccagcttcaaggagacttgtccaagccctttgtttccaagagaaccacagttcctactttccaaggcactgcttacatttagatattttattttgctgatgcactacttttgagatcttcttcctctgaccttctcaccctctaccatttgaagattttgtcttttttattcctagtttacctgctctgttaaatctggatcttaccagaaaaagattttcttcaacttaatatttggtttattgaaaggggatatatagcagatggctctcaaagtcagattgcatggattaaaaaatttttaaaaggaacggaacaccagcatatccatttaatcatttaaaatgtaataagcatttaaaaatactattacaaactacactcaaygactggtcacttttacaatacaagaatacctatggtcttgttctttagtcagggagtggggaatcattcccatctgctaaaattatcctggataattgcaaagtaagtagtgttactaacatcaagttccttacaattttaagtcgttcttcagatttgacttacctcttcattattcaatatgatctctatctttgtgcagacaataaaatattctcagcttgtctcctaactttctggccatgatctaagtacaaa

SEQ ID NO: 672034 - DNA, 1070 bp, Homo sapiens
  misc_feature 2, 3, 4, 5, 6, 7, 8, 9, 10, 11, 12, 13, 14, 15, 16, 17, 18,19, 20, 21, 22, 23, 24, 25, 26, 27, 28, 29, 30, 31, 32,33, 34, 35, 36, 37, 38, 39, 40, 41, 42, 43, 44, 45, 46,47, 48, 49, 50, 51, 52, 53, 54, 55, 56, 57, 58, 59, 60,61: n = A,T,C or G
  misc_feature 62, 63, 64, 65, 66, 67, 68, 69, 70, 71, 72, 73, 74, 75, 76,77, 78, 79, 80, 81, 82, 83, 84, 85, 86, 87, 88, 89, 90,91, 92, 93, 94, 95, 96, 97, 98, 99, 100, 101: n = A,T,C or G
cnnnnnnnnnnnnnnnnnnnnnnnnnnnnnnnnnnnnnnnnnnnnnnnnnnnnnnnnnnnnnnnnnnnnnnnnnnnnnnnnnnnnnnnnnnnnnnnnnnnnctgtttttctcaactctgagagcttttgtttttgtttgttatttgtgttatttttcatttctcttagctttttggtaaaattagttaaacatttcatctgtttggtttcacattcttcttgtatgtttttatcagctataggagggttatatgacaattgtttatctcttctcatgcactactaggtgcctttacctgggcagaaaggaaaatgagagagcctcctgtttcagtgttcatggctcaagtgctctgtcctcttgttataaaagactctaaatttggtctttctgagcagtctgttctttttctgtcagccctcagccagcttcaaggagacttgtccaagccctttgtttccaagagaaccacagttcctactttccaaggcactgcttacatttagatattttattttgctgatgcactacttttgagatcttcttcctctgaccttctcaccctctaccatttgaagattttgtcttttttattcctagtttacctgctctgttaaatctggatcttaccagaaaaagattttcttcaacttaatatttggtttattgaaaggggatatatagcagatggctctcaaagtcagattgcatggattaaaaaatttttaaaaggaacggaacaccagcatatccatttaatcatttaaaatgtaataagcatttaaaaatactattacaaactacactcaacgactggtcacttttacaatacaagaatacctatggtcttgttctttagtcagggagyggggaatcattcccatctgctaaaattatcctggataattgcaaagtaagtagtgttactaacatcaagttccttacaattttaagtcgttcttcagatttgacttacctcttcattattcaatatgatctctatctttgtgcagacaataaaatattctcagcttgtctcctaactttctggccatgatctaagtacaaa

SEQ ID NO: 672035 - DNA, 609 bp, Homo sapiens
tagggtgcatgtgcacaacgtgcaggtttgttacatatgtatacatgtgccatgttggtgtgctgcacccattaactcatcatttacattaggtatatctcctaatgctatccctccccgctcccccctccccacaccccacaacaggccccgatatgtgatgttccccttccygtgtccatgtgttctcattgttcaattcccacctatgagtgagaacatgcggtgtttggttttttgtccttgcgatagtttgctgagaatgatggtttccagcttcatccccgtccctgcaaaggacatgaactcatccttttttatggctgcatagaggagaaagagtggctcagttctgaccacttatagctttgtcaacctaagcttctctctttgtcatattctgcccatttgcattgacccaaatacatataaaacaataaactgatttggagctttaaattattgtttcagtgaaatatttgatgttaagtctgtataccataatgaggagaacactagaaattatttaaattctcctaatgagtcacacaattaaaaaatacacccaatttaaataggtaaatattgtttttcttgcacgcttgttat

SEQ ID NO: 672036 - DNA, 609 bp, Homo sapiens
tagggtgcatgtgcacaacgtgcaggtttgttacatatgtatacatgtgccatgttggtgtgctgcacccattaactcatcatttacattaggtatatctcctaatgctatccctccccgctcccccctccccacaccccacaacaggccccgatatgtgatgttccccttcccgtgtccatgtgttctcattgttcaattcccacctatgagtgagaacatgcggtgtttggttttttgtccttgcgatagtttgctgagaatgatggtttccagcttcatccccgtccctgcaaaggacatgaactcatccttttttatggctgcatagaggagaaagagtggctcagttctgaccacttatagctttgtcaacctaagcttctctctttgkcatattctgcccatttgcattgacccaaatacatataaaacaataaactgatttggagctttaaattattgtttcagtgaaatatttgatgttaagtctgtataccataatgaggagaacactagaaattatttaaattctcctaatgagtcacacaattaaaaaatacacccaatttaaataggtaaatattgtttttcttgcacgcttgttat

SEQ ID NO: 672037 - DNA, 609 bp, Homo sapiens
tagggtgcatgtgcacaacgtgcaggtttgttacatatgtatacatgtgccatgttggtgtgctgcacccattaactcatcatttacattaggtatatctcctaatgctatccctccccgctcccccctccccacaccccacaacaggccccgatatgtgatgttccccttcccgtgtccatgtgttctcattgttcaattcccacctatgagtgagaacatgcggtgtttggttttttgtccttgcgatagtttgctgagaatgatggtttccagcttcatccccgtccctgcaaaggacatgaactcatccttttttatggctgcatagaggagaaagagtggctcagttctgaccacttatagctttgtcaacctaagcttctctctttgtcatattctgcccatttgcattgacccaaatacatataaaacaataaactgatttggagcttyaaattattgtttcagtgaaatatttgatgttaagtctgtataccataatgaggagaacactagaaattatttaaattctcctaatgagtcacacaattaaaaaatacacccaatttaaataggtaaatattgtttttcttgcacgcttgttat

SEQ ID NO: 672038 - DNA, 656 bp, Homo sapiens
tgtgctttgttaaacagatgcttgaaggcagcatgctcgttaagagtcatcaccactccctaatctcaagtacccagggacacaaacactgcrgaaggccgcagggtcctctgcctaggaaaaccagagacccttgttcacttgtttatctgctgaccttccctccactattgtcctatgaccctgccaaatccccctctccgggaaacacccaagaatgatcaataaatactaaaaaaaaaaaaaataataaaaataaaataaatattgaaattattaaaaaaaaaagatcaaacaccatctgaaaaagaagggaccttaaggaaaatattatttagaagttaaagctattaaagctgagaaggtgacttctgaactgagtttaattttgaaagtcacatgtacaataaaaaaaatttaaagtttaaataaatgatgcccagacatggaatcaacccaaatgcttatcaatggtagactaaataaagagaatgtggtacatatacaccaggaaatactatgcagccataaaaaggaatgagatcatgtcctttgcagggacattgatggagctggagccattattctcagcaaactaacgcaggaacagaaaaccaaacaccacatgttctcacttgtaagtgggagctgaaaga

SEQ ID NO: 672039 - DNA, 656 bp, Homo sapiens
tgtgctttgttaaacagatgcttgaaggcagcatgctcgttaagagtcatcaccactccctaatctcaagtacccagggacacaaacactgcagaaggccgcagggtcctctgcctaggaaaaccagagacccttgttcacttgtttatctgctgaccttccctccactattgtcctatgaccctgccaaatccccctctccgggaaacacccaagaatgatcaataaatactaaaaaaaaaaawaataataaaaataaaataaatattgaaattattaaaaaaaaaagatcaaacaccatctgaaaaagaagggaccttaaggaaaatattatttagaagttaaagctattaaagctgagaaggtgacttctgaactgagtttaattttgaaagtcacatgtacaataaaaaaaatttaaagtttaaataaatgatgcccagacatggaatcaacccaaatgcttatcaatggtagactaaataaagagaatgtggtacatatacaccaggaaatactatgcagccataaaaaggaatgagatcatgtcctttgcagggacattgatggagctggagccattattctcagcaaactaacgcaggaacagaaaaccaaacaccacatgttctcacttgtaagtgggagctgaaaga

SEQ ID NO: 672040 - DNA, 613 bp, Homo sapiens
ttaaggtaaaattaatgaaaattaaacaaaatttaaaattcagttcctcaatcacactagctatatttcaagtactcaatagccttactcactggtagccacaatagcaratatagaacatttccaaaattgcacagggtcctattgggcagccccctataaagcatttccacaattcctaaccccattgtctccaactgttgttctttcatatatagtcaaccagtttaaaatggcaagtgcttggccaggcgtggtggctcacacctggaatcccagcactttgggaggccgaggtggtcagatcacgaggtcaagagattgagactatcctggccaacatggtgaaaccccgtctctactaaaaatacaaaaattagctgggcgtggtggcgggcgtctgtagtcccagctacttggtaggctgaggcaggagaatcacttgaacctgggaagcggaggttgcagtgagccgagatcgcaccactgcgttccagcccagcaacagagctagtctccatctcaaaaaaaaaaaaaaaaaaaggcaagtgctcctgaataccttgtaggcatcaacagctcagtgaacctaaagatatattgagcacattgc

SEQ ID NO: 672041 - DNA, 612 bp, Homo sapiens
attcctcactgaaaggaccttaatgatggtgggaagcttgaagaggggcttggagagaggtttgcaggcttcgggttgccagggacacttaccttcttggcttcagcacatcacacagtctcagacggcagaaagagccaacgcgttggaaaacaagggtcagtacaagggttaaatgaaagtgaaatcatgctgacccagaaatgcaaatcggtgtgccttagttctctgtagaacttgtgttgcctgaacactctattctttcttcagattatctagtgtcccaagagaggcttcagcgatttcgagaacagtgatgcaatgtggagagacgcggcaggcagcggcagaatctaattgcatttgagaagcatctccacaatttgtagtggccttctcacagggaaaagcggggggccggttttgaagttgatttccttttctttatattgcttttactatccttctcagctcagattcaaagctcaaaatgggaggtgatttttaaactgtcttttaacccatcataaaaggaagaacatgcgcacttagagatttataattctcatctgcattgtgttctctaaagttgcaamgtgtacaggaagctcc

SEQ ID NO: 672042 - DNA, 763 bp, Homo sapiens
tgacaaaagtcttttcaacttcgtttttcttccataaccttaactgtagaatgtcacagtaggaaggaatgagagaggaaaacaaagccattgaaagaggctcgaaggtgaaatctccatcacactctccttaccgcgcatacctaagaccagctcctgcaaaggagccttgctagtcaaagtcaaggcttagttcatttctagttttaaccacattgaattccagacattaaggagcctataatgcaaactatctctctctctctctctcttttttttttttttggcagtctcacttcgtcacctaggctggagttcagtggcctaatctcaggttacagtaacctctgcctcctggggtcaagcgattctcctgcctcagtctcctgtgtagctgagactacaggcacacaccaccatgcctagctaattttttttttttttttttgggagaaacagggattcacaatgttgtccaggctggtcttgaactcctgacttcaagtgatccacccccccccctcggcctcccaagtacaaactacgtcttttgaaaaatgtcccatacagatatttcactgctctctacctgggccaagtttgggaaccaggtgccaatcacagcttggtatcgagcacgttccaaaggccctgcttccctcyagcctcatgttggtcctgattttccctaggaatggacctacagcttacctgaagatgccagtttaggggtggaaactattcctccaaagaaaagttagga

SEQ ID NO: 672043 - DNA, 634 bp, Homo sapiens
gttccaacactgtcccaggttgatgggagagcatgagctggatccacctattgtgtcttaggccaggcaagggttttcattcctttctagatcaccatctattgcccagaggtctgccattttctcttttctagagagatacaagtgttctggaccattgaaagggagattattctatgtatggtagataggatggaggttaagtaagtttttaaagcacataggcctcattcccgctagactttcaataggtaatctcctatctactgtcaatgagaagggcaacagaggcagtgcttcagggcaggtgctgtgcagttatcatttaatgaagactgcagtatttctaagcactaacacctgatctggccactgacttagctcttatttgctccctgtttctccctaatctgtttaactatccatgtctgacaaagtcaggccaattcttcagtgtctagactttaactcttgcrttcctttggcttcccttctcttcatcccctaccctgtgaaacctttacctactctgggaattggagtgtgtgtgtgtgtgtgtgtgtgtgtgtgtgtgtgtgtgtgtgtgttgcagaggggacttcaatcttctaaatattttccatccttcttttag

SEQ ID NO: 672044 - DNA, 634 bp, Homo sapiens
gttccaacactgtcccaggttgatgggagagcatgagctggatccacctattgtgtcttaggccaggcaagggttttcattcctttctagatcaccatctattgcccagaggtctgccattttctcttttctagagagatacaagtgttctggaccattgaaagggagattattctatgtatggtagataggatggaggttaagtaagtttttaaagcacataggcctcattcccgctagactttcaataggtaatctcctatctactgtcaatgagaagggcaacagaggcagtgcttcagggcaggtgctgtgcagttatcatttaatgaagactgcagtatttctaagcactaacacctgatctggccactgacttagctcttatttgctccctgtttctccctaatctgtttaactatccatgtctgacaaagtcaggccaattcttcagtgtctagactttaactcttgcattcctttggcttcccttctcttcatcccctaccctgtgaaacctttacctactctgggaattggagtgtgtgtgtrtgtgtgtgtgtgtgtgtgtgtgtgtgtgtgtgtgttgcagaggggacttcaatcttctaaatattttccatccttcttttag

SEQ ID NO: 672045 - DNA, 1799 bp, Homo sapiens
aaccttaacccccaccacacccacagattacacctttttggtatgtacctcattaactcccaaaacactaaatactacagaatttgagatatacttgatctaccaatttttaaatttatctaggttttataacaaatctatatgatagaattttcaatagctgctgccagaaagtgaccatagtttatcttatttatacctcttagctttctttaataaaagaatcattgagtttgcattatgtcaaagggccaaaaaaccttgagtttttattattcattattatgtgtgtttcagttaaagatatatgaaacatgacatttcaatgtaagctttttgaaaaactattaaaattasaatcatcatctaactgcaggtaaagaaatggtccagttcaaccaaaagggaattgttttgtaatgttctttttattctaaacttagagctttagtatgatacatttttactgtttacttatatttgaatttttattttatttcatgtatatctttagtgataggtgaatttaaaataatagcattttctttatggtttgataaggctatcaatttgatcctacttgccagttgtactgcttcattgcgtacatgtttttatatttgatgacattggtgagtcagttgatggcaacagaccaaacttataattgaggcttaaaaacttcatagcaatatcagtaatagaaaaacggggagaaaagattcctttcaaataataagtttcacaaaaaacatgtacaggacatgtctggatgaataattttatttggaaattttgctaaaggttttactattagtgaccaggagaatcaagaaacctggcccgtatttgaaaatcttgtactaatgagctttgtaagctggttcatttgctgtaccttttagttgcccctttccatatcagctaaatgagggaattagactgaaggtctctttcagctcaaattttctgccaattttaaagagatagcatggtaaaagaaagagaacaagattttgtagccaaactgaccaggttcatttctcaccttgactactttctagctctgtgtaacaaaatagtttgatctatggactttaatttcttcatttgttaattaaaattaaaacaacctaattattgtcattgtaagaaaggattgaaatattctatggaaagcatccaattgtgtgtaaggccctaaagtgacagcacctcattgttcaaccaatgataaatgctattattgttattcttctgagtcaatgataggacttttgtcacatttatacataaaaggggaaagatcatttgatgtaaaacttaagactttggtaactgtattgacaaagcaaattctgggcagataaatgtttaaaagacttatgagggagatgaacatttttagcatagagaactggctttggttaacagtggatggcaaattagtcacttgcacataccctagttgatacttcccatttcttctccttactgcaggtgaacgccccttccactgtaaccagtgtggagcttcttttactcagaagggcaaccttctgagacacataaagttacactctggagagaagccgttcaaatgtcctttctgtagctacgcctgtagaagaagggacgccctcacaggacacctcaggacccattctggtaagtgtcaccaactccttgagaagaaaagtaaaacaggaaaacttagaagagtactattgaatgatagtaacatggctttgttatgtagtcggtaatgaccaagacaatcttgttattggtgtacatta

SEQ ID NO: 672046 - DNA, 695 bp, Homo sapiens
ctaccaacactcctttcacagcaagagcaatctaggtttttttttttttttttctggcatgcacttccaaactcctccagcttctatccattgtacagttccaaagacactttcaaattttcaggtgtttgttttagcagcatcctacttcttggcactaaaatatgtattaggctgcccaagccgtcataacaaaatagcacaggctggtccagcatggccaagttttctcttgctggcttataggyggtcatcttctccttatgtccacacacaacctttcctcagtgtgtgcatgtatttatgtgtgccgagagagtgggagcaagcaagcactcagttatctgcttataaggaagttaatcctatcatatcagggccctccataaaaatctcaattaccttagaggcctcatctccaaatacagtcacactggggtaataggacttcaagatataaattggagagaaatcacaaacattcagtccataacaacacacacgtgtaagcacacaaacacacatgtgaatatatccttagcaggattattttcatttgtaaagggtgaatgaaaaatgcctagatataaatcaaaagagatcagatgaagtctttcaatagacttaaaaatacatcccttataaggtcatatgactaaaacagaaaacatattttggttaatgcaatatcctta

SEQ ID NO: 672047 - DNA, 661 bp, Homo sapiens
tgaattttattttcctaagtaaaatagaacagctgagtcastgcaattagtcaccaagtcttctgaatgggtaatcagaggagataacccaatgaaaacgaagctcctgagctcatgttgagtggaacaacaagtgaacagtagcctatactcttatagatggtaggggaaagagagcatcatctaaggactgaggtccatcagggcacatcttttctatgattctctgctttttatcttgcaaacatgtggacagagctttgagtgtgatccaacatctctgtactccatgcagaatcactaatatacacagagctgtgatccactttacatccacaggtagaatataaaggctatatgagtagcccgcactgcaaccaagagtaggagaagtgagtgggtagttgtaaacatttttctttgtctactatacacaactaacaaatctatcttctttttaaaagggcatggtttgattgttcaatttgcaggtaggttgtcttaaacttagaaggctatctttaaatttaaatttatattagaagttattttgcaacgtatactgcctatattatttggtggtctgctatgttttatataatgttttctatgttgctactgtgaccacagtcatcattttaatggcgccatatgattgaag

SEQ ID NO: 672048 - DNA, 1195 bp, Homo sapiens
tttctgcaaaatccagcccaaggtgtgttattctaagatagcatgcgactaagcaagtcagataaaagaaatcataaaacaggtcaggttttaaaaattaatctttattctatggtttaagggaagctaaaccagcagaaaatgaaatcctaacaaagaagaattggaaaatgaagttttagcctcaggggaaatatcagaaaatgactaatatgttaaaaaaaatagagctcagattgagagtgtgaaaaaaagaaargaatggaaatcactaatcaaaaatgcatgacattgtcctgaataataaatgatgtgtaaacactgaactaatatgagctgtgtacattgtgatttttttaaaaaaatttagaaaatgaaaagaaaaagcatgaaggataagagaaaatatctggtattgaagaggcgaataaatgcatttgtgaagtgactggatgatattttggatacataattggaacaagagaaggttccttttatattaatggaagggacaagtgctcccataggggttctgtgggaaggttcctgttactgtggtttaagatgcccttttacctaaagctactggtctcaaccatttagaaccaccttggtttgctgccttagaactatgagttattttggaggctgggtatctagaaaaagattctggcaagatgaacatgagttcaaccaagttatacatacctttggtacaaagactactagagttccttacgtcttggtgattttcctagtgaatttgtagggtgttttgtattcttcagaaaaccagctggaaaacatttcagaaaactctctcagtagccaacaataatcccttaaacattgttgagaaatcatgggagggtctatggggtttaaccaagtggatttggtagcttaagtcagtattaacggcaatcaagcaagacctctgtcttcatatcctggtggggagtggccagaccctaggttggacaactgtaagggaaggttgcttgctggctaagtggcatctcactgtccattctgaagttttctataactatggacaaaattatataccatgggctgtctgtgaataaatatggagtagttttgtttctctttgcttcattctcctgaaatgaatatttttcactatggaagaatggaagcaagatatatatatttcacttcattcctctttcgg

SEQ ID NO: 672049 - DNA, 1195 bp, Homo sapiens
tttctgcaaaatccagcccaaggtgtgttattctaagatagcatgcgactaagcaagtcagataaaagaaatcataaaacaggtcaggttttaaaaattaatctttattctatggtttaagggaagctaaaccagcagaaaatgaaatcctaacaaagaagaattggaaaatgaagttttagcctcaggggaaatatcagaaaatgactaatatgttaaaaaaaatagagctcagattgagagtgtgaaaaaaagaaaagaatggaaatcactaatcaaaaatgcatgacattgtcctgaataataaatgatgtgtaaacactgaactaatatgagctgtgtacattgtgattttttwaaaaaaatttagaaaatgaaaagaaaaagcatgaaggataagagaaaatatctggtattgaagaggcgaataaatgcatttgtgaagtgactggatgatattttggatacataattggaacaagagaaggttccttttatattaatggaagggacaagtgctcccataggggttctgtgggaaggttcctgttactgtggtttaagatgcccttttacctaaagctactggtctcaaccatttagaaccaccttggtttgctgccttagaactatgagttattttggaggctgggtatctagaaaaagattctggcaagatgaacatgagttcaaccaagttatacatacctttggtacaaagactactagagttccttacgtcttggtgattttcctagtgaatttgtagggtgttttgtattcttcagaaaaccagctggaaaacatttcagaaaactctctcagtagccaacaataatcccttaaacattgttgagaaatcatgggagggtctatggggtttaaccaagtggatttggtagcttaagtcagtattaacggcaatcaagcaagacctctgtcttcatatcctggtggggagtggccagaccctaggttggacaactgtaagggaaggttgcttgctggctaagtggcatctcactgtccattctgaagttttctataactatggacaaaattatataccatgggctgtctgtgaataaatatggagtagttttgtttctctttgcttcattctcctgaaatgaatatttttcactatggaagaatggaagcaagatatatatatttcacttcattcctctttcgg

SEQ ID NO: 672050 - DNA, 605 bp, Homo sapiens
tatgcactaaccatccactttgtgatacctacataccttcattcccttcccttttccggggatgtccacccctcatccttagtgaacaaaaagcagaggtggaaataagaatgattgagtggagtcagtgaggaaaaatggcagtggaggagcaagctggaaggatgtttgaatctggaaagatgtttggacgtgtcggaattcaaataacctgccaatgagtttattatatgctctgcagctatatctatatctacacagtatacacacactattacaaagatcatatcctggactaaatgtgtttccttttttcatacttttttttcctccagagtaaaaattgcatcatttaaggtttacaattttttttagctttctgtcatccctaatttctctgtagaaacataattatactgccaaaatcttctgatatatgaatatacgcatatatgcacatacatatgcatatatgtatgcatatccacactgcctggagatactttcctcactatgtatatatgcgtgtatatgtataattgtatatrtgtgtgtataggtatatatgtgtgtatgtgtatatacacacatgtgtatgtatgtgt

SEQ ID NO: 672051 - DNA, 637 bp, Homo sapiens
tagaagacctagtttacatatttgtcggagtctcaaaatggaaactgaattctgtccatctgattgtgtcatacacagaatatgctcaataaaaaccttggatagtgataaaatatattctgtcttgaattcctttttttctttagggttctgtagctatagctggtgctgttattcgctggctaagagacaatcttggaattataaagacctcagaagaaattggtgagtgtgttctaacaaaagkttagaaaatctgaaaaatgacacatttcagtattttatctctgcaaagtaaatacttatgctttgccccaaatgtgatccataaattatatggatccctattatgagtttgacttatgcaaaagactatcttgtgaagatttataaaacaaggaattgacataattagtggtggttgttaataaactggcaatgtagggcataaaaattacccaagtgtaaaattgaacactggagattgccagaacctgcagatagagaagttgagttaaatttatctgatgagaaagagctttaactcttagattagagtgagcattaaaactctggtacctataatttaagtattaatacggctgttttcagtctatagataattagtttgaactta

SEQ ID NO: 672052 - DNA, 1380 bp, Homo sapiens
ttgaagtcacaataaagtatattttcttttattgacataaaacataaattttaaatgttggcttgttaagaaaaaaattctcctggtaaatattatgcataaccgttgcccaaaaatgtatacagctgttttccaacatatttatatacacagtggttcacttaagaccagccctgttagaaccttctgaatataatgtgctcttaatttataaatgggctaccctcagtgtataaaatatataggcatgtatgttatacatacaaagtaaaaaatataaaaaggaaagatggaagaaaaaagaaagtatcttttcctataagatccagacagaaagtcattataattagtgggaccatggaaaacatctgaaggatttcagttttggcaaataacttttcagaaaaatatccaagctgtgagaacactaaatgtctattttaataatttagtagaggtttctattcaaacattcagtgaagatgttgctgtcttcaactatgtagaaaagaagacttttagggtgtctgttaaaagcaaagagctgctgatttttaacaggttagtaataaccttttaatcaagtatatgtcatgcagagactcaaatcctggtccaaaagtgtttgagtatgttcratggaagattccaatggtaaggatccgaattcttcctacatcttagagggaatggagcaggatgttatggcaatggagggggtcagccccaaaggtagctggcccaaccttaactgtggatgtttaaaaaaaaaaaaaaccaccaaatatttctatagcattctttttgctgcattttctttattttaagccacaggtctacttggagggtcatgcagcaagtggcttataaataaaatcaaagtctatgaatagtgtcattgcattaagagacagaattgctgggttctttcattatgtaaaaagctcacatcttgggaatccatgagttggtaggttttatggaatacctgaaatggggaacaaaaaccatatatgtcaataatacatgcatacaattcaggagttaaagcaatgcagatgattcaatcatttattaagctagaaagtccatatgatttctaaatcatgcctcacaattaaaatgcaacaaacagggccaattccaaaattaacaaatattgccactgttgctaatcgtttaccaaggcaaacaatttccagccctctcaaattgcagtgtatgtcaccgaagagataacctacatatagtgaccacatgcattttagaagtctaagactctagacacatagcccatcttttagcttagagagatgcaacctgtctcaattttcatagaaacaaggcctttcatgaaaccctaatcatgaattttttttt

SEQ ID NO: 672053 - DNA, 1716 bp, Homo sapiens
ttttactctgcctagagtttgacaggaggagtcaatggaggtgtccactgtacagatgtaacaaatgcaagtaggactatgcttttcaacattcattctttggaatgggataaacaactctgcgagtaagttctgttttgctctaaatatagttttcccaatacactacctatttataaccgaaatcttaatattttcagatgtcagtggagcaccaaaatttaactgttgatatttcaactacaatatgcaaatctatgttatgtgttttttaaagagagactattattgcatttataataaacaggccaaattaattattcttcacggaagtttaggttcctttataaaagtactttggtttctgtgtgctttctaatttttattgattggcttgcataaagttagaatgttaaatatctaagaatacagctatgttctgttggcttacgtatttattgctatctaactccatgctcaaaaacatccatttctaattgttatttatgctttttgcatttaaatacatataaatgtttctagatgtctatttaaaacagtgttaaatacccaatcttcttgtttttcagattttttggaattccaatggaaattcttccaaatgtccggagttcttctgagatctatggcctaatggtaaaaaacaaacaaacaaacaaaaaacacaccaaaaaaccaaaaaacaaacaaaaaaaaacctaataattaaagtttttttattacaaaacaagtttactattcataattcaaaagtcaactgtgttatgttttgtgacttaaaaactttacagtcctttttacaatggatttgcatttataaactttaattggtttttctttgagtattattatttttaaagaattgatgggatactctaactttagatgttggcatgagccaatttattctttgaatccaaataactgtttagtggttgtgatgtctgcttttaatttagcggagagactctgcatatttagtagtgttctttttcccgttgaatcttttttatggccaagctatgttatatattagattctttgcctgagcaaaatttagcaaagaaactgaaagcaaagagtctgtttctgatttgggattgctaattaaactagtttctgtaatggacatttttacttttgatttcactgaaatccagtaaagacatagcttcagcaaaagtgtgcctagcatcattaagagtctgtggttaaacatcaggaatgaaaacctctaggaggatttgcactggtgtttgagcacaaaaatctggaatttatgataagactcaggaataagtctgataaattacaaaaagtattgcttagacatttcatgaaagatatgagaaacttcacttacaaagttaataataatatagatgaacactaagtgctctggataaagcttgagcaagaatttttaactgttttatttataataaagctttttaaggcaacatagaatttcttaaggaagccatagtcactgcttatctacagtaaaagtgctttgatcatttcatagctgtctgcaaactgacttgggtcaaggaaaaagaaacgatgcttgagaaatagtttcacaggatggttagaaaaaaaaacgtggaactggcctagttttctcttgtatttaaaatattatgcttctatccttctytctcccccttgctgactatagaaaatctctca

SEQ ID NO: 672054 - DNA, 601 bp, Homo sapiens
tctctactaaaaatacaaaattagccaaatgtggtggcgcatgcctgtaatcccagctacttgggaggctgaggcaggataatcacttgaaactgggaggcagaggttgcagtcagctgagatcatgccactgcactccagcctgggtgacagagggagactctatctcaaaaaataaataaataattcctgttttaatttctcatgtaataaatataatagctattacccatgttaacaaaagcattttagagtctcagtattttccaggaatgtcaaaccaaaaagtttgagaatcactcatctagttttatgtcttgatatcctgggccctgtccatttccacatatattttagaatcagctgtgatgttccacaagaatacctgttaggattttgattagaattgtgttgaatcggtctgggaagaattgattttttttttttttttttttgctacacctactataatgggaatttgaaatctttataccattgaatcctctgattataaacattatttctccatgtgttttggtctttaatttttttctcaatattgttatataattttctgtataaaytatatttgcatattttc

SEQ ID NO: 672055 - DNA, 1619 bp, Homo sapiens
ttacaggcatgagccactgcacccagtgaaaccaagtctctactgaaaaaaaaaaaatacaaaatttagctgggcatggtggcaggtgcctgtaatcccaactactcaggtggctgaggcaggagaatcacttgaacccaagaggcagaggttgcagtgagccaagatcrggccacactgcgctccagcttgggagacagagtaagactgtcaaaaaacaaaaagaataagcttagggagtggaaagttgtgacattcaagatttggcctggggaaagattgaaaggggtgagatgaagaattgctgattttcattattattttttagtttaaaaaaacttatttaaaaataaatcacatcttgataaaaaacatgcctttctttcctttcttccctttcttccctttccttccttccctcccttccctcccttccgtcctcttccccttccccttccctttccctttccctttccctttcgccttccttccttccttcctctctctctctctttctttttttgctcaaaagtgtatttggacctgggaataaacttttctttcgctgtttctactgtgctatctgtacgcctaggggaatgtgtgcagaatgtccccattgccgctgtgtgtggggagaatgcggaaaggaagcgcaggttgaaatttgcaaatgttcaatccccctacctcatggggataaagccttggcacctccctcttacagttactgaaatttttaaagaaataatgcttgtgaaatgactggcatgattcctggtgtgtcataacgagccaatacacataattagttaatgataatatgggccaggcatggtggctcaagaggatcacttgaggccaggagtatgagaccaccctggccaacatggcaaaaccccatctctactaaaaatacaaaaattagcgaggcgtgatggcgtgcacctgtaatcccagctacttcagaggctgaggcaggagaattgcttgaacctgggaggcagaggttgcagtgagctgagattgtaccactgcactccagtctaggcgacagcatgcaaccgtaccctgactcaaaaaaaaaaaaaaaaaaaaagaatgctcaatcacccaggggaatttgcctacagaggggctaggtcatgcttggtcctgcgggttgacaagatgtccgcaaaggtctagatatcttgaatggatgtctaccatgattttaatctcactcagtagacacttcccactcccggaacaggagcagtggcaacaggttctaagtggagactcatcagagtgtagcaatcagctttcttatcagcttccctgatcatgcattccttcaggtgggcatggctgcaaaagcaaaggtcaaaggcttctgagaccctcataagatcagaaacactatttacccaaaaccctgccacccaaaggagactgcctgatttcccaaggcaggggtgtgcttggggctcattgtggcttttttctttctgttcttctcacccccaaacattgcttgttgacatttcatagctcactctgcctgagacttggtttacagcttccttagataaaggtgtttggacaagctagctctttttccagtcctagcttga

SEQ ID NO: 672056 - DNA, 1619 bp, Homo sapiens
ttacaggcatgagccactgcacccagtgaaaccaagtctctactgaaaaaaaaaaaatacaaaatttagctgggcatggtggcaggtgcctgtaatcccaactactcaggtggctgaggcaggagaatcacttgaacccaagaggcagaggttgcagtgagccaagatcgggccacactgcgctccagcttgggagacagagyaagactgtcaaaaaacaaaaagaataagcttagggagtggaaagttgtgacattcaagatttggcctggggaaagattgaaaggggtgagatgaagaattgctgattttcattattattttttagtttaaaaaaacttatttaaaaataaatcacatcttgataaaaaacatgcctttctttcctttcttccctttcttccctttccttccttccctcccttccctcccttccgtcctcttccccttccccttccctttccctttccctttccctttcgccttccttccttccttcctctctctctctctttctttttttgctcaaaagtgtatttggacctgggaataaacttttctttcgctgtttctactgtgctatctgtacgcctaggggaatgtgtgcagaatgtccccattgccgctgtgtgtggggagaatgcggaaaggaagcgcaggttgaaatttgcaaatgttcaatccccctacctcatggggataaagccttggcacctccctcttacagttactgaaatttttaaagaaataatgcttgtgaaatgactggcatgattcctggtgtgtcataacgagccaatacacataattagttaatgataatatgggccaggcatggtggctcaagaggatcacttgaggccaggagtatgagaccaccctggccaacatggcaaaaccccatctctactaaaaatacaaaaattagcgaggcgtgatggcgtgcacctgtaatcccagctacttcagaggctgaggcaggagaattgcttgaacctgggaggcagaggttgcagtgagctgagattgtaccactgcactccagtctaggcgacagcatgcaaccgtaccctgactcaaaaaaaaaaaaaaaaaaaaagaatgctcaatcacccaggggaatttgcctacagaggggctaggtcatgcttggtcctgcgggttgacaagatgtccgcaaaggtctagatatcttgaatggatgtctaccatgattttaatctcactcagtagacacttcccactcccggaacaggagcagtggcaacaggttctaagtggagactcatcagagtgtagcaatcagctttcttatcagcttccctgatcatgcattccttcaggtgggcatggctgcaaaagcaaaggtcaaaggcttctgagaccctcataagatcagaaacactatttacccaaaaccctgccacccaaaggagactgcctgatttcccaaggcaggggtgtgcttggggctcattgtggcttttttctttctgttcttctcacccccaaacattgcttgttgacatttcatagctcactctgcctgagacttggtttacagcttccttagataaaggtgtttggacaagctagctctttttccagtcctagcttga

SEQ ID NO: 672057 - DNA, 1619 bp, Homo sapiens
ttacaggcatgagccactgcacccagtgaaaccaagtctctactgaaaaaaaaaaaatacaaaatttagctgggcatggtggcaggtgcctgtaatcccaactactcaggtggctgaggcaggagaatcacttgaacccaagaggcagaggttgcagtgagccaagatcgggccacactgcgctccagcttgggagacagagtaagactgtcaaaaaacaaaaagaataagcttagggagtggaaagttgtgacattcaagatttggcctggggaaagattgaaaggggtgagatgaagaattgctgattttcattattattttttagtttaaaaaaacttatttaaaaataaatcacatcttgataaaaaacatgcctttctttcctttcttccctttcttccctttccttccttccctcccttccctcccttccgtcctcttccccttccccttccctttccctttccctttccctttcgccttccttccttccttcctctctctctctctttctttttttgctcaaaagtgtatttggacctgggaataaacttttctttcgctgtttctactgtgctatctgtacgcctaggggaatgtgtgcagaatgtccccattgccgctgtgtgtggggagaatgcggaaaggaagcgcaggttgaaatttgcaaatgttcaatccccctaccwcatggggataaagccttggcacctccctcttacagttactgaaatttttaaagaaataatgcttgtgaaatgactggcatgattcctggtgtgtcataacgagccaatacacataattagttaatgataatatgggccaggcatggtggctcaagaggatcacttgaggccaggagtatgagaccaccctggccaacatggcaaaaccccatctctactaaaaatacaaaaattagcgaggcgtgatggcgtgcacctgtaatcccagctacttcagaggctgaggcaggagaattgcttgaacctgggaggcagaggttgcagtgagctgagattgtaccactgcactccagtctaggcgacagcatgcaaccgtaccctgactcaaaaaaaaaaaaaaaaaaaaagaatgctcaatcacccaggggaatttgcctacagaggggctaggtcatgcttggtcctgcgggttgacaagatgtccgcaaaggtctagatatcttgaatggatgtctaccatgattttaatctcactcagtagacacttcccactcccggaacaggagcagtggcaacaggttctaagtggagactcatcagagtgtagcaatcagctttcttatcagcttccctgatcatgcattccttcaggtgggcatggctgcaaaagcaaaggtcaaaggcttctgagaccctcataagatcagaaacactatttacccaaaaccctgccacccaaaggagactgcctgatttcccaaggcaggggtgtgcttggggctcattgtggcttttttctttctgttcttctcacccccaaacattgcttgttgacatttcatagctcactctgcctgagacttggtttacagcttccttagataaaggtgtttggacaagctagctctttttccagtcctagcttga

SEQ ID NO: 672058 - DNA, 643 bp, Homo sapiens
ttttttttttttttcttcttcttttttttaaaagattccacagctcggatgatttctgtattgtcgctttatctcaagtgtttaaagtgttaagccagatatttagaaatctgactttttctttaatccttctctatactatatagctcttttcaatctaaaatttatatatgttatttattcaattacagtatcttctatttattgcaagatttatcccctttcagtttctatttttgtgttcttctactagtttcaaatcaaaacaactgatatggtacataatcatctctcttttcctctttcataattttttttgtttctttatctatttgagctctattcttgaatgtttctttaacattatagattttatacaatttatttcaacagtaatacttctaattttcaaggtctatttattattctttttaaaatagtatttttgcccagcaccctcttcatctcctccaacttacactgagattttgtgatgaawttttttttacattttcatttaaacttttcttcttaaacttcttgtttcatcaaacatcaaagggatttttcgttgctgtttttttttgtagtctttgttcttcatgatgcatttttctccttaatgtgtggtgtgtggtgattc

SEQ ID NO: 672059 - DNA, 610 bp, Homo sapiens
gacatgggtctgttgaaatgatcttacattaatcagattttttggaattatttatttatttttrctctgataaagaatgggaaagtctccagtcttattgttggttatttcttctaatgttataaattttaaactgtttttgtcctggtacatttgatactatgaaaaagctttactatgatttgtttttgtttttgtaattcttcaatgtgtctcatatttcattaagataattgtttttaatcactcaaaaattatttttttcaataaaatctagcttatcaggtactattactgcaaaatttaatttatatatttttaaatcttcttgatatagcttcttaaatttggattttaatttttaaataatacatcacacacacacataaatatatatatatatatatatatatatatatatatattcaatctgaaagccttggaatatagtgtgaaatttttaatcatctggccatatttcaaaagataatattcttagttgtacttattttatgcttcctatttctgagcttttattcttgagttttattttatttttaatgaagacttcatttgcttttattgacttacacttgcagtagtttggaaa

SEQ ID NO: 672060 - DNA, 635 bp, Homo sapiens
tgttttggttggaaaggcttaggacctggagcagtcttgagttctgagtgcaggttgcctgaaacccagctagctgctgttagcagaacactgtaggaatgagggtgcaagacttgccttgccaagagtgtgggagctgaatggggcttactgccacctgccacccccttatccccatgtagattcatttgtgtagcaaaggtagctgtgctcctccctggaacctcaccttcatggtcagggaaccaccctctgatctccattggggccactgctcgcacccacatgtgaggarccagagcacacagttgcctgacccagccccagtctggctttgcccctccatctgccctggtagggtaacacaatgattaagggattttgggagctccatggtccctcacattgcctgagacaacagagtacctcccttgggtaacataaggcaagtgcaaatcccatggctaccactgcagctggcattcttttgcaaacacctcctcatggctggaggccaactggaacagcccattacaacatctgcaggcacaataatatagggctcagtaaggagaagacttttgtgcaatctcagctgtcaccagtgcctgcatcactgaatacattaaggctaa

SEQ ID NO: 672061 - DNA, 3012 bp, Homo sapiens
tattcagttaatgaatttaagtgttcacatttgggccttgttctacatagtattgtcatagaaccaaaacacatttttatagtctgaccatcttctttaggtagtaaaagcaaatgtctttaaaagtaggaatttaataattcagctggtagaagttctactcattcaaaaacaacttagaaacattttattttctatggtaatttttttccttaaaacttggtttttggccttaacaatttccttctcatcatgtgcttcaagaattcaaagcaactgcagcatgtggttgccaggatacatgtgcagacattctctgatgaaagtacagtgtaacagcttgatttgtcatcaaaatgaggaaatcttgagagaaaagtgatttggggaatggaaactagaatttacaaatgctgattttcctaagttaacaagacaaacatgtaacaaattgataccatgcacatgtattcatgtgtgtttgcatatctgtatactgataattatatgcatacatttattctaatgtgaaagttacatgacaagaaataatagtttataatgaatatgtgattaagagtttgcatttcctatacagaatcaacagataattaaatttcattatttccggtgttatttttgttatatctaatcttaacagtgtataaacaattgacttatttttcataattaataatcattacctcgacagaatttccagaaaacttttaacctattattgattatattattgcttaccagaacagatcttattttaaaagactatttagtagtgtcttcaaatgaattccagaattgtaaccctgtgataatgctgtatgtaatatccactagtcaaagatgtttggaggatggagttctctctaatcctaaaaagtatttgaacatatgaataacatttctctatagaagaaatattttaaatcttttttcacagcattgacactatacagaaaatcttgtatgtaatatactgaaataacaaaacagtttttttctcattgtaacttgattaattttgttgcatataattcttaattttatggttatatgtggctttttctttacctattaactttgaatgaagtgaaggtggtcaaggatgatgatatggtttggctctatgtccccacccaaatctcatctagagttgtaatccccacatgtcgagggaaggaccaggtgggaggtgattggatcatggaggcagtttcccccatgctgttctcatgatagtgagtgagttctcatgagaactgatggttttagtgtggcacttcctagtttccacactcattctttcctgctgccttgtgaagaaggtgcctacttccccttaggccatgattacaagtttcctgatgcctccccagccatgcacaactgtgagtcacttaaatctctttcctttataaagtacctagtcttgggtatttctttatagcagtgcaaaaacatactaattcagataattaataaggagggctagaaaatgagaggagaaaaagaggtttaactttttaatatattaggaaattgagatcatgaagatataaagtgacttatgggtcatttattgcttaaaaatgcagacattctgtaaattaaattccttcgttctctgccctcaccatgttttcaaaagagggcaaatgtagacatcttatttttgtgaagattagaaaaactcttgaaggaatttaagtcatgaagaatgtctgcatcaaaattttacataacaaatagacatttaattgaggatattaatttctgtactctagatgctgacacataaccatttaacatccatgtcattgacagatattgatttcactaccgcaagctataacatataaaaatttaattatggatattcatttccttcttttagtcctgatgtatacccatttagctatcacatcacagaggcatatatttttaccaattcaagctgtgaaatgtcaaaattaaactgcaaacatccattgccttgctctagttccaagcccataaaaacaagccaccaaactgtagacaaatagatattttattgtcaagatacttataataaaagtatactttcagtcattaataaatatttaatctttcaaagaataactgtaactataaatttaaatatgaccaattatctaacaaaatacaatatgtaattcattcaataccagttgaaaataaaacataaagtaaaaattaaattttttgtgaaaatataacatttgtattatgaaacgtcaagtattggagaaaagcacagaaaaaagttgaaaatccacaccaaaattctagcacttggaaatagtctttgccaaatttatttacattatagagcacataaaaagatataaaggtatagatagctagttacctaccttgataggtggtagatagatgatagatagatagatagatagatagatagatagatagacctagtaaagaaatataaacagaatactgattgtttaaaaagtatttttagtaaaagttattaaaatgctatttcttctcaagaaaatgaagctaaaaattgataaattaataaattttagaatattcttgtttcacctcaagatatagaaacactataaattagtaaaatccatttaaatttagaaaacatgtacccaaggctctgcggccgtgcaatggatcaccagagagtattctaagtactgatctctgagtctcatcctgcataggtcctgatttaattggtgtaggagggtgtgactggcttatcaagagagttaaatgtgattctaatgcgaagccagagttgagaacctttgctctaaagcaggaaaagttataatgaaagcctaaaattatgtgaaattataaaaattagaatgcttatgatattaagtagcttttaacattgttaaaaaagagaggaaattagcagatttacawttctaccttaacattattgctcctgcatctccttaaataaatttactatgcagcaat

SEQ ID NO: 672062 - DNA, 620 bp, Homo sapiens
aaacttggcaatctttctcctcccttcaatatgtattattaatgatttctccttcaccatcagcataagatcagcaaaaggtatacaagcactgccactcaagagattcaagttttgctcaaagtgctgtggatgaagctatagttttttgggtagtgcacatattattggtatgaatattgtaagtgaataacttccatactaatgctctatcaatatcatatagacattattttawttctcattagtccattataacagcaatgataattggaatactaattggaatattatagaaattctatatgagacttttaaactacaaacaattttggtttgtcaggctataagaaaataaaatttatttgattttccttaatagtgattatttaaaaagataaacaaaaatatcatatatcataactgtaggatacattttaaagtagtatatttagagggaattttatagccttaaaaacttgtaatagaaaagaatcaagcctaaaaatgaactagctgttattaactttaagaagttacaaaacaaacaagctcacaatgagaagacacttcaagacacagaatcactgagtcgaaaatagatactaataaaacagaaa

SEQ ID NO: 672063 - DNA, 542 bp, Homo sapiens
tttgttgctgatgtgcctaataatggacaagaagttctggatgtggttatcactaagccaaaccgagagcgtcaaaaattgatgagggaacaaaacatactggcacaggtgaattttttcatgtactaaatttgtatattttattttctgaattacagtatcaggaaaggccttgtattagttatctattactatgaagcaaatgatcccaaaacttagtggctgaaaacaagatacttcttgtctcacagtttctgtggagtagygatctaggcgtggcttacatgggcagatctcactcagggtctctcaccaggctgcagtcaaggtgtttgctggggctgcaggcatctcaaggttcaactgagagaggacttgccttccagccctctcacataggcatctctcaggagtgcctcaagacaaggcagcttgctttcttagaactgagggatccaagagagaactagagaggacgctcaggtagaagctaccatctttgtagaacgtaatcttagaagtaacatcagttctactgtgtt

SEQ ID NO: 672064 - DNA, 1201 bp, Homo sapiens
caaatgctagcagagggaagaaatacgaaagccactcaaatggtatggagcacgtaacccacagcacgttaacactgtaagtcaaagagccaaccttcrcacatgagtccatggaaatctggcaggaaatcagtctaaacctccacttacaatagctgtataaatagttttgaaatgttttgctttgaacctgtggaggtactttctacaatatttgtatcaggaggccactcctgaaccccagaaactgactttaggactctatttagggctatcatatgtaaagttcaagctatgtcttggccagcagtatcctttggcaatggtggaaaaaaaaaattggtttttaatttctccttcctcctaaagatgtcttaagatttaaatgaggcaagtgcctgtcacaaggcaggcattcaacaaatggctctttcacggtagcctgtaaaaaacacctcataaccatagggaacatggttaccaagggctttattctccctacgtggagaaaggtggggagggaaagcctcggggacttttgtttctctctttatgacacaaagtggatccagaagagttcaatgaagacaatggtctctgaaacagaagagcaagctagaaccttcccaatgataaaatggaaagtggttaaaaaagaaactctccttaggataaggggcaggcagacaaggggccattagccactagaaattagaattcaggtcagacacagtggctcatgcctataatcccagcactctgggaggctgataaagggggattgcttgaagccaagagttcaaggccagcctgggcaacaaattgagaccctgtctctacgaaaaaatttttttaaaaaatcagctgggggcagtggactacaagtccgagctactcaggaggctgagacaagaggatcacttgagcctaggagttcaaggctgcaatgagctatgatcacaccactgcactccagcctggaggacaaagcaagaccttgtctcttacaaaatacaaattttaaaaaattaaatataatagaattcagagttgatgcagggagaggaatgcattcattagctgaaaatacaactctaggttgttttcgtttttcagtttccctaagaaatgcatcctgaaatacagtgtttgtataaaactctttatttttagaagttttaaaaaggaatgtgttttaaga

SEQ ID NO: 672065 - DNA, 1356 bp, Homo sapiens
tttatttcattttctctagactgagatccttgcagagaaactgacatgcacaaaaaaatgtcctttgagttaaattggtcactttataagagatccagatttctccccaagtagagaaatttgcgcagaatgtggaagacaaactacccattggaaacacatgcaaaatcactcagtagggatactctcctaaccctgggcaagtgaggtcttcttgcagtaaatagtttccactgaggatggacttagaatgaagctaccttgaggggacacgtaggctactagtattcaggaacaacctgccagagacaatgcaggaagtgtgtgtgaaatgacccaaaagataagagggtagagaaaccctaatggaaggacagatagtgtgaataaaggtagattctgaaaagaatgagctagcacattgtgtaaagatgaggagagaattagggctctggaggagagatctgaggaaaccacccagaatatagcacagagagatacaaagaagaagaatttggatgagtcatgaaaagcttggaggacaggctgagaaggtcccgcagtgtctaactgaattctagaaggaaaggctagggagactggaatagaggccatatgtggaggaatgtgggtgagaacttgctaaactgaggaaaaacactcttccccaggtggaagaggcacactgagttcagagtagtgatggtaaataacaaccacatccaccactagacactctttggtgaactatagggtattaaagacaaagagaaaaattctaaaagcagactgggacaacaaatctgtatttgtagcaggaaaaagcatgaggttcaggttttgactgtactgcttgctgcctgtgtcatcttaagtaggtcacctacctgcttcgagcctcagaggacatctgtcattggctaatgggagtagaagtggctaataacaagaacaatgactaccacacgaggttttgtgagccctgaaatatttccagagaataaatgtaaaagcattttaagtcattaaacaaatgggccgggcatggtggctcacacctgtaatcccagcactttgggaggccaaggcrggtggatcacctgaggtcgggagttcgagaccagtctgaccaacatggagaaaccctgtctctactaaaaatgcaaaattagccgggcatggtggctcatgcctgtaatcccagccactcaggaggctgaggcaggagaatcacctgaatgggaggcagaggttgcagtgagccgagatcgcgccattgcactccaacctgggcaacaaaagcgaaacttcatctcaaaaaaaaaaaaaaaaaaaggatagtcaccttatgataga

SEQ ID NO: 672066 - DNA, 1856 bp, Homo sapiens
aagaagccctccgtggctccagtccagtgaacacttggtagcagataagaatggaccatcaggaaggaagagatcaatagattcttaaaaccagagcaaggagtttagagcttgttctaggtttgagaggaagcaggagagtcacaggatctgatttatgctttaaaaatatcaccttggctgtttgtggggatcagattataagatggaaagggggggcacggagtgctgttaagaggccgtcctgattccaaaaagagaggctgagggctcgcaatgtcaccagaacaggacagattcctcttcttcagagaggtctgccaaatccttaacgctaagcctcctattttgaactggaagactaaaacttcaaattaggctggtccaacgtggtactaatgtgagagaagggtgtggctaccagggcatccaagaggaagtgggcagctgggaggcaacatccctttaccaatatgctccaggacagaccatacagtgaaaagtcagatgatccagcccctgggctctcaaatctcaggatggccatgcatgaactgaggcctcggttgcttgtctggtaaagaagaaccagaatgcgtgctgtcaggctttggggtggatcaaatgaggagatctatctatcttcaacaactggcaggcatttactctcatgacaatggctttgcaggtagctaaagtggtctgcaagggtaggaaggaaatatcacctcccacaaagaacttctgcagacagacaggatgtggggagactgacttcctctcaggagtagattaaactaagatcctgagaagccaaacatgttggaagttctttcccctttatgtctttattttccctaagattcctaattgattacctgaaaagggagccaatactatacccaatttgaattgtaatttaatttcctaacatttattttggttattgtttccaccaaaaaatgagatagcttttatactcattcactactgtttaaaacaataaaaaccctatctttcccagggcacaactaagaagaagccctgaatggaaatttaaatatttttaagtaaaaaaaaaaaaaaccttttagatgactatgcattatattctataacagtttcaatcactcttcagataaagtgggaatcttaagtattctttttttttttttttttttttttttgagatggagtctcgctctgtcgcccagggtggagtgcagtgggacaatctcggctcactgcagcctccgtctcccaggttcaaacaattctcctgcctcagcctcccgtgtagctgagactacaggcgtgtgccaccatgcctggttaatttttgtatttttagtagaggcagggtttcaccatgttgatcaggctggtcttgaacttctgacctcrtgatctgcccaccccagcttcccaaagtgctgggattacaggcttgagccaccgtgcccgaacttaagtattctttaataaggagtgtaatttgggtttttttgttcagtacccagggtatattttccatccctggatccatcccttggaatttcacttggtccctttgaaaattaagttaggcagttgagacacatctagcagaatcaagttagtgaatgggatcaatttccaagccacctccaaagtcaatttgtcttagaaaacaaaaatgaatatattcacattaaaaatttctataggtaaaactagattcctagctcatgtttcctatttcaagagaggtgctatggcagagtagttacaacctctgaagctaaactaccgtctatttgaccttggacaatttatgtaacctgtcagtttccagtttcctcattagtaaaagtgca

SEQ ID NO: 672067 - DNA, 1409 bp, Homo sapiens
cagcaaaaaggcaaggaggagtctgtttcaggaacctgaatcaattcctatgaaagccttgttcacttagaacaaggctttaatttgttctgtttccatatcaaggtctatgtcatgaaagcagggccaagtggcagtcctggcacgatgctcattgttctaaccaaagggccaatgaacccagcacctatgctggccttgacatcactgagaggtacaatgaagtcccttggcacaattttttggcaggttggtgagacagagaaaggtgggtccttgccatgcagatgggcaaatttctgaaaccctgttgagtgttaacaatctattttggtttgtgcctcaggagagagctggatatcgttggctccatagacagccagggccatggttcttatcttttccacaattggaagctgaacatcatacgggaaatggaatcaacttcttttacttgcagcttctctcaaagcccaagccaagtccgcaaccgttttctaccaactgaccagtgatagcaagggactgcatcaaaggcaccagcccgttttgtgagctcacacaccaagtcaatctcagcaccggtgtggawcttgaagaccttcagagtcaccataatgggaaccccaaagagctgagcaatctgaatttgctgctagaggttacggcagccatctgccaccaactggatgttcttttctttatgttctttcttcagaggaacaccagcagttacacttggcccgccactgtgcatcttcagagcttgcaccgttgccaccaacacaaccacactgggcaccaagctggaagcttgacacttgttgaaaaatttctccatttcaatgtcagcaccaaagccagcttcagtcactacaaatccttcttcaccaaccagtttcagggcaattttgtcagccaacactgaagaattgccatgggtgatgttagcaaaagggcccacgtgcatgaatacaggtgtccattccagggtctgcatcagatggccaccaccatccttcccagccatgtcttcatgtctgagaggctgttcataagggccagcaccaccatgatctcgctggccaccacgatatcaaacagcgtttgccaagaggagcctttctctgtgtttgcctgcctgatggttattttttgtagaaatcagttgtttgtatttttttaattaaatttttttatttccataggttattggggaacaagtggtgtttggttacatgagtaagttctttagtggtgatctgtgacaaaacggggcagcctgtggcactgatgatttgggggtgactggtgctttgacagttttgatgaaagatgcaatgaaatcaaatctgtgagattttggtgcacccatcacccgagcagtatactctgcacccaatttgtag

SEQ ID NO: 672068 - DNA, 1126 bp, Homo sapiens
taggcttgtcaatataatttcctaatttatcaaaatacagcacaagttaatgaaacaagagtatgaaagaagaattgcrgtttccataaagctaatgtgaatgcttaaatggaaaataaaagcaggttccaaaattgttagtttagtagctgtgagtcttccaactctacaagattaaacaaaaatgaaaaatattgaacaacatttttagacagaatgctatgcatctgatgctaaattctactcttaaactaatccaaactgcaaatcacagagaatgattgatagctatgctttcagcaagacagagtagaattctatttgctgaaacctacacaaagaaatgttctttagtctatttctattatactgaacaaattacaggtaaaaatgaaatattcatgttacaaatgtatcattttttataaatactgattaacagacatttccaattaacctatccacttccattcctgaatatattatgactgggcttttcatagcaatatctccacttattccactatttattgtttaaatacatactgagcatcttctactctctggcttgcatgccagacacttgggagtcaaagtaaacatacccacattcccagagcgcacagcctgtgaaggacactagtgcaggaaagactgcctcccaatgtgacacatgctatcccagcattgtgtttgtggctcaagggtgctcagaagagagggtatctataaatcccaagttatcttgctgccatcctgaagatgaatgtcacacccaagcacccagctgaagcaggacaacacgattttaataaattagagaatattcaccaggtgactgctcatgcaagacaacaatctctgcaacagttttgtaattaatgacatcacaaaacgaataggctgaatcttacaacagccctcggtctataatctaacatcataccaatgtacaattcctgaaaagattttcaagaggccttgcagttgcttaggcaacaggcattgcagaactacctactaccattacctgtgttccagcagaagaagcccttgcctccaggcaaacccaattcagcatctggaaatcccaggatatgtagggaagtaggatgtacaagtgcta

SEQ ID NO: 672069 - DNA, 612 bp, Homo sapiens
tccggtatatgtgcatgccccacaagatggtgcagacttcgtagtgaaaaaaaggaaactatcttaattttactatttattaattgcatgctgattttttttcatacattgggtcaaataaattgtattattaattttacctgtttctttttagtttttaatgcagctactgaaaaatttraggtgactgacgtggttcgtacaggcagtcaggaggccacgctcaactaactggttgctgcttctccgtgtggtctccaggcttctccgtgtgttctctccagaaaaggaatggtggctccatggtggctcaaaggtttaaaggaaggaagcagaaactgccagtcctcttaaaggctgggcccagaaatgacagaaagtcacagagtctgcccgggctcaaaaagaggggacacagacccagttcctggtgggaggggtctcaaaaatttggatgggcgtctgtatctccctctgcatcaatctcatagaaggttcatgcccctgctccagcagattctcctctgagctgagtacagtgatcatcagggctgagaagcgctgagaagggtgactgtggggcagggaactctggtcaccctggtggcctct

SEQ ID NO: 672070 - DNA, 1083 bp, Homo sapiens
taatggggggggggaggggcaggagaggatgtgggaagggtggcgctgcactgcgaagaagggcaacccctcaaagtttggatggatgggatggaggagggggccgagcgggatggaggaagagggagggaggaagagggagggagggagagtgagggaaggagatctcctttctccccatctctagtcttycctcccctcctttcttcctcccgcagaaggtggaatctcccgtcgttgtggggtcaggcagtcaatgacgggttcgccccttgttgttccccctagcattctgcagaatgggtagagagttgggggcgggggggtgggctgcagagttgaaagtgcacctgaggcgaatgggccattaaacacccaatactgagacggtttcggggaggatgcggagggaggagcttcacctagttgagcattcagaactttgggtgggaaagggggtgttgagacattctcaattttctagaaataggatgactagtgtggagtttgggtttattttatgttcatctttgtcatttttcgtctggatcttctggcttgggtcccgttgggagaggtcgctctcttaaacctctctttcccaatacatcgcgctaccccctcacttgggctggaatgaggagggggtcctgaaccgctttttttggcaacaacaatattttaacatgttccagtctaggttttgttgaataattagaaatggaaatatttttttctccctcccccttctgaaaaaaaagggggaaatgtgagctctcttctgattggtgggtgacgattttagtccgcaccaatgagctggcggcctcgtctgtatttatttagtgctctgggggagtttttctctttacgcagcgcctgtagtcacggctggaaccttggctgggggactctgagggataagaggggattcggggggaatccgaactgtacctgttcagagatccgcgaccttgcagccggggctggcggaactctgatagggagatagagggataggacaggcaggcggggaggctccgggtgctggggcgacaggaaaggggtggaggctgggctccg

SEQ ID NO: 672071 - DNA, 636 bp, Homo sapiens
cagttgctcctccaatcaaattcaatccagtacaatatatctttaaaagaacttcaaaataatacagttatagtctgagggtgaattaaataggcagcgtgttccttatctcaatgctccggtttttccttttcctaatcatcagctttgcattcaaccagcatttgccaaatgccaacaacatacctgtcatcattctgaatgtcagaaaatcatgatgaaaaaggcagacttgctgcctgactttgtggaattcccagccaaatggtgtagaaatgactaggcatttacaatcaagtaagagttaccacgaggttacgcgcaggatgcaatgaggtacccatgaggggtaccttatggtagaaagggcaggggaggttctcagggaaagtactggctgacctgacatagaaagatctaaagctaagctcaggaaaagaggtcagagagtggcaagggggctgtaggtggagagagcaatttgagcaaacacgtggcagctwagaaaagcatggtattctgagggaaacactgtttacaatgcctagatcacagtgagcaaaaagtaatggaaatagggtttctttttattattattattattattattatactttaagttttaaagtataataa

SEQ ID NO: 672072 - DNA, 602 bp, Homo sapiens
ctaatgttcataatattaatacttcgggagaaaaaggagacccttacgatgagattcactagaaagctgagcaagacatgtatcctggagttggccacgggtaccactgcagatgctgggcaatacagtttgtgttgtgtaaattatacacacttgagctggcaggaactagggcagcacctggacctgacaaaaaagtcaattgatagatgacacatttcctcctttgtatgttggtgatcaattctaactttttacaacctagtcaaattgcttacagctgaaaaatatggggttttgttttgttttgtttcgttttgagacggagtttcactctgtcacccaggctggagtgcagtaacgcgatcttggctcactacaacctccacctcctgggttcaagcgattctcccacctcagcctcccaagtagctgggattacaggtgcgtgtcaccatacccggctaatttttgtagtttttagtagagatggggtttcaccatcttgaccaggctggccttgaactcctgacctcgtgatccacctgcctcggcctcccaragtgctgggattacaggagtgagccactgtggccagccga

SEQ ID NO: 672073 - DNA, 722 bp, Homo sapiens
tttttaaaacaccttccaaaataatagtccctaggtcagaccaaagcaagtagagaaatacataatgatgggttggtaaaattgttttgtgttttgagaattgaagctatgagtaactattagaaagaagaggamtacaaagaacaaagtattaaaacaagtgtttctgaatatataaaagtgaacccccaaccattccaaacaaaccgagggtaaaaataaggagaacactcgtctgtgagtcatgaaaccaggagaacacagtgatcacagggagaggctggtgcagagtccagcagagaaatgatggcctcaaaagggcaagtagagatggtgagagtggggtggatttgagccggattttggaagtagactgaacagcacagagaacacttaattcttgtgtctggaatctcatacaatatataattagcccatgtgctctgcccgcttcacaatgatgctcacacatggctgaagatttctgcattttccagatagggaagttgggcctagagagggtcattagtgcagagggtgcctgctcacatggctgtgtgggatgagcaaggccaaagccatatgcatggttacagcggacccaggtgcagaggtgcacgcccatataaagacgtacattaagacctctttcctctagcaatgtgaaacatggttaatcttaaacgtcactaaaatccatccatccatccatccatccatcc

SEQ ID NO: 672074 - DNA, 687 bp, Homo sapiens
aatgattcattaagacttgaaaagtgtctgatacttagtaggtggtcagtaatgattacttaatgaatacttttgctccaaagcttaataataataataaacaatcatcatcatcattgcaaatacttttatttgctccaagtgttttatgtgcataaattcatttagtcctctctccattttacaggtgagaaaagtgaaaccaagtggtgccaagtaacctgccaaggacataaatctagaaagtgagagccaagaattttaacccaggcaatctggttccagagtctgtgctcttaatagcacattatctgcttgtcttaagtgaatgaaacataggtttttaaaacctaaggagcatacgataatttaaatattttcccaaaatattatactgctataactagctctgcatgcttaatttttccagtaatataacggcrttattaacttatgattttgttctgtctgtgctctttctacacataattcttgacctcaagtcaggcattaaaataaaaaccagtgaaagagcacaattatagtgttctttgtaaataaataaataaataaataaataaataatatagactaacaaagtacttaggagcatccactatcagacctaagttgaacaaatacgtaatttgacagacgtcatatatcctgacagatatatttgacaaa

SEQ ID NO: 672075 - DNA, 605 bp, Homo sapiens
ggcccctcttgttgtgtttcagggtggacaagtccttcacttctcgccggagtgtgtggtgagtactggggactctcaggagggcctgggtttccttggctggtccctgcagatacccccaatccattcctacccctgcgatgccaggccagaccttaccaagcttccaaccatcctctcagggcaagggggtgggcagaccctcttactgtccccagagtacttttttagagagccttggaggcaggcaaagcaggtttacatcttcactctgccactgcctgtgtgaacttcagcaattccttaatgtctctgaacctcaattttctcatctgtgaaatggggattaaaatgcctattcatagggtgtaaggtaaaaagaacaaaamcaaaaactggccctggcatattttaggccctttttgcttaaatgcttccttccttttttttcttctctatttcttcccacctcagggtggcccctcgctgggctggggctcccttagcctttactgacccccaaatcctctagttactccccccgacagccctcagaaccccttcctcccatatttcctgtgtctggggctgccctctctttggag

SEQ ID NO: 672076 - DNA, 1011 bp, Homo sapiens
acctttagatggtgcttaaggtcccagcttcagctcctgcacctgcacctgcaaagctgtgatcacagaccactctcccgtgctgtgaccacactcaggccacagcctcgtacatacccgaaggcctcgcaccgcttctggtagatgtccatctggtgctgcagtggggccgggtcactctggcccaggcgattgatgtctagaatggccacaaggttgtccagcttatagatgctggcgaaggccatggcctcccatacagagccctctgacagctccccgtctcccagcaagcaatagactcggtagctgtggacagagagtgaatcaggccagtccctctcacctggacccagctggctcccacccccccacccatccaaggagcctgcattctgggtaaaggagcagccacgcatggatatgcagaacagayggcatttacactcgaggggcaacagtgtcaccaggttcctgcagcctaccacaagccacaccccaagagaaaatggcatgaaggaagacgtcaggagctcaggaagaagtactggttgttaagaaacagaggtctaggacaacagggatctggctaataagatctagaaaaatgggggttgttggaatgagaggaaagtgaggaagggtgggtgaataggcttgagccacctgctgcaggggacagaccccgctgtgaaccagaggttggaggaggccttgggactggctgggtgggccagtgggaaaggggaaccttgggaaccaagctctgcttctgcccggaggagggaggtgggccaaggaggcctgaggcactctaggcaacaccctggagcaagagggctctggggaggatagagcagagggcacttgaggaccaggcgcttcctgggacaggctctccccaagcttccaagactagctcttgaccccaagactgaagctgcacctggctctttctctaccacaggggccctctcctcccctcaacacaggcaactgtgatcttttcaa

SEQ ID NO: 672077 - DNA, 587 bp, Homo sapiens
cctggcctggtgaacccctatttgtccctcaggtctcggctgaactgttccttcctctaggaaatcttccctgacccttaggcttgaccctgtagcactaccagccttgccctcttcagtctcatcacaactgtgacttaacagttacttgaggaaggagttggtgcattcgccacccgggcctggggatccaggaggacaggccctggatgtagcttttctttcagctgtgttctgcgcctcgaatattatggctggcatgcaggagctgtcagcccatgttccctgcatgaatgcataagggcaggcgacatttaaatggagctggagcaagaggatcagaggaagagggaacagcaggaacaaaggcctggagggaggacctagcagggtgcccaaggtagttctgtgctctagaggacactggggaaccacagcaggccctcaaggcaggagagtcgggcagattctgccaggggaaggccgtggaggtctasgagggagggacagaggggccatggcccaaccttctctgcctggccttgttgcagagcgtgggaaaacactggtgcagaagaagccgacca

SEQ ID NO: 672078 - DNA, 610 bp, Homo sapiens
agggacgtgtcctggggggggtgtgggatggcagggaaggatgtgtcctgagaaggggggtgggatgacagggagggacgtgtccttgtgggggaatgggatgggatggcagggagggacgtgtcctgggaaggggggtgggatggcaaggagggatgtgtcctgtgtggtggcagggagggacgtstcctgggcgagggtgggggaatggcagggagggacgtgtcctggcagtgctccttcccagtgcagaccctggattgctatcgccactttctatggcttgggaaaaagaaactccttgagttcatttgggaagccttggacctgattcagcgtttaaacatctgctcagaaatggagatccatgttgccctctcatgagccttctgttggtgcctacaataaagaaccttcatcagaatgcacacccagagccaggaggagtcagcctcctgggagactcagcatttacctcttcacttagtgaaaagtccagcagcactggaacaaagggataacgaatttcttagcttcaccactccatcccaatgccaatctcagccaataatataactttgagctttggtgaaatcggtgtagataaaat

SEQ ID NO: 672079 - DNA, 610 bp, Homo sapiens
agggacgtgtcctggggggggtgtgggatggcagggaaggatgtgtcctgagaaggggggtgggatgacagggagggacgtgtccttgtgggggaatgggatgggatggcagggagggacgtgtcctgggaaggggggtgggatggcaaggagggatgtgtcctgtgtggtggcagggagggacgtctcctgggcgagggtgggggaatggcagggagggacgtgtcctggcagtgctccttcccagtgcagaccctggattgctatcgccactttctatggcttgggaaaaagaaactccttgagttcatttgggaagccttggacctgattcagcgtttaaacatctgctcagaaatggagatccatgttgccctctcatgagccttctgttggtgcctacaataaagaaccttcatcagaatgcacacccagagccaggaggagtcagcctcctgggagactcagcatttacctcttcacttagtgaaaagtccagcagcactggaacaaagggataacgaatttcttagcttcacyactccatcccaatgccaatctcagccaataatataactttgagctttggtgaaatcggtgtagataaaat

SEQ ID NO: 672080 - DNA, 924 bp, Homo sapiens
atttagccgtgtgttcagctgactctgaaatcacaagtctctctggtacccatgattttaagtaaaaggtttatggtcaaatgacagattattttgcagcacagaattaatgaaacgtcatggggagatgaaaacctatctgtgacacagatactgctattcaatctatttaataattaaaaataaatatgtcaccaaatccaaggaggcctctatcgagagctttcttgaaattaaaaactgtggaaatcaatgaatgatcacattgagaaagttgggtttagcataagaagtctgagtaaaaggaattgccctttatatttgtgtgtgtgtgtgtgtgtgtctgtgtgtgtgtgcattttttttgaagcacaatttacatgcaatgaaatgtatccattgaaagtatatggttcattgatttttaggaaattggccgagttgcacaactattgccatggtccagtttcagcacggttgcttcacccctgataagatcccttttgctgtttgtagcaatccccgttcctgcctccagcctttgacgaccactcctctgatttggccttgatggatttgcccatcctcactattcctgtaaatggaatcctccagcatgtggtcatcctttttgtctgccttctttrgtgtcatgttctgaggtgtgtctacgcagtagcttgccacgtcattccctttttgttcctgaatggtatcctgattttcagacatcccgttggcttgccggttcacctgctgatgcaccgttgggttgttggcatgttggggctgggggagcagcgctgccatgaacttcgcgtgcacgcctcgggatggatgttgttttcatttctcttgcctccacgttatactttataaccacagacgtcagtgctcggtggggccgcaagaagccccttatgt

SEQ ID NO: 672081 - DNA, 645 bp, Homo sapiens
cagcatctggcctctgaaccgttacatcctgttcttcctagtctagaagaacactttggattggatgtatttaaggaatacagcatccaccaggctggggcaggcagccaagtatgggatttgagcccagcatccagggccaatttccttgctgcctggcaccgcacagaacatacatggatgcccatggtatggaggtgaaaaggacatgcctggagcttcaagcgttctgagcctggtagggggacaatggtggtggagttgccaggtgacagcagcagcctgtccgggtggttgggcccaagggtcagccctgcttagagtacagcagggaccacctctcaccagctgatccccaccatcagctggggggcccyggtcatgcccttctgccggggtgtcatttttacacaggtgaagaaagagaatggacccaggagagagctggcgattttgctcatttcctgggctgccctttggtggcatctgcctggctctcatttgcttctacttggagcatctgaatgactcaatgacagagtcccgtaaccaccctaccaggctgactacagccctgatcagacagaagtcagtatcctgctgtggattcaatttcccgaatggttgcagagagccatcttaggc

SEQ ID NO: 672082 - DNA, 643 bp, Homo sapiens
tgtcctgctttgagtcccaacactactcattaaaaactatgatcttagacaaatttattaaacaacctcttcacctgtaaaatagcaattattattcctacctcagcattttgactaatcctactttaggattcagcagaaatagttcatgtaaatagcttagcaaaatgctaactgacacaaactttatgctccataaatgttagctactgacatcaaccccttggagytactgttcttttaaaacttttgatattgatacatttgcaaacttgcagtaaagttagaatagtacaaggatctcccataaatccacacgttaccagttatttactttttgactcacttattttgttattccaagtcattttcaagtaaagaaatagaatagaataaaatgaaaattgtctatactccatctcttccatttccctgccaatctgggtagcagtgagattctaagtaggctaccccagagccttccctctcctaagaaccttcttatgttctagttgctactcacatccctgaccccaacccaagcctactcccatttcagataccatcttgtctcctctttacatggtaaagagaacttgggaggaagggactgaggaatcaaagcttctgagatttgaggatc

SEQ ID NO: 672083 - DNA, 643 bp, Homo sapiens
tgtcctgctttgagtcccaacactactcattaaaaactatgatcttagacaaatttattaaacaacctcttcacctgtaaaatagcaattattattcctacctcagcattttgactaatcctactttaggattcagcagaaatagttcatgtaaatagcttagcaaaatgctaactgacacaaactttatgctccataaatgttagctactgacatcaaccccttggagctactgttcttttaaaacttttgatattgatacatttgcaaacttgcagtaaagttagaatagtacaaggatctcccataaatccacacgttaccagttatttactttttgactcacttattttgttattccaagtcattttcaagtaaagaaatagaatagaataaaatgaaaattgtctatactccatctcttccatttccctgccaatctgggtagcagtgagattctaagtaggctaccccagagccttccctctcctaagaacctycttatgttctagttgctactcacatccctgaccccaacccaagcctactcccatttcagataccatcttgtctcctctttacatggtaaagagaacttgggaggaagggactgaggaatcaaagcttctgagatttgaggatc

SEQ ID NO: 672084 - DNA, 840 bp, Homo sapiens
aaaatactaatatatcaattataagcctcactattttatgattaaaatagtaggttgggcaagcataaaatatctcttttaaacgtctatgatagcttacaaatgcccactcctaactattggattatatacagtaataatagatatttgaatcattactgggatgaggagtacatctgcttataggagaccctaagtggcacataaaggagttgtcatctcttttggacaatacggaatgaatatgaactatacagattgtgacggaacacactycaagcaagggaatcaaattttcctgaaactcaagaaataaaaattacaaaatgtgtattgagcctgataagtagtatagaatgttgacacatgtagtaatagagaagagctagaaagtaatctcaagaatgtgaattggggtacataagagatgtataaagttgaaaaatgaagggtaagtctgtaaaaagatctgctacctacaaaagcaatgccttccagtgaactcacgtgtcttatctcccaatctcccattgtttataatcccccatcccagattagagttctccctaaatcactctgcctaaagtagtctagttaaactcaatgaatatcacaccatttaatataagggatacttattgcatttctctgtgcttcttagccatatttgacaccactaatcttgtcctttttacttaaattatcttggtgaggtttctgtgataaacattccccgtgttcctatctctctggtacattctccttgttttcccttatcatcttctctttatttaaaacacatgctgaagtttctcaggcctctgtaactggttcttttct

SEQ ID NO: 672085 - DNA, 840 bp, Homo sapiens
aaaatactaatatatcaattataagcctcactattttatgattaaaatagtaggttgggcaagcataaaatatctcttttaaacgtctatgatagcttacaaatgcccactcctaactattggattatatacagtaataatagatatttgaatcattactgggatgaggagtacatctgcttataggagaccctaagtggcacataaaggagttgtcatctcttttggacaatacggaatgaatatgaactatacagattgtgacggaacacacttcaagcaagggaatcaaattttcctgaaactcaagaaataaaaattacaaaatgtgtattgagcctgataagtagtatagaatgttgacacatgtagtaatagagaagagctagaaagtaatctcaagaatgtgaattggggtacataagagatgtataaagttgaaaaatgaagggtaagtctgtaaaaagatctgctacctacaaaagcaatgccttccagtgaactcacgtgtcttatctcccaatctcccattgtttataatcccccatcccagattagagttctccctaaatcactctgcctaaagtagtctagttaaactcaatgaatatcacaccatttaatataagggatacttattgcatttctctgtgcttcttagccatatttgacaccactaatcttgtcctttttacttaaattatcttggtgaggtttctgtgatmaacattccccgtgttcctatctctctggtacattctccttgttttcccttatcatcttctctttatttaaaacacatgctgaagtttctcaggcctctgtaactggttcttttct

SEQ ID NO: 672086 - DNA, 656 bp, Homo sapiens
agaaataggaaaaagaagactgagggggcatggggaggaggaaaaggggggcaggaatatgaggaagaggcagaaragtagatggagcaaaagagaaggaaaaatgaaaagaaagacaaaaaaaaaaagatactgtcatttgcatgtacacgaaattctgaaaactgccatgtggccattctaaggcagatactattcccattttacagatgaacaaactaaagcataaatatgctaagtatcatgtacaaggtaaagtattaaaatggcaatgtcaaaaattaagaattgtcaaaatttctaaggttacaaaggtataatttgtatgcactcttactatcctgtaattatttctactgttttctgaggacaattgttatttttactattagaagaattagagaattattgaatgctttattttattcataagaaatatttaaaaagcttttgagagttttaccaaaaaaaaaaaaaaaacaataggagaaagagagctcttgaggtcaggttacttggagaaaagattgaagaaaatagaatgagatgatattggaaacatttaccatttatcaactcaggctcttagagttcttgcatgctcttcaatcattgacttatcagtagataagcttctgacattttacaagaaagaa

SEQ ID NO: 672087 - DNA, 656 bp, Homo sapiens
agaaataggaaaaagaagactgagggggcatggggaggaggaaaaggggggcaggaatatgaggaagaggcagaagagtagatggagcaaaagagaaggaaaaatgaaaagaaagacaaaaaaaaaaagatactgtcatttgcatgtacacgaaattctgaaaactgccatgtggccattctaaggcagatactattcccattttacagatgaacaaactaaagcataaatatgctaagtatcatgtacaaggtaaagtattaaaatggcaatgtcaaaaattaagaattgtcaaaatttctaaggttacaarggtataatttgtatgcactcttactatcctgtaattatttctactgttttctgaggacaattgttatttttactattagaagaattagagaattattgaatgctttattttattcataagaaatatttaaaaagcttttgagagttttaccaaaaaaaaaaaaaaaacaataggagaaagagagctcttgaggtcaggttacttggagaaaagattgaagaaaatagaatgagatgatattggaaacatttaccatttatcaactcaggctcttagagttcttgcatgctcttcaatcattgacttatcagtagataagcttctgacattttacaagaaagaa

SEQ ID NO: 672088 - DNA, 605 bp, Homo sapiens
tggcatttaggattgtatcctttaggtttattattggcactgggttctaaccaggtcaattgactcacagaaatatcttcaagtacattagcctcttcacccataaagtttatatagtctcatttcatttctttttccaattacttttttttttttttagagatggagtctcactctgttgcccaggctggagggcagtggcgtgatctgggctyactgcaacctctgcctcccgggttcaaacgattctcctgccgtaacctcccgagcagctgggattacaggtgcacaccaccacgcccagctaatttttgtatttttagtagagatggggtttcaccatgttagtcaggctggtctcgaactcctgaccttgtgatccacccgccttggcctcccaaagtgctgggattacagatgtgagccaccgcgcccggccgaagagatcttaatgacacagaaataaactattttctgaatctcacacttctgaaatagctaaaaaaacaaaaacaaaaacaaaaaaaaaaactatttgaccaataaaattaaaagcaccagtgttaacatttcaactaatacataacaattacgaaattattttg

SEQ ID NO: 672089 - DNA, 633 bp, Homo sapiens
attacttattttacatcatcagaaatgaagtctaaggagaaaaggtgccacatttttgcctgcttttttctttcctagggctatctatacccttgacaaatttgatgttcagaatttytgccctttagaagtttttagtagagtaatttgaaagacagttgctcatttaagtgaaaacaaaattatatatatatacatacatatcgccatatttttctctcaaaaagttaaaaatgacttgtggattttgcttaaacatttaaaaattcattttttcaatgatcaagaattaccaaaatgattgatatttgtgttgttattgtttctaaatataatagtgctgcttaaaatggtcatgatatgcatttactttagatgacactttaggtgacttataaaatgcatagtttagactgcataggcattctgagtttgcattaacataaaaaatgtgcattctaatcccacttaggtaacatagagaaaaagtctacacatcaggagaaaacaactaaaatggagataggaacttgttttttggacaccttttggcacccaccatcacagattttacagtctcaatttctcctgcacagatcccactgacaaagggtattacattttgctgacatc

SEQ ID NO: 672090 - DNA, 633 bp, Homo sapiens
attacttattttacatcatcagaaatgaagtctaaggagaaaaggtgccacatttttgcctgcttttttctttcctagggctatctatacccttgacaaatttgatgttcagaatttctgccctttagaagtttttagtagagtaatttgaaagacagktgctcatttaagtgaaaacaaaattatatatatatacatacatatcgccatatttttctctcaaaaagttaaaaatgacttgtggattttgcttaaacatttaaaaattcattttttcaatgatcaagaattaccaaaatgattgatatttgtgttgttattgtttctaaatataatagtgctgcttaaaatggtcatgatatgcatttactttagatgacactttaggtgacttataaaatgcatagtttagactgcataggcattctgagtttgcattaacataaaaaatgtgcattctaatcccacttaggtaacatagagaaaaagtctacacatcaggagaaaacaactaaaatggagataggaacttgttttttggacaccttttggcacccaccatcacagattttacagtctcaatttctcctgcacagatcccactgacaaagggtattacattttgctgacatc

SEQ ID NO: 672091 - DNA, 1467 bp, Homo sapiens
  misc_feature 646, 647, 648, 649, 650, 651, 652, 653, 654, 655, 656, 657,658, 659, 660, 661, 662, 663, 664, 665, 666, 667, 668, 669,670, 671, 672, 673, 674, 675, 676, 677, 678, 679, 680, 681,682, 683, 684, 685, 686, 687, 688, 689, 690, 691, 692: n = A,T,C or G
  misc_feature 693, 694, 695, 696, 697, 698, 699, 700, 701, 702, 703, 704,705, 706, 707, 708, 709, 710, 711, 712, 713, 714, 715, 716,717, 718, 719, 720, 721, 722, 723, 724, 725, 726, 727, 728,729, 730, 731, 732, 733, 734, 735, 736, 737, 738, 739: n = A,T,C or G
  misc_feature 740, 741, 742, 743, 744, 745: n = A,T,C or G
taactaacaagctttatatgcaccccttccccttggcaggtttccaagcatgaagcagacccagctcagggaaagagaaaaggtttaaattgggtgagagtttgaaattttcatattacgctgattggatgtgtatgtgtgtgttgaaaaatgagatttcttagagcaaccaagatttcatcaagggttggggaagaccaagttgagagattacttaagaaatataaagttgctttctgtttgcatcttaccaacttcagcaatttaataaactagttagagtttacatgtttctttgattcagtagaagtaactatattgatagttcagtgtgcactaacaaaattttttttgctagacaacttaatgccatgtgtcttagtccactggggctgaattacaaagyaccataaactgggtgacttatgaacaacaaacacgtatttctcatagttctgaagactgggaagtccaaggtcaaggcaccagcagatttggtgtctggggagggctcatttcctggttcattgatgctgccttctccctttgtcctcacatggtgaagagacagggcagttctctggggcttctgttataagggcactaatcccattcacaaagtctccagccttatgataactaagcnnnnnnnnnnnnnnnnnnnnnnnnnnnnnnnnnnnnnnnnnnnnnnnnnnnnnnnnnnnnnnnnnnnnnnnnnnnnnnnnnnnnnnnnnnnnnnnnnnnnggtatctggcttgataatgcaccctttattggctgcttttttctgtttcacttccctaactgcttattgatatttcctttgcctctcaaatgaaccacttgcaccctaatccttgtcataaggtctgttattgagggaacccaaatgaagacacccagattgcttattatgttagcaatagagtctcacaacaaacctcaggagagcccatctgtgttaggcattcaatcgcaagaaacagcaaaccaaacttcagtaacctaatagaataggggattatttttcttctattacgagaattccagtggcagacagttgctggagtaggttcaactgctccatgatcccaccaaggaatcagggcctttccatcttcatctttacctttcatccttggactttttgctcatgtcacaaaacatctgctgcatctcaggaaccagagccatattccaggaagaaagaaggggagaaagttaaatctttcctttttgcacagctttgtctttttagtcaggaaaagaagtcctctccaggtgtctccatctgcagttgaactaggtcacctgctcatcatcagaccaattacttccaaaagggatgagattagaaagcctggtttatttagctcagtcatagttcatccctggtgaaggtccctatctgaacaaattgggattctgttagctggaaagaagaggcagaagtagcttgggtcagca

SEQ ID NO: 672092 - DNA, 650 bp, Homo sapiens
taccctgtcctcatcctttatgctacatctaccttcattatcaacattgtcattattcactctcaacaatktattatcaacattgtcacaagacactgttataattttgtcattaaacactgtgtggtaaagaattaatcttgctcaaagggaggtctgccctgtgcccttgacttctggaaggtaatcttgaagcccttggaatgtcctgcctcataagagtgtctgtttacctgagggctttaagccacatcaaatatagcaatgtaatgtatagtggaaattttgggtcctatggtatcagctcaactactggaggggctggaaactaagatcagccgtgtggatggtccatcatgtctatgtgacacagccatgataaaatcttgaacaagattcaggtgagtttccccacttggcactactctatatatcttgttatacatcatttccatgaacactgagaaaggacaactggaagctccatccatggaattctcttggactctacccatgtgtctctgtctctttcctcagctgattgtaatctgtaataaaccataaccatgagtatagctgctttcagtgagttctgtgagtctttctagagaatttttgaatctgagggtggtcttggagacctcagactt

SEQ ID NO: 672093 - DNA, 650 bp, Homo sapiens
taccctgtcctcatcctttatgctacatctaccttcattatcaacattgtcattattcactctcaacaatgtattatcaacattgtcacaagacactgttataattttgkcattaaacactgtgtggtaaagaattaatcttgctcaaagggaggtctgccctgtgcccttgacttctggaaggtaatcttgaagcccttggaatgtcctgcctcataagagtgtctgtttacctgagggctttaagccacatcaaatatagcaatgtaatgtatagtggaaattttgggtcctatggtatcagctcaactactggaggggctggaaactaagatcagccgtgtggatggtccatcatgtctatgtgacacagccatgataaaatcttgaacaagattcaggtgagtttccccacttggcactactctatatatcttgttatacatcatttccatgaacactgagaaaggacaactggaagctccatccatggaattctcttggactctacccatgtgtctctgtctctttcctcagctgattgtaatctgtaataaaccataaccatgagtatagctgctttcagtgagttctgtgagtctttctagagaatttttgaatctgagggtggtcttggagacctcagactt

SEQ ID NO: 672094 - DNA, 650 bp, Homo sapiens
taccctgtcctcatcctttatgctacatctaccttcattatcaacattgtcattattcactctcaacaatgtattatcaacattgtcacaagacactgttataattttgtcattaaacactgtgtggtaaagaattaatcttgctcaaagggaggtctgccctgtgcccttgacttctggaaggtaatcttgaagcccttggaatgtcctgcctsataagagtgtctgtttacctgagggctttaagccacatcaaatatagcaatgtaatgtatagtggaaattttgggtcctatggtatcagctcaactactggaggggctggaaactaagatcagccgtgtggatggtccatcatgtctatgtgacacagccatgataaaatcttgaacaagattcaggtgagtttccccacttggcactactctatatatcttgttatacatcatttccatgaacactgagaaaggacaactggaagctccatccatggaattctcttggactctacccatgtgtctctgtctctttcctcagctgattgtaatctgtaataaaccataaccatgagtatagctgctttcagtgagttctgtgagtctttctagagaatttttgaatctgagggtggtcttggagacctcagactt

SEQ ID NO: 672095 - DNA, 650 bp, Homo sapiens
taccctgtcctcatcctttatgctacatctaccttcattatcaacattgtcattattcactctcaacaatgtattatcaacattgtcacaagacactgttataattttgtcattaaacactgtgtggtaaagaattaatcttgctcaaagggaggtctgccctgtgcccttgacttctggaaggtaatcttgaagcccttggaatgtcctgcctcataagagtgtctgtttacctgagggctttaagccacatcaaatatagcaatgtaatgtatagtggaaattttgggtcctatggtrtcagctcaactactggaggggctggaaactaagatcagccgtgtggatggtccatcatgtctatgtgacacagccatgataaaatcttgaacaagattcaggtgagtttccccacttggcactactctatatatcttgttatacatcatttccatgaacactgagaaaggacaactggaagctccatccatggaattctcttggactctacccatgtgtctctgtctctttcctcagctgattgtaatctgtaataaaccataaccatgagtatagctgctttcagtgagttctgtgagtctttctagagaatttttgaatctgagggtggtcttggagacctcagactt

SEQ ID NO: 672096 - DNA, 606 bp, Homo sapiens
tttgttgctgttgtgaataggtaattcatttttaattgccttcagggtagaattttgcaaaggctttttaaaaacccatgtaagttcatcctacgaaaaatkgatttattgccgcattctactatgagcaaggcattattctaatgccctttgttgtgtgcataatccactcgaagaactctgaattttcttttttcagcccccctatattatctttttcaatagtaagttatatttaactgtttgtgaccttttcttacatagatcctaccagatcacctgctacagaaatatgccttcatccttctcagaatgacaaatatgttttactgtgactgcattccaggcttaggaaaaacagtggtgttagacagggtcactgccctctgagagctggtgtgggagacaggcatgcaggtcagcaatggccttgtgagccgtgctttgacatgggtgagctcagagttgggagcacagaagaggtccgcctaggcctgggggattagggggaacaaggaggacaccatgcctgcaggggtgacctggagatgagtcttactgtctgggcttgccaggtgggctgggtaggctgactgaggcagccct

SEQ ID NO: 672097 - DNA, 539 bp, Homo sapiens
ccctccacatccaatctctaacttttgctgctgggttgtgtgccccagaggccgacttctaagtggcagcttcatccagggctcccttgccccctggcatccagagaaattctgccagtgagggtcagggtactggcaggagagcaaagggtgagaagcatgcaggctcatggtgggtattcaccccctcacccacctgcctccttygacaagcagtggctgcagccacagctcctgcagggcagccccatctccagggctctggctcatggagctggggcactctcctcggcccccctctgccaacgcccctggccccttggatgccagtcctgagtaacttgacatgtcctgctggttcccttaagccttccccatctccataatacttgcttcactaactgtcttcagttaaaccatttaagtttgtcatctgtttcccctctacaaaatagggctagccccttgaaggatttttttttttttttttttttttttttgagacggagtcttgctctgtccctcaggctggagtgcag

SEQ ID NO: 672098 - DNA, 636 bp, Homo sapiens
tttcttcataaattacccagtctcaggtatgtctttatcagcaatgtgaaaacagactaatacacacagtgtcaactgtttatgaaccttaattatgtctacaaaatcccttttgacaaacaatgtaacataaccatgggagtgatacttcatcacattcctgggtccacccactattactgggataggattacacagagtktgtatatcaggaggaagccatcatgtggtccatcctagagttctaactgccacataggtatatgaaagatgcttattattcacaaaaattataaatagcatactttctatgtaggcacaatggatggtttaaaatattttctgatattttggcatattaaattctacaaacattttattattgtagaacatgttcataaatcataattttaaattattgacaatgatagttattctgcttagttaagtactctgaagatataaatagatcatttactttttcagaaagacttgaagggaagacttcttaatgcaaagtatctttttcctccaaggatagtgcaaggcatgcaatgtataataattcacttaatgtttgattgattcttcccatgaagttaagatgtgatacagtccttttccaacatgaagcac

SEQ ID NO: 672099 - DNA, 636 bp, Homo sapiens
tttcttcataaattacccagtctcaggtatgtctttatcagcaatgtgaaaacagactaatacacacagtgtcaactgtttatgaaccttaattatgtctacaaaatcccttttgacaaacaatgtaacataaccatgggagtgatacttcatcacattcctgggtccacccactattactgggataggattacacagagtttgtatatcaggaggaagcsatcatgtggtccatcctagagttctaactgccacataggtatatgaaagatgcttattattcacaaaaattataaatagcatactttctatgtaggcacaatggatggtttaaaatattttctgatattttggcatattaaattctacaaacattttattattgtagaacatgttcataaatcataattttaaattattgacaatgatagttattctgcttagttaagtactctgaagatataaatagatcatttactttttcagaaagacttgaagggaagacttcttaatgcaaagtatctttttcctccaaggatagtgcaaggcatgcaatgtataataattcacttaatgtttgattgattcttcccatgaagttaagatgtgatacagtccttttccaacatgaagcac

SEQ ID NO: 672100 - DNA, 2102 bp, Homo sapiens
acaagaaggctctgccgctaagaggaagggcgttcaggaagaagtcgtggtaagagcagtctcagcttaggaagatgccaggctctcctgatttaaagggtaagaagcccaaccatgccatgaatggtgaacactgaacgaagcacaagcagagactgaggctcagagtccaaaccatgaggcagaaaatgaacccatcctaatggaaagcagagcacagagcagatggccagaggaggaaacgtgggggtttcaggtctgaaacatcttcctagtaaaaatctatgagtaacctgctttagttaacatgacttgtgagacaaaagagaaaaaagaagaaaagagaaggtatcaaaatagtagggtattttaattttcagattattgtaaatgtaaatctcagaacactgcaaatctcagcatatgacttttagcaacatttatatccatttaaccatcaattcatttattcaatagaactgttgactccttattttcaacctactgtattgggtactccatatacaaagatgaataagaaacaggtcttgccccctaggaacagtctagagagggcaaaagatatgtgaacacaaagaggtttctgtccttagtatttttaaactctccaactattattaagtcaccagtattcaccttaaataatgaagcattttaataaaataactgcgtatctttactgtaaaccagtcttctcaggaagtgcaaaatgaaatacaacggtataaatacttttgcgtaagctgaaagaatgacataaggaacaatattattcacaaggtaccatttctattacgtaacagaaaggtgctggatatgtagatggagggaaacatctcattttcttgatccaataaaatcgatttggaaactattgatactgaaccacaccacaagactcactcaaaagctctgtattgttttacttttaaaggaaaaatatttggtgaaggctaagttggcatgctgggaggagttggaacaagagcatcattggcaggctgcataataatgaattggttcctacagaaatgaaattgctactgctgtttttgccatctacaattaaaaatgacaagtattgagaacagcgtcattaagaagagtctgattagagaagtttccaagctttaggarttgttattggatggtatcctggttggtatacgaaaggctttttttaagtcagaaaagtaggagcatctaaaatagagctattttaaattccttaacttaagaacataatcacagggatttatgcattatcaacaagaatgcataattaaatagaggataacattttaccgatgataatttccgaacatcatagattgcttaattataaataatttcatatctatttgtaaccaaaatggcttttgagaattatttgtatgatttttgtaaacaaatcactgtcttattttcttatcatgagcatgaaaaaagtttctaataggcttttgtttcaacctgagggtgtattcccacctatacctcatgtaagttttgaaactttatgaaaaatcataattctttcccattttcagaacttagaacatttactagtttttagaacggtattaggtgctacattttcactttgggctaaataagtgaacctgaagatcaaatgttcaaataaaatacgacaagtgggtgttaaataatgaaaaagatattcttgtggagcttttcacagagagatgatccaggctgaacgtgtgtccccagtgatggtgagaaccgtgggactgctgcctaacatctgcagggtgtcataaaaagcctcactaaggcgcatcgttccaaatgaataccgtatgggtcacttgcaggctatgttaagtaaacaataaaaaatttaaaacaaacagccacaaagacagaggaatgctgaggaagggaagcagatgagttattttgaagagactcctaacatgactaatccctgccaggggatagcctctcaaggtatattgcagccagtccctcccatctctaaagtaggaacaaaagaagtgcaatcatcaaaaccatcgtgttgacatacttgaagtggaaaattatccaaattatct

SEQ ID NO: 672101 - DNA, 591 bp, Homo sapiens
aatgtgatcacctcttctctaaaatcttattggtaactcctagacaactggactataagaatattaattatgttaccttgatgataatcaaactttgaacatactatttatcctaataatattaacttatctttctttactctgatgtttaaacttttcacataggctaatttcagtgactctgtaaattttagttgtttcaaggagatcaattatattacctaccatacttagcccattgtaggtgcttaagaaattctttttgaattgatcagcttctatctaagaacattatagatcatgttagcaatgaaatacaaataagacatgtggaaaattattttacattatcttccctagaaatggctgacaaattcattctgatgaaagacagatatggtgcagtgaatagatgctttcacagatgcattagaggtcatgaaagtaacccagacacagtctaaatcagtctctggtgtgctgacagcctgttagcatagcgtatgaatacccctttcatgatttaaaaacattttgacgtctaaaataacacygtctagctatctgtgatgtatgagattatatcataaa

SEQ ID NO: 672102 - DNA, 591 bp, Homo sapiens
aatgtgatcacctcttctctaaaatcttattggtaactcctagacaactggactataagaatattaattatgttaccttgatgataatcaaactttgaacatactatttatcctaataatattaacttatctttctttactctgatgtttaaacttttcacataggctaatttcagtgactctgtaaattttagttgtttcaaggagatcaattatattacctaccatacttagcccattgtaggtgcttaagaaattctttttgaattgatcagcttctatctaagaacattatagatcatgttagcaatgaaatacaaataagacatgtggaaaattattttacattatcttccctagaaatggctgacaaattcattctgatgaaagacagatatggtgcagtgaatagatgctttcacagatgcattagaggtcatgaaagtaacccagacacagtctaaatcagtctctggtgtgctgacagcctgttagcatagcgtatgaatacccctttcatgatttaaaaacattttgacgtctaaaataacaccgtctagctatctgtgatgtatgarattatatcataaa

SEQ ID NO: 672103 - DNA, 572 bp, Homo sapiens
ggagttcataccagattgtgctgttggcagacgttgttaaaggggtgttggtgtggtgtgtcacttgcaaccttgtacctccattattagcacacacccacccagccagtctcctggcacccattcttctccccactttcttcctcatggggttggtattttgccatgtgcgacatacctaaagctttcttaatgtcttagaagtcatgtttatcccaggatatcttctaatgaatagttaaatataatgtggttaggatctctgtccctgattctacttgcaatgattctaggaaatcattgcaaataaatgagggatacaaaaatttatttataaggatattctctaaagcaytatatataatattgaaaaaaagtaaaaataacacaattgtccaataagaggaattggttatatgcattatggtaaatccataaaataaaatgaaatgctgtattattattaaaacatttcaaataaattttgctgacataaaaaatgctcaatatataaccttaggtaaaaaaaagcaggatatgagactgtatgtaggatttgatattgcttttta

SEQ ID NO: 672104 - DNA, 683 bp, Homo sapiens
aatattaaaatttggtggaaaattgatgcatctatcttaaaggtatgattacttagtaatattcaaacaaataattgttgtctttagaatttcagatttgtgtatatacttaaaggtggtacattgctccctacactggtaaagtgtcctaagaatgaatcttatgaaactacgcttacctattagcctattagtggccaacaaattacaacaaattttagccaggtacttatccattagttttaccttttactgcatattaaaaaaaatacacatatttggaacattaaaaaaaataaagaaagctcttaggttctttgatgggggagagatagagggtaacagtgatatgagaattgaaggcaatagtataaaaacttataaaagtgaaggacaagtttgtataaatttggaaatattcatgaaataataaattgaacatgagatgaaayagaaaatcactcaaagaatatcaaatgcacgaaacatttttaagagaggtagagattaatgtctgatgtaccaagtgttctttcaactggaattaagggacatcttggatagatctcaatggcattgattatttcctactcatctttgaatcctcaacactttatcgtcttcttacacataattgaccttcataactgtgtgactgatgaaagagtaagcccaatcattat

SEQ ID NO: 672105 - DNA, 765 bp, Homo sapiens
cacctccatgtactttggccttgacactttccccggcaaatgtgttgattaaagaaatgtgaagagaggcttgaaatggagctgcatggttgggcttccctgttctgttctgtctctataatgagatgggcatgctctaagaaacctattggtctcccagaatgagaaatacaaaaaatagacctgaacccaacctgtggtaaagaattgatagctgccttagatcagttgaactccagccaaacccacataagagtgagaaataaaagcttaatttgcaatccactgcttttagaatggtttgttatacaatgctattgtggctatagttgactaatacagaagaaataatgataatagatttcaaagtactcttactgagattatgattcaggtagatcaaaatatagtatagaagcctatatcacaattgacaattacccaaacatctgccttctcagagttraacctgacataatttaaattaagtgcagatcttgatacactttatttttgtctcatgccctgtaatgttgcattttcttccatttccaactttatagggtttttaaaaatcttgataaatggctacattttgaaagtaatttttaattgaaaggggatgagtggtaagtagaataacaacctctccactcaacaatttgatcttaatttgtccactgacatacatgtcatgaaaacaatagctttgtcacttttgtttagtgcagtgtcaccagtacctaagaatttaataaatataaa

SEQ ID NO: 672106 - DNA, 641 bp, Homo sapiens
ctgagcagtggaaatggctctcagtggagaggggagctggagagtgaatgggaagggcaggtagtctttcttgaagtgaggtcatcttctcctcaaagtccagttgtctattccccaaagtcaagctaactctcttccccaaagtccaactgtctgcccactctacyaactgagtatggggaatttaaaggcacaggatggggacagggcaggctgtaggtatttttggaaaaggcaacattcaactggtcaaaagacattattcagaaagaaccaatccagagaaagcaggcaacaggaatagaagttttcactttgggccgtgggttttaggctactttggcttgaaggtggagtttcactggggactcatccctgtctgcctaggcattcagctgcctcctgctgtttttaatattgatgttaacatgttcttcaaacttctgtaaatgcctggatattgtctgagagagcctgaccaatagaaggactgttgcagagtattttgcagaacccaaggaaagacccataagaaaaaaaaatgatttggtgtcaaatttcaatttgaaattgaagttatcatcacttaattaatcacaattaagcaaaaagaaatatttgtccagtagcaaaggttaaac

SEQ ID NO: 672107 - DNA, 609 bp, Homo sapiens
gccttcattctaacaaaggttgcagattggaaagctgatttggaatgctttttaagtgttttcagtttcaatatttttatgaaattcctatggtctccaacaaactttttttttttttttttttttctacacctggagcttatcctgcagaagcttcctgccaatgattgttttggaggaaattaaaagaaaaccaaacgaaacctctcctatccaaggggaagaactttatccccatattgattgaatataggattctagatttaaaatgttgtaggcagttagagtttgctcttttttttttttctattggaaaggtccacaaatgttytattgacatttttgtctttaatccatttggatttggggtacatgttacgatttgtctacgttaatttcccttttaaaaataaaaataattcctcaactccaattagacaattgggttgtccttttcacactgatacctcttttatagtacactgcattcttacatataacaggatctgtttttagctgtgtatcctgattcagtaattggtatatgtgtgtgtgtatatagataaatagaatgccatttccctgtgcagacggaagggcaagcttatt

SEQ ID NO: 672108 - DNA, 688 bp, Homo sapiens
cagaagaggagggatctatactttctacatccttccagttctctatcaggcgctctctgactatactcctaaccaccaactcctccaagaaaagcacctataattaagacaggcagatacattttaaaaattataattctactactactactattactacttagccaagaacaacaaactaccgccttgagtaaggaaaaggggagaaagstgagaagatgaaatctgctcgtgggactaatgatgttgagaatcttttcatgtgctaatcggccatttaagatgtctattctaggcctggtgcggtggcttatgcctgtaatcccagcacttcgggaggccaaggcgggcggatcacaaggtctggagtttgagaccagcctggccaagatggtgaaaccctgtctctactaaaaatacaaaaattagtcggacatggtggcgcatgcctgtaatcccagctacttgggaggctgaggcagaagaatcacttgaacctgggaggcagaggttgcagtgagccaggatctccccactgcactccagcctgggcaacagagcgtgagattccatctcaaaaaaaaaaaaaaaaaaaaaaaaaaaagacggctattcaaatccatatgcccatttttaactgggttgtcttttatattcttacattttaagagttctttatatattctac

SEQ ID NO: 672109 - DNA, 1563 bp, Homo sapiens
tgcctcaggtccttgtgtaagatctttcttctgcctggaacactctccttcccaaaatgtgcatggctagctccttttccttcaggacttaactttaaatattgtctcctcagaaaaaccatccataacaatcttatgagaaatagtcctcctcctattattctctatctcaacatcctacttgtttyatttataacatttatcacaattttgtttgctaacgtaggttaagatttgttttgttttgttttttccctagaatctaatccacaagggcaaggacttttcttttcttttttactcaatgctgagaatgttctctgacactcaataaatactcaataattattcattaaatgctgaatgaatatagccaaagagaaatagcagaaggaatgagtggagatttagaaacttcagttcaatatgatgtaaaacaaagctccattctttggagacagtccaacaaccagaaataattttaaaagaaacgtatagcttgtattttctacaggactttgccccaataacacattcaacattctcttcttttcttcctgaattctttcacatctttttgttactccaaagcttctcactcagcaacccttcacaactcttgcatctctttataaactgtttatcacgattctctgaatttagattctctgaattttttggtgtttctatcaacttatcaatttctgaatttgtcacacacacaaaaagcataaacataaacatgtggtaagaataattatatctttagtcagatacatctatctacctgttctgttgattctatatcacacacaaaaaaaaccaaaacagcaattaaagagccatccttaggtaattcagagtgaagaagctaagaaaagataatctataataggtatagaagtgggggagacatagtatattaataaatctcatctaatcataataagaatttctcagagcattattgaaaattggaatagattatctgaggagctatagaactctccacaattgacaaattgaataagtacctggttataaaagtcagatggattatggtactagatatgtattttcccaagagagataatgatttatctttaaaaattaaggagcggtagcagtggtaaccattgcctctatcttctttctagatcaagaataaacactttacactgaactctgctgtctttcaaattcaaggtgcattttcaacccttcctagtttgagtttcccaacttagcctagttagagctctaaaaaattgtaattttgttttcacattctgaatgatacaaatcagagtgctaatccagatcttaccttttccagataatactcaaagagattatactaaaactcaaacaaaaagagtcgcctttatttgtttgaatgaaaatcgttagctctagtgtctggcagcacagcctctcattaacatagtatgcaaagccttcaccttagggggaggttaacgtgtacagcaatccatgtatggcaagtaaatagggttgtcctcaaagtgggtaaactatagagtagcacttggactctgcttt

SEQ ID NO: 672110 - DNA, 1563 bp, Homo sapiens
tgcctcaggtccttgtgtaagatctttcttctgcctggaacactctccttcccaaaatgtgcatggctagctccttttccttcaggacttaactttaaatattgtctcctcagaaaaaccatccataacaatcttatgagaaatagtcctcctcctattattctctatctcaacatcctacttgttttatttataacatttatcacaattttgtttgctaacgtaggttaagatttgttttgttttgttttttccctagaatctaatccacaagggcaaggacttttcttttcttttttactcaatgctgagaatgttctctgacactcaataaatactcaataattattcattaaatgctgaatgaatatagccaaagagaaatagcagaaggaatgagtggagatttagaaacttcagttcaatatgatgtaaaacaaagctccattctttggagacagtccaacaaccagaaataattttaaaagaaacgtatagcttgtattttctacaggactttgccccaataacacattcaacattctcttcttttcttcctgaattctttcacatctttttgttactccaaagcttctcactcagcaacccttcacaactcttgcatctctttataaactgtttatcacgattctctgaatttagattctctgaattttttggtgtttctatcaacttatcaatttctgaatttgtcacacacacaaaaagcataaacataaacatgtggtaagaataattatatctttagtcagatacatctatctacctgttctgttgattctatatcacacacaaaaaaaamcaaaacagcaattaaagagccatccttaggtaattcagagtgaagaagctaagaaaagataatctataataggtatagaagtgggggagacatagtatattaataaatctcatctaatcataataagaatttctcagagcattattgaaaattggaatagattatctgaggagctatagaactctccacaattgacaaattgaataagtacctggttataaaagtcagatggattatggtactagatatgtattttcccaagagagataatgatttatctttaaaaattaaggagcggtagcagtggtaaccattgcctctatcttctttctagatcaagaataaacactttacactgaactctgctgtctttcaaattcaaggtgcattttcaacccttcctagtttgagtttcccaacttagcctagttagagctctaaaaaattgtaattttgttttcacattctgaatgatacaaatcagagtgctaatccagatcttaccttttccagataatactcaaagagattatactaaaactcaaacaaaaagagtcgcctttatttgtttgaatgaaaatcgttagctctagtgtctggcagcacagcctctcattaacatagtatgcaaagccttcaccttagggggaggttaacgtgtacagcaatccatgtatggcaagtaaatagggttgtcctcaaagtgggtaaactatagagtagcacttggactctgcttt

SEQ ID NO: 672111 - DNA, 635 bp, Homo sapiens
ttagaaagatgaaactgaggagtaaattgctgattacctgaaaacaagaaatccaaacaagaaaatattatgttcattaagaaagaccacaatatatctataaaacttttattaaaattggaattagaaactataccaaaaactttaaaaatacattaagacattgttcttttttcttacagaaaagagggtgaaaataagacccatggcaaagagccatccctgataattttgttcctttcaaacattcatgaacatttaaataaaattacaaatatttaaataaccctaaggtattacccacaggctaaaacttgccagtaattccttagccctgctatttcaatatcaattccacaaacatggaaaattatggtaactgcaggctgtaacagtttctaatattcacattatgaactatttgttatgttgtcataagaatgtgctcatgctataggcaaattcagaggtgatttcaycattttcaaattatcatcaagagtgtgaaagaggaagatgacacacacgtgggatggtgtggaaatccaaagccccacattttgggagtctgtgaccactcccatctgccactaaagctacgagttggtgttggcatgaatctgctttgtttattc

SEQ ID NO: 672112 - DNA, 513 bp, Homo sapiens
gaggttccggttcccttcttcctctgaagwttactcataaatcccagagcaccaaattctgtgatcttcaaaatccaggggcctgtgaagccccacaagtgtgacttgctgcatgttttcatgtctagtacacatcctgagccaaaatcactttggatggggtggggagggtgggcagcagcttgctgtgtggatgctgggaggatgggagggggtccaaggagaaaaggaagatgaaatcggggcagtttattgagaagagactcagttcatagcaagggaatctggagagtgactggagaatggctttggatcagggattctcaaaccatgacccaaagattacccacatccaaaagaatactgtggtggcaagtccctatgttaatccaataccattatttcctactctggtaggagtgggtgtggggatgggaatgaggagttggaacaaatgatagtgattaatactgttgagaaattaacatgggccacatatgtgctaatgtgctt

SEQ ID NO: 672113 - DNA, 1284 bp, Homo sapiens
  misc_feature 572, 573, 574, 575, 576, 577, 578, 579, 580, 581, 582, 583,584, 585, 586, 587, 588, 589, 590, 591, 592, 593, 594, 595,596, 597, 598, 599, 600, 601, 602, 603, 604, 605, 606, 607,608, 609, 610, 611, 612, 613, 614, 615, 616, 617, 618: n = A,T,C or G
  misc_feature 619, 620, 621, 622, 623, 624, 625, 626, 627, 628, 629, 630,631, 632, 633, 634, 635, 636, 637, 638, 639, 640, 641, 642,643, 644, 645, 646, 647, 648, 649, 650, 651, 652, 653, 654,655, 656, 657, 658, 659, 660, 661, 662, 663, 664, 665: n = A,T,C or G
  misc_feature 666, 667, 668, 669, 670, 671: n = A,T,C or G
cgcctgtgaatagccactgcactccagcctcggcaacatagcaagacccccatctctaaaaaaaattttattaagaacaacaaagaacaataatccagtaagatagtatgtaagtgctacttgattgggaatatttgtaacaacatcttacatttgtatagagaaaaggaatggggcctcctaaacttagagcatcatgtcaattaagatgtaactggctagtcaaatccataatgcctaactaataatagctcaaactttatacaatttattaatttacttagtaaagggctccaggattggttcagtgtcttgatggagttaytaagggccctgcttattctcacctttcctctttgccttccttgtctcctcttgggttacaaaatggctgctgcagctccaggcattgtggcttcatgcaactatgaccaaagcaggaagaaaaggaatggcagagacttctcagaagctctccaacagacttctctttgaatctcattggccagaactggagcacaaacccattcctaaaccaacttatggcaaaaagagggttgtcaagattgtcnnnnnnnnnnnnnnnnnnnnnnnnnnnnnnnnnnnnnnnnnnnnnnnnnnnnnnnnnnnnnnnnnnnnnnnnnnnnnnnnnnnnnnnnnnnnnnnnnnnnttttgtattaaggggtattaaaggaaaataaaaaatttagtttataagtcagtatctaggccacaaattatatgaagtatgttgcaaggggtttataaaagtacttaattggaccccagggttgattaaggtactgcttccctcctttgtcaggaggatcattcaaagtcctttcgatcctctagttacaagatgagtcacaaatgaaaatacatttttttttaatgtttttttttttgagacgaagtcttgctctgtcgcccaggctggagtgcagtggcacgatctcggctcactgcatgctccgcctcccgggttcacaacattctcctgcctcagcctcctgagtagttcggactacgactacaggcgcctgccaccacgtctggctaattttttgtatttttagtagagacggggtttcactgtgttggccaggatggtctccatctcctgacctcgtgatccgcccgcctcggcctcccaaagtgctgggattacaggcatgggtcaccatgcctggccagtgaaaatatatttataatgacttccctacctattccctatcttcttccaccattcttagacacagtgatagtttaataatcgatta

SEQ ID NO: 672114 - DNA, 589 bp, Homo sapiens
attaaaaaaaaaaataatttgtccccagccatctggcagagtcagggttgggaatagattttcattcccaaacctggtggctataccgtgatgccacacgattttgagcaggaaatagcttcccaaattaagccaccagaacactttcaatccattatgcatccaaaaatagtgtacatttgcaaagggaaaaaaggaaacaatagttctgaaatactaatgaattaatgcagaaaaacaatgaaatggactaggaaagttacgtagaatgaggagtctatgaaaagttactttattgagaagaggatgtggaggttgctgaaaatgaatgtgaattaaatccacaaggggaagctggatacttgcaaagatttaggggtttgctggtcttagtatctagcttcattcccaacttgtgcattttccttgagacagcagctatgattggaattattttgagttaaraaatacagcatggtggctgggcgcggtggctcacgcctgtaatcccagcactttggtaggctgaggcgggcggatcatgaggtcaggagattgagaccatcctggctaacatggtgaaaccccg

SEQ ID NO: 672115 - DNA, 2279 bp, Homo sapiens
ttggccttgtactctgtttccagctcttgagttgtggagctggagaggacttcacctgggtcttgcctccagaagctccttgtaggcctgaggagtctcaggacttggcattgccctggctcctgtggcacgaagacctcaggtcctgtggaagttgagcagcaatgtgtgatttgaggggagctgacttgttttttttttggtttccccagaccttatccattcaccgtgtgttcaaaaatagtaaaattagcatatggtaaaccatacttaaaaattgtaaaattaatttattagaatttagaaatattaccggatcaaaaatttaatattaagcatattgaaataatttttaaaattgaatraataaagttagtttcaacactgctagtgttagcagtgttgaaataataataataagcattattacagaatgacggcttggttgtccagacgttactgttaattagagtagtcctaataagaaaggaagcgctgatgagtcttctcgatttacttaccgcgtttcaactttatttccagcagatggttctgagtggtggtttttttcccaccacccccccttttatatttaggagactagcaaatgcttttggaacagatagtagtattttggcatttgttttagttaagacttttggaatctatcatgcagtgtcttgacagaaaatgggctccttctgaaatgagatgatgaagagatgctcttgtcagatgattctcaggagacggcagtagctgtttcttagacatatgccatgacattttaagaaaattatataatcattttctaaccgccgccccccaccccgcaaagttcaggaagtttgtataaaagttctaggaagtaagtacacttcttagagagccagtgttggaattagcctgcatatgtagatgggagttctttttctgcagttcactaatgtgggcagtttaatcaacttctcagtgcctcccttttctcatttgcaaaacagggataatttctactttcttcacaaggtttttgtaaagatagagtgtaaaggcacttttaaagttattagggatgcataaatgtaatttatatgttagtatatatgtgtttctttttttctactagaaacaagcataatattttaagtttttgcaaaactgctttctttgaagttagtgtttgattctcagtgatcacaagtttgttttttttttttaatttcaaggagtattctgaggcttgctattttaggacttggagagcttataataaaagacattaatccaatatagacgagagtattattatctaaacatgtgttgatgactttgtgcttttaggtataccaagcttggctacgcaggcaacactgagccccagttcattattccttcatgtaagtaaagctctatccttgggtttataaaggtttgtgtttctcagaattgttctaagtgttctgattctgtttttcaagatatattaatgtacttaccatcttcttttagaagaccgttctggttaccccacaactttctagtccttctgttccattctgataaagccccttgtcactgtcgttggaatctcagcttggatagtcagcagggtccatttattcaattataaatgcctgaactgcctagaaaaagtatatctggtctttaaggtaaatttgtaattttaagtacatacagtctgttagcttagtaacttaatggactgaatatctcttgtactacactattcactctattgaaagattcttttttttttttttggtggaaatgataggcctgatgactgtttttattgtgtttagtagtattctgtttttgtttaagttttaatcggtagagaataacagaagtgtccttgcagtttggcatggggcgttctactcactctttatttcctgtaggagtcttcccgaggttagtcggttgttaaaggataggattcttggctgggcgtggtggctcacgcatgtaatcgcagcactttgggaggctgaggcgggtggatcagctgaggtcaggagttcgagaccagcctgaccaacatgttggaaccccgtctctatcaaaaatacaaaaattagttgggtgtggtggtgcgtgcctgtaatcccagctactcgggaggctgaggcaggagaatcacttgaagctggggggtggaggttgcagtgagccgggatcgtgccactgcactccagcctgagtgacaagagtgaaactccgtctcaaaaaaaaaaaaagataggattccctggaac

SEQ ID NO: 672116 - DNA, 1474 bp, Homo sapiens
ctcagttcagttttattttacagtaacatttaaaccctagaaaaaaacaacatcttgacctggtttcctctgctataagtggcaataattacaatcatcttgctatgtctcaagaaaactaaagtaggcagttggtttatccaaatccattcctccttctattgtccttgcttttggaggcctgtttagctacttaccctcctccagggtccagaacatcagacaagttctcctggtccccacaccaaggagaaagtcttcaagaatctaaaccagtcacagtaaatccattcctattgctctaaccaggttaggcataggcagatggggcaaatgtgctgggaaggtttctgggaaagggtctctaaattcttaaaaagtgcaagggaaatcttctatctctgtatagaaatgtccaaagaggtgatctaggaatttggcagccaccctggacccagggggaacaaacagaagagctccagctagtgccctaggctgcatgtgcaattccatcactgagctgctaaaacaacagccctagagctgcctcacttgggcttcctgtttggtgagctaacaagcccctttttgttctgaacgtttttattgagctttattttcaaaaaagcagcctgattcatgcacatatctttagaagaaatttaaaacgccctagaaaagaatatcttcagtttaaaatctaagcaatttggaatttacaggaatatattcctcttagttccagttactcaccattaaaaaataatggtcctcaggttcagctcgaagatatttaaaaaccacttgctccatgaacctttccataagatcccagtcttcaatgattccatgtcgtatcggccactggaggaagagacaccagagttgtcaagcctcagttcgcaacaataagagcaacagtttaacagtggcacagaagaaactgtattattaagaataaaggtctccttctcattgcagttgttgttaattcttgtaaagaaacaacagcatttggaaaraaaagattaagttacattattgttcatattctcctccactcatttccacaaacaaagaatcaccttaacaatgacacggaggcaggccaggcacagtggctcacgcctctaatccaacgctttgggaggccaaggcaggaggctcacccgagcccaggagttcgagaccagcctgggcaacatagcaagacactgtctctacaaaaaattaaaaaatcagccaggcatggtggtgcgtgcctgtagtcccacctacttgggaagttgaggtgagaggattgcttgagctcaggaggtcgaggctgcagtgagccaagacggcatcacagcactccagcctggatgacagagtaagacctatctctaaaaaaacaacaaaaaatacaatgaggaaccgatagaaaactgcagctaattatcatacaattggatctggagctttaaaaaaaaaa

SEQ ID NO: 672117 - DNA, 824 bp, Homo sapiens
ccattataggtggcctgttkgcttttttcctgcttaaatatgtgtagtattcttttatcttttaggggtttgttttgttttgtttttgagatggagtttcactctcgttgcccaggctgaagtgcaatgtcatgatcttggctcacctcaacctctgcctcccaggttcaagcgattctcctgcctcagcttcccaagtagctggatttacaggcatgcaccaccacacctggctaattttgtatttttagtagagatggggtttctccatgttggtcagctggtctgaccccaggtgatctgcccacctcggcttcccaaagtgctgggattacaggcgtgagccaccgtgcccggcctatctttcaggttttataaattaaccaggatacgcttccattttaatgactctgaattttttccagttcacagtgagtccttatattaatattatatgatctttcattatattccaggaaaactttgtcttttatttattaatgttacatctgttccacacactctgttctcttcagcaggaacaccagctctgactacagtagatgccttctggactcttctcccacagcttccatcttctttctaatcaccatgacctctttgttctttcctaccgtggtctacgtaatttcaggaagttgatcctcacatcagtgatttcagaaccactggtactacctcatgtaacctccaacatgcttttaattcctgaaatgattttagttttctatttctttccttatggatgtcagctgacctccatctcctccttttagctttctttaatcttttaaaattacttc

SEQ ID NO: 672118 - DNA, 824 bp, Homo sapiens
ccattataggtggcctgttggcttttttcctgcttaaatatgtgtagtattcttttatcttttaggggtttgttttgttttgtttttgagatggagtttcactctcgttgcccaggctgaagtgcaatgtcatgatcttggctcacctcaacctctgcctcccaggttcaagcgattctcctgcctcagcttcccaagtagctggatttacaggcatgcaccaccacacctggctaattttgtatttttagtagagatggggtttctccatgttggtcagctggtctgaccccaggtgatctgcccacctcggcttcccaaagtgctgggattacaggcgygagccaccgtgcccggcctatctttcaggttttataaattaaccaggatacgcttccattttaatgactctgaattttttccagttcacagtgagtccttatattaatattatatgatctttcattatattccaggaaaactttgtcttttatttattaatgttacatctgttccacacactctgttctcttcagcaggaacaccagctctgactacagtagatgccttctggactcttctcccacagcttccatcttctttctaatcaccatgacctctttgttctttcctaccgtggtctacgtaatttcaggaagttgatcctcacatcagtgatttcagaaccactggtactacctcatgtaacctccaacatgcttttaattcctgaaatgattttagttttctatttctttccttatggatgtcagctgacctccatctcctccttttagctttctttaatcttttaaaattacttc

SEQ ID NO: 672119 - DNA, 824 bp, Homo sapiens
ccattataggtggcctgttggcttttttcctgcttaaatatgtgtagtattcttttatcttttaggggtttgttttgttttgtttttgagatggagtttcactctcgttgcccaggctgaagtgcaatgtcatgatcttggctcacctcaacctctgcctcccaggttcaagcgattctcctgcctcagcttcccaagtagctggatttacaggcatgcaccaccacacctggctaattttgtatttttagtagagatggggtttctccatgttggtcagctggtctgaccccaggtgatctgcccacctcggcttcccaaagtgctgggattacaggcgtragccaccgtgcccggcctatctttcaggttttataaattaaccaggatacgcttccattttaatgactctgaattttttccagttcacagtgagtccttatattaatattatatgatctttcattatattccaggaaaactttgtcttttatttattaatgttacatctgttccacacactctgttctcttcagcaggaacaccagctctgactacagtagatgccttctggactcttctcccacagcttccatcttctttctaatcaccatgacctctttgttctttcctaccgtggtctacgtaatttcaggaagttgatcctcacatcagtgatttcagaaccactggtactacctcatgtaacctccaacatgcttttaattcctgaaatgattttagttttctatttctttccttatggatgtcagctgacctccatctcctccttttagctttctttaatcttttaaaattacttc

SEQ ID NO: 672120 - DNA, 824 bp, Homo sapiens
ccattataggtggcctgttggcttttttcctgcttaaatatgtgtagtattcttttatcttttaggggtttgttttgttttgtttttgagatggagtttcactctcgttgcccaggctgaagtgcaatgtcatgatcttggctcacctcaacctctgcctcccaggttcaagcgattctcctgcctcagcttcccaagtagctggatttacaggcatgcaccaccacacctggctaattttgtatttttagtagagatggggtttctccatgttggtcagctggtctgaccccaggtgatctgcccacctcggcttcccaaagtgctgggattacaggcgtgagccaccgtgcccggcctatctttcaggttttataaattaaccaggatacgcttccattttaatgactctgaattttttccagttcacagtgagtccttatattaatattatatgatctttcattatattccaggaaaactttgtcttttatttattaatgttacatctgttccacacactctgttctcttcagcaggaacaccagctctgactacagtagatgccttctggactcttctcccacagcttccatcttctytctaatcaccatgacctctttgttctttcctaccgtggtctacgtaatttcaggaagttgatcctcacatcagtgatttcagaaccactggtactacctcatgtaacctccaacatgcttttaattcctgaaatgattttagttttctatttctttccttatggatgtcagctgacctccatctcctccttttagctttctttaatcttttaaaattacttc

SEQ ID NO: 672121 - DNA, 2369 bp, Homo sapiens
  misc_feature 700, 701, 702, 703, 704, 705, 706, 707, 708, 709, 710, 711,712, 713, 714, 715, 716, 717, 718, 719, 720, 721, 722, 723,724, 725, 726, 727, 728, 729, 730, 731, 732, 733, 734, 735,736, 737, 738, 739, 740, 741, 742, 743, 744, 745, 746: n = A,T,C or G
  misc_feature 747, 748, 749, 750, 751, 752, 753, 754, 755, 756, 757, 758,759, 760, 761, 762, 763, 764, 765, 766, 767, 768, 769, 770,771, 772, 773, 774, 775, 776, 777, 778, 779, 780, 781, 782,783, 784, 785, 786, 787, 788, 789, 790, 791, 792, 793: n = A,T,C or G
  misc_feature 794, 795, 796, 797, 798, 799: n = A,T,C or G
tcccatagaaagtaaagactggagaagagaggccttttggatgctggaggatcttggggagtcctagggtcagcattttgggggtgcccctcccgtgaccagaaatggagaagaattaagaatgaggagtgaatttgccctgggaccaagctgagcttagaatttggttttcttttaaaaaatttgtattaccctatgttttagaattgttctctaaattcactttctgataaaagagacaggtcttgactaattgaggtatctgattaaacaaacatttggcttgattaaaaactaagcaaagaagaattcaagaaagatagatcagaaatgacataaggagaaacaactactctataaaggtagattggtcaaatatgtaaaagagggttgagatgaagggatatttatatcttgaacacacactgagaaaataatttttgagcatttattaaagaccaaatactttaggctttgttttattggggaaagtaaactgtttgcttgttcaatgactttctgggagaattagaaaatttaatcacaaatgaactgctgcaaatcaaatgtagtaaaagccattgtgcagtaatcaaggacagaacataaatggttcctttccttgaacaaggggtgtattcaaaagagggaccctgatttctaaagatcaatgaaaaataaagagtttgaagctagtgtnnnnnnnnnnnnnnnnnnnnnnnnnnnnnnnnnnnnnnnnnnnnnnnnnnnnnnnnnnnnnnnnnnnnnnnnnnnnnnnnnnnnnnnnnnnnnnnnnnnngatatgatctgtgcaacttactctcacacagtgcaggaaagtaataataatatgtatggacatacagagagtgacaaagcaaatgttaacagttggtaaaagtggaagaagagtatacagtagttttttgttctcttccagctttcagtagcagttcagtagctttcagtagctgttctcttccagcttaacttctatttgcctacccaccctctcctcaatgcagcacataccacgcctggtccctctgagccaccatatggtttccatttgttaatcatctgacaggtcagcagcctgagaccaagataaaatgtggcaacagggaaagatgaatggtctgttcgctggtgttttcttgaagattgttttcatattgtagacagttgtgggggtgcatggaaagatttcccccaccaaactcagcacatgagccccacacatacttamaatttttgtattgttttgttttgttttttgagacagtcacccaggctggagtgcagtggtgtgatctcggttcactgcaacctctgcctttttatttttttaagatggaatctcactctgtcgctcaggctagagtgtagtgatgcaatctcagctcactgcaacctccgcctcctgggttcaaacaattcttctgcctcagcctcccaagtagctgggattacaggcacccgccaccatgcctggctaatttttgtatttttagtagagacagggtttcgccatgttggccaggctggtcttgaactcctgacctcaggtgatccacctgcctcagactcccaaattgctgggattataggcatgagccactgagcccggccatatgaaaacttttctaaacgtacatactgtgctcccacactggggttttggcttctgtaggtcagggagggtgccctgggtctgtacaatattttcaaaagttcttcgggggaggattgtttctgtattccacgcctcagtttactagcactccctgccaggtgcccgtctttgtcggtttcatcctcccctcttatgatgcacagtgctcccgcaatgctcccttgcaactcctgagctcttatccactctctcatcctctgagaaggatggctcacaggtgagatgcaggggtgggccctccaagatgacccttcacagccctccctccccaagaatgtcacagctccagaagcaggtttgcacccacagtgacacgccatggctttgcatttcccccagcactaaggagctgcttcatggagcacctctgattgacaaatctaaaatagagaatgaaagaaagtgtcaacctggaggagtttaataacgctgtaattaaaagaaggaagaaggggccacatcccagtgaggaagcagctcctttaaactattgaagaatatattgttctgggggtgccaacagcagaagaaattttaataacaaaaataaattgacaaaaaaaaaggcaggagaggtattagttggaacaaaaccaagtatcttaaaactgctcattttaaactgagtgttttatggtaggataaggaagctccaatattttcaaacacaatt

SEQ ID NO: 672122 - DNA, 2369 bp, Homo sapiens
  misc_feature 700, 701, 702, 703, 704, 705, 706, 707, 708, 709, 710, 711,712, 713, 714, 715, 716, 717, 718, 719, 720, 721, 722, 723,724, 725, 726, 727, 728, 729, 730, 731, 732, 733, 734, 735,736, 737, 738, 739, 740, 741, 742, 743, 744, 745, 746: n = A,T,C or G
  misc_feature 747, 748, 749, 750, 751, 752, 753, 754, 755, 756, 757, 758,759, 760, 761, 762, 763, 764, 765, 766, 767, 768, 769, 770,771, 772, 773, 774, 775, 776, 777, 778, 779, 780, 781, 782,783, 784, 785, 786, 787, 788, 789, 790, 791, 792, 793: n = A,T,C or G
  misc_feature 794, 795, 796, 797, 798, 799: n = A,T,C or G
tcccatagaaagtaaagactggagaagagaggccttttggatgctggaggatcttggggagtcctagggtcagcattttgggggtgcccctcccgtgaccagaaatggagaagaattaagaatgaggagtgaatttgccctgggaccaagctgagcttagaatttggttttcttttaaaaaatttgtattaccctatgttttagaattgttctctaaattcactttctgataaaagagacaggtcttgactaattgaggtatctgattaaacaaacatttggcttgattaaaaactaagcaaagaagaattcaagaaagatagatcagaaatgacataaggagaaacaactactctataaaggtagattggtcaaatatgtaaaagagggttgagatgaagggatatttatatcttgaacacacactgagaaaataatttttgagcatttattaaagaccaaatactttaggctttgttttattggggaaagtaaactgtttgcttgttcaatgactttctgggagaattagaaaatttaatcacaaatgaactgctgcaaatcaaatgtagtaaaagccattgtgcagtaatcaaggacagaacataaatggttcctttccttgaacaaggggtgtattcaaaagagggaccctgatttctaaagatcaatgaaaaataaagagtttgaagctagtgtnnnnnnnnnnnnnnnnnnnnnnnnnnnnnnnnnnnnnnnnnnnnnnnnnnnnnnnnnnnnnnnnnnnnnnnnnnnnnnnnnnnnnnnnnnnnnnnnnnnngatatgatctgtgcaacttactctcacacagtgcaggaaagtaataataatatgtatggacatacagagagtgacaaagcaaatgttaacagttggtaaaagtggaagaagagtatacagtagttttttgttctcttccagctttcagtagcagttcagtagctttcagtagctgttctcttccagcttaacttctatttgcctacccaccctctcctcaatgcagcacataccacgcctggtccctctgagccaccatatggtttccatttgttaatcatctgacaggtcagcagcctgagaccaagataaaatgtggcaacagggaaagatgaatggtctgttcgctggtgttttcttgaagattgttttcatattgtagacagttgtgggggtgcatggaaagatttcccccaccaaactcagcacatgagccccacacatacttaaaatttttgtattgttttgttttgttttttgagacagtcacccaggctggagtgcagtggtgtgatctcggttcactgcaacctctgcctttttayttttttaagatggaatctcactctgtcgctcaggctagagtgtagtgatgcaatctcagctcactgcaacctccgcctcctgggttcaaacaattcttctgcctcagcctcccaagtagctgggattacaggcacccgccaccatgcctggctaatttttgtatttttagtagagacagggtttcgccatgttggccaggctggtcttgaactcctgacctcaggtgatccacctgcctcagactcccaaattgctgggattataggcatgagccactgagcccggccatatgaaaacttttctaaacgtacatactgtgctcccacactggggttttggcttctgtaggtcagggagggtgccctgggtctgtacaatattttcaaaagttcttcgggggaggattgtttctgtattccacgcctcagtttactagcactccctgccaggtgcccgtctttgtcggtttcatcctcccctcttatgatgcacagtgctcccgcaatgctcccttgcaactcctgagctcttatccactctctcatcctctgagaaggatggctcacaggtgagatgcaggggtgggccctccaagatgacccttcacagccctccctccccaagaatgtcacagctccagaagcaggtttgcacccacagtgacacgccatggctttgcatttcccccagcactaaggagctgcttcatggagcacctctgattgacaaatctaaaatagagaatgaaagaaagtgtcaacctggaggagtttaataacgctgtaattaaaagaaggaagaaggggccacatcccagtgaggaagcagctcctttaaactattgaagaatatattgttctgggggtgccaacagcagaagaaattttaataacaaaaataaattgacaaaaaaaaaggcaggagaggtattagttggaacaaaaccaagtatcttaaaactgctcattttaaactgagtgttttatggtaggataaggaagctccaatattttcaaacacaatt

SEQ ID NO: 672123 - DNA, 2369 bp, Homo sapiens
  misc_feature 700, 701, 702, 703, 704, 705, 706, 707, 708, 709, 710, 711,712, 713, 714, 715, 716, 717, 718, 719, 720, 721, 722, 723,724, 725, 726, 727, 728, 729, 730, 731, 732, 733, 734, 735,736, 737, 738, 739, 740, 741, 742, 743, 744, 745, 746: n = A,T,C or G
  misc_feature 747, 748, 749, 750, 751, 752, 753, 754, 755, 756, 757, 758,759, 760, 761, 762, 763, 764, 765, 766, 767, 768, 769, 770,771, 772, 773, 774, 775, 776, 777, 778, 779, 780, 781, 782,783, 784, 785, 786, 787, 788, 789, 790, 791, 792, 793: n = A,T,C or G
  misc_feature 794, 795, 796, 797, 798, 799: n = A,T,C or G
tcccatagaaagtaaagactggagaagagaggccttttggatgctggaggatcttggggagtcctagggtcagcattttgggggtgcccctcccgtgaccagaaatggagaagaattaagaatgaggagtgaatttgccctgggaccaagctgagcttagaatttggttttcttttaaaaaatttgtattaccctatgttttagaattgttctctaaattcactttctgataaaagagacaggtcttgactaattgaggtatctgattaaacaaacatttggcttgattaaaaactaagcaaagaagaattcaagaaagatagatcagaaatgacataaggagaaacaactactctataaaggtagattggtcaaatatgtaaaagagggttgagatgaagggatatttatatcttgaacacacactgagaaaataatttttgagcatttattaaagaccaaatactttaggctttgttttattggggaaagtaaactgtttgcttgttcaatgactttctgggagaattagaaaatttaatcacaaatgaactgctgcaaatcaaatgtagtaaaagccattgtgcagtaatcaaggacagaacataaatggttcctttccttgaacaaggggtgtattcaaaagagggaccctgatttctaaagatcaatgaaaaataaagagtttgaagctagtgtnnnnnnnnnnnnnnnnnnnnnnnnnnnnnnnnnnnnnnnnnnnnnnnnnnnnnnnnnnnnnnnnnnnnnnnnnnnnnnnnnnnnnnnnnnnnnnnnnnnngatatgatctgtgcaacttactctcacacagtgcaggaaagtaataataatatgtatggacatacagagagtgacaaagcaaatgttaacagttggtaaaagtggaagaagagtatacagtagttttttgttctcttccagctttcagtagcagttcagtagctttcagtagctgttctcttccagcttaacttctatttgcctacccaccctctcctcaatgcagcacataccacgcctggtccctctgagccaccatatggtttccatttgttaatcatctgacaggtcagcagcctgagaccaagataaaatgtggcaacagggaaagatgaatggtctgttcgctggtgttttcttgaagattgttttcatattgtagacagttgtgggggtgcatggaaagatttcccccaccaaactcagcacatgagccccacacatacttaaaatttttgtattgttttgttttgttttttgagacagtcacccaggctggagtgcagtggtgtgatctcggttcactgcaacctctgcctttttatttttttaagatggaatctcactctgtcgctcaggctagagtgtagtgatgcaatctcagctcactgcaacctccgcctcctgggttcaaacaattcttctgcctcagcctcccaagtagctgggattacaggcaccmgccaccatgcctggctaatttttgtatttttagtagagacagggtttcgccatgttggccaggctggtcttgaactcctgacctcaggtgatccacctgcctcagactcccaaattgctgggattataggcatgagccactgagcccggccatatgaaaacttttctaaacgtacatactgtgctcccacactggggttttggcttctgtaggtcagggagggtgccctgggtctgtacaatattttcaaaagttcttcgggggaggattgtttctgtattccacgcctcagtttactagcactccctgccaggtgcccgtctttgtcggtttcatcctcccctcttatgatgcacagtgctcccgcaatgctcccttgcaactcctgagctcttatccactctctcatcctctgagaaggatggctcacaggtgagatgcaggggtgggccctccaagatgacccttcacagccctccctccccaagaatgtcacagctccagaagcaggtttgcacccacagtgacacgccatggctttgcatttcccccagcactaaggagctgcttcatggagcacctctgattgacaaatctaaaatagagaatgaaagaaagtgtcaacctggaggagtttaataacgctgtaattaaaagaaggaagaaggggccacatcccagtgaggaagcagctcctttaaactattgaagaatatattgttctgggggtgccaacagcagaagaaattttaataacaaaaataaattgacaaaaaaaaaggcaggagaggtattagttggaacaaaaccaagtatcttaaaactgctcattttaaactgagtgttttatggtaggataaggaagctccaatattttcaaacacaatt

SEQ ID NO: 672124 - DNA, 841 bp, Homo sapiens
gagtcaaagttggaacctcagcctttaaggagcactctgccaccacaagccagtaccatactgtttgacttcccagcctccataaccatgagccatatatatttatattctttataaattacccagtctgtgatattcgattatcacagcagaaaaagagctaagacacataggcagaagaactgatcaagtattttatagaagaggaactactttttataatcatgttaaagaatacccaacctcattaacaagcagggaaatataaatttaaatggcattgcgaggccagcaattccagcttagacacattccctggagaaactccttcccatgtgcacaggaacaagtcccacgagttcatggccacatcattcgcaccaatgttcatcaacagcagaatagaaataaatggtgttgggaaactggctattcatatgcagaagaaggaaattggactcatctcactccttatgcaagaatcaactaaaatggatgaaaaacttaacaaaagtcccgacactctaaamctactagaagaaaacattagagaaaagctccatgacactggtctggaccatgatttcttggatatgacctgaaaagcacaagcaatgaaaaagcaaaaatagacaaatgggattgcaggaaactggaaggcttctgtacagcaaaagaagcagttgattgaaggaaggaacataccacaggtaggaagaaaatacttgtaaattatatattggataaggcactaatatgcaaaatatgtaaagaactgaaactaatcaataataagaaaacaaataaccctctttaaaagtgagcaaaggacctgaataga

SEQ ID NO: 672125 - DNA, 558 bp, Homo sapiens
ttgtatttttagtagagacagggtttcatcatgttggccaggctggtttcgaactcctgacctcagctgatccgcctgcctgggcctcccaaagtgctgggattacaggcgtgagccactacgcccgaactggtcacatatcttatggaacataatgtttttcatgatcaacggccactatgggaacacaacacacatcagccctgagacacccgaaacaagacagagcagcctctgcagcctctcatgcagggagcgtggggcatgtctgccacagggtgaggggcggcgggcagagmtggagacataaaggcggagctggcttccagccttgtgaaccagcccagctgaatgccccaagtctgtaaataattgatgggagccagagcacccagccctgcagggctctcgggagctgcccgcccaacagtcccatgcctggcactccctcaggtgccgcctgcaaggtcactccactgcttctaaataatgcactgcacagatggaggaaagtatacctttacccattcaaatcttccaaggcacgcattttcacaa

SEQ ID NO: 672126 - DNA, 791 bp, Homo sapiens
ctggatgaaacagcgagactctgtctcaaaaaaagaaaagaaaaaaaggagaaaaaaaaaagaaaagagaagaagggcgtcccaggaaagagaatagcaaacgcaaaggccttatagtggaaacagcctttgagaatctgaggagcasaaaagaacacactatatagagtgctggggttgttcagcctccccacgacagaagtgagcatatgggcacacttatgtgacccaaggaagtcaagatttttgaagacacctttctctaggttctgccactgaccacccaggacacaatgagtccagggctcaggatgggttggccagatgtgaatcagcccccacctggccctttactttacagatggaacaccagctcctaagatggctttgatatctaattgctggcgataaattaaacccacaaaacggtggatgcaaagctcattggggctgttaacatcagcaaagccagtggctgtgcctgttttcacaccaagatgccgtaagatacaactcacctctggagatagattacatggagatagggctctgccctttgggcctggaagcgagagggtcgattcctgttactgagctcctgtaactaggcttgatcttatcacagttatatgaatgcttgggagggagatcctggagtaggggtgagcagagattttcagcaatagtcatatactctaatctcagccagcaagagacaagcccctcctccctctagcccgtgagtgagtgcaggctaggggcctggctaggagcactgccaagggatgagg

SEQ ID NO: 672127 - DNA, 791 bp, Homo sapiens
ctggatgaaacagcgagactctgtctcaaaaaaagaaaagaaaaaaaggagaaaaaaaaaagaaaagagaagaagggcgtcccaggaaagagaatagcaaacgcaaaggccttatagtggaaacagcctttgagaatctgaggagcacaaaagaacacactatakagagtgctggggttgttcagcctccccacgacagaagtgagcatatgggcacacttatgtgacccaaggaagtcaagatttttgaagacacctttctctaggttctgccactgaccacccaggacacaatgagtccagggctcaggatgggttggccagatgtgaatcagcccccacctggccctttactttacagatggaacaccagctcctaagatggctttgatatctaattgctggcgataaattaaacccacaaaacggtggatgcaaagctcattggggctgttaacatcagcaaagccagtggctgtgcctgttttcacaccaagatgccgtaagatacaactcacctctggagatagattacatggagatagggctctgccctttgggcctggaagcgagagggtcgattcctgttactgagctcctgtaactaggcttgatcttatcacagttatatgaatgcttgggagggagatcctggagtaggggtgagcagagattttcagcaatagtcatatactctaatctcagccagcaagagacaagcccctcctccctctagcccgtgagtgagtgcaggctaggggcctggctaggagcactgccaagggatgagg

SEQ ID NO: 672128 - DNA, 612 bp, Homo sapiens
tgttgaaaggggttgtctgggtaatgaaaataagacatcacctttatgtgctcttttgtatattttttgtatttactgacatttctgtaatgatatatacgttatgtaatcagaaggaaatgttacataggaaaataaagagctcaaatgtattcaagatactgaattcacaatatagaaaagactagataagtcatattttagaaaaaattctaacagaaatagacaaaatctcttcttggtgctcttaaaggtttaaccttgagttccctggaaaagtcactcatccaaaacacagcattccccaaagatgtcaaacaaaagaagtattgtcgggataagttcaaactgcatcccagttacctgctgtaagatttgtggatcactgttgtgatgactgtgaaactgtaggtgagagagagggattcatactggaatcctaaggctcccactcaaaatctgtcatctgaacttagccacaggcactaagcctctctaacaggctcaagaaagagaaaggccaagggaaaaaaagtacactcrtgatgtcacaaatttctaacaatcaaatattattaggtttacagcctgccttttaaaataccatcagga

SEQ ID NO: 672129 - DNA, 1452 bp, Homo sapiens
tcccaggaatgctacaacctaataaggaaagtattgaggtatttacttgaggtagggagttagcaaacttcctgcaaagaggaattgaggatttttagctatgacttcaaaacttggttaagttagaacttatgagatatgttatggacttctccccgaactccagtcttaaatatttaattgccttctagacatttccagttgccttctaggcaccttatactcaaaatgtcaaaaactaaatttctcatcttccttacccagacctgctctttccaaaggctcttcctggatcttagttgctataagattgacttttaccttgtgaagtatcaagactttcacctatctctatgtctgtttccaaactttctcacctgtgtcatgcagtgagatgacagttgaggtggcagtttgctatacagtgagatggcatggctggcagcttgaccttctctaatatgatgtagataagtgttgaagcaacagaaaacaggactcagacaggtggaccagctgtgacttctgatttacagtgagtgccattataagtttttatagtatgtcactagcttagtcttagacaatggtgttaatcttgagtgacaagtcatgaaggataagcagctgtaactctgaagtttccatcacacatttgacagggcttgaaatcttgacctgagataaaacaccagctgctcgttcactgactatttaataccaaatagtgcaacatagagcactgaagaaatgtcaaaagttcttcaatacatatctcattaatactagccaattggtactattaattttagaaaataaaaagtatctagttgtctccgtgaaaggaaaaaaggaattagtgtaaattagtttttcgtccatagtttttcatagggatagtttcttgttcactctattgtgaactctactccacaacagctctccaccaaycttgttaattaactttatatgtatggataacaaacttaaacatggtaataagatttttggaattgtccttctttatagaatcataaaactgaaggactaaaaagaaccttagagttaatctggcctaaaatatcatttaatcatgaggtaacaagagctcagtaaggagttctttactttactttaagggccacactgctcttaaatgaaagaggtagaatttcaactcatgtcttccaactgtgagtcagggttctttctattcatcacactatcctctctttctatgttgattcaaccatttaaatgaaattgcaggaaaaataaagtaaataagtgaaattattttctttgtattatctttatacttataaataaataggcaacttcatggtgaacatcggggtgtaatttaaagaaaaaggatgaggaagcaactgcattcagaaatgatatccttatatagaccgaaaaagtaaatagtaataaattttaggaggt

SEQ ID NO: 672130 - DNA, 1908 bp, Homo sapiens
agtgtgtttgtcctaggagcaaatgtctcctatatttgcttttcattaactttaatgaatgtttgtgggaggagctatcatattgactctgccttctctccacctaatgctgagcttctcataagtcaatatgcatagaaggccctgctcatggcatgtagcctgcacagtgtgactcttaaaggacatttgctgatgataaagaggaatgcaaggaaattaataacatctgaggaagcacaagagcatcataaggattcagcagagcaaatgggtagctgaattgacataccacttctttgttcctacytgaataaaagtctaaatgtgtaaaattaaatctttttagttaaaatgtgcattctagaagggttttaatagccatctagataataatggaaagacacagggtcactaagcaaaggaagaaagaacaatatgtaggaaaataaagcatatgggaatacagcgcatggcacacagtatgtgtttatatttctcaaatattgagtaagagatcagctttcctccttgctaacagacaccccttatcttggattctattaagcattcactaattgaaataaaaatgaaacaaaacttagaaaaatgtgatagtgtcgactgcactcgaagaaaaaaataattacttagtcactctaattacacatgcagagtaaagcaactgcttgctatttactggtatatgccaaaaacaatttaatattaataaatatttgtgagaaattacttgttaaatttaattacttaacaaaagcaataaaataatttttaattaaaaagtatgtacacccataagtaaaatgaccccttgtgttccaatatagtggcttcttttagagctgaaggataacatatctgaatccctaactatatacaaatcatgagggagcaaagaggttaaataccacattgtctcttcccaatggaaaattaggaaagaaaattgccaaaggaaaaaaaaatgaagattgaaataggcctttttttttttttagatactctcgtcttatctttaaggaacatgatctttttttttatgctggtaaagtaaaaatccaaagttcttggaattgccaagggtaatctataaccttgacgtcctgagaactacttctgtgctcttactgccatgccagtctccaatgggctaactcattacaattcttaacgaatgaattaattgatattttctttggaaattacaaccaatttgcaaaaattagtactgatgactttttcaacagacataaatagttgtgtaattcttactaataattccaaccactaatcagctgtaattggaaaacaacaacttgtggcgaggggtgagggattagtgctcggaagttccccctatatgtctggaggaaaaggttaaatgaaatggccttactttgccatcccaggaaatcaattcttccagcatccctagcatggcaatagcaaaccatataaaaaatagttttccttatttctcattcagttataaaaattctgtccctaactggtgtatgccaaatcttcctcattgttaacacagaaagctcatcgaatggaattattctagtcttctatgcaagttttataactaggttcttcactgaattttttaagtttctgaaatcctgggtaaaagtttctttgagtcttattccttcttgatggagtctgcagcagtagaggcgagagtaggcaatgaaggggaacaagaaaaggacagtccctaaaacagacttgttttcagagagatgatttactaaatgaccttcttggcacaggcgcccaactaatttcagtctgaacaaggaaataaggtcagacactaccaacaaagtacgaccatggtcattcctctgatagcaacaaattatccctggaaaggaa

SEQ ID NO: 672131 - DNA, 899 bp, Homo sapiens
ttgcaggggcagcaggaaagcaacagacccctcccctccctcagcccccagcccctcccccaggacccrccccagaagtcagatgggcgcacctgctgcggggggctgtgacagatctagggcacaggctcagaggaatttccgctgcagtcgagggagagggagggagggtgcaggtctcgatctctagagctgggcagagggaggacccaggccgggccccctggaaggctgctcctccatggagggcacagtctaagaggaatttctaccacagtgggggagggggtggtgggagggcacaggtctccatctctagagctggggagaaggaggacccaggccaggccccccaggaggctgctccataaagggcacctcctggcgtgtgcagggccgaggctctgggcatctaggccctgctgccacatctcagcctgcctgggcctctgcctgacctggacagggaatcggggctatggggctggagggaccccagtgcaaaatgaaaatggggacctcctgttccaaaatgattaagcgcatcaagatggcaacaccagggcaataaaaccaagcgtaggccctcctgagtgtggggcctgtgtgactgctgaggctgcacagccacgaagccgccttgctgccagtttggggaggggacagggaaaggctgcgaccacaggggcccacccccagtaggacggggcagcagaccaagatgggcaagcccagcccctggcctgtctttccattctggctctgatacttccttttattttttgaggcagagtctcactgtctcccaggctggagtgcagaagcacgatcttggctactgcaacctctgcctcccgggttcaagccactctcctgcctcagcctccccggtagctggg

SEQ ID NO: 672132 - DNA, 899 bp, Homo sapiens
ttgcaggggcagcaggaaagcaacagacccctcccctccctcagcccccagcccctcccccaggacccgccccagaagtcagatgggcgcacctgctgcggggggctgtgacagatctagggcacaggctcagaggaatttccgctgcagtcgagggagagggagggagggtgcaggtctcgatctctagagctgggcagagggaggacccaggccgggccccctggaaggctgctcctccatggagggcacagtctaagaggaatttctaccacagtgggggagggggtggtgggagggcacaggtctccatctctagagctggggagaaggaggacccaggccaggccccccaggaggctgctccataaagggcacctcctggcgtgtgcagggccgaggctctgggcatctaggccctgctgccacatctcagcctgcctgggccyctgcctgacctggacagggaatcggggctatggggctggagggaccccagtgcaaaatgaaaatggggacctcctgttccaaaatgattaagcgcatcaagatggcaacaccagggcaataaaaccaagcgtaggccctcctgagtgtggggcctgtgtgactgctgaggctgcacagccacgaagccgccttgctgccagtttggggaggggacagggaaaggctgcgaccacaggggcccacccccagtaggacggggcagcagaccaagatgggcaagcccagcccctggcctgtctttccattctggctctgatacttccttttattttttgaggcagagtctcactgtctcccaggctggagtgcagaagcacgatcttggctactgcaacctctgcctcccgggttcaagccactctcctgcctcagcctccccggtagctggg

SEQ ID NO: 672133 - DNA, 899 bp, Homo sapiens
ttgcaggggcagcaggaaagcaacagacccctcccctccctcagcccccagcccctcccccaggacccgccccagaagtcagatgggcgcacctgctgcggggggctgtgacagatctagggcacaggctcagaggaatttccgctgcagtcgagggagagggagggagggtgcaggtctcgatctctagagctgggcagagggaggacccaggccgggccccctggaaggctgctcctccatggagggcacagtctaagaggaatttctaccacagtgggggagggggtggtgggagggcacaggtctccatctctagagctggggagaaggaggacccaggccaggccccccaggaggctgctccataaagggcacctcctggcgtgtgcagggccgaggctctgggcatctaggccctgctgccacatctcagcctgcctgggcctctgcctgacctggacagggaatcggggctatggggctggagggaccccagtgcaaaatgaaaatggggacctcctgttccaaaatgattaagcgcatcaagatggcaacaccagggcaataaaaccaagcgtaggccctcctgagtgtggggcctgtgtgactgctgaggctgcacagccacgaagcygccttgctgccagtttggggaggggacagggaaaggctgcgaccacaggggcccacccccagtaggacggggcagcagaccaagatgggcaagcccagcccctggcctgtctttccattctggctctgatacttccttttattttttgaggcagagtctcactgtctcccaggctggagtgcagaagcacgatcttggctactgcaacctctgcctcccgggttcaagccactctcctgcctcagcctccccggtagctggg

SEQ ID NO: 672134 - DNA, 1004 bp, Homo sapiens
ggggcgttctgtctgcaagaacggcattctgacctgacgaggcgagaggagagagatccaggcagaggccctgcaggtgcagaagccgcttggggacttgggaggccggagccagggagtgaggagagaggggtttgggggcgctgctgccctgggtttggactcagcagactctggaaagcaggcattggaggaagggcggctgaaccctctggctgctcattaaccaggcctgacgctcggggctccaggggtggggccgcaccccgcttgctcacctgcctggctgctttatcttgacaacagattgcacaaaccccagagctaatattgaacttgcctggcttttaaatagcacctgtaaacaccactactcccagcccctggtccacacatccctgcccaaggaggcattsaggtgaggctggccccaggcactgcctcgcaagcactgaagtggagcagagtcagctccccaggaaccagatcctcatcatttgccccacccctgatgagcgaaaccttctctgctcaccttttgtgctggaaatggtcaggggaacccttctctgcagggaaggggcaaacgcccagccaagctggagagccatttccagacctgcatggacgtcctccctgagtggcaaggccaggccctgggtcaggctccagccggagatgtccaatggcctcacccatcgctgcctcgggggctccacccagctgctgctctgccgtggcctcattctgctgcacctgagatccctggagggcttcggaagtcacccccagccagagtcccagctgctgttcccatccagctggtctggggtggcagggtttggcttgcttaaagctggcgattccagtgtgcagccagggcctcaacacaggctggggggccgctgagcccctggagagccaccatgcactaacatgggaaccccaacgagagaggagttagggggctgtagaaaagagaatgcgcagtggggtaggggtgg

SEQ ID NO: 672135 - DNA, 622 bp, Homo sapiens
tgcctgttctgtaccatctcagttaggggccagccacgatagaagctgcttgaggcatttcaacagagaggatttgactcttggcactgctgagcaggtgctggaggacccagaaggcaggaggggatgcacgggtgatgtgaggtggtgacagcaggaagcagccccacccccagggccaagggaaagggtggagttgctggacccagaggcttggtggaggatggatctgggactgaccttggaggcaggtgtgctgccgggctggagctgcgagtgtcaggggaagggaagtcgcccgtgatgctcatgagacaaaacccatcttgtggtggcaaaaaggggctggtctcctccyagcgggatttggagcggagccacaccgatgcacgctttggcggagactgagccgcagggaagaggcgcagtaaaggatgttgtcacccaaacatggccaccccacccaccctccaaggcaagcctgccctgcccacccagaaagtcatgcagccccgcttacccatcgcactgagcagtcttatctcctgaccacttaccactaggaagaagcaattttgttcccattttacaggagactgaggctgagagacgaagtaacttt

SEQ ID NO: 672136 - DNA, 622 bp, Homo sapiens
tgcctgttctgtaccatctcagttaggggccagccacgatagaagctgcttgaggcatttcaacagagaggatttgactcttggcactgctgagcaggtgctggaggacccagaaggcaggaggggatgcacgggtgatgtgaggtggtgacagcaggaagcagccccacccccagggccaagggaaagggtggagttgctggacccagaggcttggtggaggatggatctgggactgaccttggaggcaggtgtgctgccgggctggagctgcgagtgtcaggggaagggaagtcgcccgtgatgctcatgagacaaaacccatcttgtggtggcaaaaaggggctggtctcctcctagcgggatttggagcggagccacaccgatgcacgctttggcggagactgagccrcagggaagaggcgcagtaaaggatgttgtcacccaaacatggccaccccacccaccctccaaggcaagcctgccctgcccacccagaaagtcatgcagccccgcttacccatcgcactgagcagtcttatctcctgaccacttaccactaggaagaagcaattttgttcccattttacaggagactgaggctgagagacgaagtaacttt

SEQ ID NO: 672137 - DNA, 2016 bp, Homo sapiens
  misc_feature 535, 536, 537, 538, 539, 540, 541, 542, 543, 544, 545, 546,547, 548, 549, 550, 551, 552, 553, 554, 555, 556, 557, 558,559, 560, 561, 562, 563, 564, 565, 566, 567, 568, 569, 570,571, 572, 573, 574, 575, 576, 577, 578, 579, 580, 581: n = A,T,C or G
  misc_feature 582, 583, 584, 585, 586, 587, 588, 589, 590, 591, 592, 593,594, 595, 596, 597, 598, 599, 600, 601, 602, 603, 604, 605,606, 607, 608, 609, 610, 611, 612, 613, 614, 615, 616, 617,618, 619, 620, 621, 622, 623, 624, 625, 626, 627, 628: n = A,T,C or G
  misc_feature 629, 630, 631, 632, 633, 634: n = A,T,C or G
tctctcgcctccctggacaaagcccttcagagcctcttgagacactgtcccctggttgcctttgcttatgtcctttgggctggctagaaagcacccccctgaccgggcataatggcttacgcctgtaatcccagcactttgggaggccgaggcgggagggtcacgaggtcaagagatcgagaccatcctggccgacatggtgaaagcctgtctctaccaaaaaatacaaaaattagctggacttggtggcatgtgcctgtagtcccatctactccggaggctgaggcaggagaatcgcttgaacccgggaggcggaggtcgcagtgagccaagatcacgccactgtactccagcctggcgacagatcaagactccgtctcaaaaaaaaaaaaaaaaaaaaagcgcccccttgtctcccggaacgtggcagccacccccagggccccctttatcacaggtgggccggcccacagcttctgcagatgtgctttctggtcgccataggtcactgagagtgggcgcgatctcatcctgnnnnnnnnnnnnnnnnnnnnnnnnnnnnnnnnnnnnnnnnnnnnnnnnnnnnnnnnnnnnnnnnnnnnnnnnnnnnnnnnnnnnnnnnnnnnnnnnnnnntgatcgcgccctgctgtgtgccaggctcctcatgtgagaaggaccataggaatctcccgtttcacaggtgggcacaccaaggcccgacaatgggtccaggctgccaagggtggagccgagatgcaaaggggcacctcagagcctgcatgtctggccaggctggacacaggctggcatgttcgctgcctggaaacaccctcccagcagccagcacccagctctgaagctctggctttggctgggcaccatgccagccctcgccacagcggctccagacctccctttctctccaggcctcccgagaaagccctttgcatcttttgactcaccctgaacaaatgctccctccctctgtcacgtccgccctcccctgcccacgctctctaggggcctgcccagaacagctcctaaatcatcccgcctgcctcctcccgccggcttcctcctgggcgcccgcccaccctccccaggctctgccctgttcccaggatggcctggagcagagccagcccagagatggggagagaagaaaaccagccagcgccccgcagaagggctgcgtgaggagtcccggcggcctgagtccccccagcctgcagagcccacagccctgtcccccggctggtatgtcctctgagtttcaagatgctctggggatttttctgctttttacccctgagcttgctgcttctagaaccttctcttggatatgaacaaggctgatgaaagcttcagccccaagtggcctgtttccagcctcagtctgtccacttcatttggaaaactcactgggaccccatgagcaggaggcaggacatcagcaggcccgtccttccttgcccctgcccgtctcctccccagttccccaagtccatggaggcaggaggataacacgctgtcctgctcactcagcctctccctgctgcccaggcactggggcggggggagttgggagtgggyggccgtgttgtttggagagacaggaaatattaggccgtggcccagcgcagacaggccctgtcttgaactccagcacagagtggatgtgctgcaattgtaatgcaaaaacacctctgattagttgtttccacaccccttccacctccccagcacccaagtctagttccatgctgggtggaggagccgctgtcccggatgctctccgctcctctgcctgccaacaccttccactgcctggccactgccagaggcagctgcccaccacctggagccatggaggagagcagttggctgaacgggcagcttcctcctccctccgattgggagcaggatttctgctcagttcaggacgttcaggccattctcaggaccccacaacggggcaggatggatgtccggacgctacacaagtgggaggccac

SEQ ID NO: 672138 - DNA, 635 bp, Homo sapiens
tgttgttttaagccacgaagtttgtggtattgtcacagcagccatgggaaacaaacacagacctcttcttaagtaagcccctgccatggtgatcggcaaggcagaagtcacaagagcaggcagagggaagggaccttctggatcagcccagagtagagacggagggcatgctgtgtcttctscagcagctcccacccaccctgccagccccctcctcttctcccccgccccacccactgtcccagaccacagggagaggctggctttcctttcctcaggtggccaacagagggcaactggtggtgacagtacccacgggtaaactgaggcacagcatgggaaaatcaggcttttgcaactgcaccctctggtgggaaaacagctcagtgctttcattctcttgattaccctcgctccctccttcctctgctgtgtgtggatgctgggatcagccctgccctgggaacagagagagaaaccccatgggaagagccaggaggaggtggagacaccacaggctctgacacccatgtatagggaacgcaagtccagtcctggtcggccagggttggaggtaaggcctggcccagtggttccccaaagcctggagcaagcactgctgagaacaagggatc

SEQ ID NO: 672139 - DNA, 586 bp, Homo sapiens
gagggaaggacatccatcacaaggtttcggttgcacccttctcccggcagctgaagatgcctggtcagtccgtttgggccttgcctgccagaggaatcccagccccagggttcctcatggccttcacaggagggcagagtccccagccctggagctgtrctcccggcagccagcaagtggccacctcccagacggccacttcaaatgcaacacctgggaaccaaagctgcccacatggtgagagcctggccagccaccaggagcctttgcccgggagtggccccactctggacacggcagtggccctatccgaccgtagtgacgcaagtctgataagctctgtgggctgccccgggagtctgggacggcagggaacccagtgttaccaaactcatcaccgccttccacaacacacacaacccccgcctctgggggagaccaaggcagctgacggccacgtgtttccctgggggactctgcccagggcccaggtcggcacaggctcctcctgtacctgcttcctttccctggcaaaagctgctgtccccacgtacgaggcatttccagggaagtgggggtcagaaac

SEQ ID NO: 672140 - DNA, 638 bp, Homo sapiens
atgctggtgtgctcctgtaatcccagttacctgggaggctgaagtgggaggatcacttgagcctgggagttagagactgcagtgagctatgactgcaacactgcactccagcctgggtgaccgagcgatactcctatctcttaaaaaatatatattatttatagattattattattttttaattatacaggtcagccgggcgcagtgactcatgcctgtaatcctagcactttgggaggtcaaggcgggaggatcgcttgagcccaggagttcgagaccagcctgggcagcatagcgagacctggtctctaartaaataaattatatagtcaatttgagagggacccaggagattcgtgaggtgatcaccactgtcatgcaggtgagaggcaggtgatggaggcccagaacgggatgctgggggaaaacgttaggttttcggcatgtcttaggggcagagtcaacaggaccccttactttgcaccctccttgaactctgcttatatgttacctcctgaccactctattgaaaatgcaaaacacaggaccgggcgcggtggctcacgcctgtaatcccagcactttgggaggccgaggcgggcagaccacgaggtcaggagctcgagaccatcctggct

SEQ ID NO: 672141 - DNA, 660 bp, Homo sapiens
tatataatttgattgactgtaacacagaagataaatgcttgagagaatggataccccattttccacaatgtgattattacacaccgcatgcctgtatcaaaacatctcaatgtgccccatatcatttattctttcttgttttataactaattataactaacacttcaactgcacttgccatgcgatacckaacggtatatctgtcatcctatattacaaactgtctctaggtaagaacattctaagaaccccacagctggcaagaagcctgctgctatcctgagaaatcagcaaaatgtcaatctgaacgaaccacatttaacctgtgatataatttggctctgtgtccccacccaaatctcatctcgaattgtactcccataattcccatgtgttgcaggagggacccggtgggagataattgaatcatgggggcagtttctcccacactgttcttggtagtgaataactctcatgagatctaatggtattttaaggggaaacccctttcgcttggctctcattctcttctcttgtctgccgccatgtgagatgtgcctttcacctgccatgattgtgaggcctccccagccacatggaactgtaagttcattaaacctctttcttttgtaaattgcccagtttcaggtatgtctttat

SEQ ID NO: 672142 - DNA, 613 bp, Homo sapiens
gacttcctgggtcaagtggagacttggagaacttttctgtctagcaagaggattgtaaaatgcaccaatcagcactctgtagctaggactgtaaaacacaccaatcagcgctctgtagctagcaaggggattgtaaaatgcaccaatcagcactctgtaaaaatgcaycaatcagcactctgtagctagcaagaggattgtaaaatgcaccaatcaccactctgtaaaacacaccaatcagcaggatcctaaaagtagccagtcgcagggaggattgaaaaaagggcattttgataggacagaaactgaacatggaaggggacaaataagggaagataagctggccaccccagccagcagcagcaacccactctggtccccttccacgctgtggaagctttgtccttttgctcttcacaaataaaccttgctaccgctcactctttgggtccatgccatctttaagagctgtaacactcacctttaagagctgtaatactcacctttaagagctgtaatactcaccgtgaaggtccgtggctccgttcttgaattcggtgagagcacaaacccaccagcaagaaccaactccagacacaccaggaggcaagag

SEQ ID NO: 672143 - DNA, 1100 bp, Homo sapiens
atgactgttttctaataagagcattaaaaattaactgatgttcttaactcttagctgattatgagttactgatgaagtcccagcaagaaatgctttatcagacacaagtgactgcatttgttcaagaacctaaagttggagaaacagcacctggatttgtatactctgagtatgaaaaagagtatgaaaaagaacaagccttaattaggaagaaaatggccaaagatactgtagtggtcagaacttatgtagaagatcaggtgagtataaaagtaatgaccaaccaaacaatttcataaattatactttcctttttttatttgatattttcattttcaagtgatgagctcggggttagacagctattagaaggtccaagttcactgttgctaagtttccttaatcttcatggtatgttgcacctgtgagtttagaaatagagattacatataggccataaatgtgactttaaaaatagggcttataatatattaaggaaaacaccaatattagcacagctgagttcattcatgccaagatctcttcatctgtgtgataagctaatgtaacctctaacccaaatctaactcctgcttttggaatacctttctacccaagatgccacaacattcactgggaaagatgaccataatgcagattaaaacaaacaaaccaaaaagtcytctagattcttctcccagctaaaaacttcaacagtctagctcagatacatctccttaaataatttatatcagtaaggatatgtatttttaacagaccataatctttttgcataggaattccatatttcttcctttgaagagagacttattaaagaaattgaatatagaataataaagactacattagaagaacttcttgaagaagatggagaagaaaagatggcagttgacatttctgaatctgaagctgttgaatcaggatttgattcaagaatcaagaattatagaattcttgaggggatgggtgtcacttttcattgcaagatgtctggatatccattaccaaaggtaaaatataaacatttatcatagctccttgccacagtaaagatacaaattggttaaaatataactatt

SEQ ID NO: 672144 - DNA, 537 bp, Homo sapiens
atagctttagataacatgaatatttggcyacttctactttgaatcacaatgtaaacagaattaataattctgttgaattatacacacaattaagtttatgaaaccaatttaaattagttaaccattttctcatattactggattcagaaaagctctaacttattcagtcatctgttattagcatgtcaagtttccccaactttaaatcatgattgctaaactacaggaaagtcaactacagcaaagagcaaactctcccatttggtaacaattgaaaggcagggcaccacaatacaattcattccaataagttttcatatcacttcaaaatatcaggatagtccggtatccatgtataacttgaggcaatttttgtattctgtttacagcaatataatttcataagagttctttggtgaaaagcaaatcgtggtgttagagaaaaaacaaaatttcacttcattttttagctaacttcagactcatccatctagaagaaacatactcaaggtattccgaaataacaaaaacctcaaa

SEQ ID NO: 672145 - DNA, 627 bp, Homo sapiens
ataaatcacactccagttctatgatagagtcaatgtagttattaacaatcgtgctgtagaattaatgatgccgaaatgttctttatacatgatgaggtagaaaaagcagtttgccatttagtacatgtgatatgatcctgagtttattgaaacataaacatatgacgtgcatgagaaaatatttgggagtatccatgaaaaatcccaatgccagtttgggtaactaaatgcaatgtgcttgtctttatttttagataaatttacaatgaatatrttacttttgtaataaaaagcatgataaatataatataaaaaggaatgattaattttctatctattagaagatttgacacaggagattgttaacttttaattaatcaactgaactgaataggtacaatttgaaaaagcattttagaggactggaacaataattacgtaatactccacattgttactctctgcagaaagaccttcttaatatttaacagcagtttaaaaaatctgtaaatttccaagcaaatagaaaaatctgtgctattctggacttttacaagacactagagcctttgtaagtcttttctagagcaagacagagtgaaataaaatagaataaattaaaatgaa

SEQ ID NO: 672146 - DNA, 601 bp, Homo sapiens
cgggagccaggttaaaacctgtgggaaatataggtagaggggcagaggacttctaaaatgggagtgaaacaaaagatctttcagatgaggtgtgaattgaactaatgttaactacatatttattatcctatcagttgtctgagagtcaaaccaatgacttcatcattaagtgatgaagcccttaaaataaactcttggcatatgtggatgtaacatttgtggttccactatatttaaagcattctagaggtccattaaatttgtaattttgctgagacacaagcttgaattctgaatttsatgtgagaatgagtaagttgattggttaggaagtcacctagctagtgagtaagaagtaatctgaaactaatttttattttgttttgaatttgccagcacctctagtaaaaattagctcggaggtaatatgaatatttacaataaaatagtttaattacttgagctttatttcaccttatccctgtctcccattaacattgataattcagtttatttggaggaaatagagtgatttcacatgtctttttaaaagtttctgagagatggcagatagtagaaagcaaggcttttgtcatgaagc

SEQ ID NO: 672147 - DNA, 599 bp, Homo sapiens
caatgtgcttctgtgtggacttcctggtgtattatgactgcactctttcagagtctccatttattccagtttatcatactttactagtgtgtatagagacttttgtaccaaatatattygtatttatttttctgataatagaacaaagaagagaaaggtttcagattgaaaaacttttgattttatatttttgcaaggtggcttgcataattttttactccccaacttttaagatgtggaatgccagaaaccacactctaagtaaaatgtttaagtgtatattttagataatactaaaatttaaaaagtgatattgttttaaaaacatcttagtctcaacatttttgcatcagttgtgattgtgattgtattgcattttaagtccagtttattttaaattccctagaggaacacatctccaggcatgtctcagtttataatgaaagccaataacaaaatcaatttcaatatgtaggaatttgatttacaggcaactgtttagaaacatatctgttcagcaaaatgaaatacatttctatgtttgaatatgtaaaaacttatacaaataaaaagtaaaaatatattttatatcctgtcat

SEQ ID NO: 672148 - DNA, 1882 bp, Homo sapiens
acctaaagcgtctcctgcaggatgtcagatttgctgaaaaaatcctatgtcattgtgtaaagattaagaaatctttattgctgattttctgtttctcaggacggttgtagttcaacatctagttttggatgtctttgccaatgcctattatgtaatgttttcttcagatctcttwatttaaatttagttttaattgtctattataattgtaattttaaaaatcctagttagtagatcatatttcttctatcgaactttatgtttgtaaccatcaaccaacctctcttcattctccacttgcccccacactcttcccagcctctagaaattatcattttactcactatctccacaagatcaactttttaatgtgtcaatttttaaaaagtccttaaattatattgtcactacttcaggccttaagtagtaagccaaataaagaacagaaagaacagctcattttaatctggaatgcaaatggtgttttatgtgttgtatatacttagcctttcagttcaggggtctactaacatctgcctagggtttcttggtcttctagttcaaataaaatgcaaatcccatgctttatgttggttcatcttgtccaggtgtttattacacatatagtcaactgtaatcacgggatattaaaatgctttcaatgtgcgtaatttaatgaggggttatagttagaaaacagtttcagggactaaatatttgtactgtggtctcagagtggctatcttgctagcaagagatcctgatgtttggtagctatctcgtgtatccttataataaacttctgtaaaacaaagacctttgaatttgccatatttttttctgtctggaatacgctttaactggatcataaagtaatacactcctttcccccacttctgatcagcccaaaataatatacccgtctctagtcaacctgcgcaagtcgccctggcttccttcatgtccagtcactctagatctaattttactattgcatgtatttcctagtattcagcattcttcagaatgattttgttcaactgttacatgttaattgtttttcatccccactggcttgtaaattttctatgagcagttagcttttctttcttgctcatcaatgaaatcacagcactgaaaacagtataggtcatatagactttgatacacattttcaatgattcaatgtacccacatattctaaagtgtttcatgcagacactattatgggatatataaagtgaaaatttgcaaaatgtaaataataagctcatactttttttacaattctatttataaactaaagatgttgaatagccttagagccaaaacaaagcaaactctgtttaattttttgaaacaagcagttctcacacttatatttaataagtacttgatgaaatacctatttctgcacaactagcattcactggaacatactttgttcattgctaatgcaagggaacctttgtatgcccctttcttgaaacctagaagagattaattaatacatagggaagacagggtggctgtttgattcacttaagatgtcatgtgccaaagtttttaattgaatttaatcctcctcgtgctttgactgaaacaaaatattctgagctgtattttcggtcttaagaatggaatttagtaggattattgccgcagcaaaatccagtcaacttgatatttaccaactcaatctctattaattatcatgtcaccaaatttactatgcacactcttgatagctccacaagaagttacttatgagttctgttatgaatggtacagattattaaccattaatttattttaaatagattaatttcaaagaaggtaatgattgtacaaaaaattcaaataagggctgggtgcagtggct

SEQ ID NO: 672149 - DNA, 1882 bp, Homo sapiens
acctaaagcgtctcctgcaggatgtcagatttgctgaaaaaatcctatgtcattgtgtaaagattaagaaatctttattgctgattttctgtttctcaggacggttgtagttcaacatctagttttggatgtctttgccaatgcctattatgtaatgttttcttcagatctcttaatttaaatttagttttaattgtctattataattgtaattttaaaaatcctagttagtagatcatatttcttctatcgaactttatgtttgtaaccatcaaccaacctctcttcattctccacttgcccccacactcttcccagcctctagaaattatcattttactcactatctccacaagatcaactttttaatgkgtcaatttttaaaaagtccttaaattatattgtcactacttcaggccttaagtagtaagccaaataaagaacagaaagaacagctcattttaatctggaatgcaaatggtgttttatgtgttgtatatacttagcctttcagttcaggggtctactaacatctgcctagggtttcttggtcttctagttcaaataaaatgcaaatcccatgctttatgttggttcatcttgtccaggtgtttattacacatatagtcaactgtaatcacgggatattaaaatgctttcaatgtgcgtaatttaatgaggggttatagttagaaaacagtttcagggactaaatatttgtactgtggtctcagagtggctatcttgctagcaagagatcctgatgtttggtagctatctcgtgtatccttataataaacttctgtaaaacaaagacctttgaatttgccatatttttttctgtctggaatacgctttaactggatcataaagtaatacactcctttcccccacttctgatcagcccaaaataatatacccgtctctagtcaacctgcgcaagtcgccctggcttccttcatgtccagtcactctagatctaattttactattgcatgtatttcctagtattcagcattcttcagaatgattttgttcaactgttacatgttaattgtttttcatccccactggcttgtaaattttctatgagcagttagcttttctttcttgctcatcaatgaaatcacagcactgaaaacagtataggtcatatagactttgatacacattttcaatgattcaatgtacccacatattctaaagtgtttcatgcagacactattatgggatatataaagtgaaaatttgcaaaatgtaaataataagctcatactttttttacaattctatttataaactaaagatgttgaatagccttagagccaaaacaaagcaaactctgtttaattttttgaaacaagcagttctcacacttatatttaataagtacttgatgaaatacctatttctgcacaactagcattcactggaacatactttgttcattgctaatgcaagggaacctttgtatgcccctttcttgaaacctagaagagattaattaatacatagggaagacagggtggctgtttgattcacttaagatgtcatgtgccaaagtttttaattgaatttaatcctcctcgtgctttgactgaaacaaaatattctgagctgtattttcggtcttaagaatggaatttagtaggattattgccgcagcaaaatccagtcaacttgatatttaccaactcaatctctattaattatcatgtcaccaaatttactatgcacactcttgatagctccacaagaagttacttatgagttctgttatgaatggtacagattattaaccattaatttattttaaatagattaatttcaaagaaggtaatgattgtacaaaaaattcaaataagggctgggtgcagtggct

SEQ ID NO: 672150 - DNA, 591 bp, Homo sapiens
tgtattattataaataaggggataattagtaataaaaattggggccagaacttcatgtgcttcctccactaagaacaagaatcatttccatctaatacagtaaattttatgcaatattcagtgagctatagaatctgaaataaaatcagaaatttagttttttgctctgtctacctcaggcctattactcgaaattaaactttatgttaataaagataatatgaaagcatatgatttccacagggtatagtaagagggtcatttagtatgtaagtagtagaaaacatttcagtgtatcatataatatctaaaaatgtattgtatttaagaygagaaaattgtattttccattttaatttacatttaagttttctcttaaaaataaatgttaagattaaacagaccatagatgacaacaattctgaagacatggaaaataaacaagttcagaggcttttttgctgttataatcaaataaccaattaaagctgacttaaaaggagctataatgcatttgtataagtctattctcacactgctaataaaaacatacacaagattgggtaatttataaagaaaagaggtgtaatt

SEQ ID NO: 672151 - DNA, 591 bp, Homo sapiens
tgtattattataaataaggggataattagtaataaaaattggggccagaacttcatgtgcttcctccactaagaacaagaatcatttccatctaatacagtaaattttatgcaatattcagtgagctatagaatctgaaataaaatcagaaatttagttttttgctctgtctacctcaggcctattactcgaaattaaactttatgttaataaagataatatgaaagcatatgatttccacagggtatagtaagagggtcatttagtatgtaagtagtagaaaacatttcagtgtatcatataatatctaaaaatgtattgtatttaagatgagaaaattgtattttccattttaatttayatttaagttttctcttaaaaataaatgttaagattaaacagaccatagatgacaacaattctgaagacatggaaaataaacaagttcagaggcttttttgctgttataatcaaataaccaattaaagctgacttaaaaggagctataatgcatttgtataagtctattctcacactgctaataaaaacatacacaagattgggtaatttataaagaaaagaggtgtaatt

SEQ ID NO: 672152 - DNA, 1326 bp, Homo sapiens
ttttttggacagcagttttgttggaacacagccatgctcatttgtttagttattgtttagggttgttttcacactatggtggcagagctaagtagttgtaacagactctctgcaaagtctcaaatatttactttctggccctttgcagaaaaaaatttgctgacttctgctccagatacctgtgcagggcttccttttttttttttgagatggagtcttgctctctcgccaggctgaagtgcagttggcgaaatcttggctcactgcaaccttcgcctcccagattcactccttcctcagcctcccgagtagctgggactacaggygtgcaccaccacgcccagctaatttttgtatttttagtagaggtggggtttcattcaccatgttggccgggatggtctcaatctcttcacctcatgatctgtccacctcagcctcccaaagtgctgggattacaggcgtgagccactgcgcccagcagcttcatttaattgaattgtacaaaaacagttatgttcagttgcaggtttttattttatttggtcaaaatactgaaatatgcttactttatccggacttaacaccgtcaaaaaatgttaatcacttttacgtgcagcacccacagcacatgaaaactggcagttaattgattagaaggagctgggtggcaggatgtggatctggactgtctggcttcaaaccttgctctgcatagatttggtgaccgaaacgttttgtgacctctgtgccttgctttccgtacctgtaaaatgggagtaataataaaatctcccacataaggctgttgtagggtgaaaccaaataaagaatgcagcaagtaaacagtaagtatgagtcattattaccatgcaggtgtgtaagtgcttcccatatttccgagttattttccaaaaattccactgtaaacttgtttattggaaattaaaatgcattttgccacagaaaccgttataaatggagtattgacaagcccatagaagtcttcatttccgctgaatgtagtagttgtacaaattatattttgaaatgttcttggaatgtgggctggacttactgcattataaagatggaaatacggttttttggtaagctgagtataaaaacaaacaaatgatgtccgtagtcagtccttcataactccaggcggcctcactcctcccaatcacgattgtttactcccaaaacaccagaagcagggactatgtcttatatatcttcttcaaaaagcagcatataaaaaccctttagagcaatgtaggttcatttaacatggctcataccatgcagtgaagcaaaaaaaaa

SEQ ID NO: 672153 - DNA, 1382 bp, Homo sapiens
aataaaaaatagtaagaggagtaatgaacttagaaacggcagttatttgcaaaggcaattgtaaacatgtcatttgatgctactgttatttgatactacacatggtaaaaacacagtgagtgacgtcataraaaaccaactcaagtattactttttcctgacaattttcctcctccttccaatagtccatagaaattagactgtctagagaaagtaaaacaaaaacacagcacatcacggaaatagaacctcaaaaaaaaaaaggttaatgtgaaaagtttgccttatttaatttaacgatcaggcggggtttaaaaaattgctattttttttgagacaaggtgtcgcttgtcatcctggctggagttcagtggcacgatcatggctcactgcagcctcgatctcctgggttcaagcgatcctcatgcttctcgattataggttgcacaccaccatgcccagccaatttaaaaaatattttgtagaggtcagatgcagtggctcatgcctgtaatcccagcactttgggaggccgagacaggcagatcacctgaggtcaggagtttgagactagcctggccaacatggcaaaattctgtctctactaaaaatacaacaacaaaaaaattagccagatgtggtagcggacacctgtaatcccagctactagggaggctgagacaggagaattgcttgaacccagaaggcagaggttgcagtaagccgggattgtgccaccgcattccaggctaggcgacagagcaagactctgtcaaaaaaaaaaaaaacaaaaaaaagtatgtatatataaaattttgtagagaaggtatctcgctatattgtctaggctggtctttaactcctgggctcaagcagtcttcaggccttggccgcaaaactgctgggattacaggctggagccaccatacatggactgaatttttaaaattcttagtagggagaccttttaattggaagttgactataggaacgagaaggaaactgggtgactgaacaaccctattaggagagaaacacagatgaatcaacatgaagaatgtctgggatgggagcctaacatgcccagagctgcccttttgtgtctcttgggaggggctgtgttctggatgaaggcagtcaataggaggctggactactgtgaatatcggggtagtgaagttgagaaataccaattctacagtatggagtcagttaggtcaaaggttttgtacgtcaaataaccaagctatcttacatttctgtctccatttggaaaccagaaggtcagtcaaatatttggttagaaaaccaggaacaggaaaacatctcttgttacacataaaatctgtatccaagcactgtgtatcattccacaccatcca

SEQ ID NO: 672154 - DNA, 595 bp, Homo sapiens
gggagaagatgcccttgataactgtcttcctgagaagttgagcctacgttcttttttttttttttttttttttttgagatggagtttcgctctgttgcccaggctagagtgcagtagcacgatctcagctcactgcaacctctgcctcctgggttcaagcgattctcctgcctcagcctcctgagtagctggaattacgggcgcctgccactatgcccagctaatttttgtattttagtagagayggggtttcaccatctttgccaggctggtctcgaactcctgacctcgtgatccacccacctcggcctcccaaagtgtgggattagggcatgagccactgcgcccagccgagcctacattctgcagcatctctctctctcgccgagaagcccttgaatgtggatatcgtaaatcacacaagttcacaaaacaagagtcaatcctagcttgagtttacaagaagataaattggcatccatgtatgatagccagataaaatattgcgcacctgtatttttattgcaaaatttggcaacctcacatccatgtccccaaatcttcaatcctctctgatttcttcagtaatgaaaac

SEQ ID NO: 672155 - DNA, 750 bp, Homo sapiens
caaggggttctgggaaagagatctccaaagtggggtctatgcacttttatgtgcaaggaaactcactggaaagaaaatattaaaacctaatttgtatttatctttacattaaaaactaagatgaaattgagctgctcccatatataatatttggatggaccccagtctcctcatgcagtttgattgccagagggtcagggctcacaaatggtattacttattatttgagaaattcaaattatataaatgcctggattcagctgattattttatggtaagcatccaaaatagtgccttatttttcttcccagaaacaaaaaacttttggtacagatttgctcaggagggactgraagcagagagctgcacagtgctgggctgggagtcagaggacccgagttctagtcctggttccagtccaggatggccccgtggacacatcctttcacctctctggccctcaggtccctcatctgtaaagtaaaagttttgcactgcttaatcgataggccaggccccttccagctacaatattttagggttctgaatgtaaatatgtaagtattctgccccttccttatccctgccactttgttgtttgtttaaacaccttaattttttgcctacaaggcatcagtctgttgctcaaatggtctttgtcactggcttccattttggttagcctgctgaactccctatgtatcttctctgcagctactgtctgtcgtcttcttttctgtggcggatccc

SEQ ID NO: 672156 - DNA, 1267 bp, Homo sapiens
atgtattttgtttttaaattataaaattttatttagtttatatttacagttttcagttttatgtcaaaaaagcaatcttgtcttctaattgtttgttccattattcataatttaaaaaattccaagcgaaaaaatcctctattatttaaataacttatggggttttttcatatgtctgtaatattctttagcttttggtgacttgctgtaactacttatatgcctggtaattttcattgtgtatcataaattatgtttcaaaaattatagagttatttgaagatgttgaatgatattatctctgtccctaggaatattacacattagatttagaagtatattttgacaggagactagctacagaaagtagtaatcccttaccaataaccccatcagggttgttgtcattcaaagataaagtttagtctctgtgaaatctggtctagttctacttctcttttcccttaaattatactccctcagagtcttcagtcagatgaggatggtttgactaaggtgattcctccttggaaagccctggtctttaacattgatgacctggcatgtcagtgggtttattgaaaccaatgctcaacttaaccattaagcttaactttcagaatctgcaaatgcctctgggaaaatgttaccccaaattctaagttcatatctgtgggctttccttctctttcatctgtatcataaacaataactcactaaaacatgtatcatggttgaacagtaactcactgaaatgtcatgcactagttatttcacatggatttttaaattattttttatccattttagttctcaataagwgtgttggcccacaacattcagcttaccattccaagaggcagaccacagtgcttcactcgaacaaaatagagtcagctcaagattattataaaattatgccattcatactcacaatttaacattttgactgaagtaaaaaaaaaggtagagtttggagactagagatggaattgagtatatgttggagtaagccctacgggagtgtaaaattatgtacatgacctctttcttgtgtataagagaagaaaaaattgttgaaaccatttactgtgaaacatgtagtgtagcttcattttgaattattctgtcagtctccaaatcttataagccattacattttatctctgaatatttgccttattttttgcagcagaaatataacagttttttcctatatcatatattacaaaacttatttgtttgaaaattttatgaatgtttaata

SEQ ID NO: 672157 - DNA, 1918 bp, Homo sapiens
cttattgaaaagaatttttattcttttaattyagccaagtgcttggtttctaactggtagttagtatatatttgttgtaaaagtaagaaagaatagaaaaaaatttgctttccagacacagaataggaattaatgagataatcaagggaagactataatgaatttaagaataagaaagaattgttctattgaaacataaaaccaaagtgaaattggaatggggaagggttggaaacaggagtatttacacaaatttagaattatataagcattcagatggacaaaattaagctgtacgtttgtagggcacggtgagagtggggggctgaattattttatgactttcatttgagaacttccttttttaaattatacaaagaaaattatataactgttaagttcaacaagactcacaaagctttagccacatgtcaattaaattgcacagggaattgtgtaaggaacccagccagaaataaaaaggtatgtaagcaactttcatcaagctttttttttccaaaacagaattttttaaataaagaaatgaaataagttatagtgattctcatcttttatgtttttgtcagcttaccttgaaccttatacccagataattaattatgtagggccctcattagttcagtaaaatactatagctatgagtttttgtctgcccatcataacgaagataaacctgccttcctataactgagataaacctaccttctttttgtttttttaggaactgtttcaaatccatatacataacagtgctttctactcacccggccaatgtggaggtgcctgacattgcactggcctatcaacatagcctattcctctgtccaggaagagatgcatagcctaatctaggtctataaaagcagaattttttaaagaattactctgatacaaaagacactcaatccatattggttaaatcaatatttaatgaatgaatgaacaagctagtgggaataagttaggactacttctttccttgaggtagatataaccctggctccagttttcattaacttactaaaagaagctcatcatctgcagatgataacaatgccaaaatgcttaaaagagagagagagacaagcataagtaagagatgaagaaatagagatataacttcatgaaattttcctggaatttctggtttggggaactaataaatttctgttttcctgaagttaacttgagtttccaccacttgttcaaggaaggtcatgacaaataaaataatcattagtagtgctttaacacaccccagaatacctagtggaaacaaggggtgattaatcgtcaattattatatgtttacatgaaagtacatcattatagatatgaataaaattcaacactgctgttggaataagcagaaaatcttgttcagagtgcactttcaattcatagttgcttccacgttaagcctaagaacattactttaggaacaaggagatagtagtaagttcatatatgctgcatatcctgaatagtatagaagactctaaatagctggatgtttactatttcattttcatgatttaagactttcatacagtgttagaaatttaaaatttatttgtaacttgctcttgcatttccttttttcttatcgctttggatgcctactttaaatttatcatcagctaatgagtttcatcttgtggatatgaagttttggaatcataaacttagatttctacaaagccacaaaagatattttactttatactgagctaaaaactgtcttaagcagtaattctggtgaaattaattcccctttcagcctgtgggaaccaactgaaggaaatcaagatatttcattccaaaatacacttctttgatatattttgagatggcccttcagagggcctgcaaacagaagtagccctgcaaagctgtc

SEQ ID NO: 672158 - DNA, 1918 bp, Homo sapiens
cttattgaaaagaatttttattcttttaattcagccaagtgcttggtttctaactggtagttagtatatatttgttgtaaaagtaagaaagaatagaaaaaaatttgctttccagacacagaataggaattaatgagataatcaagggaagactataatgaatttaagaataagaaagaattgttctattgaaacataaaaccaaagtgaaattggaatggggaagggttggaaacaggagtatttacacaaatttagaattatataagcrttcagatggacaaaattaagctgtacgtttgtagggcacggtgagagtggggggctgaattattttatgactttcatttgagaacttccttttttaaattatacaaagaaaattatataactgttaagttcaacaagactcacaaagctttagccacatgtcaattaaattgcacagggaattgtgtaaggaacccagccagaaataaaaaggtatgtaagcaactttcatcaagctttttttttccaaaacagaattttttaaataaagaaatgaaataagttatagtgattctcatcttttatgtttttgtcagcttaccttgaaccttatacccagataattaattatgtagggccctcattagttcagtaaaatactatagctatgagtttttgtctgcccatcataacgaagataaacctgccttcctataactgagataaacctaccttctttttgtttttttaggaactgtttcaaatccatatacataacagtgctttctactcacccggccaatgtggaggtgcctgacattgcactggcctatcaacatagcctattcctctgtccaggaagagatgcatagcctaatctaggtctataaaagcagaattttttaaagaattactctgatacaaaagacactcaatccatattggttaaatcaatatttaatgaatgaatgaacaagctagtgggaataagttaggactacttctttccttgaggtagatataaccctggctccagttttcattaacttactaaaagaagctcatcatctgcagatgataacaatgccaaaatgcttaaaagagagagagagacaagcataagtaagagatgaagaaatagagatataacttcatgaaattttcctggaatttctggtttggggaactaataaatttctgttttcctgaagttaacttgagtttccaccacttgttcaaggaaggtcatgacaaataaaataatcattagtagtgctttaacacaccccagaatacctagtggaaacaaggggtgattaatcgtcaattattatatgtttacatgaaagtacatcattatagatatgaataaaattcaacactgctgttggaataagcagaaaatcttgttcagagtgcactttcaattcatagttgcttccacgttaagcctaagaacattactttaggaacaaggagatagtagtaagttcatatatgctgcatatcctgaatagtatagaagactctaaatagctggatgtttactatttcattttcatgatttaagactttcatacagtgttagaaatttaaaatttatttgtaacttgctcttgcatttccttttttcttatcgctttggatgcctactttaaatttatcatcagctaatgagtttcatcttgtggatatgaagttttggaatcataaacttagatttctacaaagccacaaaagatattttactttatactgagctaaaaactgtcttaagcagtaattctggtgaaattaattcccctttcagcctgtgggaaccaactgaaggaaatcaagatatttcattccaaaatacacttctttgatatattttgagatggcccttcagagggcctgcaaacagaagtagccctgcaaagctgtc

SEQ ID NO: 672159 - DNA, 646 bp, Homo sapiens
aaaacgaagccttcttaagttctcagattcccggccaggtgccgtggctcatgcccgtaatcccagcactttgggaggctgaggcgggcggatcacaaggtcaggagatcgagaccatcctggctaacacggtgaaaccccgtctctactaaaaatataaaaaattagccgggcttggtggcgggcgcctgtagtcccagctacttgggaggctgaggcaggagaatggtgtgaacccaggaggcggagcttgcagtgagcggagatcgcgccacttcactccagccagggcgacagagtgagactctgtctcaaaaaaaaaaaaaaaaaaaagttctcagattcctgtgactctgggaccctgtgggcagagtgactctggggctctgcaacctaaatcctcaaggagtcctgaatgtcctaaggtcggagaatgccaaggtcccaaaggctctgagagcgacaaaccccttatcatgtcccagcgtccttatccaacagccctgtagcatccagggccattttgggacactttgtttctccctgctttgttcactcctcctgtcccctccyccccatccgctcccccatctgctggccttgtttctgccacaaaagcttgggaaagggtcaagggggtgctggg

SEQ ID NO: 672160 - DNA, 1525 bp, Homo sapiens
gatggtggaggggagggctgtggaagagagtgtcacagatagacaagcttgcattttaattcatatcatatatgtagaaggagctgagacagaagctatggttcagctaaactgcagctgcctcacaataaaaggacaggaatttttacttcctggacactcatttctgagtgtaatccacaagcccttctgccccattgctggcattccaaatccccttcccctgctctatttttttccataatatttattcaccttctaacatcgtactcaatcttctcatttattaggtttttaatttgtctctcacccccccaccagaattgaaggcactgtgaagggagggggttttgtctgttgatacatccctagtgcttaattaaataagttccccgcacacagaaaatgctcattaaatttttgttgaatgaatgaaaccttcctaccttccttccatttctttgaaatggttcccctcctctgtagttctccatctccatctttagctggaagcaaggtcctcctccctctcccctcccttctctcaaggtccttaacagttttacaggaagtagtacctgttcctgtgttctcaatgcagccatatttgggcagagcacttagtttaatgatggcatctctctggaggttgtcatcatcatcagtagcaaaaaaatggtgaaatgagagtggtgctctccctccctcatcaacctaagaaagaaaagaacatagagagtccttggtgatttcacataaccacagtaaaaaaagagctggattgcaaagtgctgcctgggtgaccttctagcaccaattcygcttctttgaggaggcagaccatctacagacgagatgaggaatgtgtatgctgctgaagccaggcaatctttcagtgcctctcaaagctacagtcagacatgatgacttctgtatctcccttcaaagttgcactccattcaatgatggatctggttataaagcagctctagcccattctaatcacccacctcggttcagctgcctgccaggatggctgccttccttccacatcaacattcaaaagcccacagctagagaatgatagatccagttctcctgcggatactgtgagggtgactgtgtcctataggcattctcatccagaataaaagtcctgtttattctcttatattatatatttataggtgtgtagcaagaaaggttcaccatatctgaaagctagtgcttatcttaatgtcaaggaagaaaataaatcactataagtaaaagcagttgctcaaactaattttttttcctttagagctctattttgtatgctaaccccacaatctgagcctggtgtttttctctagcctgctggagatggtcaagcaatttcaccctgaacaactcttggctaactgtaggaagatctataaattacaaaggggaaggtcactctgactctgggaatggggacagtccaaatggcttttccaaggttttatgtaaaaatggaaaaatgggaggaatatcagaacca

SEQ ID NO: 672161 - DNA, 2459 bp, Homo sapiens
tgcaatgttaaagaaattagacaatgactgttatgttcctaaagtagtcycctgggaatgtttcaaatctattctaatgacatttctttagttcagtaaatttttgagtctacctttgtgactcccaaatgcttactggttgttctttaaaattccatctaccatcagtagcaaagattagcccaccagtgatattcagaaggatggattactgcatctctaaaaggaatcatacaaaggttttgagaaagtagagattgttggaagaacatatagcatccagaggtgggtactttgaaaaggataatattcacttcaatgaataagggctgactattaaaaaattagattcacttgtgttctttgtgtttttctgtaccttctaaataataaacatatattattttttataatcaaaggaagcacaataagagttattttggaaagccgatcacattaccacactgttatatcacatagataatacttcaaaaatgtgttcctttttttaatggatgaagatagatgtagttaacactatcagagtcacagcgctaaaaatattgtgaagattcacataccaaattaagaccgattcatctccatgaacagtgctaggaaagtggcagctgatccctcatatggtgtcattctgaatgcatttactccaagtttcagaaatcacccatttcacctatagtttaaggaactggtttcacagggttcaaggtggggccgggggcaggtgtggggcagggatggaagtgggaacacgaagaagtctcaaatatcaaagccaatgaaactacacacaaaatagctcctcatagtctgtatcacaaagacgctttgctctcgtctgagacacataacaactgattgtagagcaaaaaatcctccaagcaggtcagtgacagagtgtgtaggtgtgtagctacctgtggccatcggccttcggaactcagctgtatgcttaagaagcacaccatgctgtggaggtctccgaagctcaaagaagagttctttgggcgctgtctcagcatctcttactaccacctgaagtcctgcagcaaggagaaggaagcgtggtgagagagaaagcgtatgttaaagacgatagactatatattaaaaccgcaggccaggctaggagtcatgctgtgggtaatctgattgttatcagaaagcactgcttcattccaatcaggcacaaaagagtaaaaacagataatacagtcaattcctacactgcaagtaggtgcttccaaaagttcatgtaaggtagttctgaatttagaacaccttttttcttccatacaaatgacagcatgcacagaggaagcccacaggtaggtcaaccctgactagctgggttagattttcttccagaaaatcctcctataaattgtttggcatttcattgttttgtcccttcttatttttctaaagctacaaagagccaagtgagcaatgatcacaaaggtgaggtgcagggttaaagtgacaggcatccttgtacacatggcttatttgtaagtttggtaaaaattaattttaggccaaaccccatatgtagaaactggataaggatctctagaacacacctaacaaaaatcacaatacctactgtttattagtaaaatgttcttgataaaagaatacatttctaaagattaaattcactaattagtacatataattatatacaaaataactgggtcaactctagttcttcacaacttctgaagcttcttgtgacctgacatttctcctgctactcttcactttctaaatagaaacaagagccgccattgaaatcctgctcccctctatgttcttctcgccgctctattactttatattttagtgatggcatcaaagcaaactcccggaaaatcagttctgtgttgtgttccaccactgaacactggcctctgaaggcttcatttccttctctctgtgcggcttctgtttgcatagaaatgggcaggaggaaggatacaggtgagaatgcaggcaacttctggaagaagagtttgcttttttggcaaccatcaagaggtttgaagaggggcagcaatatgatcccatttccaaagccatgtttctatcaggctcccagttcttacctacagaagtgctgcctcctgggctgaccgccagccgtggagctgtgacctggaacactggcagttgctgatcactgggaagtaagtgaatggtgaggaccatctccggacttgtgtgttctccatctgaaactaaaaaggataaatgcacacacacacagagacacacacacacacacagagacacgcacacacacacacgaatcaacttgtagtctggtcctcttcaggcagtttccacaaatatgtagctagaaacttttttgcactactttaacctttgaagagatgcttacaaatgaagaaagtaagcaagcaagatactgtgag

SEQ ID NO: 672162 - DNA, 634 bp, Homo sapiens
tgagtatttaatatgcacaatcaaataataaactgaggtgtcaatcagtgagttccttcctcatccactgtcaccatcccccattggaccaggaagcatggggtcatcatgtgttcccaaagctatcaaaatcagacctacaaagacactatacttatagaacccagggcacaggagatagaaagaaaaaaaattgtcttttttgtttggtaagacaaagtgtccctctgttgcccacactggmgtacagaggcaaaatcatatctcactgaaaccttgaactcggggctccaggatcctcctgcttcattctcttgagtagctggacctataggtgtgtaccaccgggtccgcctaattcttttatttttcatacagacaggagtctcactatattgcccaggctggtgtcaaactcctggcctcaagcaatcttccctccttggtttcccaaagtgatgggattacaggtataagccacctcacccggccgaaaaagttctttaatgtgcattggaactaacagacccaggccccccaccaacacaacccctacactctccatctccctaccccaacctaaaaaaccttcaaactgaaggggaagaaaaagcagaggaaccattccctttgc

SEQ ID NO: 672163 - DNA, 671 bp, Homo sapiens
gggaggtaactatgtgacccaataaactgctatgacaccagtcattttactcacagtaaagtctatgggcatattttctacaaactaatctgattgggaggcaactcgtgaattcttcttatttggtggtaaccgtctgatgagccctctaattcagatctttgatgggcccacaccatagaagcacatctgtcagaaactgtgtccttaaaatggcagcatcctcagagagaccaacaaattccagggtgaattccccctaaaatactccagtctgccttccatgcctgttcctgcccacaggtgatactgaaaacaatttcacaggacacagtagaggaagtgtatacggtcactgtttaacttgtatcagactgcaattactaaaataagggaattgaatttccaacccaccactctagcagcttctgcaaggattaatgtcccatccaaaaagccccatctgtgcagtaaggcatctgcatctgaccttcctgcctgtaatcaaaaaaaggcaggctgacctcaaatatgtttaaatagggagcgtgtatccgttaattccttaaaaacagtgcctattctggagcctgtctctcagattcctcccgctactactcagcaagtaaattcttgtytgtcactattgcaattacagtagagtctttaaa

SEQ ID NO: 672164 - DNA, 647 bp, Homo sapiens
gaatgtgcttgcatattagtttcttttcattaactgcctgattttgatcccgggcaggcatcagcaaacattttytgtaaagagccagataatgagtattttaggctttcaggttcatatggcctgttacaactattcaattcttcaattccagagcctttcgcaccaccaccactgtcttctggctaggattgctagaggaatcaacaaattggagaagagcatgtggaaataaggcttggggaagaaatatttgttatcgcaacctttagatgacactaaaatctaggagctgatggctgagcaggcacttaagtcacagaatgagggaagggcatccaaacgtgtttgaagaatcaaagggctacagcaagctccagagataatccagataagcatgaatttgagggtggaaagcagcaggacaaatacataatcaagtggtcctgcagggacatctgggacaagtgtgcttagataaggctgatttttattcagtcacctatgagacctacctgtgtttcaaccttaaaggtatccatgaaactggcatccatcaatggccccacctcaaagactttcaatgactccgtataatttataagataaagttcaagtagctcagcatggaataaaggccctaaaat

SEQ ID NO: 672165 - DNA, 609 bp, Homo sapiens
cccggctaatttttttgtatttttagagacagcgttttaccgtgttggccaggctggtgttggactcctgacctcaggtgatccacccacctcagcctcccgaagtgctgggattacaggcgtgagccaccacgcctggcccagaccctgctcttgatggatcagctggtaccacccagattaataaactggctcatctgatcttgtggcccccaccccaggaactgactcagtgcaagaagacagctttgacttcctatgatttcatctctgacctgaccaatcagcactcctggctcactggcttcccccaacccaccaagttgtccttaaaaactctsatccctgaacgctcagggagactgatttgagtaataataaaactcccatctcccgtacagccaaattactttatctcaattcctgtcttgataaatcagctctgtctaggcaatggggaaggtgaacctgttgggcagttacattacagggacatgctggaaatagtacctggtgtggtgtaagtacttcataagcactgactataatcagctgtcactgccctccttccccctctccattgcccctctcaagttttgactagtctaa

SEQ ID NO: 672166 - DNA, 609 bp, Homo sapiens
cccggctaatttttttgtatttttagagacagcgttttaccgtgttggccaggctggtgttggactcctgacctcaggtgatccacccacctcagcctcccgaagtgctgggattacaggcgtgagccaccacgcctggcccagaccctgctcttgatggatcagctggtaccacccagattaataaactggctcatctgatcttgtggcccccaccccaggaactgactcagtgcaagaagacagctttgacttcctatgatttcatctctgacctgaccaatcagcactcctggctcactggcttcccccaacccaccaagttgtccttaaaaactctgatccctgaacgctcagggagactgatttgagtaataataaaactcccrtctcccgtacagccaaattactttatctcaattcctgtcttgataaatcagctctgtctaggcaatggggaaggtgaacctgttgggcagttacattacagggacatgctggaaatagtacctggtgtggtgtaagtacttcataagcactgactataatcagctgtcactgccctccttccccctctccattgcccctctcaagttttgactagtctaa

SEQ ID NO: 672167 - DNA, 1511 bp, Homo sapiens
cacttgctgcccatgaattaatttcacagtagaataagtggcattgtatatagcccttgtgtggcagccactgttctaggtattttacatatattggcttgaccctcaaagaaaccgtatactcttcctctttattttagtgacaagtaataggcacacagagaattaagcaactcaccccaaagctgcacagctaatcatgcagagctaagatctgaactcacgcaggctggttccagagtctgtgctctcagttcctgcaccatactctccctctcagctgccttgcttattgaactgcgtgaagctcacttttctcccctatgaatgggtataatagtgcctacctcggatggaaaattagaggacaaacccagaacatgattgcacaggcaggccctggcacagggaggtgcagagtaggcatttggtaagggaggtcactggacagctgggagatcatggacagccaggatgtcaccccttcagcaaccagcctggagacttatatacagtaggtgctgaactgacatgcaacgcggatgaaggtggtgacatttggaggccaccaggctgcagtttccccagagaggttcagggctcagcagccccttgggatctcgagctcagcaagaggacctttaaatgcctagagactgcctacgtgcgtcaccgctgtcttccattaacgcataattgctcttgcaggcgagtagctatgctcactagggtcagatttacagcagagcaggaaacagccaggcaacgggcatgacagagatgggaaaagagaaggggcttgtgtggctggggagagatgacaattccaaagaagaaggctgggtccttgggtgaagttgtgatgtgttttcaggcccagacctcatttgatatggtccgccttgctgcccccacaaagcacatcggggaaatgccagcatttgagcctccaagctacatctcccaggaagatgtgaaaatgtatcccctgaatgggcagtactaggattaaagattttcttatgagtctctgtaatgttctccttatctatgtaatatcactgaaatctgcaacaagtcatcaaagacatcccgtctggaaggtgtgayggcagctttttcatttcaaggctctggcttcctctcccgggagctaagccccatgcacactactaggcgtattgttcatcactccagcccttcaaagagatctccaaaagtgcacacacaatctgcaagctgccgagtgaccccttcactcacgtgcaccccacagatgccttagaggttagggaagatcactgtgcctcaaatgtgccatattttctcctaccaccttgcctgggcaccacctgttccctctgctgggatgttcttggtctagccaccgtggcaaatttctcctggtcctgcaaggctcagctcaagtactacttattttgcaaaaccttccccaaaggggcagcctgaatctctaagaagccgggccagagctcttagagttatcttct

SEQ ID NO: 672168 - DNA, 634 bp, Homo sapiens
tgagggagaaataagagtaatgattctgaaccaactcccatatgcccaggactatacagtttatgaagcattcaggtactcaacagggagattayttctgttgccactgcccaagctcaacaccgcccccattgcatgttgtctgaacaaccacagaagcctcctgctgcttccttcctcccctgtagcccattttctggcggatggatctcactcccgtactcccagtcctgcagcggcttccccatacactcgaagttaacccaggcggcactccctagcccgcttgtcccctgcccacctcccacgctcgcctcttactgttgtttcacctgctcatcacacctcctcacacctttctagtttcctcacacctctgtccagaggacgctcctgggtcctcggagctggctccttgggagcattagctccatggcaaagggaactttgtcttgttaatggctgtgaatccctgccatacattcacgctggccgcatatctaccatgtcaataaaatacagctatcggttattgagtgatgtctgctggggagaatgaggaccagaggaataagactcaagaggtggctgggatcagcaaattgtccaaggtcatatagctggcaagtgatga

SEQ ID NO: 672169 - DNA, 634 bp, Homo sapiens
tgagggagaaataagagtaatgattctgaaccaactcccatatgcccaggactatacagtttatgaagcattcaggtactcaacagggagattatttctgttgccactgcccaagctcaacaccgcccccattgcatgttgtctgaacaaccacagaagcctcctgctgcttccttcctcccctgtagcccattttctggcggatggatctcactcccgtactcccagtcctgcagcggcttccccatacactcgaagttaacccaggcggyactccctagcccgcttgtcccctgcccacctcccacgctcgcctcttactgttgtttcacctgctcatcacacctcctcacacctttctagtttcctcacacctctgtccagaggacgctcctgggtcctcggagctggctccttgggagcattagctccatggcaaagggaactttgtcttgttaatggctgtgaatccctgccatacattcacgctggccgcatatctaccatgtcaataaaatacagctatcggttattgagtgatgtctgctggggagaatgaggaccagaggaataagactcaagaggtggctgggatcagcaaattgtccaaggtcatatagctggcaagtgatga

SEQ ID NO: 672170 - DNA, 634 bp, Homo sapiens
tgagggagaaataagagtaatgattctgaaccaactcccatatgcccaggactatacagtttatgaagcattcaggtactcaacagggagattatttctgttgccactgcccaagctcaacaccgcccccattgcatgttgtctgaacaaccacagaagcctcctgctgcttccttcctcccctgtagcccattttctggcggatggatctcactcccgtactcccagtcctgcagcggcttccccatacactcgaagttaacccaggcggcactccctagcccgcttgtcccctgcccacctcccacgctcgcctcttactgttgtttcacctrctcatcacacctcctcacacctttctagtttcctcacacctctgtccagaggacgctcctgggtcctcggagctggctccttgggagcattagctccatggcaaagggaactttgtcttgttaatggctgtgaatccctgccatacattcacgctggccgcatatctaccatgtcaataaaatacagctatcggttattgagtgatgtctgctggggagaatgaggaccagaggaataagactcaagaggtggctgggatcagcaaattgtccaaggtcatatagctggcaagtgatga

SEQ ID NO: 672171 - DNA, 634 bp, Homo sapiens
tgagggagaaataagagtaatgattctgaaccaactcccatatgcccaggactatacagtttatgaagcattcaggtactcaacagggagattatttctgttgccactgcccaagctcaacaccgcccccattgcatgttgtctgaacaaccacagaagcctcctgctgcttccttcctcccctgtagcccattttctggcggatggatctcactcccgtactcccagtcctgcagcggcttccccatacactcgaagttaacccaggcggcactccctagcccgcttgtcccctgcccacctcccacgctcgcctcttactgttgtttcacctgctcatcacacctcctcacacctttctagtttcctcacacctctgtccagaggacgctcctgggtcctcggagctggctccttgggrgcattagctccatggcaaagggaactttgtcttgttaatggctgtgaatccctgccatacattcacgctggccgcatatctaccatgtcaataaaatacagctatcggttattgagtgatgtctgctggggagaatgaggaccagaggaataagactcaagaggtggctgggatcagcaaattgtccaaggtcatatagctggcaagtgatga

SEQ ID NO: 672172 - DNA, 632 bp, Homo sapiens
ttcacaaaattcaatataataataatggccagaatggaaatctgtccagcctcttttccttttttctattctcatgtctttcagaactttcaacaagtttacatagcttttcatagttaccttaatgtttactggtagccagttccttttagttggctaaataaaaagcctttaaaacctaggttcaaaatctaaactctttatgagccagttggattaactcattttgtggtcagagcctctgtgcatttttgattgattacaagaggaactagtcatagctcaagagaatcgtcacatatttatcacaccattagcgttcactgtagtatggtaactgtttttagaattatgtcatgatctgaaaaagctgtaactattatgtcaacctgaggaaacttacctgtttttgtgggctttctgtaatagtgtttatctgtcatttatggctttcaaatttaatactgtgcaagagcctgstctaggcaattatagaagatagaaagttttcctttgaaagttaaaatgtaggaaagttgttaaattttagtcacaaataaatgatacagtaaaaaccataaagaaataaaacaggagagaggcaaaaagtggaaaaaaaaagtcatttaaag

SEQ ID NO: 672173 - DNA, 642 bp, Homo sapiens
tgaccattttgaacttcaactttcctgtagatagaatgaggaatcataaaatatggcatgatcatttaataattaaatgaggatcatttatatataatacttgggatggcrccaaacacaaattatggacttagtaaagaatatacattatcattactattctgtttacaaattgtcattgtgaaatttccagaaacatttaatgactaagcttaatgatgtaagtcatgaaagcataaaaaataaattatttggatttaaataacaagttattgactggtttctttttctttacctgtgtggctttactgtggcttgactaacacaaattgaatacattctcatgccaataaaatctaaaatgtaaaggtataaatgaattttagtgaatgtgtgactattcttaaaacattgagtgcaatattagtatctcgggcacattggagtgtggcatgtaaaaccttcattttaatctcaagaaaaggaatcaacaccattggttataaaaataaatgaagaaaataggaacgatttggtaacacaataaaaattcttttagcaaatttgtacttaactagctcaccagaataaccaatgcttttcattccttccataaaatatgtcaactgatagcaacagcta

SEQ ID NO: 672174 - DNA, 921 bp, Homo sapiens
agatgcagcctcatcttgcaacactgtgggaagaagaaagcccacgctcagaacctccctccttgtgatgtaagtcggcagagtgatgaggtgaacttacacaactttaagttatgagatagaaggggtaataaagtacagcacagaaaccctccgaacatctgattgaaagtttggaaaaggaaaatcctgaagattgggaaattagttgtatattgcctgttattgggaatttagaattatcagtaataaaataacatgatttcatatattatttggtaactataaaaatatgaggactttctttttttttttttttttttttttttttttttgagacggagtctcgctctgtcgcccaggctggagtgcagtggcgggatctcggctcactgcaagctccgcctcccgggttcacgccattctcctgcctcagcctcccaagtagctgggactacaggcgcccgccactacgcccggctaattttttgtatttttagtagagacggggtttcaccgttttttagccgggatggtctcgatctcctgacctcgtgatccgccygcctcggcctcccaaagtgctgggattacaggcgtgagccaccgcgcccggcccaaaatatgaggactttcattaccttgtttgccacctgagttcttttattttttgttttaattttttgtcaaaatatcttaagtttttccaactatggatattcctatcatggagtttgtaggataataatattttgtttgaggagatatttttggatcccaattcaggaaacattaagatgacaaatggccttaaaaataaataaaatatttatcagaagaataatacacaataaagaaaaaagtctacaaaccacaagctagtatcacaagacacctcttacgatgatatctgtctcacaa

SEQ ID NO: 672175 - DNA, 655 bp, Homo sapiens
gacattaagccaatatgttcaatytgactggagatgcgtagaatacccatgcccatcttctgcatggtcctaacccctgcaggcaaacacagaaactttaatggttctaactctcttctgtgacccagagtcttgaagatctcttctcagcttgctactgtggcaaccaagcagcctactgaagcagttaatagaacctagtagattaaaacaatgttcccgtaacaaaatgtttcagtctagatccattctggcttgggaatttcaaaactagtactgaggaaactagttttaaaattcccagtggctatttgcaagatgagacagtttgatacagattgaaactttgaatgtcattctgccaatgacttcacagccccagtctattcatgataatggagtccagagaatcaaggcaaaccatgtcttgaatgtccaggttccaggggtatttcccacatgagaacagaaggagggaggtaactgaaaaccttatattttttcagtgatggaaaaatcaaaacacctcctgaaacaagaagctatacccctgcttttttataagatagggacaacctaataataattgtaatacaattcaatatggagcatgggaggttaccttttgagtgcaagaaatcacagggcacagtct

SEQ ID NO: 672176 - DNA, 655 bp, Homo sapiens
gacattaagccaatatgttcaatttgactggagatgcgtagaatacccatgcccatcttctgcatggtcctaacccctgcaggcaaacacagaaactttaatggttctaactctcttctgtgacccagagtcttgaagatctcttctcagcttgctactgtggcaaccaagcagcctactgaagcagttaatagaacctagtagattaaaacaatgttccsgtaacaaaatgtttcagtctagatccattctggcttgggaatttcaaaactagtactgaggaaactagttttaaaattcccagtggctatttgcaagatgagacagtttgatacagattgaaactttgaatgtcattctgccaatgacttcacagccccagtctattcatgataatggagtccagagaatcaaggcaaaccatgtcttgaatgtccaggttccaggggtatttcccacatgagaacagaaggagggaggtaactgaaaaccttatattttttcagtgatggaaaaatcaaaacacctcctgaaacaagaagctatacccctgcttttttataagatagggacaacctaataataattgtaatacaattcaatatggagcatgggaggttaccttttgagtgcaagaaatcacagggcacagtct

SEQ ID NO: 672177 - DNA, 1059 bp, Homo sapiens
agttattcccacatgaagatccactgaatgtttcacagtatcaaattatatgtataacccaaaagcctacatctccagattttcacttaaattcatttacttcctacatttccctgactttccttgtctttcctcttgggtaaaatgtggtacactcctcgccccagaaatatgcctgaagaggctcccagatctctgtaaagcacacctcagcactggggcatgacagccacacagcactggctgatagatggcatcggctaatcattgcaccagccagcctttacgcaactcacaggtaagatactgctccagtcacagtcacagctggctcctgattagctctctaatgggtggagtactgaggcagaaaatcccaaacaacaggtgatccaaatataatttatatttggctcagcaaatgaccttattttgtatcagttttaccttcataattatgttttctttagactaatacaatttgttggcacacaccatctgacaacagaatagggtgcgcaaaaatgcaggtaggtggcaaagagaagctgggaaggatgaaaattttgctggggatacttaaacaaatataacaacttctaacagagagaaacttgactatacatcattcaaagggtcacaaaatcaagcaggaatttaaagtttatctgttctgaatgtgacaatgatggcttaaatagtttgtcagagattactcatctagaagatataaaataataattatgatgatgaagataataatggtgatgatggaaacctgtaaagcctttttctgaccaacctagacaaattatatccccatcacagtccatcacagcaatcagtaaatctttttctatgaaaggtcaaatagtaatataaatagtaaatattttttatgatctctgytgcaaataattctgccattgaatgagagtatttgtgttctaacaaaaatttaagtatgaatatcaaaatttcaatttaatataatttcacatatcaagagatctttattttttaaatgttagccatttaaaaatgtaaaaacaaatctct

SEQ ID NO: 672178 - DNA, 585 bp, Homo sapiens
catacagatcagagcatgtgtttccacgccaaacagaaggtttttgagaagcagagaacattatgctgtactcggccatttcctagaattcagaataccaaatattttgaaagtatactccccagtgacaatgtagtgctggtctggagaccagaggctctgtatgacagaggctatcctgggagtcaataagttcttgtttgtttgtttgtttgtttgtttgtttcttgagacagagtctcactctgtcacccaggctggagtgcagtggtgcaatctccgctcactgcaacctccacctcccaggttcaagcaattctcctgcctcagcctcccaagtagctgggactacaggygctctccaccatgcctggctaatgttttttgtattttagtagacatggggtttcaccatgtatgccaggatggcctcagtctcccaacctcgtgatccaccgcctcagcctcccaaagtgctgggattacaggcgtgagccaccatgcccagcccaataagtttgttcttatagcttatttcaatttgacagtgcaaataaaacactttgttcatggaacaatcctaaa

SEQ ID NO: 672179 - DNA, 462 bp, Homo sapiens
ggctaacatggtgaaaccccatctctactaaaaatacaaaaattagccagacgtggtggcaggcgcctgtaatcctagctactcgggaggctgaggcaggagaatcacttgaacctgggaggtggaggttgcagtgagccgagatcttgccatcgtactccagcctgggtgacaagagtgaaactctgtctcaaaaaacatgtatatataaatatatcttgtgcagtttaattttctrcttggatgatatgcctgctattgtgatgtttgaggaagtgaagacgtcttagcacgtactgttagctagagcactttggaggagaagagtagacacattgctactgaaagcttcatgctgccagccttacatgagaaccttgtgctgaccttgcatgcaggtgggagagagggctgtctcataagcaggacttcaaggagtcgtagagacaagactggtctcca

SEQ ID NO: 672180 - DNA, 664 bp, Homo sapiens
atatcttccatgcaaagaacccccatcaccttcaaaagaattaacacatacagaggagatatacgaggggctggctgaccggaggatggggccagctcttctgaaggccaaaactcttcgtgtttcatgttgagagagaggcattctctcaggagaggaacctcgccctcctcacacttcttcatggtaaaagcctcacactgtgtgtctggactgtgcatcatggagtagtgagaagaatatctttttagctaaattattgaataatagtgctgtccctttatgctccaccctattctctcggtctccctattgagacaaactttagtcttgcactgagagctcaagtatattttgtttgctgtctttattttctaactctgataataattggctcacatcacttgtaaacacgattcagtctttcttccttccttccttcctttctttctttccttctttctttctttccttccttccctccctccttwcttctttctttctttctttctttctttctttctttctttctttctttctttctttctttctttctttctttctttttctttctttctgacaggatcttactctgtcacccaggctgtagcgcagtggtgcgatctcggctcactgcaatctctgcctcccaggcttaagcgat

SEQ ID NO: 672181 - DNA, 664 bp, Homo sapiens
atatcttccatgcaaagaacccccatcaccttcaaaagaattaacacatacagaggagatatacgaggggctggctgaccggaggatggggccagctcttctgaaggccaaaactcttcgtgtttcatgttgagagagaggcattctctcaggagaggaacctcgccctcctcacacttcttcatggtaaaagcctcacactgtgtgtctggactgtgcatcatggagtagtgagaagaatatctttttagctaaattattgaataatagtgctgtccctttatgctccaccctattctctcggtctccctattgagacaaactttagtcttgcactgagagctcaagtatattttgtttgctgtctttattttctaactctgataataattggctcacatcacttgtaaacacgattcagtctttcttccttccttccttcctttctttctttccttctttctttctttccttccttccctccctccttacttctttctttctttctttctttctttctttctttctttctttctttctttctttctttctttctttctttctttttctttctttctgacaggatctyactctgtcacccaggctgtagcgcagtggtgcgatctcggctcactgcaatctctgcctcccaggcttaagcgat

SEQ ID NO: 672182 - DNA, 608 bp, Homo sapiens
agggtttcaccatgctggcctcaaactcctgaacacaagtgatccacctgccttggcctcccagtgtgctgggattacaggcgtgacccactgtgcctggcctagaaaccaaaatcctgtagacaagacagtagaaccaaaatgatctatgtcaaaaaagaagtataaattagtcctaagtgttaattttcttaaagataatatcaagcttctcacagcttttctaatatggaattcataccaacacaaaatacatgacatttaaattaggtttcttttttctttttttttttttttttttttaattaaaacaagttttggccagggatggtggctcatgtctgtaatccctgcactttgggagccaaggtggctggatcacttgagctcaggagagttggagaccagcccgagcaacgtggatagatcccgtctttacaaaaaaatattwaaaaaaaatagtggggcatggtggtgtgcacctttagtccccagtaacttgagaggctgaggtgggaggatggcctcaacccagggggtggaggttgaagtgagttgagatcatgccactgcactccagccagagcaacagagcgagactctttgtt

SEQ ID NO: 672183 - DNA, 615 bp, Homo sapiens
aaagcagccaggaggtgaagcatgctagatcattatgattatataataagtattaattttattcttccaccataataactaacattaactgatcatcgactgtgggcagcgcactacaattacatatctttaaaatatgtaaaatagctactgttagtatcccctttatcaacttcaggaaactgaggcacaaagaggtaaaataacttaccctaaatcacacagctaatcaaacgcagatttgggatttagacccaggcagtgggactccacctctgatatgttgaccagtaccttgtactggaattcaggaatgaagagagattatcaggagcatgctacccaccactaccacactccaaaaacatatctagtcacatatgatgagaatgaaccagactgttgaagaatcaaaacatttgagatgcccttgaaatgatgagaataactgtaaaagatgatgatgaacarggttattctttcctgggcaaacaaagaagaaaagataagacaaaaataaatgtctagctgggggtgtggagtgtgaggtcgatctacagaaacagagttagaaagagctgcaaagtttttgaggtctctctgaggaagaagact

SEQ ID NO: 672184 - DNA, 1286 bp, Homo sapiens
gtctctactaaaaattacaaaaaattagccgggcgtggtggcgggcgcctgtagtcccagctacttgggaggctgaggcaggagaatggcgtgaacccgggaggcggagcttgcaatgagccgagatcgcgccaccgcactccagcctgggcgacagagccagactccgtctcaaaaaaaaaaaaaaaaaaaaaaaaaaagaaataaaggttaaaacaggccccagccctttaaatactttggaagtcacttcaaccaaatgggggaagcttgcaacatgggggggagatgcaaaaagaatgatttcctgcctatgatcagaagcagcaaccagcaatcagagcacagattcccaatatttagaggacagacagggtttaaaggttgttgttgttgttgttgttgttgttttccttctttctttctttctctctttcttactctaccctggcttttgcaagctgcttgccagcaactcctgaaacacctgcccacaagcctgccacgtggctaagggattagaatgggtagctgttactgtgcaaagagctaaaatacgaccaaaatctttctttaaaaatctgtcacatgctggggccaacaagagtgaggcttcttttttttttraatgtgtatgggcatgacaatttggattgaaggaattgtgagtgtgcaaattggagtaaatttctagaaagcaattttatagtatttaacacattatttcacatactcattattaattcagcttgactttaccatgcagacaaatcataatataaatactcaagtacgtatgtacaaagatttaaaaaaaaaaatggaagtaatcaaggccagctgggtgtggtggttcacccctgtaatcccagcactttgggaggccgaggcgggcagatcacctgaggtcgcgagtttgagacaagcctagccaagatggtgaaaacctgtctctactaaaaacacaaaaattaattgggcgtggtggcacatgcctataatcccaaatactcaggaggctgaggcaggataaccacttgaacccgggagacagagacgcagtgagccaagattgtaccactacactccagacagagtgagactctgtttccaaaaaaataaaataaaaataaataagtaagtaaataaataaataaataaataagtaatttatgtttcacattgatgtatattgaaaataaccgatgggatattataatacagaaataaatatataatgaaaatgtaatttctaacaataatataaagtgaaacagggagaatta

SEQ ID NO: 672185 - DNA, 1286 bp, Homo sapiens
gtctctactaaaaattacaaaaaattagccgggcgtggtggcgggcgcctgtagtcccagctacttgggaggctgaggcaggagaatggcgtgaacccgggaggcggagcttgcaatgagccgagatcgcgccaccgcactccagcctgggcgacagagccagactccgtctcaaaaaaaaaaaaaaaaaaaaaaaaaaagaaataaaggttaaaacaggccccagccctttaaatactttggaagtcacttcaaccaaatgggggaagcttgcaacatgggggggagatgcaaaaagaatgatttcctgcctatgatcagaagcagcaaccagcaatcagagcacagattcccaatatttagaggacagacagggtttaaaggttgttgttgttgttgttgttgttgttttccttctttctttctttctctctttcttactctaccctggcttttgcaagctgcttgccagcaactcctgaaacacctgcccacaagcctgccacgtggctaagggattagaatgggtagctgttactgtgcaaagagctaaaatacgaccaaaatctttctttaaaaatctgtcacatgctggggccaacaagagtgaggcttcttttttttttaaatgtgtatgggcatgacaatttggattgaaggaattgtgagtgtgcaaattggagtaaatttctagaaagcaattttatagtatttaacacattatttcacatactcattattaattcagcttgactttaccatgcagacaaatcataatataaatactcaagtacgtatgtacaaagatttaaaaaaaaaaatggaagtaatcraggccagctgggtgtggtggttcacccctgtaatcccagcactttgggaggccgaggcgggcagatcacctgaggtcgcgagtttgagacaagcctagccaagatggtgaaaacctgtctctactaaaaacacaaaaattaattgggcgtggtggcacatgcctataatcccaaatactcaggaggctgaggcaggataaccacttgaacccgggagacagagacgcagtgagccaagattgtaccactacactccagacagagtgagactctgtttccaaaaaaataaaataaaaataaataagtaagtaaataaataaataaataaataagtaatttatgtttcacattgatgtatattgaaaataaccgatgggatattataatacagaaataaatatataatgaaaatgtaatttctaacaataatataaagtgaaacagggagaatta

SEQ ID NO: 672186 - DNA, 1286 bp, Homo sapiens
gtctctactaaaaattacaaaaaattagccgggcgtggtggcgggcgcctgtagtcccagctacttgggaggctgaggcaggagaatggcgtgaacccgggaggcggagcttgcaatgagccgagatcgcgccaccgcactccagcctgggcgacagagccagactccgtctcaaaaaaaaaaaaaaaaaaaaaaaaaaagaaataaaggttaaaacaggccccagccctttaaatactttggaagtcacttcaaccaaatgggggaagcttgcaacatgggggggagatgcaaaaagaatgatttcctgcctatgatcagaagcagcaaccagcaatcagagcacagattcccaatatttagaggacagacagggtttaaaggttgttgttgttgttgttgttgttgttttccttctttctttctttctctctttcttactctaccctggcttttgcaagctgcttgccagcaactcctgaaacacctgcccacaagcctgccacgtggctaagggattagaatgggtagctgttactgtgcaaagagctaaaatacgaccaaaatctttctttaaaaatctgtcacatgctggggccaacaagagtgaggcttcttttttttttaaatgtgtatgggcatgacaatttggattgaaggaattgtgagtgtgcaaattggagtaaatttctagaaagcaattttatagtatttaacacattatttcacatactcattattaattcagcttgactttaccatgcagacaaatcataatataaatactcaagtacgtatgtacaaagatttaaaaaaaaaaatggaagtaatcaaggccagctgggtgtggtggytcacccctgtaatcccagcactttgggaggccgaggcgggcagatcacctgaggtcgcgagtttgagacaagcctagccaagatggtgaaaacctgtctctactaaaaacacaaaaattaattgggcgtggtggcacatgcctataatcccaaatactcaggaggctgaggcaggataaccacttgaacccgggagacagagacgcagtgagccaagattgtaccactacactccagacagagtgagactctgtttccaaaaaaataaaataaaaataaataagtaagtaaataaataaataaataaataagtaatttatgtttcacattgatgtatattgaaaataaccgatgggatattataatacagaaataaatatataatgaaaatgtaatttctaacaataatataaagtgaaacagggagaatta

SEQ ID NO: 672187 - DNA, 615 bp, Homo sapiens
ttatgcagcacatatatatcagaaaattttacgtatgtacctatatatgttttgtatatatatgtttatatatatatatcatgccttctttcactaaaaacatagaaaagcaagtttgatttaaagaatggataatacagatatcttattttatgcagcacatatatattaggaaattgtatatatgtacatatatctatatatgtgtaaatatatattttacatatatacacaacagaaaggaagttagaaaaacaaagataaacttcaactacttcattttctacctagactttcctactcctggaaattttttatataaaattttacttcagttgcattattaatttgaatactccaatgatatttttataaagacaacgcattttttgtaaaktttgctgtgttcttttttgtagcttttttacatttatgttttaatagagtgggctttattaagtcaggatacttctattgtagattaagtacagagtaccaagaagggctaagttattcactgggtaacacaggattcctaaaattactgggaagttgtaatactgttattgaaataattcacactgtaaatgttctcagatagtcacaatcgtttgg

SEQ ID NO: 672188 - DNA, 700 bp, Homo sapiens
acctgaaaagctagaagtaatgtaaattactggtattcttcagggggtctaatgatatctgtatcagatatgtggtccctacaaggcactccaaagtctgagtggggctagcaaaaattgagcagagtggcactgtgatcatcagaaagatatttcccccaacaatatgacaagatctgaaattatacgagtttgtcaaatttttaaaccctacgatgtaaaagttctccttaatgtcccaaaaggcaatttttactttaacacatttttaagttaaaggtagagctcaaaactgttagtttttcttgcatatcagatttccaagaaatatgtttgttatcttgtacaattcatttactgaccttaattacctaaatgtacgagtcagcattacctgacaagtccgtttggagatcttacagtgtgtgagggcacccatcctccagtccccagctcctcttgagcctcatctttcaaccccagcatttacttatttctgagyctttgcacatcagtttctactttcagagaatgggttggctgattcctgctaatcactcatccttcaggtcctagctttgcctgtgcactctgcaagggcaggcaccacgctttccctctactgcatgcccatcatctactccatcacctgtcacaaagtaggatagatgtctaacaaattttgtttgaagaaatgaac

SEQ ID NO: 672189 - DNA, 1622 bp, Homo sapiens
ttgactctgaagtctatgcagttttaaccacagtaactattagtagattaatagctataattatataagaattaatatattaataggtaattattgtattagctctccaactggagttgctacagctaagaaagatgactccagaaggtagaagctataggaaaaccagcgtgattgttatttagggccatatttcatcctgaggggtctcttcatggaaaccaaccagtcttccagcactgaacaaattaccattgccaattggacmtgctggggaaaaaacatattaccatattgtttagctcttggaaaatgaagcactcttcatctgtaactttgtgcagccatattcctttattttctctggctctgggttctcccattgggagtgcaaaagaatgtcttcaaaactcccccaagcacagaactttccaggccatggaagaacatgcatgttgaaagccatccattcagctgctcatttaggaatttatttcctggtacatctatctggcttttctttgccatgaaagaactggctcaattctcagttttattggtattttagcttctcaaattgtgcaagatctgtagatttacaaaattgtagtacatctctctttacccttgcaatttacacacttacctgtacttttttctttagtaccagacacaactgttttttaatctgttagaacgtgtagctcaataaaatacaatagcagtatgtgttttggagaatttatgtatgtaatatgaatacggagaatttaaaaaattatattgattaagagaacaaaaggggctggtgaatacttttatatatagttttaataatattcaactttctgtaagtagcccctcccccaccttgatttcacagtggctttggaaagaatttaaatctgatacaaaatcactgtattaaatttccaaagtccccaaattcacctttaaattccttcatccttatccgctggattatgactttcatccaagagctcccccacatctttgtggtcccagaatcaagaaaattcctctttacattgcacttatcttttggcaagtaaaataaaatttgcctggatattcttctccaatcatactgttatgatcagtttgaaatggaaatgaccagacttcatttggattacaagagaaacattctcctttaaaaaaaaaaaattaaaacaaaatgtaaaagtgaataatgggaaatgctgccccaggcctatgtttatagacacagagacaaaccctgaaaactggggcggagggctggatgaagaacacacagtccatcagttttgcttaaaaattgcctaagaaggctgggtgctgtggctcacacctgtaatcccagcactttgggaggccgaggcgggcggatcatgaggccaggagttcgagaccagcctggccaacacggtgaaacccagtctctactaaaaatacaaaaattagccacgtgtggtgtcgagcgcctgtaatcccagctactttggaggctgagacaggagaattgcttgaatctgggaggcggaggttgcagtgctctgagatcgcgccattgcactccagcctggacgacagagcaagaccctgtctcagaaaacaac

SEQ ID NO: 672190 - DNA, 587 bp, Homo sapiens
ttgagctcagaccttgcacacagctattgcatctctactttgtgactggaacaccttccctctttgagagttttgtacgttatctacagaatgaatgagagcaatgagcttgtacctaagcaatatctgtcccatggaaaaggtgccatccaygaactcatcatcagccatttaagatggcaatgaacgaagtgaaagttaaatcttcaggtgttatacttgaaaagtctctcattaatttcaagaaatgaaaaaacaaggtcttggaatagataatggaaaaagcaatttctgaacaatttatacgctagtgttcacataattggacacataagacaaattaagcagtaaagaaattcttctgacagattgatttttatctgagaagtgaatgctgtgctttgtcccagactggatttattcacagggaacgttctctgctgcagtttatacaagttatctcacttgacaggctccagagagacttgggacaaatacagaaatcccagtggaacagcatagaaagcaagaaatatttcaatatgtaacatggacatttacctttacgtaagtaggcacacttcttt

SEQ ID NO: 672191 - DNA, 587 bp, Homo sapiens
ttgagctcagaccttgcacacagctattgcatctctactttgtgactggaacaccttccctctttgagagttttgtacgttatctacagaatgaatgagagcaatgagcttgtacctaagcaatatctgtcccatggaaaaggtgccatccacgaactcatcatcagccatttaagatggcaatgaacgaagtgaaagttaaatcttcaggtgttatacttgaaaagtctctcattaatttcaagaaatgaaaaaacaaggtcttggaatagataatggaaaaagcaatttctgaacaatttatacgctagtgttcacataattggacacataagacaaattaagcagtaaagaaattyttctgacagattgatttttatctgagaagtgaatgctgtgctttgtcccagactggatttattcacagggaacgttctctgctgcagtttatacaagttatctcacttgacaggctccagagagacttgggacaaatacagaaatcccagtggaacagcatagaaagcaagaaatatttcaatatgtaacatggacatttacctttacgtaagtaggcacacttcttt

SEQ ID NO: 672192 - DNA, 644 bp, Homo sapiens
tatacatatatatatacatatatatggctctctgtgacagtaactatctggaaaagtaggaaaaagtactgtgtttaaaattttttaaactaacacataataattttacatatctgtgggatacatagtgatgtggtgatgcatataattacggtaatgagatcagaataattagcatgttgtgcttttttaaaatggcaattttatataattgtataaaacttcacatatatttaacatttttcctgggggaaataataaaggaatatataagcataatcatgggctcagggattttrtaaatacccatgttaagggaggacttggaacctgaaaagtttacattggagaaaacattgcagaatggcagagtgaagatcttggttaactcagttttcctctaactcaatgttaatgtgaaacatcaaaaatacaacaagacaactaaataacccatttttgatctcagaaaaataaccaaagccacagaatgtactgaggagaacctattcaaaagaaagtactaaactacagtatgacagcaggcccggtgatgttttaagttggtgctatccccatcctttccaccacacacagcagctcagtggcacagtagccaaaggctaagagcattgcagacagca

SEQ ID NO: 672193 - DNA, 613 bp, Homo sapiens
ttttaaccaatataagtaatggtaatagatagatcatatttctcttctatttccagtgtctttccttccccccacttcactagaacctctcagttactactctcctcccttcctccccttcaggtctgatccctccaccagccatggtaacaatatgcactgcattaaggactctatattgatctcagggcaatggaaagcacagtgtgaagatggggaaactccatggaatattgcaccagaagacttaggttcaaatcccaatgcccattagtactatgtagaagatactgttggtgccctgcccaaacacccttyccctggagggtgaactcatctcctagctactgtaggtgtaggcagctaaccactcactcgcagctgaccccttttccaggaaattgccctcagacaaaagccaattcttcaaagagattaaacccccctagcctcccaggggcagccactggccaatgactgattgacataggggtacaaaaggccaaccatctcaaggaggggctcattctgtgctcctatttatgctccatgccgccttggccccaccctccatcaacttaaagtcagcctcaaacctagaccacatccttgc

SEQ ID NO: 672194 - DNA, 641 bp, Homo sapiens
atgactgtaatcccagctactcaggaggctgaggcaggagaattgcttcaacccggtaggtggagattgcagtgagctgagatcatgccactgcactctagcctgacaaagagaaacttcgtctcaaaaaaaaaaaaaaattaaatgaaaaataattgatcctagtgaaaaagatttcagtggaataaagatagacaaaaatggaaatgtttcaaatgagtgtcatggaaagatgaccaaagaattcaactgactgtgtgagtttgttccagaaaacatgttctttaaaacaaaacgttctttagttccctacagggactcctagtgaccaccgccatctcattaataagtggctttgattcttggactcagtaaacaaaatggcttgaggcgtgtggaactgagtgtctttactcttttgaaaattgtactaaatgcttgtccctaagaggtttagcccttagacaatgcatggagggaaattatttgcaaaaytccccactctctggaaaatcatttgttctggtcagattcctggaattcatatacagatactggggtctctcacagttttttctgccactttgggttaacttttcctccgggcgtttcagttctaagaatgctccctttgacaggga

SEQ ID NO: 672195 - DNA, 1232 bp, Homo sapiens
  misc_feature 776, 777, 778, 779, 780, 781, 782, 783, 784, 785, 786, 787,788, 789, 790, 791, 792, 793, 794, 795, 796, 797, 798, 799,800, 801, 802, 803, 804, 805, 806, 807, 808, 809, 810, 811,812, 813, 814, 815, 816, 817, 818, 819, 820, 821, 822: n = A,T,C or G
  misc_feature 823, 824, 825, 826, 827, 828, 829, 830, 831, 832, 833, 834,835, 836, 837, 838, 839, 840, 841, 842, 843, 844, 845, 846,847, 848, 849, 850, 851, 852, 853, 854, 855, 856, 857, 858,859, 860, 861, 862, 863, 864, 865, 866, 867, 868, 869: n = A,T,C or G
  misc_feature 870, 871, 872, 873, 874, 875: n = A,T,C or G
atgaagtaccatagttatttataccagaaaggagattcttacatcttgaccatttatttataatatttatcgaataccaaatgccatgtactaggtactgtggataacagaaacattaaaaatgtggatcctgccctcgaggtaaagattaagtgccgatgctttatttgggaggtacaaattcaggacagccagagtgaagaaagctggaaggaagttaggtagagaaggatgtgaagtaatacatggtgatgtgttaccttgctgtcccctccttgaaaatgagccacaagagacacagcagctttttcagcaggcacactccctcagtcttgcctgtctccagacacactggagaaaccatccttggaaggaagaagaaaagggaatttaagtattgtgctcggtcagtccactggtttcaatkggtgaaagttactccatggggagtgacccccccaccctcccagcatgcattaccgaggccctagcagcctctgagaagtcagctcctgcattgttcagaagtggcaggagaagccagagattccggaaatgcaactggtgagccccaaaaagagcaagtgattatgggtacagaaagcaaacaaagtgaaggaaatctgaggaagtacatgaaatatatccattacacaagacataagcacctgaagatagaaatcaaaatacaggagttcaatagtaaaactgcaataaaaatcagtatcactgggcaatatatgactgggtgagtttagaaaaggggcattactggnnnnnnnnnnnnnnnnnnnnnnnnnnnnnnnnnnnnnnnnnnnnnnnnnnnnnnnnnnnnnnnnnnnnnnnnnnnnnnnnnnnnnnnnnnnnnnnnnnnnacttgagcccaggagttggagaccagcctgggcaacgtagcaagactatgtcttaattaattaattaattaattaatttatggagacagagtctcgccctgtcacccaggctggagtgcaatggcacgatcttggctcactacaacctctgccttctgggttcaagcgattctcctgcctcagcctcccgagtagctgggattacaggtgcgcgccaccacgcccggctaatttgttgtatctttagtagagatgggggtttcaccatgttggccaggctggtttcgaactcctgacctcgtgatccgccagcctcagcctcccaaagtgctgggattacaggcgtgagccaccgtg

SEQ ID NO: 672196 - DNA, 663 bp, Homo sapiens
tcatgaactacatcactctttggcctactgaggggttagagatgtcatcaacaactctcattgcaaccttaagcctcctttccttccaaggtgaagatgaccaacaagggggcacagatcaatcatatgctctttaaacatgggttgggaatatgaacaagttagctatattaaaataaacaaagatatctggtctgttcccactacaatatgcctctaatgaatctaacttgagacgctagaattttaatacattatttcagggagactttcttaagggagctatgacctcaaaaccattacttgattttatccccattttatttatacaggaaagggggcagaaatataacatggtgtacaagtatcatatcatakcatagacaggacttgacttctctaatcttttcttaatgttttcctgccttaaacagaaattaaacactatcaacagggtgacctaaggaaactccccaaatgattcctacttcttgagccactcatcatgaaatcctacatacaaaagctgaataacaatcttaaatcttaaagggctacttctttcagcaaactattattctgaagactagagaacatgttgctctcaacagtattttagtgaacacattaaataagaagcaaacagttcgagggaggatccaa

SEQ ID NO: 672197 - DNA, 1212 bp, Homo sapiens
tgtggtatttggttttctgttcctgcgctagtttgctaaggataatggcctctggctccatccatgttcctgaaaaggacgtgatctctctctctttttgtttttaacggctgcatagttctgatagtacttttggagaaatctaagaattaagaaataatctagcaatactatttttgctgttttccttttcagcatatatttctctttaataagttcaaaatcataaggttttttttgaacttgcttattcagccagcattttattttagctttttattatggcaaatttcaaagttcagaaaggagagagaacaataaaatgaacttccatgtactcagcatccagtttcaataattatcagttcacagccaatcctatttcatccatacctaaatatccccctgaatcttgttatttagaaacaaattccaggcataatatcatttcattgtatatatttcatatgtctctctggaaaatggggagtcttttaaacaycacaacaatactaaaaagagcaataatttctaataacatcaataatttttaataacatcaaatctggggttcaaagtttttttattgtcttttcctttaaaagtatattttttagtttgtttgaatcaggatccaacattacaattttcaagatctttacgttttagccttagagtcttacgattttagattagaaggttggcctcggtcatttcatctgtccctacctttttatagatgagaaaaattgccaagggtcacagggctggctcatttaagattagaacctggaccttctgattcttaatctcaggtgctttttgtttttagcagaaaacgttgtgaaggcttgtctttacaaaaaagttttccatcctttggtttctgtgcattataagcaatgacatgaacataaactcacatcactgggacttgggcattcaaacatgaaggtttgaggtatctttattccagctacgaatcctgctcagagccaaaatttgatggctgtaaccactgttctcccttttgtcacctttttaagaaggttagctctgaagcttgactataacgtcagtggtgctgactttctcacaaacatcctaaatctctcccagtctagtgtgctaaatttgctgacttcctcccttagtctttctgaattctggcatttttaagtgtatatattcttttcctcatatttacttaac

SEQ ID NO: 672198 - DNA, 1212 bp, Homo sapiens
tgtggtatttggttttctgttcctgcgctagtttgctaaggataatggcctctggctccatccatgttcctgaaaaggacgtgatctctctctctttttgtttttaacggctgcatagttctgatagtacttttggagaaatctaagaattaagaaataatctagcaatactatttttgctgttttccttttcagcatatatttctctttaataagttcaaaatcataaggttttttttgaacttgcttattcagccagcattttattttagctttttattatggcaaatttcaaagttcagaaaggagagagaacaataaaatgaacttccatgtactcagcatccagtttcaataattatcagttcacagccaatcctatttcatccatacctaaatatccccctgaatcttgttatttagaaacaaattccaggcataatatcatttcattgtatatatttcatatgtctctctggaaaatggggagtcttttaaacaccacaacaatactaaaaagagcaataatttctaataacatcaataatttttaataacatcaaatctggggttcaaagtttttttattgtcttwtcctttaaaagtatattttttagtttgtttgaatcaggatccaacattacaattttcaagatctttacgttttagccttagagtcttacgattttagattagaaggttggcctcggtcatttcatctgtccctacctttttatagatgagaaaaattgccaagggtcacagggctggctcatttaagattagaacctggaccttctgattcttaatctcaggtgctttttgtttttagcagaaaacgttgtgaaggcttgtctttacaaaaaagttttccatcctttggtttctgtgcattataagcaatgacatgaacataaactcacatcactgggacttgggcattcaaacatgaaggtttgaggtatctttattccagctacgaatcctgctcagagccaaaatttgatggctgtaaccactgttctcccttttgtcacctttttaagaaggttagctctgaagcttgactataacgtcagtggtgctgactttctcacaaacatcctaaatctctcccagtctagtgtgctaaatttgctgacttcctcccttagtctttctgaattctggcatttttaagtgtatatattcttttcctcatatttacttaac

SEQ ID NO: 672199 - DNA, 1083 bp, Homo sapiens
tctcttatcttgtagtctaagatttatttccctaaaccttactccccattggaagttcagtttctttcttttttcttttctttcttttctttcctttctttctctctctcttttctttccttccttccttccttccttttctttctttcctttctttttttttttttttccttgacacagtctcgctctstcacccagactggagtgcagtggcgtgatctcggctcactgcaacctccgcctccagagttcaagcaattctcctgtctcagcctcctgagtagctgggactacaggcgcatgccaccactcctagctaattttttttttttgtatttttgtatttttagtagagatggggtttcacggtgttagctaggatagtctcaatctcctgacctcaggtgatccacccgcttctgcctcccaaagtgttgggattacaggcgtgagccactgtgcccggcctagtcaaaatctttcaattcaactctgctttggaatataatggcctaaggtaggtattctcgaatctatttctctttaaaccatggctccctttcctcaagaaaaaccccagtcttcctgagacttcctatctggactgggaggtggatgagagatgcatggaatgaagaggaagaccaggtccatgggaacacttggagataaaattacttggaaggctcaacttcttaatccattagccaattttttatttttaagaaggtgggggtatgagtcactgttaccttgaaagaagcgagactcatcctcacagcaaatgctttaaactttctcttctccttcccacgcagctcacttgttggccaaaggactagcctaaatctcatttctttcggtgtctttggcttattccatggggaagacgttaattagcataaataagttgatgccttattgaacctcatgatgcctgatgataaagcctcataaatgaggttaaagagagtacaaaggtcagagcaccccatctctaactgcgggacaccagactgatttttctccagaatgactttgcactctcttctcactgttcctaccctggcccacaccctcaga

SEQ ID NO: 672200 - DNA, 1083 bp, Homo sapiens
tctcttatcttgtagtctaagatttatttccctaaaccttactccccattggaagttcagtttctttcttttttcttttctttcttttctttcctttctttctctctctcttttctttccttccttccttccttccttttctttctttcctttctttttttttttttttccttgacacagtctcgctctgtcacccagactggagtgcagtggcgtgatctcggctcactgcaacctccgcctccagagttcaagcaattctcctgtctcagcctcctgagtagctgggactacaggcgcatgccaccactcctagctaattttttttttttgtatttttgtatttttagtagagatggggtttcacggtgttagctaggatagtctcaatctcctgacctcaggtgatccacccgcttctgcctcccaaagtgttgggattacaggcgtgagccactgtgcccggcctagtcaaaatctttcaattcaactctgctttggaatataatggcctaaggtaggtattctcgaatctatttctctttaaaccatggctccctttcctcaagaaaaaccccagtcttcctgagacttcctatctggactgggaggtggatgagagatgcatggaatgaagaggaagaccaggtccatgggaacacttggagataaaattacttggaaggctcaacttcttaatccattagccaattttttatttttaagaaggtgggggtatgagtcactgttaccttgaaagaagcgagactcatcctcacagcaaatgctttaaactttctcttctccttcccacgcagctcacttgttggccaaaggactagcctaaatctcatttctttcggtgtctttggcttattccatggggaagacrttaattagcataaataagttgatgccttattgaacctcatgatgcctgatgataaagcctcataaatgaggttaaagagagtacaaaggtcagagcaccccatctctaactgcgggacaccagactgatttttctccagaatgactttgcactctcttctcactgttcctaccctggcccacaccctcaga

SEQ ID NO: 672201 - DNA, 1083 bp, Homo sapiens
tctcttatcttgtagtctaagatttatttccctaaaccttactccccattggaagttcagtttctttcttttttcttttctttcttttctttcctttctttctctctctcttttctttccttccttccttccttccttttctttctttcctttctttttttttttttttccttgacacagtctcgctctgtcacccagactggagtgcagtggcgtgatctcggctcactgcaacctccgcctccagagttcaagcaattctcctgtctcagcctcctgagtagctgggactacaggcgcatgccaccactcctagctaattttttttttttgtatttttgtatttttagtagagatggggtttcacggtgttagctaggatagtctcaatctcctgacctcaggtgatccacccgcttctgcctcccaaagtgttgggattacaggcgtgagccactgtgcccggcctagtcaaaatctttcaattcaactctgctttggaatataatggcctaaggtaggtattctcgaatctatttctctttaaaccatggctccctttcctcaagaaaaaccccagtcttcctgagacttcctatctggactgggaggtggatgagagatgcatggaatgaagaggaagaccaggtccatgggaacacttggagataaaattacttggaaggctcaacttcttaatccattagccaattttttatttttaagaaggtgggggtatgagtcactgttaccttgaaagaagcgagactcatcctcacagcaaatgctttaaactttctcttctccttcccacgcagctcacttgttggccaaaggactagcctaaatctcatttctttcggtgtctttggcttattccatggggaagacgttaattagcataaataagttgatgccttattgaacctcatgatgcctgakgataaagcctcataaatgaggttaaagagagtacaaaggtcagagcaccccatctctaactgcgggacaccagactgatttttctccagaatgactttgcactctcttctcactgttcctaccctggcccacaccctcaga

SEQ ID NO: 672202 - DNA, 643 bp, Homo sapiens
tcccagagagtggtctgatctttgtcctagattaaccattgacaatcaacaagcagatgacagagtcactgaaaactgagagttcactgtatttattggggtctcttgaatagtgtattacattgaattaattctgaaagrtgtgagtcctacccaagaccagagagttatgataaattcagtggttgatgtagtctctagggttacaatcagggtatttcttcgtcaaaactgaaaccattataactagccttttctattctcctccctctgcctttactctttttcaaccctcggctctcatcccctctcatacagcccctcccaggatgcccagaatcctaacagtgtgccagagctctcccagtggaggaatcatctaatagactaagtcaccctaaagagtcattgacttgatgtgctaattcttaccaggggtgcttgtttttcaaaagaagatacctgaagtggtctgtgcttaccccaaaggagtgagtcactaatggcataatttcagatgccaggtaactggagagggtctaagagtcagaagacatgcttttaacaaaactatgtatttgaagaacagtcttacttagagaaccagaacatatttactttcaaatgtcttcatacataatta

SEQ ID NO: 672203 - DNA, 598 bp, Homo sapiens
tcagtggtaccaccatacctctaatgtccatcagagataaaccacataaatgataattttaccactggtacttttaaacaacagagaaccacacagcaatgagaatgagaatgacaaactgcagctaacaatatagacaaattttacagacataatgctaagcaaaaacaacacaaaacagacagagtataaattgtattattccactttaaagagttcaaaaaaggaaaaactaatctatggtgttaaaagtcactatggtggttatgtttgtgtttggaggggtggggtgctagactgctttctagaaggagtcactagaggwggttctggaatagaatgttctatttttttatttgagtgttgttacttttctcagagtatgctgtattccagtaaaaggtcaaaaagtgaacaattatggtttccagatttgaggggggaaaacacaactttcctgctggcagaattccttgggagatgcttttactttttttccattttttgcagagatgggggtcccactatgttgcccaggcttgaactcctgagttcaagtgatcctcctgcctcagcctcccaaaatactgggattaca

SEQ ID NO: 672204 - DNA, 615 bp, Homo sapiens
tctattgtgcaatatggtgataacaatgaaccatatartcaataacaatggactgcagttttttgagatgtggtcttgctgtgttgcccaggtggtagtgcaatggctattcataggcatgatcatagcatgctacagccttgaactcccgggctcaaatcatatccctatctcagtctctcccaaagctgggactgcatgtgtaactgtattcttgaaaatcactaagagagtagatttcatgtgttctcactataaaatataagtgtatgaggtaatgcatatgataaataggtagatttagtcattccacaatgcatatatattccaaaacatcatagtgtatattataaacatatacaatttttatttgtcttaaaacaaatctttaagaaatatttttaaaaattaatgtaatagtatacatttgagataataaataaatctagaaaataaatctagaatgaattcaataatctggatagtagaaaaggaagccaagggttatgtgcctctaaacaaatgaaaatatattgtaagagagtgagataggtgcaagatcaaagaatgggaacttacacttctgtattagtcagaattctctagaaggacaga

SEQ ID NO: 672205 - DNA, 585 bp, Homo sapiens
agaatgagtaattccaatataatatgaaatacaaataactgtaagggatccaacatctgtctaaaaagatgcttttatgcacaaatatggaaagcctcctcatgatcgttattgcttcagaggcgagagcaaacacattcaaaagctagcagaaggcaagaaatcactaatatcagagcagaactgaaggagatagagacacaaaaaacccttcaaaaaatcaatgaatccagaagctggttttttgaaaggatcaacaaaattgatagaccgctagcaagactaataaagaagaaaagrgagaagaatcaaatagatgcaataaaaaatgataaaggggatatcaccactgatcccacagaagtacaaactaccatcagagaatactataaacacctctatgcgaataaactagaaaatctagaagaagggaataaattccgagacacatacaccctcccaagactaaagcaggaagaagttgaatctctgaatagaccaataacaggctctgaaattgaggcaataattaatagcttaccaaccaaaaaaagtccaggaccagatggattcacagccgaattc

SEQ ID NO: 672206 - DNA, 1846 bp, Homo sapiens
tatcacctttttcctgtgtagattgatcatggaacagttggctagcatccatatctttaaatcagacatgcactggtagagcaggcaggttgtggaaggaatgagaaacaaggccagcgaagctcatcttaagtcattctatcacaaccttgagtcaggataccttctagtctgtcacctctgcaggagcgaccagaggatggcttcacctggaactcttatttttccttgtctttccactaaaatattgaggactttaaaaaactgaaaagaaagacaattatttgtatgaatgtgggatccaaattcctgaccactttgaaatgaamtgaactgtcaaagaggccctggggcatttacatctgatccaccacctaaggccaaacacagtctggcaccttccacggattgatgttagggccttggtaaactttttgaaagaaactcagagattctctgagatgacagaattctctaactgttctctaaacaattagagagtacaagattccattcaaaagcagattaacttttgtgaataaagatttaactttatcataaataaaggagcatctgcacttaagaaaatgaattcctttggacaatcacaattcagtgaatatgtaattcttttcaattaacaaggactaccttgattttaaaaacttagcatcatagtatagacaagatcaggattcttccagtgtgtaagattagcagaatataggtcataaaacttcagaacgctgagtttaggcagagataatggtttggatttttagtttcattttatcatttgctatatccatggttggaaggcttgaaagttaacatcaaaagataactctctggcacttctagattctttgttcataattatgcatatcataagtgtataattattctataaattttttttttctgagatggagtctttctctgtcgcccaggctggagtgcagtggggtgatcttggctcactgcaatctccacctcccgggttcaagcaattctcatgcctcagcctcctaagtagctgggattacaggcacgcaccaccatgcccagcgattttttttttgtatttttagtagagacggggttccaccatgttggccatgctggtctcgaactcctaacgtcaggcgatctgcctgcctcagccttccaaagtgttgggataacaggcatgagccattgtgtctagccctatgtagatgttattctatagtgttagatcattgattctcagttaactttataaagttcaaattaaccaatactgataacaaaataaaatgtagacaaccttaagtattagatatatgaactattgtccaaatcatgcagggataagggaaagaaagaggagggcaaaccaatgaaacatgtagtagaaagtctagtaccagtcacatagccaccacttttgctacatggttccataagaagtatatttctttattagtattttaataaaattgcaagatagtatacaaaatgagtaatgtagactttagaatcatcaggtactaaatttaaatttttattctacagctaagtaaaaaattatttaacctttttcactcttcatttctatggtacgaggctgctcattttccagggtgattgtcaagccttggagatgcacataaaagcacttatcacattgcaggttcctaatagtcatccactaaataaaaacattgtgcttaaaaaataaaattatgtttttatttgtaatatattaaataacatgagcgcaacttatgatcacatggctactgaaaaaaatgcagttaacatagtttaaaaaatactttagtatcagaagaaatatctccta

SEQ ID NO: 672207 - DNA, 1846 bp, Homo sapiens
tatcacctttttcctgtgtagattgatcatggaacagttggctagcatccatatctttaaatcagacatgcactggtagagcaggcaggttgtggaaggaatgagaaacaaggccagcgaagctcatcttaagtcattctatcacaaccttgagtcaggataccttctagtctgtcacctctgcaggagcgaccagaggatggcttcacctggaactcttatttttccttgtctttccactaaaatattgaggactttaaaaaactgaaaagaaagacaattatttgtatgaatgtgggatccaaattcctgaccactttgaaatgaaatgaactgtcaaagaggccctggggcatttacatctgatccaccacctaaggccaaacacagtctggcaccttccacggattgatgttagggccttggtaaactttttgaaagaaactcagagattctctgagatgacagaattctctaactgttctctaaacaattagagagtacaagattccattcaaaagcagattaacttttgtgaataaagatttaactttatcataaataaaggagcatctgcacttaagaaaatgaattcctttggacaatcacaattcagtgaatatgtaattcttttcaattaacaaggactaccttgattttaaaaacttagcatcatagtatagacaagatcaggattcttccagtgtgtaagattagcagaatataggtcataaaacttcagaacgctgagtttaggcagagataatggtttggatttttagtttcattttatcatttgctatatccatggttggaaggcttgaaagttaacatcaaaagataactctctggcacttctagattctttgttcataattatgcatatcataagtgtataattattctataaattttttttttctgagatggagtctttctctgtcgcccaggctggagtgcagtggggtgatcttggctcactgcaatctccacctcccgggttcaagcaattctcatgcctcagcctcctaagtagctgggattacaggcacgcaccaccatgcccagcgattttttttttgtatttttagtagagacggggttccaccatgttggccatgctggtctcgaactcctaacgtcaggcgatctgcctgcctcagccttccaaagtgttgggataacaggcatgagccattgtgtctagccctatgtagatgttattctatagtgttagatcattgattctcagttaactttataaagttcaaattaaccaatactgataacaaaataaaatgtagacaaccttaagtattagatatatgaactattgtccaaatcatgcagggataagggaaagaaagaggagggcaaaccaatgaaacatgtagtagaaagtctagtaccagtcacatagccaccacttttgctacatggttccataagaagtatatttctttattagtattttaataaaattgcaagatagtatacaaaatgagtaatgtagactttagaatcatcaggtactaaatttaaatttttattctacagctaagtaaaaaattatttaacctttttcactcttcatttctatggtacgaggctgctcattttccagggtgattgtcaagccttggagatgcacataaaagcacttatcacattgcaggttcctaatagtcatccactaaataaaaacattgtgcttaaaaaataaaattatgtttttatttgtaatwtattaaataacatgagcgcaacttatgatcacatggctactgaaaaaaatgcagttaacatagtttaaaaaatactttagtatcagaagaaatatctccta

SEQ ID NO: 672208 - DNA, 615 bp, Homo sapiens
tggcaaaagactagtgtcagctaagatggggctatattttttttttttttttttgagacagggtctcactttgtcacccaggctacagtgtagtggtgcaaccatggctcactgaagccttgacctgacctcctgggctgaagtgatcctcccacctcagcctcctgtactttaattactaaaaattctttagtgcggtcccaccatttgcagttttgaattatgtgtctgaatgccacaatgacccactggcatttccaataggtcatgtagactggtgagatctgccagaactccacacagggacagccggagaaatcagagatgttcaggagcaaagtaggcgcacagggctattttggtgaagtttcaatctaccacgtggaaggaatattagacacattcgctacggctccaagagcatgagtaagacaaamacagacaggccgcaggcaggcagatgtgtgagtgggcccgcagaagaatgtccagcaaccagtgccatgccacaatggggtgcacggctcagagacacaggacgctctgatggctgagtgatcagcctcccacccagcagcctccaggcatttctacgttgatcaaaacattccatga

SEQ ID NO: 672209 - DNA, 1517 bp, Homo sapiens
aggtgaaaacagcccaaatgtccatcaatggttgaatgaataaacaaaacgtgacaggtccgtacagtgcaatattactcggccatgaaaaagaatgaatgatcgacatgagctacaacgtggatgagccttgaaaactttaacctgagggaaagaagccagtcagaaaaggatacatgctatatgacttcatttacttggaccatccagaagcattaaatccgcagagacgggaattagattggcggttgycaggggtgagggaatggggagagactgcttcatgaggtaatgaaaaggttttgaaaccaggcagaggtggtgattgcacactactgtgaatgtcccaagtgccgctgaattgttcactttaaaatggttaatattattttatttaatttcatctgaaaaaaaaaaagggccaagtatgttaagagccctaccatggcagaagagatcctgatggataaggaaaagcagtcacgagctgtcattaattgccctacgaagctgaaggaatctatctccagcctgactgccctgctgggaggtggaacaggtgccttctctgtggggggattggggggcagcctccccagtacccacgggcttaggcaatagctgcctttccctaatgctttgtcctccacagaccccacccacatggccagggtccttggcctgccacagtttcctagaggacaggaccccaggaaggaaggcaaggtgggaacagtattattatttgttaggatctagggatttcatctgatttgagcctttcattaagaagtccacacgatcaatagaaaaacagcattgggtcccagggagtccaaattttagctgtagtccatggtaatagacccaaggtggaatgccgtatccctgcagactgatcacatctattttgtgagacctggggaggtgtggtggggagaggaagctgtgtgtgtatctgtgtgtgtgtggatgtgtgttcctaagtgcattgtatggatgtgtctatgtgtgtttctgtgtgttcatgtgtataagtgtgtgtgcatgcatatgtgtctatgtgtgtctcttaccgtgctcgtgtgtccatgtgtgtatgcctgtgtatgcacatgtgttcatgtgagtgtgtgcatgcatgtgtatgtgtctgtgtgtgcgcacacattcgtgtgcacaaactaactaagtaggaagcttgaggacaaacctcagggtcttatcatgccctggaacatttcatccagcttcttacttgagttgctacaaagcctcaggggaaggcagttgaatgaccttcccgagtcccagtaagtctttcattgtccttgaccaaaggaataaaaatgcagcccacccaaatattaacagcatctttttgtcatctcaaaccaaactgctttataataaaaaagaacattactttattgtgtgcagacctcaagttattcactttcatccctcaaaaatttttatatgctcctaacatatggaaagcgggcatcaatggccca

SEQ ID NO: 672210 - DNA, 1517 bp, Homo sapiens
aggtgaaaacagcccaaatgtccatcaatggttgaatgaataaacaaaacgtgacaggtccgtacagtgcaatattactcggccatgaaaaagaatgaatgatcgacatgagctacaacgtggatgagccttgaaaactttaacctgagggaaagaagccagtcagaaaaggatacatgctatatgacttcatttacttggaccatccagaagcattaaatccgcagagacgggaattagattggcggttgccaggggtgagggaatggggagagactgcttcatgaggtaatgaaaaggttttgaaaccaggcagaggtggtgattgcacactactgtgaatgtcccaagtgccgctgaattgttcactttaaaatggttaatattattttatttaatttcatctgaaaaaaaaaaagggccaagtatgttaagagccctaccatggcagaagagatcctgatggataaggaaaagcagtcacgagctgtcattaattgccctacgaagctgaaggaatctatctccagcctgactgccctgctgggaggtggaacaggtgccttctctgtggggggattggggggcagcctccccagtacccacgggcttaggcaatagctgcctttccctaatgctttgtcctccacagaccccacccacatggccagggtccttggcctgccacagtttcctagaggacaggaccccaggaaggaaggcaaggtgggaacagtattattatttgttaggatctagggatttcatctgatttgagcctttcattaagaagtccacacgatcaatagaaaaacagcattgggtcccagggagtccaaattttagctgtagtccatggtaatagacccaaggtggaatgccgtatccctgcagactgatcacatctattttgtgagacctggggaggtgtggtggggagaggaagctgtgtgtgtatctgygtgtgtgtggatgtgtgttcctaagtgcattgtatggatgtgtctatgtgtgtttctgtgtgttcatgtgtataagtgtgtgtgcatgcatatgtgtctatgtgtgtctcttaccgtgctcgtgtgtccatgtgtgtatgcctgtgtatgcacatgtgttcatgtgagtgtgtgcatgcatgtgtatgtgtctgtgtgtgcgcacacattcgtgtgcacaaactaactaagtaggaagcttgaggacaaacctcagggtcttatcatgccctggaacatttcatccagcttcttacttgagttgctacaaagcctcaggggaaggcagttgaatgaccttcccgagtcccagtaagtctttcattgtccttgaccaaaggaataaaaatgcagcccacccaaatattaacagcatctttttgtcatctcaaaccaaactgctttataataaaaaagaacattactttattgtgtgcagacctcaagttattcactttcatccctcaaaaatttttatatgctcctaacatatggaaagcgggcatcaatggccca

SEQ ID NO: 672211 - DNA, 735 bp, Homo sapiens
taaaacaaattcattgaggtaaaattcacccatcataaaattgcccattttaagtgtataatctgatgagctttggtaactttaccagataccataaaccattaccataaaccacttttagactattctcatcaccccrgtaaaatcctccatgtttactgacaattaatccctatttccaaccttaaccccagacaatcaataatctactttctacccctatggatttgccttttctgaatatttcacataaatggaatcatataatatgtggtcctttgtgtctggcttcttttacttaccataatgtgtttgaggttcattcatgtctttgtacatataagtagttggttccttttcattgctgaatatgtccattgtgggatattccattgcacagatatactatgtttatgtttttccacttaatagttgatgatcatttgggttttctcacatagtacttcaatatccatttattcctataggattttatacccacttctttaaggcatgctacatattatcttacagttgtaaacagagaaggaagtacatttgattcacctttttatgctggggcctacacctatatctggaaaattgtaggtatttaatgagcctcagttgcagttgtgtgctgcttacatgaccctgcctgttactgctgctacaaactcaggaatcgtggtccatctggcctctacacaggcagtgtttctgttcccagtattg

SEQ ID NO: 672212 - DNA, 735 bp, Homo sapiens
taaaacaaattcattgaggtaaaattcacccatcataaaattgcccattttaagtgtataatctgatgagctttggtaactttaccagataccataaaccattaccataaaccacttttagactattctcatcaccccggtaaaatcctccatgtttactgacaattaatccctatttccaaccttaaccccagacaatcaataatctaytttctacccctatggatttgccttttctgaatatttcacataaatggaatcatataatatgtggtcctttgtgtctggcttcttttacttaccataatgtgtttgaggttcattcatgtctttgtacatataagtagttggttccttttcattgctgaatatgtccattgtgggatattccattgcacagatatactatgtttatgtttttccacttaatagttgatgatcatttgggttttctcacatagtacttcaatatccatttattcctataggattttatacccacttctttaaggcatgctacatattatcttacagttgtaaacagagaaggaagtacatttgattcacctttttatgctggggcctacacctatatctggaaaattgtaggtatttaatgagcctcagttgcagttgtgtgctgcttacatgaccctgcctgttactgctgctacaaactcaggaatcgtggtccatctggcctctacacaggcagtgtttctgttcccagtattg

SEQ ID NO: 672213 - DNA, 673 bp, Homo sapiens
ctctgtgttgctgtagccactcactctcatagccaccacctttatcacacccttgcaggagagctggactgaaatctcactccctagattctgaccgcaacatcctagccttacagctcttctttcccttgcccccgggaagcctggtctttaagtctgttgagacttccagtttcttgcctttctttcctttgacactggcccctcatgtcttcacttttcttcctaaccagtctccattccacaatgcttcacctctgctcttcaactgtgtcgtctccctctctgttgttattaaccttctgaatggatctcctggcttcagaacttatcttttaaatccatcctccacattgcagctaggctgatccctctactaaatcttatcatatgactcacctgtctaaatcttctaatgctccgcattgcccattactacccattcccagaaggtgccatgctcccacaggtatccatgcctttgcatatgctagaccttcttcctgctttaatgctttccttgttctttgcctgaataattcttatgtcccttcaagattcatttcaggctgggcacggtggctcacgcctgtaatcccraaactttgggaggtcgaggcaggaagatcacttgagttcaggagtttgagagcctggacaacatattgagacc

SEQ ID NO: 672214 - DNA, 637 bp, Homo sapiens
acaaaaacaaaatctttttcataacatatttgacaataaaacctaatctgaactgaatttattttgtggcagaacctgacctaaacttacataaggttatttatagttttcacttttccatctttcacttaccacagtwtgaagtcatatgtgtcattccagaaatattaatttgtttgattactgggtgctgtcctgatgcattgggattgttgctttatattttgtatatgcaccatactatctttcaaaaatccaaaaaattttgaaacacattaaccatccagatttcccaccccatttactcatcagtgttggcctgagttcttttggctatttgcataaatccaatccacctgcagataatgaatattcattgcattgtgtgttatagactctgaaggagattcttgttgttttgagcagtgtcctcattaaaacaaagctaaaagcttcttgaatgactatcttgaaatgacagcactcatttggatgataagttgtaatgtgtttatggacagccagtctcattaccatacacttcatttatatattttaatagtcagtggtcagtgatcttctgaaattagttcccctggatttgctttagtgaaaaccaaagagcaagctctgaatg

SEQ ID NO: 672215 - DNA, 613 bp, Homo sapiens
tccctgcatagagcaaaaggctgcactgctggcatggggtgctctggacccaacactgcctctaacttggactagggaggctttaggtcacaggccatggaaggtgggatgggctccagggttggtagggcctgtgcttgaggcaaggcagggaactgctctgcaaagggctagaggcagaagatccccagatgccttcaaggatctgggccaggacctcggggtgggagagggaagctacaggagactggagcaggtgggagggcagcagatcctgcagggccgccartgcccaccacgagcaccccgtcatggcctgcaccgtgtcaccaggcacaggaacatgggagggtttagagggtagaagcatcattttagaaaacttaccctgcagtgcagagcacggcctggcagtggagggacctgtaggattgtcctgcttaagagttgtcacctgcccacagtggtgacacctcaagtggagctgccaggtgcgggtctgagaaagtttgggtagtggaggggtctgggctgggtggtggtttgcatgtcatggagggatgaggagcaggagggtctgggatcccatcagtctatacctgttggagaagag

SEQ ID NO: 672216 - DNA, 660 bp, Homo sapiens
tccttgagtgcattctgatataaaataaataaatacataaaatagactagaagtaaaagacagaatcacctggtgatcagaaattcaggcacacttgcctttaaatgccagttctgctgagcaggagctggacatcctgatgaggagttgcagcagctctctacccatctgtgcatgagacaacactggcaccttgctcgcaggctgctttgagaagtaaatgagyggatcactgtaatggaagcactaagcacagtgcttagcacccaggaaacacacatgaccatcgccagtcttgtcgttatcatgattattcttcttactgccctggacactgacagctgaggcattcacaacaggacttctgaggtattctaaggagctctgttctaggttctaggagaatcttcagctctcgcctggattcttctgtgtctccctacagtaaaatgcaatgtcagcccagtgcctaggggactgacttattgctcctataaatcctttccttccaaattgggccctctcagggtcagcagccaggagcctcataaccaactaaatgaggcaggaacagagctaagcctgaagtccccacgccccccaaaagcaatggttcctggtagttgcctggcacttccacccaacaaggaaccatctccc

SEQ ID NO: 672217 - DNA, 595 bp, Homo sapiens
tgccacagtttcattcagtctggcagyttggcttggtttcaaaaacacagtgaaatgatgagtatttgaaacagaatgtcaggaaagcacagccctcagcagaatgtccagggctgccggagatggcttcagatgaaggcagcatatgttgtccctgcatccttggcagaagcaattcaaatagcgtttgcccaaaggcattctttctctcctttcaaggtggcatcacagctgtcaacaggagaacattctgacatatctatcgtccacagataggaagagaccatcaaatggtgaaaagaaagcatttttctaaataaagcatttctgagcataacaagcacaaaactggagaatacaaaggaatgaaaatatagcataagggagtcagaacatctttatccccgagaaggtttttaaaatatttcttcccatgttataaagtactgggtctaccaaacaaatggaaattgtttaaactaataaattcattttgccactttaaaattaaccaaaacacatgtaagaaaatgctagtttctgttcagaatgtaataatcaatgtcattaatttgggctgatacaattataatct

SEQ ID NO: 672218 - DNA, 608 bp, Homo sapiens
tgggatagatagagagaaatagagctagtgttgagcatatgggttcaggaaccaggctgcacaggttcaagtatcagttcagctaattactggattcatgaccctgggcaaggggatttaccttttggtgcctcagtttttcttctataaagtggggttaacaatagcaactgcttcctaggatgttgttaggttttaaaaagtacatgtgtttagaacagtgtctggcacctcagtatgcattcactacatattaaccattgttatttaaatattggcttcgtgcatttctttcatgcatgcctgatgttccttgaggtcagagattcataaatgcaatttttgtcttttgcattacctctaggtctaccacagggctgagcactgagtagcttctcaatatttgtttttcaaattgaatattgcatctggattgttcgtcatcttcagagcaatgaaattatagccattctttggttggtttaccaaattgagcagygatattctgctatcctgagttatcattcttctaacaggcatcattgatgtatttgtatttctggaaatagtatttgaagttcaagtatcctcctaggagggttaaaaca

SEQ ID NO: 672219 - DNA, 659 bp, Homo sapiens
tataacaatattaactcaattgggattgttataacttcttagtcattttaagataaagtttagaaggctgtttttttctgcatttctatctcaggaaatatttaaagagattgaacagtatgtttcttttctttctttttggggggattttttttagtttaaccatgatagtcctataacacagagtattggttgaatgggaatttctgtaagagggcttttagtaaacattctaaaaattatgcttttcctcattctatttatttcagcagcagctgtgaataagctctctgatgccctgaagagtcccttgtgaggtggtaaccaatggtgcttccagatgcccagtttgggaggttggttcgtggtggcaccatggtggagraaaaacattcattcctggtttttcccaactgtggatatgatcataagggagatcatctctagcggcggggactcttgcctccagccctctgggacttgcctctggatcaccatttgttcaggaaagagcccagcagccagaatgatgtattttgggctcggattgccttctatgtggagtgaggagacagatgggcttagcacctatcttcttgtcttatccatgacaccaaaatttttaaaaatataattttactatatttatggttatttaa

SEQ ID NO: 672220 - DNA, 1878 bp, Homo sapiens
aaggttctttagtagtctttaccagggtctaactcattttatattagaagaataaatttgtcattgtagacatgctgaagctgagaattctaccttttattccaatcttaccaaaaaaaaaaatcctgaagtcaaacttttattctttctactgtccagttatagtagataaatgtcaccttaaattctgccaagtacactgtctgattgacattttactttacatttgtgattaataagcctaagcccattattttctttcttcaaatcgtcaaatatactcacccaaagcaactcaatttcataggatttctaatcattctaatcactcacatacttattactaccacaaagattgcacaagtcagtatatttcctgctttatctcacacaagtttaccacagttgaaatcctttacaattgcattcatacagctccactttccaccagtaatggagtcataactctcacatactactgggtgttccaactccagaattccatttttacagtctacttattaggattacttctgctaccaaatatctaaggctggattctctagaagaagagatgtgacaaggacttatatgcacatgaattgaagaaatacttttcaggaaaacctgcaaagaactgaaaaataagaaaaaaagtaagaatgaggtctcaagtaacatcaaataacatctgatcttttcttgcttcacaaggtaccctggagcataagtcatattacacaattattcctctttgagaaaaaagggtacaactctatcactatatctgtcagtcattactcagggatcctcactggtgatgaagcttttatcagcagagagcaattctcaagagaagaaaggaaatacgagtcattatcaacaaatcctcatagcatctgggtaatgagagatctgaacaaaacacgtgacagcatctattgcactgacacatagtaaatactcagtgttaattgaaataaaaattatatatgccaacctctattaattatacatagttatcattttaacaataatattatcagagttacttgagaagcttttttcaaaatgtatatacccacaaattattagcatttctttgaggatgttggtggagaacacaaacatattttgaaaataagtcccagttgttactaatatataccaacatacacacacacacacatayatacacatacacacccatacacacacacatacaccctgtgaataattatgataagatgtcctttagaatttgaccttgcttactattttaattttcatctcttccaactcctacatttgatgttattttcattcatcaatgtatatttctctaaatatataaagttgttttatacttccattcattggaaatggtcttcacttctccctcagtcagtttcatataccaatgcatgcacaagcatgctctgttctctctcacacacacacatacaaatatacacacccccccacacaaatatttctgatattttggggcctttttgaatatacctgcctttgctatattctacttatatgccactattattgtgaggctgtcatttatacttccatacataatttactattccattcttagagctcctacaggtaaattcacttcaactgactctattgtatttaaacgtttattattctaaactatgaaatcaacaaaaggacagtttgagtctaattatttgagggagattttattaagtacagaatttgaggttggtagttattttcttttagctccttgaaaatagcattccatagtcatcagcatccattgtttctgttgggcagtctgatgtccctcttattactgaccttttggaagtaatcttcttctccttcccccat

SEQ ID NO: 672221 - DNA, 1878 bp, Homo sapiens
aaggttctttagtagtctttaccagggtctaactcattttatattagaagaataaatttgtcattgtagacatgctgaagctgagaattctaccttttattccaatcttaccaaaaaaaaaaatcctgaagtcaaacttttattctttctactgtccagttatagtagataaatgtcaccttaaattctgccaagtacactgtctgattgacattttactttacatttgtgattaataagcctaagcccattattttctttcttcaaatcgtcaaatatactcacccaaagcaactcaatttcataggatttctaatcattctaatcactcacatacttattactaccacaaagattgcacaagtcagtatatttcctgctttatctcacacaagtttaccacagttgaaatcctttacaattgcattcatacagctccactttccaccagtaatggagtcataactctcacatactactgggtgttccaactccagaattccatttttacagtctacttattaggattacttctgctaccaaatatctaaggctggattctctagaagaagagatgtgacaaggacttatatgcacatgaattgaagaaatacttttcaggaaaacctgcaaagaactgaaaaataagaaaaaaagtaagaatgaggtctcaagtaacatcaaataacatctgatcttttcttgcttcacaaggtaccctggagcataagtcatattacacaattattcctctttgagaaaaaagggtacaactctatcactatatctgtcagtcattactcagggatcctcactggtgatgaagcttttatcagcagagagcaattctcaagagaagaaaggaaatacgagtcattatcaacaaatcctcatagcatctgggtaatgagagatctgaacaaaacacgtgacagcatctattgcactgacacatagtaaatactcagtgttaattgaaataaaaattatatatgccaacctctattaattatacatagttatcattttaacaataatattatcagagttacttgagaagcttttttcaaaatgtatatacccacaaattattagcatttctttgaggatgttggtggagaacacaaacatattttgaaaataagtcccagttgttactaatatataccaacatacacacacacacacatacrtacacatacacacccatacacacacacatacaccctgtgaataattatgataagatgtcctttagaatttgaccttgcttactattttaattttcatctcttccaactcctacatttgatgttattttcattcatcaatgtatatttctctaaatatataaagttgttttatacttccattcattggaaatggtcttcacttctccctcagtcagtttcatataccaatgcatgcacaagcatgctctgttctctctcacacacacacatacaaatatacacacccccccacacaaatatttctgatattttggggcctttttgaatatacctgcctttgctatattctacttatatgccactattattgtgaggctgtcatttatacttccatacataatttactattccattcttagagctcctacaggtaaattcacttcaactgactctattgtatttaaacgtttattattctaaactatgaaatcaacaaaaggacagtttgagtctaattatttgagggagattttattaagtacagaatttgaggttggtagttattttcttttagctccttgaaaatagcattccatagtcatcagcatccattgtttctgttgggcagtctgatgtccctcttattactgaccttttggaagtaatcttcttctccttcccccat

SEQ ID NO: 672222 - DNA, 621 bp, Homo sapiens
tacatccattgaattgaagtctaacacaattcgttatcctagaaacattaaagagctggagattaacagtgttatcacctcaayttaagtcaactgttcaatagaattaaaaattggagatgtagtaattctcatattcttgtttcttttcatattcacaaaaaaatatccagtgtcctatttaagtggcatttcaacttaagctaaaacttaattcttcttcttttcctgctttgctttcttttggtggaggaggggtcatgcaagaaggaacttagtcctaaaaacaaaatatatagattgccatagattttatttcattttattgttttttgtcatttttctttttacttatttaatttttaattaattagttaattaattatttttagacagagtctcactctgtcgcccaggctggagtggcatgatctcggctcactgcaacctctgcctcccgggttcaagagattctcccaccttagcctcctgagtagctgggattacaggtgccccccatcatgcctaatttttgtatttttagtagagatggggttttgccatgttggccaggctggtcttgaactcctgacctcaagtgatccacctgccttggtctcc

SEQ ID NO: 672223 - DNA, 732 bp, Homo sapiens
acctcagcctcccaaagtattgaggttataggcatgagccactgcacccagccccactcatgatttgtataccaaacaggtgggggagatgaaggaaacaggtgattaaatattactttttaaaaagcygtacaaactttctcatcttagcccacaagggaactctaagtctcttcccagttcatctccagtccatcctatcaactctcactccaacttccaaggcagaagtgtgtccgtgcgcctgtcctcagggaaggattatttctgaccataaaggagctaacttatagtcactcaaattgtttctgagctctctgtgtggtgagaatcacaacagaaactgagtagcacagacaaaagggtgcccagggcggatgaacagccaggatgctgcacccagccagttccagcagaccaaaaaaaaaaaaaagacagagtcacaggtccagcttcagtcatcagagcaaagtgggccaaagctctccttgaccttcggtatcagagaaaatgtcaggctgtggggtgatgtgaaaacaagggcaagagataggcaactcccaaggacactcctccagctgtctatcagcctctctcctcatctcctgtcttctctcctatcctctgcctctctaccccttggccaaaccccaaaccagtccattttgtgacttaatgacaggtccatcaaggatgatgaaactaataatactaatagcaactgtcatttac

SEQ ID NO: 672224 - DNA, 655 bp, Homo sapiens
ccaggctggagtgcagtggcatgatctcggctcactgcaacctctgcctcttgggttcaagcaattctcctgccttagcctcctgagtggctgggattacaggcacctgccaccaagcccagctgattattgtacttttggtagatacggggtttcaccatgttgaccaggctggcctcgaactcctggcctcaggtaatccacccgcctcggcctcccaaagtgctagaattacaggcatgagccaccgcacccggcctttttttcttcttttaatggaaataaaatcagaggcttgtggccgcaccagggcctcaattctttcatgattttgccaccgatggatgtctagagtgagccctcctctcctctcacctttcctctcttccattctctgccctgcagcctgtgtttccttttcacctctttctgtggcccagtgtaaaatacttttgtctacaaatgttttcccagaagacctctcgtctttttttttaggatggtaaagatgaagttgccttttaagtgggaagaatggaacgtctctcygcttccaccacaaactaaagttaaggtgagtcactgaatgttcgggcatctacgtcagacctaggaaacgggagagctgttcacttaatctcactccctctgaaat

SEQ ID NO: 672225 - DNA, 851 bp, Homo sapiens
agctcagctgcccagggcttgctagggaagacacgtgggcaattttcccagcaacagaagctggccagacaaggagagccagtggagactgcmgcgttgtctaaggggtgtggcaagatcatgcctgattcaggcaatgtttgctacaaggatgtccaattcggcaacaggaacttccttctgtaactgacagaatatattagtggagacactactgagccaaagtggaaacaggaatccaaaggactaggcttcacggaatcccgttcctaggaagatgtgatgattggatggggcacaaataaaaaaatagactccaaaaaggatgcaaaaatactagcatatgaatcagaggattcaagcacactacagaaaatgttggttagctgcatatgtttagccattagtagcagcggggaaggtcacttagagtgtatacactatcccacaaccatcctggccaatttcttctttcttcattagtaaatggtctgattatgcaagattgttatttgacaagtctccaatatcacttccaccaactttattcaatctttgttttttgcaagatttgacattttaccagacgatcagtttgacttgcatttgtattacactgtcatgtaataggaagagatagactggtgctagctaatgctaggtgctagctaatgctacatgctagcaagtgttacaaagagtgaaatggttaaattttcaagtgtttagtttatcagggaatatttttctgaagtgacaatgctgtggctgcagcaacctagatggtaaatatttcgataactcagataggaatagaatatattattaagaccaaagcagaagtccttgcc

SEQ ID NO: 672226 - DNA, 1073 bp, Homo sapiens
aaatgtcttttattgtagaatttgaagcaaatttacttgacctagatgtataatatttaaaaggcagtctaattcttctggcaacattgaacacagtttgacctcaaaactgacattcaacagtttgggtgtgcaatttaactttacattgagagagagagatctttaaaaagtttatttaatattaaaaattagcaygttttctgatttgaagcccatcgggatgtcaacactttctagcttccaattctctttaacctaatgtatgaggaacatggcattaattaaacctttgttatttatccaatctgtgaacttttcaagtttgagattacctaattagtcagatttcatggttgttctgtgacaagcattaagaccatgttgttcaatttaacttatgacttgttaccaccatgtgattaaaatgctagtaagtcagcttattttactcactttattttgagggaataaaagtgctaaggcatttatatgaaatgttgtcttaagaacctaattgaagaatctgtggtgtttttaagccagtaatttgaaggagcacattctgtctttgagaatgatgtcttagtaggaactaatttctactgcagccaccgaaggacattggccaagtattcagggagtaacatgaaatgaaacacatttttcatgaggtatatttatccagaagaccaaatgtaccatgagaaaatgtattttttagttattcacttaaacttgagctcactggagtaccccaaacctctctgtgtcgttttagaaacatgctaattataaagaggttagaagagtcaacatagatttttgtatatgaagtaataaccaaaaacaatgtaaatagtcaaaaatattcctaaatgtttcaaattttattttggtaaagtagaaaatagaggcattcatacctttatgaattagttagcaggaagagaaatttacttaagacttgtacctgtgtgagatgttcacatagtaccctactcagaataagcagaggaatataaacatttgaatctggtagtcagttgtatccagctattatacctataatt

SEQ ID NO: 672227 - DNA, 591 bp, Homo sapiens
ttaagaataccaaacattgggatggatgctattttataaactttatctttctttttgtgccttaccctctcttttgtgtatatgtgttttagtttctgcattgatttactggtcctctccttaaggaaagacttaacaaaaacataacaattaactttgctcagaatgaaaaaaagttattacaagacagaaataataatatctattggctagctgtgagtgtccacttttgggctgtcctattagaaagtgggaaatagaataattattcacggagacaaagctttttcctggcagtaagttctaaaacagatttttcatctggatatttttccccactgaggcatggaaggataaacattttaaatataaaattatatagtttatttatattacatgtctctttcctttagtaatgctatcttaaatccragagtacatgaatgacatccaactgaggtcaggtgcttctgtgaggtgttaactatgatatgtcatttatttttgtcaggattttggttagcactaaatagctgactaatatctagttaaagattatactctctgaaagagacctagagtgtagattct

SEQ ID NO: 672228 - DNA, 3015 bp, Homo sapiens
  misc_feature 2074, 2075, 2076, 2077, 2078, 2079, 2080, 2081, 2082, 2083,2084, 2085, 2086, 2087, 2088, 2089, 2090, 2091, 2092, 2093,2094, 2095, 2096, 2097, 2098, 2099, 2100, 2101, 2102, 2103,2104, 2105, 2106, 2107, 2108, 2109, 2110, 2111, 2112: n = A,T,C or G
  misc_feature 2113, 2114, 2115, 2116, 2117, 2118, 2119, 2120, 2121, 2122,2123, 2124, 2125, 2126, 2127, 2128, 2129, 2130, 2131, 2132,2133, 2134, 2135, 2136, 2137, 2138, 2139, 2140, 2141, 2142,2143, 2144, 2145, 2146, 2147, 2148, 2149, 2150, 2151: n = A,T,C or G
  misc_feature 2152, 2153, 2154, 2155, 2156, 2157, 2158, 2159, 2160, 2161,2162, 2163, 2164, 2165, 2166, 2167, 2168, 2169, 2170, 2171,2172, 2173: n = A,T,C or G
tgataagcttgctagtggctccttcagaaataccacacaaaggattgtgggtccgattaagcatccaaggacagatattawgatattttgtttcccctatcttttttattgtactgttttccttctcaaaacctactaaatttaaaatttttgaattataaaataccttatttcttctacttacttagaaaacaaataaacaatcatgcaaactacaagttgccactgtttcagctttggtttggacttggtttagacttgccatgagcactaaggaaaaggaagagtatgcctcccatttctcagctggaaggcttttcttgagcagctaggcctaacaaaggtatttacataatttcatctttcacatgtaccatcaaggccttattaagtttagtctaaatagaattacaactgaagagatgaagcagtactcattgtaagaggaaacatctctagagatatcctggatttccctctttttgatgatcaaatctttagtgattgcgggtcactaatggaggaagcatttgtgttgctctgatcccaatattccaatattgattttcattaataacactaaagatgaaactactgtacggtacaattatattttttaaagttttatgtagaagtctttgaatatttatttataaaatgtgtgaataagaaaaaaacatgattaaaaaaagggaaggtttctcactcttgaaaaataaaccatgcagtctgggtgcaggggctcacgcctgtaatcccagcactttgggaggctgaggcgggcagatcacgaggtcaggagttcaagaccagcctgaccaacatggtgaaaccccatctctactaaaaatacaaaaattagttgggcatggtggcacgcagctgtagtctcagctactcaggaggctgaggcaggagaatcgcttgaacccgggaggtggaggttgcagtgaggcgagatcgcaccattgcactccagcctgggtgacagagcgagactctgtatcaaaaatagaaggaagagaaggcaagcggggggggaggggaccatgcatattaattgccaacaatcatagaattgtttaatgcatgattatgatattataggcaaaaatacttcttaggcaagctatgagagatgggaagaaaattagagattgttcagcaaagggagttcgaaaatcagagagcaatatttgtgctgtttcagacacagacactgttgttaagtattcataatagtttgaggtttcttttagatgaatatgccaggaaaggcagattttgctttgttttctcctcttttatttcttttactagtttaaaaaagactagtatagctaagatgtgtagtagctacatgatagtatttacaatgaccataaattccataaaattctgatgctctttatggggcccatagagaggaatagctgccttaaagtaaacggcaatataagtaaacaagattttggttattcaaaaaatgatttatagtgatatatcttaccagatgtttgagttaaatggcaattcttaatacttaaagttaaaaagaatccatccatgtctagtatgtcttatttttctaaatattgctaatgtgatttcccttggctgatcatttcttataggaaaaaaatctaatttatgcctaaacaagtggaaaaaaattttcatgacaaagtgcaactgcctatatcctatggttgtcatttatttcaacattcctgtctgaagctgtattagaaatggctattctgtggagttcaaggaacctcctgcagtttgctattaaaatcattcattcaaaaaaatccattcagatcctactacgtgccaggacagtgctaggtgttgaagctaccaatgtgaatacgacaccccctatccttgactgctgggaactcacagttttggtggcaggtgggcatcaattatataaacacatagtcaggacaattttcccagatggcatgatactagttcatgcctgccaccatcatgaccactgaaatcacatttttgtcctcgccaccccccagaaccactgaatacccttcaaagtggaagnnnnnnnnnnnnnnnnnnnnnnnnnnnnnnnnnnnnnnnnnnnnnnnnnnnnnnnnnnnnnnnnnnnnnnnnnnnnnnnnnnnnnnnnnnnnnnnnnnnnatttctattggagctgccttgtccttcagtcagtaaactcattaagtgccaaattatctaataattcaattattggatatctgtttaattattgagaaacactgttggtgttttgcactcaaacgacatttcgatacatattaacaataaggtatcatcataaacacttatcatcagaatgaaaaaaaaaactgctgtatttttcaagcttattttcatttctgagaatatttccaagaaatacaattatgcctcaaaatggcttaaagttaactgtcaatcattctttatgtatagtatatcaaaattcaataatgtggatcacagaagtcaagaggacaagatttgagccagcagaatctcagctgaatactgatccttaactttctgtctgtggaaactggtcctgtttcctcatattataaaatagggattatttcatttattttaccaaactatgataatgattaaaggagataatgaaaacaaaacatttgtcacagcaaatatatatatatatttattaatgcttccaaatatttaatattcataaaattaacaaaataattgtattttattaatgcatccaaaatatttgaatgtatatatgtacatataatccaaaatattcaaatattttggaagcattaataaaggctgacaccatattttagtggaagttagtggaagtgagttgcaatacaaatctggaagactagactgtatcctctttcagtgtagaaaaataagaaagtaaggttaggtatcagcaattttagtcatataattaacattactaaaataaaaatactcaaaaaatgttttagtaaaatactgagtca

SEQ ID NO: 672229 - DNA, 831 bp, Homo sapiens
gaactccaaatttctaaatgtccatgtctctagttttgtgtataagtcagtctgacaacaattgacagcagaggaagtaaagcagggtaagataagatgaaaccacctttgcaaaaatcataacagtgagaaaattatgacagtaaaagagatctgatctaaacctccaaactatgcttggtcattcctggatgtgggtcaagctaactttgggagaaatttatagtttaagtgataatatcctttcccaaaactaaactgcctttgtaaaactaaagaaaggccaggaggttaggatggattccactaaaatgtaggtgtagttaagtgattagcatccattattctggaggtcatgagatgtgcaacttccccaattattcctgcaaataacattgaagcaagaaattttccctgatccctctgtgggtgggaactggagtgcatgggtgctggcagggacaaactccactaacttgaacctgctttgctcaaccccttgagggagggagtacacaggtgagggggtgcaggagctagagcaagcacttttgggtgccagcaggaatgaactttgtamaggctccatggcagcatctagggggagtgcccatgatccctgaagccccagaaggagcgttacagtaagcactcttttagttttgccatccgcggatggcttaagtgttaacagctcagtgaaaggtcagtgtgacagctttttgctcccacacccaagttctcgtccagtgtccaggaggaatgaggtcgcatgaacaaatttgaaggatggtgaatgtgggggattttatttccaatgaaagtggctgt

SEQ ID NO: 672230 - DNA, 831 bp, Homo sapiens
gaactccaaatttctaaatgtccatgtctctagttttgtgtataagtcagtctgacaacaattgacagcagaggaagtaaagcagggtaagataagatgaaaccacctttgcaaaaatcataacagtgagaaaattatgacagtaaaagagatctgatctaaacctccaaactatgcttggtcattcctggatgtgggtcaagctaactttgggagaaatttatagtttaagtgataatatcctttcccaaaactaaactgcctttgtaaaactaaagaaaggccaggaggttaggatggattccactaaaatgtaggtgtagttaagtgattagcatccattattctggaggtcatgagatgtgcaacttccccaattattcctgcaaataacattgaagcaagaaattttccctgatccctctgtgggtgggaactggagtgcatgggtgctggcagggacaaactccactaacttgaacctgctttgctcaaccccttgagggagggagtacacaggtgagggggtgcaggagctagagcaagcacttttgggtgccagcaggaatgaactttgtaamggctccatggcagcatctagggggagtgcccatgatccctgaagccccagaaggagcgttacagtaagcactcttttagttttgccatccgcggatggcttaagtgttaacagctcagtgaaaggtcagtgtgacagctttttgctcccacacccaagttctcgtccagtgtccaggaggaatgaggtcgcatgaacaaatttgaaggatggtgaatgtgggggattttatttccaatgaaagtggctgt

SEQ ID NO: 672231 - DNA, 1630 bp, Homo sapiens
  misc_feature 12, 13, 14, 15, 16, 17, 18, 19, 20, 21, 22, 23, 24, 25, 26,27, 28, 29, 30, 31, 32, 33, 34, 35, 36, 37, 38, 39, 40,41, 42, 43, 44, 45, 46, 47, 48, 49, 50, 51, 52, 53, 54,55, 56, 57, 58, 59, 60, 61, 62, 63, 64, 65, 66, 67, 68,69: n = A,T,C or G
  misc_feature 70, 71, 72, 73, 74, 75, 76, 77, 78, 79, 80, 81, 82, 83, 84,85, 86, 87, 88, 89, 90, 91, 92, 93, 94, 95, 96, 97, 98,99, 100, 101, 102, 103, 104, 105, 106, 107, 108, 109, 110,111: n = A,T,C or G
cttgacactacnnnnnnnnnnnnnnnnnnnnnnnnnnnnnnnnnnnnnnnnnnnnnnnnnnnnnnnnnnnnnnnnnnnnnnnnnnnnnnnnnnnnnnnnnnnnnnnnnnnntctcacttatcatatttttatttattttaggatatgagcacattaattaatgtttcttacagctgccaaattttctcctttaattcttgttggggtgtctcctttccattttttcccacgtaaagcactttcatatataaaatttcagagagcttaaaaaagtgaaatgtcaatccagataacatagttacagccaccaccacatttatcctttttaaataaagctagtataattcaatataccatattttattaatactatcttaaataatttttttctttttaaattttattttattttagatacagtggtatatatgcargtttgttacatggatgtattgcataatggtgggttttgagcttctagtccaatagtctatcatccaagtaatgaccactgtatgcatatgtaactctttaacccttacctccaagaaatctttattttactttcttttcattgggctatatgatacaaactagatcgtgatcacattaattaaataaattaatataaaacaacaattgaagaaataaataactcacaatgataccatctcaagaaattcaaatgttttcacccctctgggtacctctgtaacccttttatcacaaagataaacctcttgttttacttagtaggccaaatctgccccaagtttcatgttggaagagcaaatcacaattttcaaatgcttctaacagaacaacatattcatgtatctagaaggggactgtgtaacatctagctttactttttaattgctcttcttctgagttggagtgctgtgctgtttgccaagaactgagaatgaagaggaaaatagcaagagcctccttgagaaagaacagaggagaaagctatctaaaagggaaatcaaaactaagaattgcagataaaaagaaaaagacgtgtgaagttaatagtgttccattactatgagttgaagtttaaaaaacagtgaatacttcagacttctgtaaacaaatgcaaagcagtatcctatccttgcagatccaaaatatgaggtaagtaattaaccttcagattgtcagaactgatactcagtcatcatcactgtgtctctagtgggattaaccccaaaggaaaacgtaattcttgttgctgtcactctcatttgtggcccgaaatcacagagaaaaagtgcttttctgcttctttttcaacacagaatgctgcctatgaattttatttgtgcagaataataaactagctgaaatgtcttctgaatgatatcatttcagagtccagatttaggtatcacattatcacatattgaaattcaattcatacatgttactgatcaattgagacactgtccaaattcctgtggctggttgacacacattcaaagtaactattgtgggattcttaggaataccaaactgatagttgccctccagtatattgaagttatgagtttttaaacatcatttctcaccatatgcatttctcagtttcacacaataaaaaaaatcataagtcctcaaatta

SEQ ID NO: 672232 - DNA, 1630 bp, Homo sapiens
  misc_feature 12, 13, 14, 15, 16, 17, 18, 19, 20, 21, 22, 23, 24, 25, 26,27, 28, 29, 30, 31, 32, 33, 34, 35, 36, 37, 38, 39, 40,41, 42, 43, 44, 45, 46, 47, 48, 49, 50, 51, 52, 53, 54,55, 56, 57, 58, 59, 60, 61, 62, 63, 64, 65, 66, 67, 68,69: n = A,T,C or G
  misc_feature 70, 71, 72, 73, 74, 75, 76, 77, 78, 79, 80, 81, 82, 83, 84,85, 86, 87, 88, 89, 90, 91, 92, 93, 94, 95, 96, 97, 98,99, 100, 101, 102, 103, 104, 105, 106, 107, 108, 109, 110,111: n = A,T,C or G
cttgacactacnnnnnnnnnnnnnnnnnnnnnnnnnnnnnnnnnnnnnnnnnnnnnnnnnnnnnnnnnnnnnnnnnnnnnnnnnnnnnnnnnnnnnnnnnnnnnnnnnnnntctcacttatcatatttttatttattttaggatatgagcacattaattaatgtttcttacagctgccaaattttctcctttaattcttgttggggtgtctcctttccattttttcccacgtaaagcactttcatatataaaatttcagagagcttaaaaaagtgaaatgtcaatccagataacatagttacagccaccaccacatttatcctttttaaataaagctagtataattcaatataccatattttattaatactatcttaaataatttttttctttttaaattttattttattttagatacagtggtatatatgcaagtttgttacatggatgtattgcataatggtgggttttgagcttctagtccaatagtctatcatccaagtaatgaccactgtatgcatatgtaactctttaacccttacctccaagaaatctttattttactttcttttcattgkgctatatgatacaaactagatcgtgatcacattaattaaataaattaatataaaacaacaattgaagaaataaataactcacaatgataccatctcaagaaattcaaatgttttcacccctctgggtacctctgtaacccttttatcacaaagataaacctcttgttttacttagtaggccaaatctgccccaagtttcatgttggaagagcaaatcacaattttcaaatgcttctaacagaacaacatattcatgtatctagaaggggactgtgtaacatctagctttactttttaattgctcttcttctgagttggagtgctgtgctgtttgccaagaactgagaatgaagaggaaaatagcaagagcctccttgagaaagaacagaggagaaagctatctaaaagggaaatcaaaactaagaattgcagataaaaagaaaaagacgtgtgaagttaatagtgttccattactatgagttgaagtttaaaaaacagtgaatacttcagacttctgtaaacaaatgcaaagcagtatcctatccttgcagatccaaaatatgaggtaagtaattaaccttcagattgtcagaactgatactcagtcatcatcactgtgtctctagtgggattaaccccaaaggaaaacgtaattcttgttgctgtcactctcatttgtggcccgaaatcacagagaaaaagtgcttttctgcttctttttcaacacagaatgctgcctatgaattttatttgtgcagaataataaactagctgaaatgtcttctgaatgatatcatttcagagtccagatttaggtatcacattatcacatattgaaattcaattcatacatgttactgatcaattgagacactgtccaaattcctgtggctggttgacacacattcaaagtaactattgtgggattcttaggaataccaaactgatagttgccctccagtatattgaagttatgagtttttaaacatcatttctcaccatatgcatttctcagtttcacacaataaaaaaaatcataagtcctcaaatta

SEQ ID NO: 672233 - DNA, 2860 bp, Homo sapiens
  misc_feature 752, 753, 754, 755, 756, 757, 758, 759, 760, 761, 762, 763,764, 765, 766, 767, 768, 769, 770, 771, 772, 773, 774, 775,776, 777, 778, 779, 780, 781, 782, 783, 784, 785, 786, 787,788, 789, 790, 791, 792, 793, 794, 795, 796, 797, 798: n = A,T,C or G
  misc_feature 799, 800, 801, 802, 803, 804, 805, 806, 807, 808, 809, 810,811, 812, 813, 814, 815, 816, 817, 818, 819, 820, 821, 822,823, 824, 825, 826, 827, 828, 829, 830, 831, 832, 833, 834,835, 836, 837, 838, 839, 840, 841, 842, 843, 844, 845: n = A,T,C or G
  misc_feature 846, 847, 848, 849, 850, 851: n = A,T,C or G
tccccagtctctttttcctactattggtataaaataattattttcttcccttttttataaccctgaattgctgtggaaagctaacagtagcattacttaatttaaaaagcacagaaatcttaaatcaatagcttaatgtttgtaaaagcatttaaatggaaataagctaccagttcaccaggaacaaaggatatcagttgggtctaagaataatcatgccaaaaagctctaggaggaaaagctcctgggaattaggactgtgataatggtctttgagatcaagaaagaaatggggaaatggggatgctcagggtcaggtacatgcttagcaaaagacccagaaaaccctaagctgtcacctgtgtactttaaactctgcacaagtagaaaatagaggcacaaggagagttgtaactttatgctgattagtaaaggcatgctccaacacacatacatagatcccaggtgaaaaaaaatcagatatttatttttagtgaaggttaaaaaatctggagtcttactttccaattaaggattagtgaaaatatttggggagatttgcattgatcagttcatcctgaggtcaagaaaatcttgtttttaaaatttggagcctccagtaaaggattagcttccacctagaggtgttctttggccttttggactcagagctatcttgacactactactggttacactgatttgaaagtcagctaagagcttgctacagaactcctgacaactaagtttgnnnnnnnnnnnnnnnnnnnnnnnnnnnnnnnnnnnnnnnnnnnnnnnnnnnnnnnnnnnnnnnnnnnnnnnnnnnnnnnnnnnnnnnnnnnnnnnnnnnngctgcaaattctagtattttagccttagcctttggtaaaatggactgtttccctgcattccataggatgccaaggaactttacagtttgtgcaggtccttgaattttactagggttaacttcccatccttgagataggatttgggtttttaccggatccaagccccagctgactagttcttcagttttaccctgactgggccactcaggcagctgcttttttcagcaataggctgataactttgaggctgatcagtcaagacataggcctggccatgggccagggccagcctggaagtctgattagcattttcttttctggcttacatttctgttgtagcagctgattcctatcttgacacattaacttataagcagtaagcaagcaccatccatgccgggaaattccctcagcatcccatttaccaactgggattccctgcacctcctcacacacagccaatgattcaaaatgcactaacttagattgcctattttcacaaacgccagctcccttggaccactgaatggccaaggggaagaactaggggagttcccatctgaagatatggaaagtccccgagctcccagtctggtctctgcaccaaaaaatggcatgcttttgctttcggatcctgttcgtgaagccaaaaatgttctgcgcaggaaatgctcaaggagagaaggaaacacacacacacacacacacacacacacacacacacacacacaatacctttaagggtaaacaaactgtatcccacataaatggcaatgcagatataataagcaaatgatataataagcaagttgcaatgggacggagagaagggaaaagagatatatatatttacactcatcagactatggaggattcaccaccagactgcgaagcaacagactgggctccagagttggccacttgtccgtgaacagatgagaagagatctcatgaagttttggcacagtctggaaccctagctctttttgtaatgagttatctggcatgacgtccagtcaggagggcccttcatttctgggctcaaggaaaagaaaaaggtcaagttgttttttgtgattgtctgttgtttttcagtaactaacatataggaataaattgaaatagagatttatctgaaacagcgctggatgaaagcctcaaggggctcacacaacctgttccaggacttggtgaccattgtttgagtccagattcaattgagttcaaatttaatatttaaattttactccacaaagtgtcaaaagtaattccttcaaatgcagaaaattatgtaactactcacaaactaaacttctcaaccaaaagtcataaattgagtataggaattaaaaaaaaaaaagaaagaaaatctaactacatctgtctaaagggactcaatttatttatttatttattttagagacttggyattgctttgtttcccaggctggtctcaaactcctggtttcacgtgatcctcccacctcaatctcctaaaatgctaggatgacagatatgagccatcttactctatagtaacaaaaacagactaaatgtggcaagatgcatccaaaaaattatgcaaatcataaccaaatgaggacagactatgtcacaattatagtatgcaaaatgctttttaaataactgtcttagtttataaaatatattatgaaatcaaattgtcagaaaaacaaaggacaaaataataaaagggtttattcactggaaacctatgacaattatacacatttatataattgtgtgtatatatctaattatgtatacacacaaatatgtatgcaccttacatgagtatttttaaatatatcaataatatcttgacagaacataagcaaaaacggcaatatattaaaagtataatattttaatacaccagttctgtaattaataaaaaagccagatagaatattaaaaagtaaacggacgacatgaaaatactgtaaagcaattagatataacagatgcatacagaacactctacacaa

SEQ ID NO: 672234 - DNA, 2860 bp, Homo sapiens
  misc_feature 752, 753, 754, 755, 756, 757, 758, 759, 760, 761, 762, 763,764, 765, 766, 767, 768, 769, 770, 771, 772, 773, 774, 775,776, 777, 778, 779, 780, 781, 782, 783, 784, 785, 786, 787,788, 789, 790, 791, 792, 793, 794, 795, 796, 797, 798: n = A,T,C or G
  misc_feature 799, 800, 801, 802, 803, 804, 805, 806, 807, 808, 809, 810,811, 812, 813, 814, 815, 816, 817, 818, 819, 820, 821, 822,823, 824, 825, 826, 827, 828, 829, 830, 831, 832, 833, 834,835, 836, 837, 838, 839, 840, 841, 842, 843, 844, 845: n = A,T,C or G
  misc_feature 846, 847, 848, 849, 850, 851: n = A,T,C or G
tccccagtctctttttcctactattggtataaaataattattttcttcccttttttataaccctgaattgctgtggaaagctaacagtagcattacttaatttaaaaagcacagaaatcttaaatcaatagcttaatgtttgtaaaagcatttaaatggaaataagctaccagttcaccaggaacaaaggatatcagttgggtctaagaataatcatgccaaaaagctctaggaggaaaagctcctgggaattaggactgtgataatggtctttgagatcaagaaagaaatggggaaatggggatgctcagggtcaggtacatgcttagcaaaagacccagaaaaccctaagctgtcacctgtgtactttaaactctgcacaagtagaaaatagaggcacaaggagagttgtaactttatgctgattagtaaaggcatgctccaacacacatacatagatcccaggtgaaaaaaaatcagatatttatttttagtgaaggttaaaaaatctggagtcttactttccaattaaggattagtgaaaatatttggggagatttgcattgatcagttcatcctgaggtcaagaaaatcttgtttttaaaatttggagcctccagtaaaggattagcttccacctagaggtgttctttggccttttggactcagagctatcttgacactactactggttacactgatttgaaagtcagctaagagcttgctacagaactcctgacaactaagtttgnnnnnnnnnnnnnnnnnnnnnnnnnnnnnnnnnnnnnnnnnnnnnnnnnnnnnnnnnnnnnnnnnnnnnnnnnnnnnnnnnnnnnnnnnnnnnnnnnnnngctgcaaattctagtattttagccttagcctttggtaaaatggactgtttccctgcattccataggatgccaaggaactttacagtttgtgcaggtccttgaattttactagggttaacttcccatccttgagataggatttgggtttttaccggatccaagccccagctgactagttcttcagttttaccctgactgggccactcaggcagctgcttttttcagcaataggctgataactttgaggctgatcagtcaagacataggcctggccatgggccagggccagcctggaagtctgattagcattttcttttctggcttacatttctgttgtagcagctgattcctatcttgacacattaacttataagcagtaagcaagcaccatccatgccgggaaattccctcagcatcccatttaccaactgggattccctgcacctcctcacacacagccaatgattcaaaatgcactaacttagattgcctattttcacaaacgccagctcccttggaccactgaatggccaaggggaagaactaggggagttcccatctgaagatatggaaagtccccgagctcccagtctggtctctgcaccaaaaaatggcatgcttttgctttcggatcctgttcgtgaagccaaaaatgttctgcgcaggaaatgctcaaggagagaaggaaacacacacacacacacacacacacacacacacacacacacacaatacctttaagggtaaacaaactgtatcccacataaatggcaatgcagatataataagcaaatgatataataagcaagttgcaatgggacggagagaagggaaaagagatatatatatttacactcatcagactatggaggattcaccaccagactgcgaagcaacagactgggctccagagttggccacttgtccgtgaacagatgagaagagatctcatgaagttttggcacagtctggaaccctagctctttttgtaatgagttatctggcatgacgtccagtcaggagggcccttcatttctgggctcaaggaaaagaaaaaggtcaagttgttttttgtgattgtctgttgtttttcagtaactaacatataggaataaattgaaatagagatttatctgaaacagcgctggatgaaagcctcaaggggctcacacaacctgttccaggacttggtgaccattgtttgagtccagattcaattgagttcaaatttaatatttaaattttactccacaaagtgtcaaaagtaattccttcaaatgcagaaaattatgtaactactcacaaactaaacttctcaaccaaaagtcataaattgagtataggaattaaaaaaaaaaaagaaagaaaatctaactacatctgtctaaagggactcaatttatttatttatttattttagagacttggtattgctttgtttcccaggctggtctcaaactcctggtttcacgtgatcctcccacctcaatctcctaaaatgctaggatgacagatatgagccatcttactctatagtaacaaaaacagactaaatgtggcaagatgcatccaaaaaattatgcaaatcataaccaaatgaggacagactatgtcacaattatagtatgcaaaatgmtttttaaataactgtcttagtttataaaatatattatgaaatcaaattgtcagaaaaacaaaggacaaaataataaaagggtttattcactggaaacctatgacaattatacacatttatataattgtgtgtatatatctaattatgtatacacacaaatatgtatgcaccttacatgagtatttttaaatatatcaataatatcttgacagaacataagcaaaaacggcaatatattaaaagtataatattttaatacaccagttctgtaattaataaaaaagccagatagaatattaaaaagtaaacggacgacatgaaaatactgtaaagcaattagatataacagatgcatacagaacactctacacaa

SEQ ID NO: 672235 - DNA, 2860 bp, Homo sapiens
  misc_feature 752, 753, 754, 755, 756, 757, 758, 759, 760, 761, 762, 763,764, 765, 766, 767, 768, 769, 770, 771, 772, 773, 774, 775,776, 777, 778, 779, 780, 781, 782, 783, 784, 785, 786, 787,788, 789, 790, 791, 792, 793, 794, 795, 796, 797, 798: n = A,T,C or G
  misc_feature 799, 800, 801, 802, 803, 804, 805, 806, 807, 808, 809, 810,811, 812, 813, 814, 815, 816, 817, 818, 819, 820, 821, 822,823, 824, 825, 826, 827, 828, 829, 830, 831, 832, 833, 834,835, 836, 837, 838, 839, 840, 841, 842, 843, 844, 845: n = A,T,C or G
  misc_feature 846, 847, 848, 849, 850, 851: n = A,T,C or G
tccccagtctctttttcctactattggtataaaataattattttcttcccttttttataaccctgaattgctgtggaaagctaacagtagcattacttaatttaaaaagcacagaaatcttaaatcaatagcttaatgtttgtaaaagcatttaaatggaaataagctaccagttcaccaggaacaaaggatatcagttgggtctaagaataatcatgccaaaaagctctaggaggaaaagctcctgggaattaggactgtgataatggtctttgagatcaagaaagaaatggggaaatggggatgctcagggtcaggtacatgcttagcaaaagacccagaaaaccctaagctgtcacctgtgtactttaaactctgcacaagtagaaaatagaggcacaaggagagttgtaactttatgctgattagtaaaggcatgctccaacacacatacatagatcccaggtgaaaaaaaatcagatatttatttttagtgaaggttaaaaaatctggagtcttactttccaattaaggattagtgaaaatatttggggagatttgcattgatcagttcatcctgaggtcaagaaaatcttgtttttaaaatttggagcctccagtaaaggattagcttccacctagaggtgttctttggccttttggactcagagctatcttgacactactactggttacactgatttgaaagtcagctaagagcttgctacagaactcctgacaactaagtttgnnnnnnnnnnnnnnnnnnnnnnnnnnnnnnnnnnnnnnnnnnnnnnnnnnnnnnnnnnnnnnnnnnnnnnnnnnnnnnnnnnnnnnnnnnnnnnnnnnnngctgcaaattctagtattttagccttagcctttggtaaaatggactgtttccctgcattccataggatgccaaggaactttacagtttgtgcaggtccttgaattttactagggttaacttcccatccttgagataggatttgggtttttaccggatccaagccccagctgactagttcttcagttttaccctgactgggccactcaggcagctgcttttttcagcaataggctgataactttgaggctgatcagtcaagacataggcctggccatgggccagggccagcctggaagtctgattagcattttcttttctggcttacatttctgttgtagcagctgattcctatcttgacacattaacttataagcagtaagcaagcaccatccatgccgggaaattccctcagcatcccatttaccaactgggattccctgcacctcctcacacacagccaatgattcaaaatgcactaacttagattgcctattttcacaaacgccagctcccttggaccactgaatggccaaggggaagaactaggggagttcccatctgaagatatggaaagtccccgagctcccagtctggtctctgcaccaaaaaatggcatgcttttgctttcggatcctgttcgtgaagccaaaaatgttctgcgcaggaaatgctcaaggagagaaggaaacacacacacacacacacacacacacacacacacacacacacaatacctttaagggtaaacaaactgtatcccacataaatggcaatgcagatataataagcaaatgatataataagcaagttgcaatgggacggagagaagggaaaagagatatatatatttacactcatcagactatggaggattcaccaccagactgcgaagcaacagactgggctccagagttggccacttgtccgtgaacagatgagaagagatctcatgaagttttggcacagtctggaaccctagctctttttgtaatgagttatctggcatgacgtccagtcaggagggcccttcatttctgggctcaaggaaaagaaaaaggtcaagttgttttttgtgattgtctgttgtttttcagtaactaacatataggaataaattgaaatagagatttatctgaaacagcgctggatgaaagcctcaaggggctcacacaacctgttccaggacttggtgaccattgtttgagtccagattcaattgagttcaaatttaatatttaaattttactccacaaagtgtcaaaagtaattccttcaaatgcagaaaattatgtaactactcacaaactaaacttctcaaccaaaagtcataaattgagtataggaattaaaaaaaaaaaagaaagaaaatctaactacatctgtctaaagggactcaatttatttatttatttattttagagacttggtattgctttgtttcccaggctggtctcaaactcctggtttcacgtgatcctcccacctcaatctcctaaaatgctaggatgacagatatgagccatcttactctatagtaacaaaaacagactaaatgtggcaagatgcatccaaaaaattatgcaaatcataaccaaatgaggacagactatgtcacaattatagtatgcaaaatgctttttaaataactgtcttagtttataaaatatattatgaaatcaaattgtcagaaaaacaaaggacaaaataataaaagggtttattcactggaaacctatgacaattatacacatttatataattgtgtgtatatatctaattatgtatacacacaaatatgtatgcaccttacatgagtatttttaaatatatcaataatatcttgacagaacataagcaaaaacgrcaatatattaaaagtataatattttaatacaccagttctgtaattaataaaaaagccagatagaatattaaaaagtaaacggacgacatgaaaatactgtaaagcaattagatataacagatgcatacagaacactctacacaa

SEQ ID NO: 672236 - DNA, 602 bp, Homo sapiens
gcccaagcattttttttttttttcaaaacattgtctaagctccaggaacttctcttcctaatttcttcttcctgttggatggttgtactttttctcttgtgtgggattcaaaggctcttatgtcatttcatacttccccatctctattgtgcatggtaaatactgtattctcaaattcctcaaggcattatagtttgtttgcagctcagccatttggaatttcatcataaattattactcaaaaaagcctggatcttgaaaataaaaaatatactatccttctaagtattaagaactgaaactatctatgcctgcccaacttactctgcacatgaacatgaatattccaggacactgttgcccaggaagagggagttccaagggccttttattgtatatttcagggactcctagaagtactcaaaargtaaccatagataactcaaacgggttcaccaataatccgaggcctgctttgaactactggccttgaaattattacgttgttatgtcaactaactccacactattttatcacgaaccttgcgcaagtctatgggaattgtaaatattgcaacttcatcctcccctcctgagatggc

SEQ ID NO: 672237 - DNA, 654 bp, Homo sapiens
gcacattttctctcacctaactagctcrtgagttcatcaaaggcaaaaaggtggtatagtgcagtaagacaaacagtatcttaggggacacaaagagctggatgcaaatcgacctatttgctgtgtgagcttagacaagtcacttaacatctcaggattcctttccctatttgtgaaacaagagtaatatacctacctcacagggctgctgtgagaattaaatgagattaaataggttgtgccctttgtgagtctttgataaatatcaatccccttctaccatttttaatccattttctatgtccaccatagcagctggcacaacagtataagcttattcctgcatcaaatcaaacaaataaaagcaatccacatgctgatggaaaggagtagggcaacaaaaagcacggaagtagcccaattattacatgagcaaggtgtcaacagaggataggagtcccctggattcgagttggccaagaaagtaataatgaataacaaaatgatagcatcaggcattaattggaagcattctgtaatgtatgccaggcactgtgctgagggctcccttgatgtaactcatttaatggggcaacaagggccactcatcagtattatcattactccactttacacatgagggatagagatcca

SEQ ID NO: 672238 - DNA, 654 bp, Homo sapiens
gcacattttctctcacctaactagctcatgagttcatcaaaggcaaaaaggtggtatagtgcagtaagacaaacaktatcttaggggacacaaagagctggatgcaaatcgacctatttgctgtgtgagcttagacaagtcacttaacatctcaggattcctttccctatttgtgaaacaagagtaatatacctacctcacagggctgctgtgagaattaaatgagattaaataggttgtgccctttgtgagtctttgataaatatcaatccccttctaccatttttaatccattttctatgtccaccatagcagctggcacaacagtataagcttattcctgcatcaaatcaaacaaataaaagcaatccacatgctgatggaaaggagtagggcaacaaaaagcacggaagtagcccaattattacatgagcaaggtgtcaacagaggataggagtcccctggattcgagttggccaagaaagtaataatgaataacaaaatgatagcatcaggcattaattggaagcattctgtaatgtatgccaggcactgtgctgagggctcccttgatgtaactcatttaatggggcaacaagggccactcatcagtattatcattactccactttacacatgagggatagagatcca

SEQ ID NO: 672239 - DNA, 1298 bp, Homo sapiens
ttgggtgtaaatttcagatatgtcatgtgtgccagaatctccgtgaaggcagacagcacattctccctgcgtacaccgccgagtcccatttctcacctttcacacccccatcctcacacaagtaacccgggtgtctgacacgttacttaggtttttaatccgcgctgagacaatctcacagagaccctacttcacctctcagtaacttgcatttctcagctctgctgtgtgtgtgtgtatgtgtgtgtgtgtgygcgcgcgcgcgccggcgtgtgccgtgttgggggagtgtgatgtgggggaatcagttaatttggtgattgcaatgaaaattcgacaccgctagatgtattttccctgccaatctgtgtgtgctggccccggccggtcaatgcacacactgctgggctgctgcgaaattatttattatagagcatgtgggccatggactgcacttggggtcgcctcctctcttccttcaacatttccctgtgaattgtctattcagtgcagtgcgaaataactgtttgctggtgcctctctctcagcctggaggaggatttactctttctctacccggagagattccatcagcagcattcaggcatgagtctcttttattgagtatgtaaaccaatgattaagacagtgctgcttttcacagcagactggggagcggggggtgcggggaaggggtgtgagtatagccgagaaaatgcaccactgcaaccagcagcaacaccagcattaggtccaataaataaataaataaataaataaaggttctatacagcaaccagggaaagagcacaagtccatccatgtctgtggacttaggagcatcttagatcaggccatatgaatacactaaaagagatacgaggatttaaaaaaaaaaaaaagaaagaaagaggagggggcacaaagcaccactggattgtcttctcatgtttatggctgcctcacatttattcatcaaacactgctccacagacacatcatagtttgttgatattgtcagtttttgctcaaattgctcatgccttccttgtcttaggcttggctgagaacattgtttcggggttcagatttatgtttcttcccctaccctactgttttattaggacttggttaggttgtaaaatgaaggctttattttctggacatagattaaatacttagcgggtctttctatgtgcggggagaaaagggtggcgggggaactagtgagcgactgattttggctagagggagtctgccctgcctgctagtagttatgactaggcaaatactatagt

SEQ ID NO: 672240 - DNA, 1491 bp, Homo sapiens
aaaaaatcacccatgcctctgttttaatttgtctactttctttaaattcttatgtcctatagtgtctctgaaattggcaaactaatttctcttgcaacatcttgaccatyatacattcgtgcattgattatcccttagggtattttccatctgccaattaatgtccaataaaatgttgcttagatttaaaagcttaatcaaattaattcttactatatatttacagtgtatttagagcaacctatatattaaagttattgaaattatttgttttcttcagagagctatctcttttggaggtaaaaaggacataaaatattaagaaataaggaaaaatattgattaaaatacttttagttgttagaattttaattatttagaaaaaattctcgaatcaggtagtattcaagcttgtagtgatgcaaagattaatatggcagtctatcttatttaagaatttacagtctagtgtgaggtcagcaattttttctgtacagggaaaaatagtgaatatttcaaaattgtgaaacaaagagtctctgtggcaactactcattgttgcataacagacaatatgcaaacaaatgagtgtgtctgtgttccaataaaactgtatttacaaaagcagaaggccacccatgtgccaatgtccaaagtttctcaaccaacccctggtctagtaggtaataaaggcatacaaagaaattattaaatttaattgtgatagtaataaagtaaagacgtccaaaggatgcagagtttaactccgagagaatgctttaacagaagtcaccattttaaatagatactaaaaataatgtgtagtgattagttagcttgagaaacgcaaatgaagagttctgaacacaaacacaaaaaataccacaatgcgtttactgtggcttttgaatctgagattgaatcatagtttgtgtgcctgtagaggaggctggcaattctgttattgcctcatacagattcttaatgaatttggtaattattgagtagccattagtgatgttaatttcgagggagtgagatgacaaatctgtgttagaaaatcacttctgttaagaactggaaaacgaaagtcttggaggcagtcattactctagttggccttgtcagaaaagctaatgacatgcagaatttctaggaatttgagagtagaattggatggtccaggaagagttcataattcataaatattcctatatgcctatctttctgaaaggactaactgagtctggcaagaatcaatgcctcagagagcagttggctcaactacctaaaacactgccattggctcatgaaaattatgtctgcagttggcaccaactccagtctacttctgttagttttcaaatggtggagtgagagagaggacctcgtaatctatttatagctaactatcgatatgtgatttttttctatgactttttgtatatataatacaaagttttataaattttgcttttgtcttatcttgaa

SEQ ID NO: 672241 - DNA, 1491 bp, Homo sapiens
aaaaaatcacccatgcctctgttttaatttgtctactttctttaaattcttatgtcctatagtgtctctgaaattggcaaactaatttctcttgcaacatcttgaccattatacattcgtgcattgattatcccttagggtattttccatctgccaattaatgtccaataaaatgttgcttagatttaaaagcttaatcaaattaattcttactatatatttacagtgtatttagagcaacctatatattaaagttattgaaattatttgttttcttcagagagctatctcttttggaggtaaaaaggacataaaatattaagaaataaggaaaaatattgattaaaatacttttagttgttagaattttaattatttagaaaaaattctcgaatcaggtagtattcaagcttgtagtgatgcaaagattaatatggcagtctatcttatttaagaatttacagtctagtgtgaggtcagcaattttttctgtacagggaaaaatagtgaatatttcaaaattgtgaaacaaagagtctctgtggcaactactcattgttgcrtaacagacaatatgcaaacaaatgagtgtgtctgtgttccaataaaactgtatttacaaaagcagaaggccacccatgtgccaatgtccaaagtttctcaaccaacccctggtctagtaggtaataaaggcatacaaagaaattattaaatttaattgtgatagtaataaagtaaagacgtccaaaggatgcagagtttaactccgagagaatgctttaacagaagtcaccattttaaatagatactaaaaataatgtgtagtgattagttagcttgagaaacgcaaatgaagagttctgaacacaaacacaaaaaataccacaatgcgtttactgtggcttttgaatctgagattgaatcatagtttgtgtgcctgtagaggaggctggcaattctgttattgcctcatacagattcttaatgaatttggtaattattgagtagccattagtgatgttaatttcgagggagtgagatgacaaatctgtgttagaaaatcacttctgttaagaactggaaaacgaaagtcttggaggcagtcattactctagttggccttgtcagaaaagctaatgacatgcagaatttctaggaatttgagagtagaattggatggtccaggaagagttcataattcataaatattcctatatgcctatctttctgaaaggactaactgagtctggcaagaatcaatgcctcagagagcagttggctcaactacctaaaacactgccattggctcatgaaaattatgtctgcagttggcaccaactccagtctacttctgttagttttcaaatggtggagtgagagagaggacctcgtaatctatttatagctaactatcgatatgtgatttttttctatgactttttgtatatataatacaaagttttataaattttgcttttgtcttatcttgaa

SEQ ID NO: 672242 - DNA, 3053 bp, Homo sapiens
ctttcctttcatttcccactcacacgagcatagtatggttaggattctgcagcatcacagacacgagttcactttgttgaatgattactacacgacaagtactaggtaagtattttgatatcaatttcttcgggtactctgacaacaacactatgaggaagatatttttatctcattttatggatgaaaaaatagggattaattcctctgcccagaatctcacagtgagcacattgtggaacctgttgatttcagaacctatattttaaaagactgtgttaaaccaccccttgagtgcaagcttaagcacatttcttacagtgtgttctgcagaatgtttgttcttggagatatctgaggaaaaaagttgtgtggtcaaataaatctaagcaatgaatcaaactatgaccctcagacaattcttaatgcattttacatatgaaagactccgagaagtgatgcaataaactttttttttttttttttttttttttgagacggagtctcgctctgtcgcccaggccggactgcggactgcagtggcgcaatctcggctcactgcaagctccgcttcccgggttcacgccattctcctgcctcagcctcccgagtagctgggactacaggcgcccgccaccgcgcccggctaattttttgtatttttagtagagacggggtttcaccttgttagccaggatggtctcgatctcctgacctcatgatccacccgcctcggcctcccaaagtgctgggattacaggcgtgagccaccgcgcccggccgcaataaactttttgtaaagtatttgaccatcaaattcttttcctttgcaaataccttttaacatttcaaggagctagggaaattttgatattgtgtccagggaaacatatctacttgaagcttgcagactgtcatgagtctcctgtggtccagcattgggaaattgtaccacacaaacactttgcattaatattgattaattaaattgagacattttattactcaaagttacatagccattccacatctccctaccaggatctctaccctccattttcagacccacttgtaccttcatacctgagaaratttgattttactatctgcaagaaatatgggaaaaaatcaacaccgttaaatataaaaaagacctatagcatcaacacatttttaaggctaaatgccagaatcaagcttgtaatactgatgattaattccgaaagactgtctaaggctctatctactgatatatcttgtctttgcaataaccacatcaagtagaacatgaacaaatgaagaaaggttgccatcctccactgaggtctgtcctataatccactgatttattctggaactctgcttttttctttgcctctaacacttaaggtggaatctttcagactaatacattctaagaactatgtgtttattggctttattttaaaatatcatttgttatgtaagataggaattatttttttgccatattccacacaattttaccttcctacatttgtactcacagtttaatattgcatttaggttaatttgaaattcacagttactcacagaaagaattttatttaaaagaacaagggcaattaaccaagtcccaggtaggtcacacttacatatttccatttgccaaacatgagattctgaggtacgtcaagtcggcaaggtatgataatggtatctccatatgctgaatttacagtataccatccaaggcctttgggggaaaaaaaaaaaggaagaagagagaaagagagagagaacaaaattttaaatgctttcttgaaatgacaaataacttcaagatgcatgtcgatgaaggttgtcatctgctatagttttattttaaatggtatacaaaaggtatgagactagaatatattttccatttaaaaattaccacctttctatttagctactgaatgtttgaatccttgactatcacacaatcaaaatttgcagatctccaattttactagagaacaggtaagtggtgtattccaaaggaacatcgtggaatctgcagatgaattatcttctttactgtatttcatagaaataatttccaccatattttatagaaatgtgggactacacaaagactaacatgattaaaattctcaaaactagctttaactatatttgtgtttttcatttgaaaatattatcaaatttttcttctgtaaaattcaaaaaactattaaaaactgagaattaatacacataagaccacaactgaattttatttataaggggaaagtggcttattttgtagtagtataaattaaaatactaatttaattttgtataaaatattagcatagtaagaatttatagtatgaacatgcttcataaagtgctatttacaaagtgattatgtgaatttttggaagacaatataatttaaaccacaattttgtacatacagaaaactgcctcatcttatttaattctatattaagaaaaaatataaacaataaaaaattaaaatgtggaaagaagcaatttttgcatatgaatgaaaagcattattcaaatctggatatatttatgaaggttaaaaaaacccaggcatttaaattggttatagtacttgggaaacatttcaattttttaaccttagtttatttacaacaatctttaaaatttagaacttacacagctgaatgtctattaaggtgtatcataatcgggtatagagtgtgaaggggctactttaaacagtagagaaaaaaacaaatgatattttgtccaccaggtggtgctaaaatgcaaagcgacggcaatctgcaacacataaataaaaccatcttctgactttctgaagaaacaggactgggaggataccatctttcgactgttatctatcaatcaccatgtataccaaaatttcatttaaggttaagaattttgccccagtgaacagaaacataacaaagaacacacacttcatgtaaatatgcaacataacaactagttttcagcatttttaacattgttaagacagaataccaaatatgcaaagtgagaatgca

SEQ ID NO: 672243 - DNA, 879 bp, Homo sapiens
ttgctgcaataaacaaaaaactaaaagaaattgattgtagatttcatgatgatccaagtgttgatatagtacagaacacaaggcaactccacaatgtggatataagtactgaatgccagatagaaataaatgattgaatcattgttttgtagaattttaaatctggaagagttctttagagatcttaagacccacacacatcatttttcagatatgaaaacagatgttctaactgaaaacaaagatttgcctatgttcatgtagcgaattgatggaagagccagctatgaaggcagagaccttgtttatcttatctacatgtatttattaagaaaatacattaataaacaaaacaagtagacaatgtaatttaaaaaccatattttaccaagaaaaagagaatcaaagggatgatttgtgagaatttgagaaaagtgaattaggacttaggaaaatgaattaggacttaagacttttcctttatacttggaaaagaaatataagaataaatcttggtgcaaagctgctaagatttccagacaaaatatagggaagtgagattaattgattaattttgtgaggccaaaatctcagtgacaacagaagaaattattcttttaaaacctatatgctatggcttgacttcttgttacctccaaaactcatgttgaaatttagcttccattgtagcaggttttttttgktttttttatttatttttttattttattattattatactttaagttttagggtacatgtgcacaatgtgcaggttagttacatatgtatacatgtgccatgctggtgtgctgcacccattaactcgtcacttagcattaggtatatctcctaaagctatccttcccccctcccccc

SEQ ID NO: 672244 - DNA, 1771 bp, Homo sapiens
atcctttaaagcatattaatgctgcaaataaaataacagtgaatactttaccataactccaaattctatagtgcccaagtaaccattgctgaaatgaacaacttgagcctaaagtacagacgtgttgtcttaacacacctaggatggctgtaacctgtaatcattatggggtaggaaattatagtaaattttaacttgaaaattacttactttacataatctgttacatttctaagtgtacttcaaattaaatttacttcctgactatagctcctgaaataagtataacacaattaactccttaataaaatgtttttaatgtgaaacaaaagtcttacagatgtttgaatgcaatatgattcatagctcagcatttctaggcatttgaataatttatacatataagtaaggtttactgcaactaaaaactgtaataaaccaaagtgaaactcttgcttgtttcacttacagggattatttataaacttgacaataattattaaggcaaaaattgtgacactgaaggtctgagttactaaggagcttctctgccagtgattgcctcctcacttacattacaacgatgggtcaatgctactgatcaatggctaactgtgagcagtcttcctttcaagaaaaaaaaatccataattatgtgaattatgtttgtgttttatatacagagctccagctccaaatctgtgagagtgcatttggcagaatctgaacaagcaacacaatgattagagggtttttgtttttttgtttgtttttaacagttttgttacaatgtttccaccccaaaatgtacctgggtaagtgctgggcccatttttccttattcctgacatagctgcaattgtattagctagaaccacctattatgcctagctgctccatcaggagcctctgctgcctaggtgaccatgtctggccagacgggcccaatcgggtaaaaatgactggactagacatgggcacctgattttaggaaccagtccatagccagcttctccacctctgactgacacaaaaagatgcattgagacaatcctattctttcttggagatttgaactaagaatttgctagagggccctgtgcaaaaccatggtgggcagaaactacgaagaagcttgctcaaagtggaactgaaggaagtagcagaattatgcagactggggaccactggaatcaacatctgttgactctggataccttgaaacccaaccaccattcagcttcaatgtccrtaagaccagattttactgtgataccagtccttttttctttcaatgtgagcctttacagtaaacttcctttgttaggtaggggctagctaatgccagttggtctctatttcttacatctaaaaagaaacctgaactaaaacatagaacaaacaccagaattgggtcaagggttgtagtcttattgtttctcaattaaaagaatattatttttaaaagttcaaaatagaatgaaacaaaatcccatttaaatatggagctggaagttaaaatattttagtgactcctttggacctgagacaaattatactggagactagctgtcatctgaaatcactttttcttaagtttttttggttcaattattgcataaagacctaacagttagagaaataaggaatgtatttttatttctctgtagccccatactcctggggatgacatttcaacctttgctctatcagtttctacgattttcttaccctctgaacctaccaatatacttttcttactaggctccag

SEQ ID NO: 672245 - DNA, 2797 bp, Homo sapiens
gcacatgagtatgtgcatatactcccaaacatttcaaatgaaatattccaaatattgactatacattatctctaggtagtgggatttaactaatgcttgttttgtttttttttcttccaaattatctacaatgaagatgtattgcttttaaaaccagaaaaatatgcataaaatattatatatgaagcatgcaaatgatagatttaagaatagacactaggtgagacataaggatttaattactaaggataaacttaagagaaattgtactaaaagctcataatgggataaataaagttgcaatgttttttggcaatcgttctacagtaccaaatatactccctggaatcttcactacgatcaagataatgaacctattcatcacccccagaagtttcctcgtgcccctttgtattacttttgtttgtaataggtaagttgacatatttacttttgattcatggctgtgttcgacaagaagcttgcaaaattactcgggatttaataatcagctcttacaagctagtatgaactggctacagcacaccactgattctgttactgctcattctcctttctctagtttaagtaacttcagtttctttgacagttcctcatcttacctatgttttccaggctttcatcaattttaaacctctcaattcagtggttgagctcagacctggacctagagagacctatactttaggttataggcttaaaaatgaagcctataaatgcttggggcagtttacaagggctgagaaattggaggttgctgggaaaagcagctctactatagaaagggtccctttctaagtaagtcacccttgggagttcagtctgtgaatgtcagtagaaggatgaagggaagcaggttacccagttctgatgtggggcatactattgcacactgctttctgcaagcagcacttagtagcactaattgaatccaaccccactgatcatttcagataccaacccccatctggcctatatctactcaggaataatggctgtgggtgtcatagaggtaatttgaaagacattttcctctactgctttaagtgaaacctcaagaatattttaaaaaaccctcagcagtcccaaaatgtcttattcagggttaataactttctttccactggccataatggaatttagtcctcatttatgtgttcttgcttttatgaatcccagaaagatggcctgattttaaagcttgtccttgactcttcttcaagcagcaggatccagatcattcactctgccaccataattttaacataaaacactcctaaactgtgtctgagacgattacaaatttctttatcttgcagtaaaagtaaaatctcaaaacttttacaattcttaatagtatttaggttaccctagccaagtgcaggcctaggaatgctaggaatgtcctagatgcaaatagttttttggtgaatggttatttatgcagaatattctggcccaagctgaaaatggcttttgattgtttagaaaggaaattacagcatttaaaacatattaaagtttaaaataacatttttgagcaattaggatataaaagaatagatggggaagaaattagttaaattgcaagacccgtaaacaaaactaacactactcatttcaattcagttcccagcctaagaaaattttcatttcagcaaggcttttcctgtcttttagactactggaaaaaatggttggttcatttcacatgaaagtaatggaccctggctttggtctagtattaataatgtagatgacagtgtgaggsaacactgggtctgggggttattccattggcaaatatgtatgaaaaacacaggaatatttattctgctgaactatttttataagcctgttatggcttctaaatcatcaagaggaaggttcctttacttgctactcttcacatttccaaaccctcccggtctttgaatagttgttgctgttcaaagtgtaggagtatatggaagagcaacatggatatcacctgggagctcattagaaatgcagaacttaggccccagacctgctgaagcaggatctgcatggtaacaagatcccaggccattcacaatcacaagaaagtcccacaggtgaccatctgcagagactgtctctaataattttggcccgcaatgtttaatgcctcttttctctgaacttttaccttaccttctgtctgctctatataatttagcagttgattatatgatcttatgtttcttaataattactggaggtatgcaaatcttatttacaagattatgcaagtctctgttacggaggtttgcaatcaatgctcattattccattgtttgttaaagccctattctattcctttctgccttatgttccaaaacattttgaggtcaggtttaggaaaaattataaaaaattatcctaatattaataaaagtaaatacatgctttagaaagaagctgttaataagagtggaagactgtaaataacttcatatatagtttttgttttcttatgaatgccaagacatgaaagtaaactgtgctcttggcaaatggtttagaatataaccaatccttgatttttcattaaaatcatatctgtagcctgtaatcccagcactttgggatgttgaggcaggaagattgcttgagaccagaagtcagagaccagcctgggcaacatagtgagatgcgtctctaccaaaaaaagtaaaaaaaaaaaaaaaaaaaaattagctggatatggtagtgcatgcctgtagtcctacctactcaggaggctaaggcggga

SEQ ID NO: 672246 - DNA, 614 bp, Homo sapiens
gcatatatttcatacaattgagaaggagaagcacacaccagtttgtaacctgttttcatctaaatgatatggtagacatttctacatagcttttgtaattctctcttctgccaaagttgtagctaattcttcccagcagagtcctcacttcctcttcctggggtgttcctgtgttgcagcacgcattaccttgccttgtatttatttacttagagtgatattctcactagtctgagattgggatcttctccagtgtygggaccagagctttctcccatttctgtctatgttctacactcatgagctcttccatcattaggcttcaaaacagatgcaacccctgggcacttaaatcaaactaccttaacctccgagctcagtgcttgcagtccaggcccctatggtactgcatgaaggaatacacggcttgggggtcgggggacctgtctgtcatttaaaagagtctcatagcatgtcctgttgtttgagcagtgatcatctttttttggcgcttttacggtatgactatatgtaagcatgtatccatccatgtgatgctaaacaagatgcaggcacttgctaaaacacaaacatgtacttttgagcaaatgaat

SEQ ID NO: 672247 - DNA, 614 bp, Homo sapiens
gcatatatttcatacaattgagaaggagaagcacacaccagtttgtaacctgttttcatctaaatgatatggtagacatttctacatagcttttgtaattctctcttctgccaaagttgtagctaattcttcccagcagagtcctcacttcctcttcctggggtgttcctgtgttgcagcacgcattaccttgccttgtatttatttacttagagtgatattctcactagtctgagattgggatcttctccagtgtcgggaccagagctttctcccatttctgtctatgttctacactcatgagctcttccatcattaggcttcaaaacagatgcaacccctgggcacttaaatcaaactaccttaacctccgagctcagtgcttgcagtccaggcccctatggtactgmatgaaggaatacacggcttgggggtcgggggacctgtctgtcatttaaaagagtctcatagcatgtcctgttgtttgagcagtgatcatctttttttggcgcttttacggtatgactatatgtaagcatgtatccatccatgtgatgctaaacaagatgcaggcacttgctaaaacacaaacatgtacttttgagcaaatgaat

SEQ ID NO: 672248 - DNA, 614 bp, Homo sapiens
gcatatatttcatacaattgagaaggagaagcacacaccagtttgtaacctgttttcatctaaatgatatggtagacatttctacatagcttttgtaattctctcttctgccaaagttgtagctaattcttcccagcagagtcctcacttcctcttcctggggtgttcctgtgttgcagcacgcattaccttgccttgtatttatttacttagagtgatattctcactagtctgagattgggatcttctccagtgtcgggaccagagctttctcccatttctgtctatgttctacactcatgagctcttccatcattaggcttcaaaacagatgcaacccctgggcacttaaatcaaactaccttaacctccgagctcagtgcttgcagtccaggcccctatggtactgcatgaaggaatacacggcttgggggtcgggggacctgtctgtcatttaaaagagtctcatagcatgtcctgttgtttgagcagtgatcatctttttttggcrcttttacggtatgactatatgtaagcatgtatccatccatgtgatgctaaacaagatgcaggcacttgctaaaacacaaacatgtacttttgagcaaatgaat

SEQ ID NO: 672249 - DNA, 700 bp, Homo sapiens
caggttcacttttatcaagttaaagacttctcttcgctgtcaggcgtgtacttggaaacatatgcattgacatgtggaaaacacaaaaacaacattgacagggacacataggtggccgtgcaggtataaaggaaacaattcaaatgagatcagtacttggagtcacattccatacaaaccatagagcaggggtattctttgtaatagggagcggtgagtgagttatacgtttctaggatgggctagggaaaaatactttcctctgtttcagtcaggagaaaaggatgyggatgtggattccaagtagttgaataatttgcctgaaagaattgtggttgcaatcatctaaacgaaaggcttagggtaaaatgtacacccatctaaatataaaaattcctgggtctcattgcagacctactaaattaacatcaccataggtggcctaggaattggtatttctatgcagtatttctgtgattttaatgtgcagactggtataggaagctgtagtgaattcttataattttgtgtggcttcaacatccactttgaatataggtttaacttccttgtcacccttgacatggtgcctagttctttacctgctcccagttcctgagcatggttgacctggacatctgccctataaatcatcccctgctgaccactttcctatgagacagctggatacaacctacttg

SEQ ID NO: 672250 - DNA, 700 bp, Homo sapiens
caggttcacttttatcaagttaaagacttctcttcgctgtcaggcgtgtacttggaaacatatgcattgacatgtggaaaacacaaaaacaacattgacagggacacataggtggccgtgcaggtataaaggaaacaattcaaatgagatcagtacttggagtcacattccatacaaaccatagagcaggggtattctttgtaatagggagcggtgagtgagttatacgtttctaggatgggctagggaaaaatactttcctctgtttcagtcaggagaaaaggatgtggatgtggattccaagtagttgaataatttgcctgaaagaattgtggttgcaatcatctaaacgaaaggcttagggtaaaatgtacacccatctaaatataaaaattcctgggtctcattgcagacctactaaattaacatcaccataggtggcctaggaattggtatttctatgcagtatttctgtgattttaatgtgcagactggtataggaagctgtagtgaattcttataattttgtgtggcttcaacatccactttgaatataggtttaacttccttgtcacccttgacatggtgcctagttctttacctgctcccagttcctgagcatggttgacctggacatctgccctataaatcatcccctgstgaccactttcctatgagacagctggatacaacctacttg

SEQ ID NO: 672251 - DNA, 625 bp, Homo sapiens
cactgccacatggctgtgtgggcctgggtcctgtcctgtgcagagggaatgagccctggaatgatttcatttctgccactgagcacctctgcaagatacaaactttctgagctttggttttttcatctgtaaatggtggctggtgacacaggccccagctactttgtggagctatgtgagaatcacatgagattaggtcagtgaagcmatttttaaaagcacggcatcaagacaattgtccaggagcgttattattagtagtgacgcagtgttcagaggaaagtcaaatttctttgcttttaaaggttttaagatgacctttaaacaaggagccagctgggttcttagttcacagtagtttagcacactttaattcagaggctttgaaagcagggagaaatatttggtggcatggttcccagaaatagccggggtggagaaactggagctcccatggggagtggggttagggggtcaggaagctggtccaaatctcctctgtcaccagcttctcatctccagactcaggaaatcctttccaccctggggccgttcccacactgacgtcccacttcctcctgcaagggcagtgccctcctctggcctctggatcttgagttggggg

SEQ ID NO: 672252 - DNA, 625 bp, Homo sapiens
cactgccacatggctgtgtgggcctgggtcctgtcctgtgcagagggaatgagccctggaatgatttcatttctgccactgagcacctctgcaagatacaaactttctgagctttggttttttcatctgtaaatggtggctggtgacacaggccccagctactttgtggagctatgtgagaatcacatgagattaggtcagtgaagccatttttaaaagcacrgcatcaagacaattgtccaggagcgttattattagtagtgacgcagtgttcagaggaaagtcaaatttctttgcttttaaaggttttaagatgacctttaaacaaggagccagctgggttcttagttcacagtagtttagcacactttaattcagaggctttgaaagcagggagaaatatttggtggcatggttcccagaaatagccggggtggagaaactggagctcccatggggagtggggttagggggtcaggaagctggtccaaatctcctctgtcaccagcttctcatctccagactcaggaaatcctttccaccctggggccgttcccacactgacgtcccacttcctcctgcaagggcagtgccctcctctggcctctggatcttgagttggggg

SEQ ID NO: 672253 - DNA, 592 bp, Homo sapiens
cctctgttttagatgattggaaatttgggtgaggaagacaaaggaataatcacccccaccctccaagagcgcccaacaattctataaactaggyacttgtatcacctctaatcttcagctttttgggggaagtgttgttattgtcactgtacaaaggaggaaacaggcttagagatttaaataatttgttaaggccataaggctgtcaagtggcagaactaaaatttaatccagtttcttcaggctcttgtgctgtttctactctattataatgtttcctccaaaatagcaaatatttgaagccacccagtttttagacaggccttgctgtgtgcccagcttggtggagaagatgcaggtactgcccctgaggagtccggatttacagctgcagtatctttggtttccaggttttatgtaacatgtacagctgaatatgtcaagagattgtactgtcaatgtcttcctgtccgtgcccacatttgttccaggtagccgggttcctgcccactgctcacaggaccagctttgtctcaggacacagaggctctattggccagtggagctataaagacatgaagtccttctatca

SEQ ID NO: 672254 - DNA, 637 bp, Homo sapiens
gtgaaagaggcactcttcacactgggaaatataagtacatgtctctagtactaaattcagttatatttcctatccagatccctctctgagcagccttaccagagcacattgctcctttgtctatgccaacactagacactggaatatctcaattactgtccatatcaccatacacttatctactcaaatgttggtcagcatgctgacctgtgagcacctggatggtaaaggctgttttttattcatctgtgtctctaactttacagctaagcacagtggcaagttagacaataaagaagtgggctaaaccaacgatgaaaagaaacagaagataaaggacaggcaaccatctgggtataaagtttgtctaactcttcccacttttctactcttctgctccatcagttcttggaacacgacgttactgtgtttgtggcctcaatcttcaggtctagttactgtaaaagtataggcctaagagatatatcatgacttgctctgaggacgaacaaatcagcaagaaactattataaaaccaaaccaatagtaaytgtaattttcaaaaagcaagaatagcagcaactaaaaaaccctaaccaactcaagatgacactgataataacaaagtatccttccc

SEQ ID NO: 672255 - DNA, 602 bp, Homo sapiens
atggctcctttaaattattttcctgatgtataaaattcagatttattaaattttagaatggacttcaagtttatttttgacattcacctattccacgtgattttcaaagcatattattttgttaatgccagctttttaagcatatctggaagcttctgaggaaaatcctttactattctaataatacaaaacagacaatatatataaacatttcatcctaagtaactttttagactaaaccataaatagaaccaaggtaaaacatacttctygattatcatccaatttcactaatagtaaatacttttttcttttaaaatcaaaatattataaaactaattaggtctcagtcaggaggaaaaccaaatgctcaagtagagttaaaaccagaagcaatgtaaaagacttttttctttttttcagacttctaaataagtaaatgatttcaaaaggcaatttaaaagactgacagtactgtcacagttggataatcccatctatgaggttgcattcttttcccccacttcaaagttctctgcaattatccttcccacaatgaaaatgcctctcctcctaagatgaattgatttaatcaatgttta

SEQ ID NO: 672256 - DNA, 1974 bp, Homo sapiens
ctatgacaagtacagatatttggcttatgtagtaattttttttagttctcagaactatgtttttttagttcaaagatttctaattatttcttatgaagacatttttggttgttttatttctgccttttttagggtcacaatctcttgaggttttcttgatattattcttgaattaatctttttgatgtcttagatatgcttattttataagtctttctcaaactattccattaaattgtttcatctggaatgttgtcatgtacctgatgctgattttgtcaactacttgttttggtagtaatttttatttgcctgtgttctgaggccagtgttttcagactgctggcaattgggtggacattttttcttttgctcaattaccctctgtgtttatgcatacctctttagcagcttcctgtttcactgttcctagtctagaatcaattcttagaatgatatgctgggtttccatggaaataaaaacaataactaacagtaattgagtgcttcagagggccaggttaccttgtaagtgatttatctgtattaacacattccagtcttacatgtaactctctgagataggcaggaattttatttccattttacagataagaaacgaaaagtgcactttaatcccagcactttggaaggccaaggcagaaggattgcttaaggccaggagtttgaaaccagcctaggcaacatagtgagaccccacctgtacaaaaaaaatttaaaaatgaaatgggcatgatggcatgcatctgtagtcccagctacttggraggctgaggcaggaggaggatcactgggccccagagttacagtgacctatgattataccactgtactccagtctgggtcacagagtgagaccctgtctgaaaagaaaagaaaagaagagaaaaaaagaagagaaaagcaaaaaagaaagagaagagaaggaaaagagaaaagaaaagaaaaaagaaaagaaaagaaggaaaagaaaagaaaagaaaagagaaaagtataagtaatctcccaaatgtcaaaagatggtaagttctggagtcaggattttaacacagactttcttttccaaaagctcatcttaatcacttcagtgtggcttgaagcttcaagaaagtagccatccaatcactgcacttggttcagcccctgtaggcagggatgagtcttgggcatccagccttctgagctcatagtaggtgttagtctctggctgcgctgcggttatgttctcagctcaggagctgggaagctctgcaaataactggcttcaatatacatggatggattccatccagctttttgtatggagtgcctttttctttcctggattccctcactacccacatccagctccctagcccagcatctttcagcttcatctgcattcagtatttggcattttgatttaacttctgctgaatggggctgtttgtaaatcttgttttttgttgtttttttcttcccccttgaagcaagagcttattgtgctatttggattgaaagtcttcacgatctctctctcctaggccttttctacaccaccagataatcaccatttggagaacttccagaatctttcattacagattttctagttatacccttgtcgtactattttatagagcagaacacagcaaaaacaaaatttttcaatgcctcaaacaatttggcatgctggcatttgtgctgcagggttttgtgctggggaaggacagtgccagggattctatgcttactgagcagaatgactttctggagttgaaccatcatgattttttttttctctatttttgaggactcttctgaggattctcctgcagtttttcccttgtccaatgggtaaaaggagacataactgaagttctctctatgcagcttgtccacagggcagggctttcctcatccttcctacacctctctgtggcattatccactaatcaactttcatttcaggtt

SEQ ID NO: 672257 - DNA, 678 bp, Homo sapiens
cacagatttgttagctctccaaacacctgttcaaaaagcgcattacttatctggcttgaatcagcctgcttgatcaaatcctcttgcttttctggcctaggagtggtcctacaggagtctggcctagacagtaaatagctattatagcaaatcgtgttttcttgcttcttgtttcttgttcctaatatcttattgtcatacaaatcttacattttgtaccttattcccagaggaaaatttgaagtctgggcatgggcagcggaaactacagggaccttagatatttggtttatggactaaagtgttcgtcctgacatgatatctgtctcacaaaaaaaaaaagaaaagtacttggaaatattgttttatccccccaacttcttatcttaaaaaatagttctgccccttgtggagtgaggattctctattggtacacatcttctaagttgacagcttgccaacaattacttcaaaataaaactgactactcctctagaggattatcaatgarcattctggtttgtggaaatctcctataatatgtttgttatgatgttatcaaagtagatatgttaatattcagcaagggataatataaatatgtataaaagttgctgatactaattgtatcacttaagtttatttaataatctcacaaattaaactatgagagcttta

SEQ ID NO: 672258 - DNA, 1400 bp, Homo sapiens
  misc_feature 452, 453, 454, 455, 456, 457, 458, 459, 460, 461, 462, 463,464, 465, 466, 467, 468, 469, 470, 471, 472, 473, 474, 475,476, 477, 478, 479, 480, 481, 482, 483, 484, 485, 486, 487,488, 489, 490, 491, 492, 493, 494, 495, 496, 497, 498: n = A,T,C or G
  misc_feature 499, 500, 501, 502, 503, 504, 505, 506, 507, 508, 509, 510,511, 512, 513, 514, 515, 516, 517, 518, 519, 520, 521, 522,523, 524, 525, 526, 527, 528, 529, 530, 531, 532, 533, 534,535, 536, 537, 538, 539, 540, 541, 542, 543, 544, 545: n = A,T,C or G
  misc_feature 546, 547, 548, 549, 550, 551: n = A,T,C or G
atattgtcactattgtgatgctgtgcaattctttacttgcaaagagctcactttattttttaaaaataatttttaaatgttataaatctgctgtccgaacaatacctaaaacgtcttttgttcattggttattcataaaacccttacaatcttagggttggcagagaattttgaattaatctattctaacacttgcatttggggggatagtaaaattgagactaagaaagattatatctttactctgactttatgcagatagtggtcaaagtaaagctagaaattaggtttgctgacatctaattcatcatactcttatgctacggaaaatacttaaaggtgaagacagcaatattttatctgtgaaaagggaaataatcagtggactgaaaaataaaagtaaaaataatcagtgttattaagagaatgcctagtggcatttggttacaatnnnnnnnnnnnnnnnnnnnnnnnnnnnnnnnnnnnnnnnnnnnnnnnnnnnnnnnnnnnnnnnnnnnnnnnnnnnnnnnnnnnnnnnnnnnnnnnnnnnnctatttatataaaatttttcatagatatttttaatgtctttaacgtttcaacaaatgcaatcaaagaattcagtggaaaactttaaaattcatccacagagagtacagaacaacacattccatatccacaattatgtttgttattttacatttaaaatatggttggtactctctcaatttttgagacaaataaatgcatattctttattttttattttttatgcattgaataagtaatggtataaaatagaaaagacaggacataaacatttaatttgcttcaggaccttatattaaattcaacaactttagaatgctaaaccttttggatcagaagtgatgtagaaatatttacaagtatgaatttttgtgtttgaagattataagatagaccacgactttcagttttagaagtcttactttaactcttccccatcctcccccatcattgttttaagataatgtcaaaaggaaagtatgtttcattctagtgaataatgggaggagacagatgttggagtgcgggattctttacagagtttctatacgtsttgtagcagcctttcttctatactatcttttcaaggatgtttgtgtagcaaccagccttggaagatagaggtagtgtagtgtcttcctccagggcagagggaagacttcttctgacgaggataataaagataatccttccctttgggataaagattgaacaggtctacttgcagcccccttataaaattgagggtttcctaagcttggtgttgctcaactgtgacacaacctcactgtgaatacagtatccatctaggttcatctctgcatcatccccagggtgaacatgaagctcat

SEQ ID NO: 672259 - DNA, 583 bp, Homo sapiens
ctcaggaggctgaggcagatgaattgcttgaatctcggggtcggaggttgcaatgatccgagatcgcaccactgcactggagcctggttgacaaagtgagactctgtctcaaaaaaataaaaataaaaataattgtcattatgttgttttcattttgaataataaacacacatacacactcacacacacacccayaaacacacacccctctccccaacacacacacacagagtgaggaagagatagagagagaggatctcgctctgtcactcagactggagtgcatgcagtggcctgatctcagctcactgcagcctctacctcccaggcttaaatgaccctcccacctaagtcccccaagtagctgggaccacagacaagctccaccatgcctggctattttttctttctttcttttttttgtagaaaaggttggggggcggagggtgctcacactatgttgccaaggctggtctcgaactcctggtttcaagagctcctcgcccctcagcctaccaaagtgttgggattacaggtgagattcaccatgtccagctgtatatatacatatatgtgcatatat

SEQ ID NO: 672260 - DNA, 634 bp, Homo sapiens
gtctgggtgacagagctagactctgtctccaacaaaaaaaaaaaaaagaaaattatgggaagaaaaaaatccttacttcaggaatgaatgattatttctagaggacctagggagttatgggctagggagaagtaaatagatgactcagggagttacatacacacactgtcactgtatctgtaatgtattgatttcaaaaaatctgaagcaaaatgggaaaatgttaacatttactaaatgtaagtggtggctacatggtattgttatattaatctctattgtttccccaatgtttgaaatagtttctctcaacataattttctgattgttttatatagataaatagatactcttctcctgaggaaagagaagaccattggaaagacactgatggaagagttccctgcaccaaccaatgataaacaccaagaacatgcagcaatttggtggctgttctagcaggcaggcaagggagggggaagaygtcaaagtaatggttaagttgagagtaggaagacaaggaagatggtgagaggatagagtgttctatagtggtgggggggacagttatttgcaaataacgtgtttgaaacttgaactatataactggctgcaaatgcagagtgcttcggct

SEQ ID NO: 672261 - DNA, 649 bp, Homo sapiens
gggaaaggggatgaatgtattgtggtattgatccgaggggttattcattcaactttactgttttgtttctgtgtttttaacagagtcttgctctgtcacccaggctagagtgcagtagtgtgatcatggctcactgtggccttgatctttgggctcaagcaatcctcctgcctcagcctcctgagtagctggaggcacaccaacacatgcaactaattttttaatttttttgtggagatgagttctcactatgttgcccaggctgatctggaactcctggactcaagtgatcctcttgcctaagcctccccaaatcctgggattacaagtatgagcctccatgccctgcctcaaatttacttttcagatggctttgttcagccactttctcctgtctttatatatggtcttctttattcagtaagcagctgtcagagattccatactagtaaacatgcaccctcaaataacttacattgctaattatatcatatggtctttctactggtgctttaattctggagcaatgaaataagaagtcctctttgagaatgcagtttttctattcatttgaatgcttaaagcatctgcttgcctggcctttttcaagaaggtacmgtgctttgaatgtggtaagaattttaaaaaa

SEQ ID NO: 672262 - DNA, 623 bp, Homo sapiens
atgtatctgtgagacagctttagaaaagttttgcagcttggataccgtaaactatgcactaatgagcttcaacccattttcttgcttattttgtcaaccctgacaccaaggatagttaccagctgctgaagaagcactttctggacattgggcagctttttcttttggagccaactctattctttttcagggttatagttaaatcattcaacacaaaaatatgtacttacacagttttagagcttgtcacattggtgacctgatgaatgccacttaaattacctagattcatctttaagcagaattgttttcccttcagatgcttagaaagattgttagtttcttttatatctttaagttstaaatcacaaaatcatatggcaagaaaaaccccagatttcttttccaatctatgaataaacataaagagacagttaatacttaattgatctatctgaactatgatttttaacttctctcattgtttttatttttttattttattttattttattttgagatggagtctcgcactttcacccagcctggagtgcggtggtgtgatctcggctcactgcaagctccacctcccgggttcacgccattctcctgcctcagcctcc

SEQ ID NO: 672263 - DNA, 647 bp, Homo sapiens
tatattacatatcattgtaaacgcataattctattattaccaataatagtcatactttgaagcagaartatggtaccatattcaagaaaggcatatttgatgtttggtgtttaatactgtcttaatgttgctctatcaccataatctgatattgtgcaatgcaactggaaaaaatactgtcaggcagataagaaaatatgatatatttttaagtgatgacatagttcatcacttttgctgtacgtggaaggaaagaatcctatttcttactagaatataaaggatatcaattacaaagtcatcttggaggacatttctatgaatctttaatgtagctactacaaaaactcaaaatatttgattacataaaaatgaatatatttaagtgcctaaactcacaattcagatttccaagtaaaatgtaggatgtcatttaaaaacatatatttcttttttaaaaaaatctgaaaggaaaaaaaaatagtccacttatgtctctatagaattaaaatacatgtagagtcagactagctcaatttgtatcctgactctgtcatcaagtttctatatgacaaagcaaatcccttaacgtggcatatatgaagcaatcatatgattttgtgttaatattgtaaacataaataata

SEQ ID NO: 672264 - DNA, 647 bp, Homo sapiens
tatattacatatcattgtaaacgcataattctattattaccaataatagtcatactttgaagcagaaatatggtaccatattcaagaaaggcatatttgatgtttggtgtttaatactgtcttaatgytgctctatcaccataatctgatattgtgcaatgcaactggaaaaaatactgtcaggcagataagaaaatatgatatatttttaagtgatgacatagttcatcacttttgctgtacgtggaaggaaagaatcctatttcttactagaatataaaggatatcaattacaaagtcatcttggaggacatttctatgaatctttaatgtagctactacaaaaactcaaaatatttgattacataaaaatgaatatatttaagtgcctaaactcacaattcagatttccaagtaaaatgtaggatgtcatttaaaaacatatatttcttttttaaaaaaatctgaaaggaaaaaaaaatagtccacttatgtctctatagaattaaaatacatgtagagtcagactagctcaatttgtatcctgactctgtcatcaagtttctatatgacaaagcaaatcccttaacgtggcatatatgaagcaatcatatgattttgtgttaatattgtaaacataaataata

SEQ ID NO: 672265 - DNA, 566 bp, Homo sapiens
gccctgaaaccatcttgctctgagaagctgagccacatggagaggctttagaaaaaattagataaataatggatggatggatggatggatggatggacggacggacagacggacggacagacggacagacagacagacagacagacagacagacagacagatagatagatagatagatagatagatagatagatagatagataatgtcaagaaacactgcagtaccaggtatgtgactgtaaaggctatctttaaagtggatcatccagccccataggcccagctgacggcctgcaggtcagactcaaactgccccaccaagctcttcccaaattcctgmcccactaaatcaaaagcagaacaaaatggttatcttaagctacaaactaggtagtttcctatatagcaatagataacttcaacattgtcttccatattggactttacccggaatacatgtgcattctacccaggttgaaaatcctaaggtttttaccctttcttgaaattttgagtcatgtaaccttttaatacttcttcagaaatctcgatgctaccaacaactc

SEQ ID NO: 672266 - DNA, 361 bp, Homo sapiens
ctcctytgttattaccaagaattgatcagagtcatttgtttcctccttttcttttcctcttcctgctttcaaaatgcacaataattctttaggtgtcgtctaggtcttcacatataatttagccagagttgagtaactctatgaggatgttctggctttcccaacaaaggtctccagaactctcttctccattatatatttcttttggcaaacgctcgtggcctaaatccaaagattctaactattgcacttgggagatcacattcttacaaattatcccttttcaaagcaggctaggggatgtgtggcttctggtttgtaaatatgtactgttctgctcattttgaaaatatgaatttgt

SEQ ID NO: 672267 - DNA, 361 bp, Homo sapiens
ctcctttgttattaccaagaattgatcagagtcatttgyttcctccttttcttttcctcttcctgctttcaaaatgcacaataattctttaggtgtcgtctaggtcttcacatataatttagccagagttgagtaactctatgaggatgttctggctttcccaacaaaggtctccagaactctcttctccattatatatttcttttggcaaacgctcgtggcctaaatccaaagattctaactattgcacttgggagatcacattcttacaaattatcccttttcaaagcaggctaggggatgtgtggcttctggtttgtaaatatgtactgttctgctcattttgaaaatatgaatttgt

SEQ ID NO: 672268 - DNA, 612 bp, Homo sapiens
gatcacttatatatttatgttctatatttatgtagattaatgaacacgaaaatgtttccacattacagtttagaaatgttaaaagaaattctataatataaataaattatgattctggagttgtacaagagtttcttaaatagaagagggaaagcactaaccataaaagagagaattgtgagattagacttttaaaattaagttcttctcttaactaaaactcagtattaaaagtaaacatggaagccataggttgagagaatatgtatctatatatgagtaatataaaatatatgatatataggtaaaagagacatacttcttatacattatttcatttaagaatataaaaaactcaattttttagaaaaagggagaatattgagtgagcactttactaaatatgaacagaaactacataaaaagatgccaatatgcttataaaagatgtacattattagttgttaggaaaataaaaatccaatattaattaagccataatagcaaaaattaaaaataartgacaatatataatattgtcaagatagtgtagcaactacaattttcatatactgctggtggaatttaaaaactagtacagccaatttggga

SEQ ID NO: 672269 - DNA, 1272 bp, Homo sapiens
gcaagtccacttctaggtgtgtaaccagctgatactcatgtccacattatccaagattcctatagtggaatattcatgggaacattacaatagaccaaaagttgaaaacaatccaaatacccaccaagactagattagattgctgtaaataaacacaatggaatactatgcaaccataaaaacaaaggaattatgagtgacaactgtatatacatctttgctaaacatgagaagccacagagaaaatttaatatttgctagttaattatatttatataagctccaaaacacagattaaattaagctatggtatttagtatgcatattrtggggtgcaaggaagttattcccataacatttaggataacgtttatctccagagaggagatgaaaggttgtagaatttggaatgaagtgtcattgaggaagctaacaatattccctttgtctggagtctggttatgtgaattcagttttgataaatcatcaagttgtaactttttgttttgtgtattttttctgcactatatttcgagatgaaaaatatgaaaagctattcttgacagataaatacatttttgctggcttagtcctatctttttcaaatagcctaatccttttccaaatgacactgtgtttagttctatagaactcagctattgtgcaagaattttagagtcagttatgacgaagagataacaattggtaggtaagtggaattcgagatatttagtaggtaaaaattttagcaagtcatctaaaaatttacctaggatattttgggagattaagagagacaccatactggagatattgctattttcatttatgaatggttgaatggcagaacaaaaataattcaatttcaaatattactagggagctcttttaggggtgtaggaagattttatgtattaaaatctccttatattaatcaagtttatcaattcttaagaaaaatacatagcagcttggattgctggcaagatggtcaactaggaaaagctctggtctgcagcttccagcgagattgacacagaaggtgggtgatttctgcatttccaactgaggaacctggttcatctcagtgggactggttggagagtgggtgcagtgcatggagggcaagcagaagcaggtggggcatcacctcacccgggaagcacaaggggtcggggaattctctcatctaccacagggaagctgtgagggactgtgcctgaggaacggtggcctcctgcccagatactgtgcttttcctatggtcttcat

SEQ ID NO: 672270 - DNA, 664 bp, Homo sapiens
cccaggtttcataccacgtccctgtaacggttcatatcctttcttcttctatcagttaatttttgggattttcccatgaagctatatatgtggcattgttgctaaagaggttggaaatatgaaagtatgggacaattactcgtgattatgaggcaactatttacatatgtcttctgcagcagatcaggctagtgtttgactgtaccactaccaacacgcaaragactgttgctatgtctgcttatccttaagccttttgaaattagatgacatatggctacccacagttgtctagtcaattagtgtgttatcaggggatcaccctctacatagataccaataactttttagagaagagaaagtagttcttctgagatagatatcacctcctttcaagacccaggggtctatgctgcaacgttcctgacttcagatgtcatcattatttatcatagatacctctagcaggattgaatctatttggtcttaagacgcaggtgattttttattttattttattttttttgagacggagtctcactctgtcacccaggctggagtgcagtggctctatctcggctcactacaagctccgcctcccgggttcacgccattctcctgcctcagcctctcgagtagctgggactacaggcgccagccacta

SEQ ID NO: 672271 - DNA, 2463 bp, Homo sapiens
tatggaagtattagctatgattaatttgattgttttctaaaatgattacaaagcgtggtacagaaaggtcaactgattttcccagagtcacaatcaaaagatgtgtttttatttatgtggtggttttaaaacagtctcaaatttctttgaaacttctgctatggagaggtggggtccgaatttcctcccgttgagtgtgggctctgtggctgcttgatcaataaaacatggtgggtgctgggrcagcctggcccagactgtagaaacagcagcttctgtttcctgtctctgggggcacttgctctggaacccagctgccatgttggaagggagcccaagcagcccgtgaagaacttctgcgtggagcagaaatgaggccccagccctcaaccttggctggtgcagctgcacccgctggcctgccctgtgcctgggctgctttggaaggggtcctgcagtctccagtcaagccactcatctgatgctgtgtggaacaggagtgtctgcacctgccgagctacatggtaaacaaaagaaatgctgtggctgtcaagctttggcttccagggtggctgttatgtggcagtagtcactggagcacagctgccttaagcatcacgtgagaatcattatgaatcccaaatagacaaattcagcctcagagcctctcccctttcctcttatttgccagccgtgcccacctctaaaccgtccttcccccgtggacccatgctgtgtgctgtggtgcccgatggcagcccctcacccacctctggtctcagctggagctgtgtgcaggcttgtgcaccatgaggccccttttctgtcccacgttaggatccaccctgggctgcatcagcacagtgggtcagaaaggagccccggggatggggctgacatcaggcctgccctccaccaagggcagcaagcaggcgggcttctcttcctgaccccacaggccagcatgagacctgggaaatagcaggtgctctataaatatgtggccagatggattgaatgactgaatgaatggaaacccccagcctggagaggcctctcacctgggtcttattccaccaaaagccctggccctgcccaaagtgaccacacagctcctgactcggagctgaggcccgaggccaacaggtcagaggaagaggaagtggggatcctgaggcagcgaggagggtggcttctcccctagcttgcccctgagtgaccctctcatgctgcccctaccctgactggccaccaggctgcagctccccttcctgcctcccatcccaacaagcccttcccctgcatccctaggtcagaccttcttggcctcatatggaatcttgtccctgagggtctcctaaatggccctggtggcctggggaagcccctcctgtccactccccatgctgctgagacccaccttctgtccacagctctgagcctcccgcacttgcctctttacctcctcaccccctctgcctccctccccggggagctccacacccccgtccttccacgctctgtactctctcaccctgggggtttgcacatgctgtccttctgcctgcaacacttttccctgccccaacctggaaaatgcctagttatccagcaagagtgactcaggcatccccttcggaactctccaaacaggtgaggctctgcaggaacacccatagcccctcatgcagtcattcattcattcaacaaatacctaccaagcactactgagtgccaagctgtgccttaggccctggggagttggtgggggggtggacaaaccctgccttcttgtaactattaagagcaaaccgccctgcccagctgggttagatgcctttccacacaccatctttgctggatcgccggccccttcgatctccaggatctttcctcctcagactgagaggcacttgggcaaggtccttcctgatccccgcaccaaggccacacatgggggctgccttttgaaaggcggatgttcagattccgcctggggagcctgtggtctgggctgagccccctggactctggtgcaggtgttgggagggggtgaacatctggagaagcccctcctggcacagtggcccccgccctgtcccggcaagctgggcactccaggaccctgcatgggatcctggctccgctgtccaccctccacccagctcaacagactctgccccgacatgtgcgggaccccacctcgtgcattctccttagacctgagcccctgtccctcttcgtaggtgcccgtgtgtgttggttgcaggaatggaggatgcacgaggttagagaggttttcagaacatgtagccttctgtgatgacactaacttgatttctgtctttcactaccaggttgccccaggcttttcctgcctctaatcttccctttttgaaagaatcctcaaaagcacatgcgttaaagccttctcaaagctcccacatgatcttgagcatcaaa

SEQ ID NO: 672272 - DNA, 2463 bp, Homo sapiens
tatggaagtattagctatgattaatttgattgttttctaaaatgattacaaagcgtggtacagaaaggtcaactgattttcccagagtcacaatcaaaagatgtgtttttatttatgtggtggttttaaaacagtctcaaatttctttgaaacttctgctatggagaggtggggtccgaatttcctcccgttgagtgtgggctctgtggctgcttgatcaataaaacatggtgggtgctggggcagcctggcccagactgtagaaacagcagcttctgtttcctgtctctgggggcacttgctctggaacccagctgccatgttggaagggagcccaagcagcccgtgaagaacttctgcgtggagcagaaatgaggccccagccctcaaccttggctggtgcasctgcacccgctggcctgccctgtgcctgggctgctttggaaggggtcctgcagtctccagtcaagccactcatctgatgctgtgtggaacaggagtgtctgcacctgccgagctacatggtaaacaaaagaaatgctgtggctgtcaagctttggcttccagggtggctgttatgtggcagtagtcactggagcacagctgccttaagcatcacgtgagaatcattatgaatcccaaatagacaaattcagcctcagagcctctcccctttcctcttatttgccagccgtgcccacctctaaaccgtccttcccccgtggacccatgctgtgtgctgtggtgcccgatggcagcccctcacccacctctggtctcagctggagctgtgtgcaggcttgtgcaccatgaggccccttttctgtcccacgttaggatccaccctgggctgcatcagcacagtgggtcagaaaggagccccggggatggggctgacatcaggcctgccctccaccaagggcagcaagcaggcgggcttctcttcctgaccccacaggccagcatgagacctgggaaatagcaggtgctctataaatatgtggccagatggattgaatgactgaatgaatggaaacccccagcctggagaggcctctcacctgggtcttattccaccaaaagccctggccctgcccaaagtgaccacacagctcctgactcggagctgaggcccgaggccaacaggtcagaggaagaggaagtggggatcctgaggcagcgaggagggtggcttctcccctagcttgcccctgagtgaccctctcatgctgcccctaccctgactggccaccaggctgcagctccccttcctgcctcccatcccaacaagcccttcccctgcatccctaggtcagaccttcttggcctcatatggaatcttgtccctgagggtctcctaaatggccctggtggcctggggaagcccctcctgtccactccccatgctgctgagacccaccttctgtccacagctctgagcctcccgcacttgcctctttacctcctcaccccctctgcctccctccccggggagctccacacccccgtccttccacgctctgtactctctcaccctgggggtttgcacatgctgtccttctgcctgcaacacttttccctgccccaacctggaaaatgcctagttatccagcaagagtgactcaggcatccccttcggaactctccaaacaggtgaggctctgcaggaacacccatagcccctcatgcagtcattcattcattcaacaaatacctaccaagcactactgagtgccaagctgtgccttaggccctggggagttggtgggggggtggacaaaccctgccttcttgtaactattaagagcaaaccgccctgcccagctgggttagatgcctttccacacaccatctttgctggatcgccggccccttcgatctccaggatctttcctcctcagactgagaggcacttgggcaaggtccttcctgatccccgcaccaaggccacacatgggggctgccttttgaaaggcggatgttcagattccgcctggggagcctgtggtctgggctgagccccctggactctggtgcaggtgttgggagggggtgaacatctggagaagcccctcctggcacagtggcccccgccctgtcccggcaagctgggcactccaggaccctgcatgggatcctggctccgctgtccaccctccacccagctcaacagactctgccccgacatgtgcgggaccccacctcgtgcattctccttagacctgagcccctgtccctcttcgtaggtgcccgtgtgtgttggttgcaggaatggaggatgcacgaggttagagaggttttcagaacatgtagccttctgtgatgacactaacttgatttctgtctttcactaccaggttgccccaggcttttcctgcctctaatcttccctttttgaaagaatcctcaaaagcacatgcgttaaagccttctcaaagctcccacatgatcttgagcatcaaa

SEQ ID NO: 672273 - DNA, 2463 bp, Homo sapiens
tatggaagtattagctatgattaatttgattgttttctaaaatgattacaaagcgtggtacagaaaggtcaactgattttcccagagtcacaatcaaaagatgtgtttttatttatgtggtggttttaaaacagtctcaaatttctttgaaacttctgctatggagaggtggggtccgaatttcctcccgttgagtgtgggctctgtggctgcttgatcaataaaacatggtgggtgctggggcagcctggcccagactgtagaaacagcagcttctgtttcctgtctctgggggcacttgctctggaacccagctgccatgttggaagggagcccaagcagcccgtgaagaacttctgcgtggagcagaaatgaggccccagccctcaaccttggctggtgcagctgcacccgctggcctgccctgtgcctgggctkctttggaaggggtcctgcagtctccagtcaagccactcatctgatgctgtgtggaacaggagtgtctgcacctgccgagctacatggtaaacaaaagaaatgctgtggctgtcaagctttggcttccagggtggctgttatgtggcagtagtcactggagcacagctgccttaagcatcacgtgagaatcattatgaatcccaaatagacaaattcagcctcagagcctctcccctttcctcttatttgccagccgtgcccacctctaaaccgtccttcccccgtggacccatgctgtgtgctgtggtgcccgatggcagcccctcacccacctctggtctcagctggagctgtgtgcaggcttgtgcaccatgaggccccttttctgtcccacgttaggatccaccctgggctgcatcagcacagtgggtcagaaaggagccccggggatggggctgacatcaggcctgccctccaccaagggcagcaagcaggcgggcttctcttcctgaccccacaggccagcatgagacctgggaaatagcaggtgctctataaatatgtggccagatggattgaatgactgaatgaatggaaacccccagcctggagaggcctctcacctgggtcttattccaccaaaagccctggccctgcccaaagtgaccacacagctcctgactcggagctgaggcccgaggccaacaggtcagaggaagaggaagtggggatcctgaggcagcgaggagggtggcttctcccctagcttgcccctgagtgaccctctcatgctgcccctaccctgactggccaccaggctgcagctccccttcctgcctcccatcccaacaagcccttcccctgcatccctaggtcagaccttcttggcctcatatggaatcttgtccctgagggtctcctaaatggccctggtggcctggggaagcccctcctgtccactccccatgctgctgagacccaccttctgtccacagctctgagcctcccgcacttgcctctttacctcctcaccccctctgcctccctccccggggagctccacacccccgtccttccacgctctgtactctctcaccctgggggtttgcacatgctgtccttctgcctgcaacacttttccctgccccaacctggaaaatgcctagttatccagcaagagtgactcaggcatccccttcggaactctccaaacaggtgaggctctgcaggaacacccatagcccctcatgcagtcattcattcattcaacaaatacctaccaagcactactgagtgccaagctgtgccttaggccctggggagttggtgggggggtggacaaaccctgccttcttgtaactattaagagcaaaccgccctgcccagctgggttagatgcctttccacacaccatctttgctggatcgccggccccttcgatctccaggatctttcctcctcagactgagaggcacttgggcaaggtccttcctgatccccgcaccaaggccacacatgggggctgccttttgaaaggcggatgttcagattccgcctggggagcctgtggtctgggctgagccccctggactctggtgcaggtgttgggagggggtgaacatctggagaagcccctcctggcacagtggcccccgccctgtcccggcaagctgggcactccaggaccctgcatgggatcctggctccgctgtccaccctccacccagctcaacagactctgccccgacatgtgcgggaccccacctcgtgcattctccttagacctgagcccctgtccctcttcgtaggtgcccgtgtgtgttggttgcaggaatggaggatgcacgaggttagagaggttttcagaacatgtagccttctgtgatgacactaacttgatttctgtctttcactaccaggttgccccaggcttttcctgcctctaatcttccctttttgaaagaatcctcaaaagcacatgcgttaaagccttctcaaagctcccacatgatcttgagcatcaaa

SEQ ID NO: 672274 - DNA, 662 bp, Homo sapiens
ccatgtcctggatgaaggtggggccttttccagatgttagggcttctgctttcttgtgtccaagaaggggaagtctgagcccagcagaaagagagtatggtcctgtccctgtggctcatttgacaaacatttcctgagcaccyactctctgcctggctttgtgttaggtgtgtggatgtagcaattgatgtcagcttgttgctcttatggtacccagagtcttgaaggaatggcagcagcaagtgaaatgacagtgcctcttcagcaggataaggggagtaatggtgagaggcacagggtgccatgggagcagagaaaaggagcaggtaatgcaaggaaggcttcctggaggaaggagtgtgaccccagagaaacctatgagatgcagacaaaatagccacattaagaagcatagagaggtcaggtgtggtggctcacacctataatcccagcacttcgggagtcagaggctggaggattgcttaagcccaggagtttgaggtcagcctgggcaacatagtgagacctcatctctacaaaaaattaaaaattatccaggtgtggtggctcatgcctgtagtcccagctactcaggaggctgaggtgggaagatttcttgagcctgagaggtggaggctgcagtgagccataatcccacagat

SEQ ID NO: 672275 - DNA, 662 bp, Homo sapiens
ccatgtcctggatgaaggtggggccttttccagatgttagggcttctgctttcttgtgtccaagaaggggaagtctgagcccagcagaaagagagtatggtcctgtccctgtggctcatttgacaaacatttcctgagcacctactctctgcctggctttgtgttaggtgtgtggatgtagcaattgatgtcagcttgttgctcttatggtacccagagtcttgaaggaatggcagcagcaagtgaaatgacagtgcctcttcagcaggataaggggagtaatggtgagaggcacagggtgccatgggagcagagaaaaggagcagstaatgcaaggaaggcttcctggaggaaggagtgtgaccccagagaaacctatgagatgcagacaaaatagccacattaagaagcatagagaggtcaggtgtggtggctcacacctataatcccagcacttcgggagtcagaggctggaggattgcttaagcccaggagtttgaggtcagcctgggcaacatagtgagacctcatctctacaaaaaattaaaaattatccaggtgtggtggctcatgcctgtagtcccagctactcaggaggctgaggtgggaagatttcttgagcctgagaggtggaggctgcagtgagccataatcccacagat

SEQ ID NO: 672276 - DNA, 1832 bp, Homo sapiens
ggggtttcaccatgttggccaggttggtctcgaactcctgacctcaagagatccacccacctcagcctcccaaagtgctgggactacaggtatgagccactgtgcctggccatgtgttgtttttacatacaaaaaaagaggaatattccaataagaacaatttatgcactgctgatcttaaagacaccttaggcgccaggtgcagaggttcatgcctgtaatcctagcactttaggaggccaaggcaagcagatcacttaagctcacgagttccagaacagcctgggcaacatggtaaagccctgtctctacaacaaaattacaaaaaattagctgggtgtggtggcatgcacctgtagtcccagcttctcaggaggctgaggtgggagaatcacctgagcccagggagctgaggctgtagtgcattctagcctgggtgatggagtgaggccttgtctcaaaaaaaaaaaaaaaaaaaaaaaaaaaaaagacattttaggatcttgaaacatttaaatgttttcactataaaagaaaaattttccttatcccagacgaactgttcataaaggttcacctgcttaatatgcctagaattcctccactgaggctggtatgggtggcagtgcagtacagggacagcagccccagctctaaagggaaatgggacctgggtttgaaaccttgttgtgccatttacaagttgtgcaaacctgagccaacaccttcatccctctgggtctcaaatcttcacaggcatatctggggatctggtcctctctgtaaaaattggtaaaaagatggaatgctatgtacaagggataaccacataatttgttgtccaaagggtggcactttgagaagtgaatgttattactcttctgggacaatggatgtacacagtaaaacgtcttgggaaaacctggacataaagtcatcctagatcagaagttctctatcttggttgtacaatagaatcacctgaaaaactctggctcccaccctcagagatcttcatgtaattgatctagggtatgcctgggcattatgaatttcacaactctttgagtgactctgacattcagccatagtggagaaccaccatccttaacatacatgaagccaagctcatggtgagttctatcagtgttaattgtcattactattattatcacatgttattattactggagagaatgacatgtataatgctgagcctattttaaagattttgttagctattactataattaacaatcataattttaaaagagaacattccagtgggtggtatcttgccaattactatgggcttggcttagaatagtgggatttgattgaggtgattttgccccaggagatatctagcaatgactgaagactttttttttttttttaagaacaaaggtcttactctgctgccaaggttggagtgcagtggcacaatcatggctctctgcagcctcaaatacaggggctcaagcaatcctccttcctcagccccctgagtaactgggaccacagacacgtgctgctatatgcagctattttttaaatgtatttaggtattttttattattattaatttttttacagaaacaagatctttctatgcccccaggctggtctcaaactcctggcctcaagcaatcctcccaccttggcctctccaagtgctgggattacaggtgtgagccacatgcccagcttggagacattttttaattgtcaaaattggcaggtatagggagagtgacgctcctggcayctagagaataaaaatcagtgatgctgctaaaaatcctacaattcccagggcagcaccccacaac

SEQ ID NO: 672277 - DNA, 841 bp, Homo sapiens
ttcatgaatggcctaatgacatctctttggtgatgagtgagttcacacaagatctggttgtttaaaagtgtatgcacctccctctctttcttgcttccatgctcagtgtgtgacatgctggctccctgtcaccttctaccatgattgcaagcttcctgaggccttcaccagaagctgagcagatgttgccgtcatgcttctcattcagcctacagaaccatgagccaattaaacctcctctccttgtaaattacccagcctcaggtatttctttatagaaatggaagaacagtctaacacatacaccaagtgaataccagtgcttatcatgtgttccaaatcctttacctgaattagctcttctaaccctcctaacaaccctacaaggtgtgagctatttttattaccattttactgatgagaaaacaaacatagagagaaggagttacctgcyaaacatcacccagctagcaagtggtaggcttgggactcaaacccaaaaagtgtgatgcagagcccatgcccatccccactgtaccacagtttgcaaatgggggcacggaggccaaatcatttgctacattcaccaacgaggtcagagaagggagaatgggagcaaatagggtttagaaaaagaaaaaccttgttccaggcccaaacatgctgattttcccacagttgctgctccaattcttctggctaattcttcaatgccagccaactccctctggacccctaacgcgaaagcccagcaagattctgcgagagaaaatgactgcttcctaaaagcacccagtggatttccctgacacatcttgtcggcactcagaatgcccacgac

SEQ ID NO: 672278 - DNA, 1203 bp, Homo sapiens
ttctgcaatgaggcacatccayagtctcccaaaatgatgattccccagtaggctccaccaaattacgtaaagacaggatcatcaaggaacaaaaagctcaagagcctctttctccctggagtggatccctttctttctttctttcagtgaagcaatctggagtgctacggaatgaataattgtatatttttttaataagtagaagagttgggttagaggcaaattaaattctctgagctgctttccctggttttatttttttaagtggcaattccaccaatctttgtctcaaaatgttgaacaaatgaggacacagggggaccacaccctacctaggcgagaacgaggaaaatacagctaaatgtttcttgttccaagaccagcaaggaagaaggaatctcagaaggaaggaagcagcagaattgaaagcacggataaaagaggaggatgtctaaaaacagaacctttaagaaagaggctaagggtctctgtggtgctaatacaatccttgaaaacacactccaaaatgccgaagtccccaaagcatttcccagaatttaaaaaaatctctgaaagtgacacagagccagtgagggaacaattcaggggtggactacagtgaacaaatgacctcccctttctcgtgagactgtatggtgttatgaagatatgttcataaggctggggtctgcctcctgtgatgctgtcactcactgaatgtaccatacaaacagaaagggatcagtccaggagggatgtgaggcaaaacagagctatgctctgcacatgctgtaagcagcgtgcccagcaacactgaccctcattctgctgggctctgaagtcagcaatctccccactgtcatactgttcgtggctccttctcttcctgctgcaatacatgcacgtatgcgcatgccacatacatgcatgtacatacatacacacacgtgcagaaatgtacacaaaaatgcacgtttgcacacatacagagatgtgtgtgcacatccactcatgtgcacatacaagtgtacacatctacacatgcacacacagaggcacacacattgcttttctggcatggtgctccttgtaccttattctcgcacctatcttgaatatgcttataaaggatggtactagttaagatcttccccatctcaaaaataacacagggcacaggctcctgagagcaaggctgcctgt

SEQ ID NO: 672279 - DNA, 1203 bp, Homo sapiens
ttctgcaatgaggcacatccatagtctcccaaaatgatgattccccagtaggctccaccaaattacgtaaagacaggatcatcaaggaacaaaaagctcaagagcctctttctccctggagtggatccctttctttctttctttcagtgaagcaatctggagtgctacggaatgaataattgtatatttttttaataagtagaagagttgggttagaggcaaattaaattctctgagctgctttccctggttttatttttttaagtggcaattccaccaatctttgtctcaaaatgttgaacaaatgaggacacagggggaccacaccctacctaggcgagaacgaggaaaatacagctaaatgtttcttgttccaagaccagcaaggaagaaggaatctcagaaggaaggaagcagcagaattgaaagcacggataaaagaggaggatgtctaaaaacagaacctttaagaaagaggctaagggtctctgtggtgctaatacaatccttgaaaacacactccaaaatgccgaagtccccaaagcatttcccagaatttaaaaaaatctctgaaagtgacacagagccagtgagggaacaattcaggggtggactacagtgaacaaatgacctcccctttctcgtgagactgtatggtgttatgaagatatgttcataaggctggggtctgcctcctgtgatgctgtcactcactgaatgtaccatacaaacagaaagggatcagtccaggagggatgtgaggcaaaacagagctatgctctgcacatgctgtaagcagcgtgcccagcaacactgaccctcattctgctgggctctgaagtcagcaatctccccactgtcatactgttcgtggctccttctcttcctgctgcaatacatgcacgtatgygcatgccacatacatgcatgtacatacatacacacacgtgcagaaatgtacacaaaaatgcacgtttgcacacatacagagatgtgtgtgcacatccactcatgtgcacatacaagtgtacacatctacacatgcacacacagaggcacacacattgcttttctggcatggtgctccttgtaccttattctcgcacctatcttgaatatgcttataaaggatggtactagttaagatcttccccatctcaaaaataacacagggcacaggctcctgagagcaaggctgcctgt

SEQ ID NO: 672280 - DNA, 662 bp, Homo sapiens
taatgtgagtcattggcggtaacaggataggagaagactgtgatgatgaaggcagtatttcaaggagtttaattctggggcaaaatgcagcatgatttggaatgagaagaaaccaaggaagacttttgaaaattgtttgggtataggtagtggggtcagaaattcagacatacattagtggtatgattactaaagaatcagtaccatctaaactctctcatcttcttttaagtgatttgacaaaaaggggtaagtgtatggattgatataaataatccatatacaatacttggctcagaggataagtggttttggacttaagaaacatatgctaaaggtgtgattattaaaggatcgctaaaacttaatctstctcattttccatttagtgatctgataaaaaaaaagtaggtgatgttatagattgaatgaagtatttcacatgaaacacttggcccagtgtaagagtggtttggaagccaataactggtatattccagaccaattagctagctggagccaattaaccattaagttcttcattgttatgaagaaggtaatacattctgtggactttaagaacttctgctataagggttataggatgaaatgcaggtaggaattgagaacagtgtctggaatcttgtcagtgttaaataaat

SEQ ID NO: 672281 - DNA, 662 bp, Homo sapiens
taatgtgagtcattggcggtaacaggataggagaagactgtgatgatgaaggcagtatttcaaggagtttaattctggggcaaaatgcagcatgatttggaatgagaagaaaccaaggaagacttttgaaaattgtttgggtataggtagtggggtcagaaattcagacatacattagtggtatgattactaaagaatcagtaccatctaaactctctcatcttcttttaagtgatttgacaaaaaggggtaagtgtatggattgatataaataatccatatacaatacttggctcagaggataagtggttttggacttaagaaacatatgctaaaggtgtgattattaaaggatcgctaaaacttaatctgtctcattttccatttagtgatctgataaaaaaaaagtaggtgatgttatagattgaatgaartatttcacatgaaacacttggcccagtgtaagagtggtttggaagccaataactggtatattccagaccaattagctagctggagccaattaaccattaagttcttcattgttatgaagaaggtaatacattctgtggactttaagaacttctgctataagggttataggatgaaatgcaggtaggaattgagaacagtgtctggaatcttgtcagtgttaaataaat

SEQ ID NO: 672282 - DNA, 1594 bp, Homo sapiens
tatcttgtttcatggatttgttgtttttttggtctgtctcttcaaagaccaaggatattcttttcatcactgctgtatttccactgctggaatagtacctgacacacagtaggtactcaataaatgtagaataaatgaatggctgaatgaatgccctgtctaaatcatagcttttctatgagggcaaaattatatgtaatgtatayagatgtgaattgaaaactaaaaagtactccacagatagaaactgtagcctagtaatctccttgaccactatttccctgacactaactaaggtacaatttcagttctacctttcctgatctaaggtatgaaaaacttaaaataagttgtatgagtgtgacatcctgaattacatcctttcaaatgagaatgtcctgtgatctgatgatacactaaggacttaatgaagaatgaagagcttttattgttgtccttgttgttattttgtttaacattaaaggtggggtttttttttgttttttatttttgtttattttattttattttatttttttgagatggagttttactctttcgctcaggctggagtgaagtggcacgatctcggctcactgccacctctccctccggggttcaagcgattctcctgcctcagcctcccaagtagctgggattacaggcgcacaccaccacgcctggttaatttttgtatttttagtagagatggggttttgccatgttggccaggctggtctcgaactcctgacctcaggtgatccacttgcctcagcctcccaaagtgccgggattacaggcgtgagccactgcacccagccattaaaggtgttttctacagggatcaagcaaaacacaagacataacctcagtatattcccataaattctcatggaggctgaaatggatacaaggaatacctaaagaaacctatttatagaaattgctaagtgttatattcccctacatgcatagaatagggcttggtttcagtgcaggaagaatttatcttaaatacttaatgcagagaaaagataacatatgttccactgcaggtacacttccttctaatgggaagatcaaaactagtgttaacaactacaggagacaaggtactcagcagtgaaatgacgtactcagccactgtttggcaattgggtagtttttctctaaaaacctaatcagcacagtacagaataagttgtagaagaaaactgaacttgcactgcttctccattcattaagacagctcacactgagctccacacagctggagccccatgctgaaaaccatcacattgtacttttagcaaacctcttatacactgtcctcaaaatgaaacccttttataggaagggagggagaaaaaaagtctagaaaaaaaagaaatgtcacatactttgatttaaagttagaaaaaaaggcataagtttgagccattcctttaaaaataactataaaaatttcagataccaaataaagacagttttgtccaaaaattcaaaaccactttaaaaagaggtatttgtatttttaaatgaatctggacttatttagcaaatgaatccttatgttttaacaagctttagtttg

SEQ ID NO: 672283 - DNA, 655 bp, Homo sapiens
ggtgtccacttccctaccaatgtcattatatttatttccgtactttgcagtttatctgcacatttgtcttcttttcagaatgagccccatatcagatagcagcctgtgcccagagcgcaggtgaagtctcccatttgccgcccctcagcaggtgcatcctaggccagtgacttgactttagactcagaaaaaaacagcatctgattgggagggatccagctgggagaaagcagtctcccgggttgaatccgccrgctctgaaggtggcagtggggagaagggaaataaatgccctttggcgacttgtcctgctaatagcgtttttcctttcctggttttatcatgccacaccatcagtttgagttgctgattatttctctggaaataggataggcaatcattttacaaggcaatatggggcaagtaaatcctgaagcagaagatttttctccagccttgacacagtcctcaggcagctacagagcccaaatctgttcctcaaatctacagggctctgcaagccctgatgatttacctttgtgacaggtgacagacactcaggaagttcataatagggaaggaggcagagtgattaacatcagcagcaaagtacagtaaagcatccatttcttttttaaaatgtcatactttcttt

SEQ ID NO: 672284 - DNA, 617 bp, Homo sapiens
gacttttttagcttttarcaggtactgtagccaaagcaccttctctcttccatgttccttctccaaatcatcttttttcttttcatcagctggaccatgttttccttttcccttccaaagtcagtcgtgctccacattttgacggctttccctggttctgtgaattccttccaagttgctgccatctttctactaataagctgcccaatacactgtaccggtcacctccctggagcctctcacagcctcctggatgatcttcagcctctattctggaaaaaccaaggcttacacaccacccactacaatgctctttcagccctgtgctctccaggtggccttggctgttacatcttgtcgttcatcacccctaccacctttgcaagattaaggtgaggtatatgagcccttcgctttgggcaaaaaatttaagagggtgccacaaattaaaaaccccagtaatcaagacttttttaaacctacagattttttgcattaattttgttttcatagcatatcacattacagtattatctctcttgattactgagtttctgagcagctcccttgattttgggcccaagatgaatgcctgtctttcacactccatctctccc

SEQ ID NO: 672285 - DNA, 2249 bp, Homo sapiens
tccagcgctctgcaagcgagtggttttcagggctggcagaagtacatagacgggtatgtttaggggaattatggtctgatccaaattcatcttctgaggtggaagcataaccagtaggaaagcgcctccatcttgaatttactaaattagtttaattattaaaaaaaattattatgttatcatttaaaggaggtaaaataaaagtcatgacttcaaaacaccatgagagcgcacacacagcacaattttcaataactgacgtacacatacctcacaaaaaccataagtctactactctttagagatagaaacattacacttcggtgaattaaaaacaatgaagaatcaaaaacaatcgaaagaccatgttttccatagtgtggtgagtaaacattcagatgaaaaatttcactaatcataaacgactaagcaagttctatccatcgatgtttaactggagtacttttcaattgcaaatatttcttatttgagtgaaaatatgaatttttcaaaaaaaaagtaacaacatcaacgacaacaaaaataaaaacaagggaaaagatttcctcatgccacatggactttcaacatggagatggtaaaaactctctttttccaacatacagatgtgcataattctggctgtggaaattacacctttatggcagaaaaaaaaaattacctctgtcattcaacatcctgttacgatatggttggaaaaaatctttttacgtggtaaaaaaacacaacaaagcatcttcagtacaactctctgctgctttgacactgaaagcatatggtgaaaatagacaatggcataaaatctacaaaaagcaaaactgtacaagcttttgtcacaaccattgacattgaaggcacaggagatactgtgaagagtcacattaaagaaagtggcaatcactttcttatttacagttagtaaagacattaaaaaaatggtattgctcacacatttaaaaaatcagaagacaaggcagacactttactactgttaatatgagaatcaaacatgcaaataatttgtgaagcataaatagaggtaaaaaagaaagataatggctaattcctggtaaactgaacaagggcaggaaccatgtctgtttaatccaataatgtatacctagcacttagctgagtgttggctagcaaatgtttaacaaatatttttgaaaaaaatgtaagaattcccggatgtaaacatttacttttccgaaacctagtgaaaagcattaaatgttattggtgtttaaagtgataaaaccttagcatcttcttcctttttaatagaaactgaccctaagctgcacagaatccagaaattcctccactctaattttatgccttttatgtcttttcctccaaaaactacattttcatctggggatctctaaggctgaggttgctctcagataaaactggcatatattgccaccagaactggcttaagaaacagagaactctacaatgaggaatatgccataaattagagcctatcgattcgtccttattcacacccctatttgcagatcctgatgtttggaactagattcattcataggtatgacagaatgaacatatgcagaaagttcatggctctctgtaaaagtgtatgcaaatgcatatactaggtaattagtcatagaccttttttgaggagcttaaatataatttctgattttaacactgtaagataatttattaacatagataatacttttaccatggtgataatgtactcatttctagatataaaaacttccgtgagttgaagtgatcctgagacttgaaaccaattttrggaaaagtttagaacaagagtaaagaggtttagaaaaaacttaagaaatacagcaggcaaaataagaaatagtgtaaacaaatttgtacttttcaaaaaaacatttcattaaatgctaaatgtgtgtttattgtgctatcttacaatagtgttcataaataagaaaaaaatcatttgttatatcaaatgtcctgatttttgattaggcaactatggtcactatacatatgattggaaactagagagaaaagaaaagcaattaacaaagagctttaataactgcagaacatatgaaaatgtaagtatgataaaactaagacagttaattttgaggtaacttagaaagaatggcatcgatggctgatatatttcgtggcagactacatgaaagcagaatgagaaattgagtaccaagtgctattaatatacg

SEQ ID NO: 672286 - DNA, 2249 bp, Homo sapiens
tccagcgctctgcaagcgagtggttttcagggctggcagaagtacatagacgggtatgtttaggggaattatggtctgatccaaattcatcttctgaggtggaagcataaccagtaggaaagcgcctccatcttgaatttactaaattagtttaattattaaaaaaaattattatgttatcatttaaaggaggtaaaataaaagtcatgacttcaaaacaccatgagagcgcacacacagcacaattttcaataactgacgtacacatacctcacaaaaaccataagtctactactctttagagatagaaacattacacttcggtgaattaaaaacaatgaagaatcaaaaacaatcgaaagaccatgttttccatagtgtggtgagtaaacattcagatgaaaaatttcactaatcataaacgactaagcaagttctatccatcgatgtttaactggagtacttttcaattgcaaatatttcttatttgagtgaaaatatgaatttttcaaaaaaaaagtaacaacatcaacgacaacaaaaataaaaacaagggaaaagatttcctcatgccacatggactttcaacatggagatggtaaaaactctctttttccaacatacagatgtgcataattctggctgtggaaattacacctttatggcagaaaaaaaaaattacctctgtcattcaacatcctgttacgatatggttggaaaaaatctttttacgtggtaaaaaaacacaacaaagcatcttcagtacaactctctgctgctttgacactgaaagcatatggtgaaaatagacaatggcataaaatctacaaaaagcaaaactgtacaagcttttgtcacaaccattgacattgaaggcacaggagatactgtgaagagtcacattaaagaaagtggcaatcactttcttatttacagttagtaaagacattaaaaaaatggtattgctcacacatttaaaaaatcagaagacaaggcagacactttactactgttaatatgagaatcaaacatgcaaataatttgtgaagcataaatagaggtaaaaaagaaagataatggctaattcctggtaaactgaacaagggcaggaaccatgtctgtttaatccaataatgtatacctagcacttagctgagtgttggctagcaaatgtttaacaaatatttttgaaaaaaatgtaagaattcccggatgtaaacatttacttttccgaaacctagtgaaaagcattaaatgttattggtgtttaaagtgataaaaccttagcatcttcttcctttttaatagaaactgaccctaagctgcacagaatccagaaattcctccactctaattttatgccttttatgtcttttcctccaaaaactacattttcatctggggatctctaaggctgaggttgctctcagataaaactggcatatattgccaccagaactggcttaagaaacagagaactctacaatgaggaatatgccataaattagagcctatcgattcgtccttattcacacccctatttgcagatcctgatgtttggaactagattcattcataggtatgacagaatgaacatatgcagaaagttcatggctctctgtaaaagtgtatgcaaatgcatatactaggtaattagtcatagaccttttttgaggagcttaaatataatttctgattttaacactgtaagataatttattaacatagataatacttttaccatggtgataatgtactcatttctagatataaaaacttccgtgagttgaagtgatcctgagacttgaaaccaattttgggaaaagtttagaacaagagtaaagaggtttagaaaaaacttaagaaatacagcaggcaaaatmagaaatagtgtaaacaaatttgtacttttcaaaaaaacatttcattaaatgctaaatgtgtgtttattgtgctatcttacaatagtgttcataaataagaaaaaaatcatttgttatatcaaatgtcctgatttttgattaggcaactatggtcactatacatatgattggaaactagagagaaaagaaaagcaattaacaaagagctttaataactgcagaacatatgaaaatgtaagtatgataaaactaagacagttaattttgaggtaacttagaaagaatggcatcgatggctgatatatttcgtggcagactacatgaaagcagaatgagaaattgagtaccaagtgctattaatatacg

SEQ ID NO: 672287 - DNA, 2249 bp, Homo sapiens
tccagcgctctgcaagcgagtggttttcagggctggcagaagtacatagacgggtatgtttaggggaattatggtctgatccaaattcatcttctgaggtggaagcataaccagtaggaaagcgcctccatcttgaatttactaaattagtttaattattaaaaaaaattattatgttatcatttaaaggaggtaaaataaaagtcatgacttcaaaacaccatgagagcgcacacacagcacaattttcaataactgacgtacacatacctcacaaaaaccataagtctactactctttagagatagaaacattacacttcggtgaattaaaaacaatgaagaatcaaaaacaatcgaaagaccatgttttccatagtgtggtgagtaaacattcagatgaaaaatttcactaatcataaacgactaagcaagttctatccatcgatgtttaactggagtacttttcaattgcaaatatttcttatttgagtgaaaatatgaatttttcaaaaaaaaagtaacaacatcaacgacaacaaaaataaaaacaagggaaaagatttcctcatgccacatggactttcaacatggagatggtaaaaactctctttttccaacatacagatgtgcataattctggctgtggaaattacacctttatggcagaaaaaaaaaattacctctgtcattcaacatcctgttacgatatggttggaaaaaatctttttacgtggtaaaaaaacacaacaaagcatcttcagtacaactctctgctgctttgacactgaaagcatatggtgaaaatagacaatggcataaaatctacaaaaagcaaaactgtacaagcttttgtcacaaccattgacattgaaggcacaggagatactgtgaagagtcacattaaagaaagtggcaatcactttcttatttacagttagtaaagacattaaaaaaatggtattgctcacacatttaaaaaatcagaagacaaggcagacactttactactgttaatatgagaatcaaacatgcaaataatttgtgaagcataaatagaggtaaaaaagaaagataatggctaattcctggtaaactgaacaagggcaggaaccatgtctgtttaatccaataatgtatacctagcacttagctgagtgttggctagcaaatgtttaacaaatatttttgaaaaaaatgtaagaattcccggatgtaaacatttacttttccgaaacctagtgaaaagcattaaatgttattggtgtttaaagtgataaaaccttagcatcttcttcctttttaatagaaactgaccctaagctgcacagaatccagaaattcctccactctaattttatgccttttatgtcttttcctccaaaaactacattttcatctggggatctctaaggctgaggttgctctcagataaaactggcatatattgccaccagaactggcttaagaaacagagaactctacaatgaggaatatgccataaattagagcctatcgattcgtccttattcacacccctatttgcagatcctgatgtttggaactagattcattcataggtatgacagaatgaacatatgcagaaagttcatggctctctgtaaaagtgtatgcaaatgcatatactaggtaattagtcatagaccttttttgaggagcttaaatataatttctgattttaacactgtaagataatttattaacatagataatacttttaccatggtgataatgtactcatttctagatataaaaacttccgtgagttgaagtgatcctgagacttgaaaccaattttgggaaaagtttagaacaagagtaaagaggtttagaaaaaacttaagaaatacagcaggcaaaataagaaatagtgtaaacaaatttgtacttttcaaaaaaacatttcattaaatgctaaatgtgtgtttattgtgctatcttacaatagtgttcataaataagaaaaaaatcattkgttatatcaaatgtcctgatttttgattaggcaactatggtcactatacatatgattggaaactagagagaaaagaaaagcaattaacaaagagctttaataactgcagaacatatgaaaatgtaagtatgataaaactaagacagttaattttgaggtaacttagaaagaatggcatcgatggctgatatatttcgtggcagactacatgaaagcagaatgagaaattgagtaccaagtgctattaatatacg

SEQ ID NO: 672288 - DNA, 2249 bp, Homo sapiens
tccagcgctctgcaagcgagtggttttcagggctggcagaagtacatagacgggtatgtttaggggaattatggtctgatccaaattcatcttctgaggtggaagcataaccagtaggaaagcgcctccatcttgaatttactaaattagtttaattattaaaaaaaattattatgttatcatttaaaggaggtaaaataaaagtcatgacttcaaaacaccatgagagcgcacacacagcacaattttcaataactgacgtacacatacctcacaaaaaccataagtctactactctttagagatagaaacattacacttcggtgaattaaaaacaatgaagaatcaaaaacaatcgaaagaccatgttttccatagtgtggtgagtaaacattcagatgaaaaatttcactaatcataaacgactaagcaagttctatccatcgatgtttaactggagtacttttcaattgcaaatatttcttatttgagtgaaaatatgaatttttcaaaaaaaaagtaacaacatcaacgacaacaaaaataaaaacaagggaaaagatttcctcatgccacatggactttcaacatggagatggtaaaaactctctttttccaacatacagatgtgcataattctggctgtggaaattacacctttatggcagaaaaaaaaaattacctctgtcattcaacatcctgttacgatatggttggaaaaaatctttttacgtggtaaaaaaacacaacaaagcatcttcagtacaactctctgctgctttgacactgaaagcatatggtgaaaatagacaatggcataaaatctacaaaaagcaaaactgtacaagcttttgtcacaaccattgacattgaaggcacaggagatactgtgaagagtcacattaaagaaagtggcaatcactttcttatttacagttagtaaagacattaaaaaaatggtattgctcacacatttaaaaaatcagaagacaaggcagacactttactactgttaatatgagaatcaaacatgcaaataatttgtgaagcataaatagaggtaaaaaagaaagataatggctaattcctggtaaactgaacaagggcaggaaccatgtctgtttaatccaataatgtatacctagcacttagctgagtgttggctagcaaatgtttaacaaatatttttgaaaaaaatgtaagaattcccggatgtaaacatttacttttccgaaacctagtgaaaagcattaaatgttattggtgtttaaagtgataaaaccttagcatcttcttcctttttaatagaaactgaccctaagctgcacagaatccagaaattcctccactctaattttatgccttttatgtcttttcctccaaaaactacattttcatctggggatctctaaggctgaggttgctctcagataaaactggcatatattgccaccagaactggcttaagaaacagagaactctacaatgaggaatatgccataaattagagcctatcgattcgtccttattcacacccctatttgcagatcctgatgtttggaactagattcattcataggtatgacagaatgaacatatgcagaaagttcatggctctctgtaaaagtgtatgcaaatgcatatactaggtaattagtcatagaccttttttgaggagcttaaatataatttctgattttaacactgtaagataatttattaacatagataatacttttaccatggtgataatgtactcatttctagatataaaaacttccgtgagttgaagtgatcctgagacttgaaaccaattttgggaaaagtttagaacaagagtaaagaggtttagaaaaaacttaagaaatacagcaggcaaaataagaaatagtgtaaacaaatttgtacttttcaaaaaaacatttcattaaatgctaaatgtgtgtttattgtgctatcttacaatagtgttcataaataagaaaaaaatcatttgttatatcaaatgtcctgatttttgattaggcaactatggtcactatacatatgattggaaactagagagaaaagaaaagcaattaacaaagagctttaataactgcagaacatatgaaaaygtaagtatgataaaactaagacagttaattttgaggtaacttagaaagaatggcatcgatggctgatatatttcgtggcagactacatgaaagcagaatgagaaattgagtaccaagtgctattaatatacg

SEQ ID NO: 672289 - DNA, 1453 bp, Homo sapiens
ctttgcatatgatacttttttcacttttcttcctcttttcactgctgctttcctccactccattcacctgtatctctttgctggtcagtgggtttggtaatgatggtcactgtctatggtagaaatggacgtagggtgaagccagataacatataatcatgattccaaaaaaaaatagacaacattttccttattaccccagtcctcatttccacacttgaagctttggttggtggttcacaaatttattgccaaatattttaaaactaactactacattttggtttattttcattctgtttttggttatggctrtacttcttcaattcacatttcatctgtgctgcatttcctgatgaaatttcttctgctgtactccttgttttatcacctcatctccattaagatatgtatgtattttcctgtcttaacataatttctatgttaccaggtagcttggagtacctcttaacacatgatgtggttttattcctcgatatttaggataaggcttgagatgcaagctaaatatgattacttcagcaagtctaagaaacaactgtaagatgatatatataaagacagatttcattttctgcttctttgaacacagaacttgataaatattcagttttgtgtgtccaaaaataaccttgaattgtgtatgaaattccctaggacacattgatgtatatgattttagtcttttcgtacttactagcagtatattaaataattagaatcatggaatttaaaagttagaaggattattcccttaagggaaccaaggccaagagaggaaataacctgccctgggcacatggcagtggcaggggcagaataagaatcaaagacttttaatccccagcctgttgtttttctaccgtatctattctagctctaagaaatagtttcagtgtttacttgtatgcaagcttccagaagacagctagaatctactggattattatcaggagtatatgcaaggtcaatatacaatataaaggttttggtattgtttactaaaatctttgcagttctgatgttttacccagtttatattctctattccaccttatgagtgtaaagccacattgtaatctaggattgtatattcagattctctcaagatacccacttatagtattagatcttctctaggacagtggccaggatctttccttcagtgagaacatactataatagctgtatggaaaaggtggtcaaacaaacaaacaaacaaacctacctgtttgattttgctaatttaggtgcctttgatattataatatttctgtttaagataattataatattttgaatggaaaaagaaaagaaaaattttaacttttgaaacatgatttaaaagaatgttaaatcatgccgatcagtgttgctgtgcacagtataaactttaaagaccttggaaataatctgaacctagcacttgtga

SEQ ID NO: 672290 - DNA, 1453 bp, Homo sapiens
ctttgcatatgatacttttttcacttttcttcctcttttcactgctgctttcctccactccattcacctgtatctctttgctggtcagtgggtttggtaatgatggtcactgtctatggtagaaatggacgtagggtgaagccagataacatataatcatgattccaaaaaaaaatagacaacattttccttattaccccagtcctcatttccacacttgaagctttggttggtggttcacaaatttattgccaaatattttaaaactaactactacattttggtttattttcattctgtttttggttatggctatacttcttcaattcacatttcatctgtgctgcatttcctgatgaaatttcttctgctgtactccttgttttatcacctcatctccattaagatatgtatgtattttcctgtcttaacataatttctatgttaccaggtagcttggagtacctcttaacacatgatgtggttttattcctcgatatttaggataaggcttgagatgcaagctaaatatgattacttcagcaagtctaagaaacaactgtaagatgatatatataaagacagatttcattttctgcttctttgaacacagaacttgataaatattcagttttgtgtgtccaaaaataaccttgaattgtgtatgaaattccctaggacacattgatgtatatgattttagtcttttcgtacttactagcagtatattaaataattagaatcatggaatttaaaagttagaaggattattcccttaagggaaccaaggccaagagaggaaataacctgccctgggcacatggcagtggcaggggcagaataagaatcaaagacttttaatccccagcctgttgtttttctaccgtatctattctagctctaagaaatagtttcagtgtttacttgtatgcaagcttccagaagacagctagaatctactggattattatcaggagtatatgcaaggtcaatatacaatrtaaaggttttggtattgtttactaaaatctttgcagttctgatgttttacccagtttatattctctattccaccttatgagtgtaaagccacattgtaatctaggattgtatattcagattctctcaagatacccacttatagtattagatcttctctaggacagtggccaggatctttccttcagtgagaacatactataatagctgtatggaaaaggtggtcaaacaaacaaacaaacaaacctacctgtttgattttgctaatttaggtgcctttgatattataatatttctgtttaagataattataatattttgaatggaaaaagaaaagaaaaattttaacttttgaaacatgatttaaaagaatgttaaatcatgccgatcagtgttgctgtgcacagtataaactttaaagaccttggaaataatctgaacctagcacttgtga

SEQ ID NO: 672291 - DNA, 798 bp, Homo sapiens
cattacagttttcatatgaagccttggcttgtcttggattttcattgagaggtgtcatttttagtaacatagtttttttcagagaagacctttattttctagagaattttcattttatataagagaaaatgtaatcaatgataatatagcaaggtgaggtttaattatgggtttgtatgacaagttaatgtgactaaatgaaatagtctttcatgagactcagatatgaccaggctgcatgattttgttttcttatttttctcctttaggaaggcacatcttcatctggaagcaaacgytgggtttcacagtgggctagtttggctgccaatcatacaaggcatgatcaagaagaaaggataatggaattttctgcacctcttcctttagagaatggtattctctttctctctttcattctttatcccttttttcttctctttctccatttctctctctttctcttactcttctctgcttttttgtgaatcatatatcagttgttattataaaaaacaagccaaatctatatagtaagaagttaaacctaaataaacatattcacatattctcatgctgataaatgaatttattttataagtaaaaggctgatttttattagatattgtatattttgggggattttaagcaggggacaaattcaaagtgataaaactcttttttgagaaatttagtggacttcgtaagttgagacttcctaaggacaggtggacagacaccagcttggatttaatatttcattccgaggcacttttcattttagttgtaaatttctgc

SEQ ID NO: 672292 - DNA, 798 bp, Homo sapiens
cattacagttttcatatgaagccttggcttgtcttggattttcattgagaggtgtcatttttagtaacatagtttttttcagagaagacctttattttctagagaattttcattttatataagagaaaatgtaatcaatgataatatagcaaggtgaggtttaattatgggtttgtatgacaagttaatgtgactaaatgaaatagtctttcatgagactcagatatgaccaggctgcatgattttgttttcttatttttctcctttaggaaggcacatcttcatctggaagcaaacgctgggtttcacagtgggctagtttggctgccaatcatacaaggcatgatcaagaagaaaggataatggaattttctgcacctcttcctttagagaatggtattctctttctctctttcattctttatcccttttttcttctctttctccatttctctctctttctcttactcttctctgcttttttgtgaatcatatatcagttgttattataaaaaacaagccaaatctatatagtaagaagttaaacctaaataaacatattcacatattctcatgctgataaatgaattyattttataagtaaaaggctgatttttattagatattgtatattttgggggattttaagcaggggacaaattcaaagtgataaaactcttttttgagaaatttagtggacttcgtaagttgagacttcctaaggacaggtggacagacaccagcttggatttaatatttcattccgaggcacttttcattttagttgtaaatttctgc

SEQ ID NO: 672293 - DNA, 798 bp, Homo sapiens
cattacagttttcatatgaagccttggcttgtcttggattttcattgagaggtgtcatttttagtaacatagtttttttcagagaagacctttattttctagagaattttcattttatataagagaaaatgtaatcaatgataatatagcaaggtgaggtttaattatgggtttgtatgacaagttaatgtgactaaatgaaatagtctttcatgagactcagatatgaccaggctgcatgattttgttttcttatttttctcctttaggaaggcacatcttcatctggaagcaaacgctgggtttcacagtgggctagtttggctgccaatcatacaaggcatgatcaagaagaaaggataatggaattttctgcacctcttcctttagagaatggtattctctttctctctttcattctttatcccttttttcttctctttctccatttctctctctttctcttactcttctctgcttttttgtgaatcatatatcagttgttattataaaaaacaagccaaatctatatagtaagaagttaaacctaaataaacatattcacatattctcatgctgataaatgaatttattttataagtaaaaggctgatttttattagatattgtatattttgrgggattttaagcaggggacaaattcaaagtgataaaactcttttttgagaaatttagtggacttcgtaagttgagacttcctaaggacaggtggacagacaccagcttggatttaatatttcattccgaggcacttttcattttagttgtaaatttctgc

SEQ ID NO: 672294 - DNA, 798 bp, Homo sapiens
cattacagttttcatatgaagccttggcttgtcttggattttcattgagaggtgtcatttttagtaacatagtttttttcagagaagacctttattttctagagaattttcattttatataagagaaaatgtaatcaatgataatatagcaaggtgaggtttaattatgggtttgtatgacaagttaatgtgactaaatgaaatagtctttcatgagactcagatatgaccaggctgcatgattttgttttcttatttttctcctttaggaaggcacatcttcatctggaagcaaacgctgggtttcacagtgggctagtttggctgccaatcatacaaggcatgatcaagaagaaaggataatggaattttctgcacctcttcctttagagaatggtattctctttctctctttcattctttatcccttttttcttctctttctccatttctctctctttctcttactcttctctgcttttttgtgaatcatatatcagttgttattataaaaaacaagccaaatctatatagtaagaagttaaacctaaataaacatattcacatattctcatgctgataaatgaatttattttataagtaaaaggctgatttttattagatattgtatattttgggggattttaagcaggggacaaattcaaagtgataaaactcttttttgagaaatttwgtggacttcgtaagttgagacttcctaaggacaggtggacagacaccagcttggatttaatatttcattccgaggcacttttcattttagttgtaaatttctgc

SEQ ID NO: 672295 - DNA, 656 bp, Homo sapiens
tcatcaatgcttgtaatgtcatctacggcttcagtgaggacatgtatatgattctcccatgtacgcttgtacatttccatggtgtttttgaccgcttgacttttgggtcttgcagccaaagcaagtgcagcattaataatctataaagataaggattgaaaaaattacctattggttgcaatgttcactatttgggtgatgggcacactaaaagcccacacttcaccactatgcaatatattcatgtaagaaatctgcacttataattcctaaatatataaaataaataaaaaatattaaaacaataaaataaaattaattaaattatactcattcatrttaaacataaaaaatggaatttaaaaaaatctgtaaagatgtagaacatttactcagtgatttatttcaatacattaagtgtattaaaattagattatttaaattaaattatggttaaatacattcatcatcgacaataggaaaaacagtaaaatgtctccatatatacagtttatattgaaaagtacaaaacgttttatatttattagtataaattatataggtataaataataatttttatttttaaaattttcctactccctctattattgcagagtgagttttttaaatataaactttgttaccataagctcc

SEQ ID NO: 672296 - DNA, 596 bp, Homo sapiens
tcccatggcaggaaactcaccatgtgccactcctccacatccaggtagctctaattgctagagtagaatgaactgaaacttgcctctctgcagcttcctaccagcagtcctcactctcctctctagagcaattacaaaacaaattgtttcccccttcccatgacagcctttcaggtccatgcgagctctcatgacccttcttttctctaggccgagtgtcctattttctttacatattcccaataggactagttttrggttctcccaccatcctggccacctaggcatctgtatacgctccaactttaaaaattcagcattgaacatattccaccaggcagggtctaccaacacattccttctcctggggcatttgacattcaagcctggcctctcattgtgggaggagaggtcttcgttccctaagacagacatttcagataccaacttacagctgggggagacatgaagaaccaagtgccacctatgcacaaccacatccaggacttaatttgcatagcttcttaatctgtgggggacaatctgcatgccacttgggcctgctctgttagtctgtaagtttacccagggcagat

SEQ ID NO: 672297 - DNA, 593 bp, Homo sapiens
taccatgacttctaaatctcctacctgccaagaaactcagtgctaaatctagtgctcaactgcagcacttaactcacttctagtgccaccttctagttcattattgagctgtcttcttaaaatgtttatttcagttctcctacttaatgtgtgttataatcttttaagtatcttcaaatacattttgggaaagggcaagaaataactacttgttaccaaagtcactgagtcccgtggttccttctcagctcgcacccacctctgcccttctctaacttttgatgctgctgctggctgtcacatggaaacaccctccttgttccatctctgtcatgctctgtctctactttctttgctctctccttgtcctgcctgaggcagacacagttcctgccatttgccctagttctctcttcccyttgtttctactttctttcatccccaccccattctctctccaatggatgtcccactcagtgccatggttcaactaggactgagatgtcaatgacatgggtgccagttcaggctcaagccccaggactacatttccagtggcctcttcaacagttcttggaaatgctatgggtacc

SEQ ID NO: 672298 - DNA, 636 bp, Homo sapiens
ctcagtatttaacctcataaatttccagttattgtcctatatttacacattgcatctgctggagaagtctgtgcaatttattactacgtggaagctaaagggacacaaagagggcgaatcttctgcttatgcccctactatctaagtcagattgctcatgattaggagcaaatagtctcacctacctccacccttttgcatttatcttattaaataacataagggccaaatttccttgactttccaaaatcatctcctatccatccctgggaccctgaactgctggcctcaaagcccatttgagctgtcaggcatttcctatgctgtacctctcagtttcctgggctgccagatcctcctcctctgaaaggtcaaacagtactaaaacctcacctcatctggctctcagtcccctttgtttctcttatattgttctgccattgccctaaagccaaaagatctttggggcagyggccctgtttggtgtttggcacaatttcatttactgaacatctcgatgtacatttatgatgccatataactaataataaaaacaggacagcctagggcatcgttttttattgtcagctccgtggcagctgtgggggatggggaggcagagaatagagagcgcag

SEQ ID NO: 672299 - DNA, 663 bp, Homo sapiens
taaagatcaataaattcttttattatagttctcaactatattaattctagcttacttaatcaccaaagtgaataactcttttaaacaaatacagaaatttatttttaatatctcactaagagccaattttaaaaacaacaaaataccactacacacttatcagaayggccaaaacccagaacactgacaacaccaaatgctggcaaggatgtagagctacaagaactctccttcgttgctgatgggaatgcaaaatggcacagccaccttggaggacagtttggtggtttcttacaaaactaaacatactcttaaccatatgatctaacaatcacaatttttagtatttacccaaaggagttgaaaacttatgttcgttcaacatgtacacagatgtttatagcacctttatttatcattgccaaaaactagaagcaactaagaagtccttcagtaggtgaatggggaaatactgtggtacgtacagacaatggaatattattcagtgctaaaaacatcaaagagctgtcaagccatgaaaagacatggtggaaaattaaatgcacatcgctaagtgaaggaagccaatctgaaaagcctacaaactgtatgattttaataacagaacattatttaaaaggcaaaactatggagacagtaaaa

SEQ ID NO: 672300 - DNA, 557 bp, Homo sapiens
tactttctacaagtaaggggggagacttacaaataagttgttagtatcaattatacttcactaaagctgaaaaatcaatgaaacacatgaaaaagtgattgcataaaattttagggactgtaaactcaggattaaaaacttctatcatcttctcttgtctacgaataagttgttattcttgggagaaatagaatagcaagataaatgcagccatggaatggggggcaagtgtagagactcagggagcctggagatctacattccagtcctacctctgccatttacttccaggcggttcagctggccttggtttctccatttgcaaaatgaggggcttggaccagatgaacaatcaaatcctactggctctaacattctacatttctgtgggagaagagcaatcctataaaagcagagaaggtgtacaacttgagcattccctcaaacacaaaagttcatcctcatgaaacagggaaarcaagtaactgcaaccccagagaggtgacagaggcctcgggaaggggccattttaggagacagacagcaggactctagga

SEQ ID NO: 672301 - DNA, 1755 bp, Homo sapiens
aaagaatcagaatatcgttatctgcatgagtgtgtcatatacacagatagcaagacataatggagctttgactgttcatttggtaagtattttaaaaacccagaaataaatgactgttcactaaaagttacacatttgacagcttttcactatatcaggtcataaaagttttattagcagtactactatttctgtacaattttataaaatatgaaatgccttcagatggtgtgtttaaatgaaatcatgcaatcttcrtcataaacagccacacagaacccagcatttcatcatgaaagcaggaagacatacgggcagagtgcagatggagctgaggcaaatgaaatggaaggggaaggaaaacagaatggatcaggcatggagaccaaacacagcccactagaggttggcagtgagagttctgaagaccagtatgatgacttgtatgtgttcattcctggtgctgatccagaaaataattcacaagagccactcatgagcagcagacctcctctccccccgccgcgacctgtagctaatgccttccaactggaaagacctcacttcaccttaccaggtaagtttaaggttagaaaaaaacaaaacaaaacaaagacaaatctttgacaggcttacatagcaaatagtgcagtggcaaatctatacagagcagatcagcttttgaaaccaatagcaacattcttcctattctttaaaaactaaggcctgggaaatgaggcaagagatacctacctctaccttgttcttttgtttcttatttccttgcttccttccttccttcctccctccctccctccttccctttcttccttccttctcccactttttctctgtttctctctttctttcttccttgtcttattacaaagctttaagagaataaaacttggaaggagtctgtagttcttcacataaaatgaacctcaggcattctgtggaaaaggaaatacaacattgcttttaaaacatactctcagtcttcagacaaaaagtgaaatgctaatgatcgacaattttcagatgaacttgggtactttaatcacttggtagctgtgggagaattaagcgttaaagggtttgtcgcacactgcactgacaccaaagtttaaaaacactctatacactacccaagtggaagaagagtcaacatagctatcactggcatttgttcccagacgaaggaattggggtgtggaaagtgggtgtggggaatctgtccttgcggagggcatgaagaggagcttccacattaggtttatctgcctggagtgttcaacagcctgacaaactcccagctccaggctcactcttacagtcacaaattatcatctactttttgatcattatttcatatgtactttccaaatttatatttattttccaaataaaatgttcttaagaagacaatttagttaaaaaaaaaaaactccttatcaaaaccccattttcactataatttagttgttgggtcctagaaggctacaaaccccattttcactataatttagttgttgggtcctagaaggctacaaagtacaaaaacatgaccttgtttcaaaaagtaaatttttacgcaatgaaatttagtatttgggctgggcacagtggctcatgcctgtaatcccagcactttgggaggccgaggcaggcgattcacctgaggtcaggagttcgagaccagtctgaccaacatggtgaaacccccatctctactaaaaatacaaaaattagctg

SEQ ID NO: 672302 - DNA, 1574 bp, Homo sapiens
agtattcaacttaattagtaaacaaataaataaaattaaaatatctatcgagttagcaataacctctccaaatatccagtgttggtgaaggctaaatgagacaggcactttcacactctgtcagaaacaagatggtattgcataccaggaatcttaaaaaggttcatgtaatttaactcagcagatctctttctaggaatgtatctcaaggacttcattttaaaaacagactacactgtattcacaatgatagttataaagtttataacagtgaaaagtttgaatcctaaatatttggagaaaattcccatataaaacagaccacaggtgtacacaacaaaccaaactcataatacaatatatgtatattgataaatatacccatgggctttagaaagcagttttaacctatttcagtgccctcatcagctgctgaatatgaaatgagcttatagttctttttatattccaactgtaactcaagtccccactggtgtgtttgtcaaaactttgctctgctccgagtttctagcagctgttctggaagtttccaggagcccatacatgctccaggagagcctttcagctgctttccatctcccctggctcccacggccactcgctcacttggctacagatggttgtccattagaacaactagtgaccatgactgaagtgcccctctggcctatggaggaggcactttctcctctgttgcctcagcacaaccgagaacaactatgacatttattatgtctctctgagaactcagggataagggaagggcagcccagaaaggatcccaaaccccaccttaaggacctaccaggacccaagaagatcacacacagtgaggggccctcaacccttcccaaaaggactctccatatatcagaaatgaggtgtaacccaagcccactgctcacatgctcatacctcaagagagaagatgctgtccatgccttaggctgattggggagatggggtctcactctgtcacctgggctagagtgcagtagcacaatcatagctcactgcagtctcaaactcttggtctcaaacaatcctcccaccttagcctcccaaggagctgtgactacagatgtgcgctaccaccccaggctyttatccccattaatgtggactgtctgactcctatagttaggatcagagctcaactcacttctcaaagtttgtgttagtcaaccttaaataacaccaatagtctagtcagtgtggtgctgtgcaagctcattccagtacctcgtttggaaaggtgaacagattacgtttgaatattccccctaccatagttcaagtcctgatttccaacaagcagcttcttagataaaaaaatggagggagttactaagacaggagttggcaaactaagctcactggccaaatctggccagctgcttgctttgtaaatagagttttattgggacaaaaccatgcctatcatttacatactgttcatgactgtttctgtgctgcaatagcagagatgaagagtggcaaaagagaccgtgtaacctgtaaagcctaaaatatttgctatctgggcctttgaa

SEQ ID NO: 672303 - DNA, 653 bp, Homo sapiens
tgtagtacaagatttgactttcacaggattgtatagtgacgtgctagtcttatttttattctctacatagaaacataggtactaatgtgaaactgatgtatctttcataattctttcatattcagtattattcattaattacaaaacaagttatttgtataaatgacattaagaaaaaattaaaacagacatcattttgatttagctcttgctgcctcactctgttttccagagacaacattacttggaaaaaaacagcaagaaaataactgctgtataactcaatttcctgtgacaaaactacgctgttcaaaatctgacaccttttagacccagtgggtaatgctcctcgactagaaattgagaggtgtgatctctgttcttaaagggcctgattaacatggaaaacagtagcacttgaaacaggctcactgggtatcattttgcttgaatttgcctttctttttttcagcaagttttaataatgcatttgactttataaattagtcagaaataccaacagcatgcattcactgtcattatctattttttatggctttgatttgtatgattaaaacatagcytaatcttcaaaagtctttttatgcttgatttcttttgagtataggtgagtgccataaaaacatcaggta

SEQ ID NO: 672304 - DNA, 593 bp, Homo sapiens
acccatttgagtttagccagatctctaagacagtctaatgagactcccattctaatgctcaaagagctttttatgaataacaattagcattggagacatttttttaagttgctaatattaatttcacagaaataaaatctaattgaattccttctggctctcccccattaagttaatgttatcgacttttaacggatgtcttaattaggctttcctattaatgggaatatggctcaattttcaaataagggcctaagctgccaatattcccatttggacttttaattaaggtgagaaaatattaaccaattacactaggttattgcctgggctctttgtaagatgaggagrtcacaataaaccaggcattcaaggagagtaaacgagggtaggagtcgggtttgggacagtggggaaaggacagtggggtttgggcccccagccatctggaggaggggatccagggcccaggatagttattgctccatgtagagatgtagatgtggaagcaggtttttaatacttacctatattcctccctgacatcgctggggtttgtggaaaactcagttggcaagtgtatcactttgatg

SEQ ID NO: 672305 - DNA, 669 bp, Homo sapiens
ggcaacaaagaaattgatggaaaagctatagtggaaaattcactgkgttgataggaaggctggagcaatgacttagaaaatggggtccagggtgctgaaattgaatagtcctgtcggcactgcccttgaattgttttccactcaagattctatgtcctgagacagagagaggccagttgaccaacattgtgctaccttcttgcttcttagtaggggaatacaaaaggccttaatttacagactcacccaaaagaggagagagaatattccaaaagaaataatgcagatgccaggaaaaggcgaaaatggatgttaggagatcaaaaccagaacatatctggagtagcagccttcaagatcttctgccatggcagccagtagaagcctccttaagcttaattaagggtcagcttaggctgctgattgttttgttttctgatggtaaaagctgaatgtctggccacacctcctgttagtttcctgtggctgctgtaataactcaccaccaactgggtggcttaaaacaacagatacttatcctctcacagtcctggaggccagaagtccgaaattcagtgttagcagggccacattccctttggaggctcttgggggtagtccattctttgcctcttccatcttctggtcacagttgacattctttgcctt

SEQ ID NO: 672306 - DNA, 581 bp, Homo sapiens
agataactcgtaattacaaataaatataaaagaactatgctgcaggagacaccagtagttcagtccagcagaagcatgggtaagagaggagaagggttgaagatcatgcatgggcagggtcccaattgctgatgctatattacataattgagtgtgactttctgatttgtgagtggccaccaaagtcttttaaactaggcaatagcgtgatcagatatgtgttagagaatttactcaggaagtcataagtaaaaaggattagatagaggtagagaaacagattcggaggatgtgacattaatctaggtgagagatgatgaaaacctaatttaggtcagtggctgtggaatggtgatagattcaagggatactgaagagccaaaatcagctggatgtggggaacaaytgtttatggccagattaatgaagtttgaccctctgtgtactgatttgagagatgtgattaatgatgattaagaaacaaaacaaaacacaacacaacaaaaactgaataaaggataaagaagaggtttggaacaaaaacataatttaaattctaaaattcatttgtgagttagttg

SEQ ID NO: 672307 - DNA, 2702 bp, Homo sapiens
ccatgtgtatgtatgtgtgttcatgcacataatttaagtagcaggcagcctttgcattttcttgcatcttgacctaataaagtctaaaaatgttttccaaagttgtttggaattctttgggagtatacacacaccaagtgaaacatggaaacatttttaaaaatatgattcctttaattgaagatcaaagtagccatttcatacactttttcttgcatcatattaaattattttttcttttaaaaagtgtattgctgttgcatgtgaaataaatatttggacttagtttatcactggagattaatctgaaatcatattttctagccttaattagcattcatttgcttaattgtcattctcagccccatcatttccatttttcactaacttgaacaatgctatcttctgctgtttgcactttaatttaaatttctattaaggtttatgaacagtaataaggtcctgtttgaatattcattagcttctgaattgtgagctatgaaaaggtgctttcttttaccttaatgaaactggcacagcatgggactgatcagttgtgacatttgatttgaggcatccagtgaattttctcattgtttattgacacatcttgtccaaacagctccctcgcaagtgagcggagtaatgaaggagagagtactgcagcggagtgtcgagctttcctggcaggaaccagagcatcccaatggagtcatcacagaatatgaaatcaagtattacgagaaagtaagtgctaagagcaactgaaatgtacaatgtgctgtgtgtctcatgtcatcctactgtattgtagactaaagttggtcattatgccaacaatttggagctacttcaaacttcgtagttaattttagccatttataataaccatctctgtgaatctctggcttatcattataaatgtgatttctgtgtattaagtttctgtgttacacaaatgaaagtatcccatttgtagcatatatatttatttatttattcaatttctgatattgtagtaattagatgtaggatattttagtaccacagaaaccacacagcccaatgcattttgaaaaatattttctttagtatgtctgtttgggaccttaatggtttgtttaatttatgtggtttcagtgatgataatgacctcaaataatttaataatttgaaataataagaatattttgtataataaatatgtagttcttcagacttacaaatcagatgatgttatttcactcctttaaattcctcctgaaatttattttatatatgttttaataatcatgwatgggacttatttacacctctccttccaggaaaaatattatggctttttagcacccaagtgctgcctttttaatccacctataatgactaaattttagtaactagcgatacatctgagtatatgagtatatttatttctgtttcatttggaaagagagagaaaatgtttatgtgagccatgttcacagatcgtgatttaaaaccccacctcacagacagactcagtgcaaggtttgaaacgtggaaaccattgctattaccaacagtaacagtaataagtgttactatttttggcttacctgagttacctgaagtgctataatacacataaccattttaactgtttagacaatagaattagaaaataggagcttaaagctttgagaaaactttggggatgaatggacatgattaaataaattgaaatgtatatagtacattggcaatagatacctttgtttttttaaagaaaaattagtttaaaatatgattttgttttaatgttcagattaagtttaaaatatttttgcttgttacttacattatgaattcatgacttcatggctaaggttgcattttatatgcttcatttatcgtcccaacaaatgtgttttagaggggattattgtttttaatgctggttttggtatatctgttttcccatgagagctatcagttatattctctgcttaaattgcatccaatttcaaaagcaatgaaacacataggtggtaagagtaaagtttcttacaatataaatctgaaatattttgcaaatattttctctagaataaatatgttcaaatcattttttggccttacagaaatctacattcactaaatttgcatattaggcaactaaaagacaataataatattgtattgtattatattgtaatgtatatgcacgcatgcgtgatgtttgtgtcacctgagttatgcctaggtctttcgtttgagataaatacatgtaatacaaactatcatttttataaatgattataatgaggacaatcacagatcagtttgagtgaatcaagcttaagtatatatttatttacacttttgcaaatctcactgtgaaggcaaatcaaacaacttgattgacattttaagatttcaatgaagaatttcattgccagataaagttgaacacatgtatttattatacaccaaataagaactctctaatattgtatattatgaagtataatttttacaacttttattcataaatagcttgtgagaatcatatcaaggaagatttaaatttttatttatttaaatattgttttgatggagtttttatatgcttgagtttttacatttattcccttcttaatcttactatatatgcacataaaatatgtttgataatgataggataaaaattgttaataagcata

SEQ ID NO: 672308 - DNA, 645 bp, Homo sapiens
aaatttagtcagtatcatgatgtttgctaaggtattccaatgttaagttccagaaaggtttgctgtgtctcatttaaatctctgaaaactttatttgaagatgcaattctattcagataaattgtacactttgttttttgtgtatgttcacatcacctctaccaccaccagtactttctccaccattgtcatctactataaacagcttttgggttgttaaagaaatacttagatttttgtggatccacttgggaagctattacttactacatgctacttttgattatgcttaaatgttgctatataaaagaacataacttggcataaatgtaagtcaaatcacttttttccccatctttattcatggaccttttggattttatacatcatacagaagaattctatcaaaaaaagayaaatttaaaataatagctaacttttcttgaatgtgctgcaatctgtgaatacaataattatttatttatttttactataaacttatgagatatcactgttattgtccctagtatagagctacaaaaactgaggcttcaaaaagccacaaaatttgtccaagatagcctggcaaacaacctattatacctgattccaacccaggtctactaacattaatcaaccctaacc

SEQ ID NO: 672309 - DNA, 576 bp, Homo sapiens
cactcaatttatgcattgtttcttcattgtcatttttctcacccccctaagcccatgagagctggttcacaattctgttagataatatcttaaatcccacaagactcggtgtatacacttctgtcatcatatttttagggtgatattgcaattgtggattccattctgcatctcttgcatcagcctttgttctactcgtttctttaatgaaacatttagcacagtacctgataagaatgygcacttgctacatgttcgatgaataaatctataaatgcagacaggaacatgtggataacagatataaaatagtcctgacgatatgattataagtttacttatttgggatgaaagataacaaatatgttagaaaacaagcattgaaaacaaattagaataggcactaataactctatttgataagggcagacacataaaaaccaaagtgtagaatttaccatgaagatttgactttgaggcatttagtaaattgatataagcaatgaatttttaaaatttaaaaccttttgagctagtctcctaaataagttgcatgtgttaacatttactaatggc

SEQ ID NO: 672310 - DNA, 908 bp, Homo sapiens
agttcacattcagatgagaagatgatacaaggactgtgagaaccaggatatgggaagcatgaaggccatcttaaaatctgcctgttgaatgtggtattgtcagtttttattctggaaaagaagcttattttcctgtaaaaatctgggaattgaagaacatctaaaacatagaataaagctagtttatatcctgtatagattcctccttaaaaaaaaaaaggtcaaataaagggatatcatgcacaggacaaccaaccttgcaatggaaggcaatgtagaaacacctacagaactgctcatatactgtctatgagcagcctgaaggaaaacacatcaaagtatattatgatagttatgagattagtcagaggagttttgaaaagatactctttgacctaggtcttgattaaaaaatgacattaaaataatgatttttgtctgtgaatgggtgaattcasaatgttaagtatgaaaagccaagcttgatgtggtggagaagccccttgtgaaatacgtacaaccacaggaatttgaatcatattattttgaatatgtaacataatatcttaatccatcaggagcaaaatttataaaataataaatttaacaataactttgatagaatatgagactgtgaattaatcaaatttgtgttcaataaatgtttgctaagttaaataaagcatttccaaaatgataagtgaggttttttcaataattttgtaaactttatagtcacaatgatggtaaacttgtttttaatatttcttgaatgatgtaataaattaaccaatgggaaaaagtataaaaatggaaggttaggatgagaaaaaataggttaatatttccaactatttcgactatttcctccctattactgttaattgaaaatagttactattttactt

SEQ ID NO: 672311 - DNA, 623 bp, Homo sapiens
ggttttattatcaccaatcaaaatgtcttggtatttcttaatttaaacaaattcattttataggaattacattgctgagaattcacaccatgacactgacgggacttataatagtggttctaaagcctgcatgtgcgtcagaataatttggggatttgaggtgacttgttaaatgtacagtcactgggtagccccctgtaagattctgatttagtacatttggggtggaatccaggcatctacatttttaaaaagcaccatggccaattctgaatcatggtcgggtttgaaaagcactaagtttgggcaggcctgatttatttcaaagaattttcaagcatatttagttgtgccgttcagtaatagtagcttctcttattactgtgtgtatcccagtaaatctcttccccatttactctttcatcgccccactttgggttcttctgctctgccgccatctatttggcctgtacccactgttcactaatgaaagcccgtagcttctaaaaygggccaagattcacagttgatataagctgagaaagactgacaagttattctgccgaatgatactggaaaaaagaataggatagagggctaatgatgttattttatttttgtcc

SEQ ID NO: 672312 - DNA, 636 bp, Homo sapiens
atgtggtccaacacaatggttttccaaaatgaattcttctactaaaagaatctcccagaccgagttttacgataaaatttaccgatatgtgttttaccagaaactaaatgataaaatacaaaggcaaaataaatatatggggaaaatatataaggcaaatgcaaataagaaatgtagagaagccactattaatattmgataaagtagaaattaagataaaagcataaaatgggaaaagataatacttcataaggataaagaatgtatgagccatgaattttattcccttaccgacaggttgaaatacaacaaaagctgttataaatacaaggggaagtggacaaatccacaatgattacaggaaccattaacacaattttagaaactgaccaataatacaacatatgaaacaaatgagaatttgaatacacaactgaaaagcttgaccaaatagatacataaaaaataaatttcctaacagagcatagaaattatttttaaacatctatgggacatttaaaaatggagcatttattaggccacaaagataacctcaatgaatttccacagcctattacaatggtattaccttgaagattaaatacattataccacactgtcattaaccaacaaaca

SEQ ID NO: 672313 - DNA, 636 bp, Homo sapiens
atgtggtccaacacaatggttttccaaaatgaattcttctactaaaagaatctcccagaccgagttttacgataaaatttaccgatatgtgttttaccagaaactaaatgataaaatacaaaggcaaaataaatatatggggaaaatatataaggcaaatgcaaataagaaatgtagagaagccactattaatattagataaagtagaaattaagataaaagcataaaatgggaaaagataatacttcataaggataaagaatgtatgagccatgaattttattcccttaccgacaggttgaaatacaacaaaagctgttataaatacaaggrgaagtggacaaatccacaatgattacaggaaccattaacacaattttagaaactgaccaataatacaacatatgaaacaaatgagaatttgaatacacaactgaaaagcttgaccaaatagatacataaaaaataaatttcctaacagagcatagaaattatttttaaacatctatgggacatttaaaaatggagcatttattaggccacaaagataacctcaatgaatttccacagcctattacaatggtattaccttgaagattaaatacattataccacactgtcattaaccaacaaaca

SEQ ID NO: 672314 - DNA, 598 bp, Homo sapiens
gtgttactgatttccttgctttttctcaaattcagcagaatattcctgccaggaggtctctcatttgctctttcctctgcttgaaatgctcttcctcaaatattcacttggatcaccatcccacattcttcatgtcttgactcaaatgatacctcctaagaggacttaccagcccctactctagtctgatcatgattagcttatctagaattcttttctttggaatcattattacaatctgagattatatttaatttcaatcttgttattacaagcggtatgagagtagttcayggtcacatccttactgtctagaacagtgctcagcatatggtagtgtaaaatttattttaaaaatttaccttcagatacccctctgtgatcagtctgattttccatcttttataggaaaggtaactgagactcaggatgatcaagtcactttgtcaagatcacatagtaaatgatacagcctggatttgaagactgatctgacagtaaatcttacacttctagctgctataccatattgctttcctttttatgctatactgtcttcactcaataattttggaaattaagaatgctgaaatttcca

SEQ ID NO: 672315 - DNA, 625 bp, Homo sapiens
tgaagtaaatacaaattaaaatttggaaatctttctccagttagatatgttagaaaatatctgaaataaaagattaacttgatttctgagggaaattagatcaaaaggaaatataaatttagatgggaaattgtagtattgagtaaacactcatagataatttaatagaaactaratatcctaaaaatgaaaaattatgtaaaccttcctcctctctcagacattccctgagaacgttacaatatatttcatattataaaggagtaaaaaacagctgacagacatattggaaatgttctgttttagtgccagaacaaaaaaatgcaaattaagtcaacaatgaaatgtcatttaaaatgctttttaaaacaaaaatcccacatgttgttaatgataagacaacattcttttggaaagcatctaaaattttaagaattactttttttctattctctttccctaggctttctcttccagtggctaagtgtaattcattctgccttatcaagtattattccaatctccattctcctccattgtccacacacatcacttcaacttagggtaacatcatagctatctgaattcccacaattatcttatgtttgtccttcagcatccattc

SEQ ID NO: 672316 - DNA, 581 bp, Homo sapiens
atttgatgaatgaatgaatgaatcaatcaatcaatcaatgaaaattcatgaaaagtggaatatttggcatagtattatcaattctaggatactttccaaaatatacaatccttactatcagaaaagtgtacataattgtgtttataatgacattatttaaaataaagcaatattagaaatcatytaaaggttcaaatacagagcattatttaaatagattaggatggcagtgggcacttactgtttgtttgtttactttaaaaattagttctcctggaaaccatctctccttctttcttaccattatgatttataagtaatgggctccacttcctcttgaatagtaggccctgactggcttaacctaatcagaatattccattctcccagaagcaataactggtccaggaattgacaaagaaaaaccattcagaaccaatgtaaatgaaagataattgttaaggcttcaagagaagaaaatgtctttttcctttgagaatagaaagtggaatgtgattatagtttaaagatctgtggtctggtacaagggcatcaatgtttcatttttaattaaactttta

SEQ ID NO: 672317 - DNA, 608 bp, Homo sapiens
gggtgttattggggaaggaataggacagatttggagaacagcctctgtaaagcttcagactcagttaatttgttctttcttccctatttgtgcagggaagtgggtagaaggatgcttaatatgttatctgataaatgttcatcacaccaagagmatctcctttgcatcctgggagtagtttctgaaaaaagggaatggtcccaatttataatctggagtttgacacatgcatgacctgcagggactttcaatgatgccaaggtttggaagacataatagaggaaaatagctactgctgtgtaacaaatttctctacaatgtgaccatttataaaacaaacatttattattgtagtttgtgtaggtaaagtgcccagccatggccagactaggtacctctagctcgaagtctctcttcttcactgactgttggcttgacgtcttcttcagtttcttactacacagacctctcataagactgccatgcaacatgcacctgacttcccctaaagtaaacagtcagagaggaagtgataaagagagggagggagagagagagacattgaagactattttagaaactacctgtcacataggagaattatgatg

SEQ ID NO: 672318 - DNA, 570 bp, Homo sapiens
gtgtagggaaaatgaaagtttcactggctttggtaggttagtttgccagcattgcttatatactttccctcagctttttgaaaatcagatactctccacatgcagagataatggtactcatttatcatcataagaacatgcacttgttcttttgcaatagtaatgtgaaaggggctcacatttgcaaggttgttagagttaaaggtaaaggctatgtctatgaaacatacatatatatatatattttttttttttttttttttttttctgtgtgaacccaatttaactgacccaatagcaaatgaactaacttgcmtagataattcattatgtgggtagatgggatacagagattggaaaatgtcattggtgggttatgtatgtcagttggtagccagtataggtttgattttttctgatgctctggccagcccagttcttttggtttaaagtaccattttttcttttgatgtagtaagaacatttttctgtataaaatagtccattccttggaatggaaatggcattagatctttgtaacttaggtagtttttagcactggattgttta

SEQ ID NO: 672319 - DNA, 570 bp, Homo sapiens
gtgtagggaaaatgaaagtttcactggctttggtaggttagtttgccagcattgcttatatactttccctcagctttttgaaaatcagatactctccacatgcagagataatggtactcatttatcatcataagaacatgcacttgttcttttgcaatagtaatgtgaaaggggctcacatttgcaaggttgttagagttaaaggtaaaggctatgtctatgaaacatacatatatatatatattttttttttttttttttttttttctgtgtgaacccaatttaactgacccaatagcaaatgaactaacttgcctagataattcattatgtgggtagatgggatacagagattggaaaatgtcattggtgggttatgtatgtcagttggtrgccagtataggtttgattttttctgatgctctggccagcccagttcttttggtttaaagtaccattttttcttttgatgtagtaagaacatttttctgtataaaatagtccattccttggaatggaaatggcattagatctttgtaacttaggtagtttttagcactggattgttta

SEQ ID NO: 672320 - DNA, 570 bp, Homo sapiens
gtgtagggaaaatgaaagtttcactggctttggtaggttagtttgccagcattgcttatatactttccctcagctttttgaaaatcagatactctccacatgcagagataatggtactcatttatcatcataagaacatgcacttgttcttttgcaatagtaatgtgaaaggggctcacatttgcaaggttgttagagttaaaggtaaaggctatgtctatgaaacatacatatatatatatattttttttttttttttttttttttctgtgtgaacccaatttaactgacccaatagcaaatgaactaacttgcctagataattcattatgtgggtagatgggatacagagattggaaaatgtcattggtgggttatgtatgtcagttggtagccagtataggtttgattttttctgatgctctggccagcccagttcttttggtttaaagtaccattttttcttttgatgtagtaagaacatttttctgtataaaatagtccattccttggaatggaaayggcattagatctttgtaacttaggtagtttttagcactggattgttta

SEQ ID NO: 672321 - DNA, 804 bp, Homo sapiens
ctgtaattattccacaacactcccattatacagaggtaccatattcaagcacatgtttttgattatttacatcactataaatattaggacataatatataagtgggcaataaatgttcttgaggctaaaattgagatcaattacaattgtgtattttgaattcatcccacatagaagaattcctcagttcaatgctgtgcacacgataagattttactatttattgtcaaattattctccaggagtgctgtgcatttccaccagcatggataggagtttctgcctctcagtaaaatgcatgytttaatgttatttgtaatagattatttcagtctaactaatataagcttattttaaatgatattatagaggaaagctacataataatatgaaccattcaaataattaagaatgtatatgaaaatatagaaagagggaatatatctgatccataaagctcacttatataagccattattttaacagtcactttcatattctatgtaaaagaagtaggaacagtacttaactactctccttgtggtaaaaaacaatagttgaatacatatctacacaactgccacacaatttttaaaaaagcctttaaaactgtaaaaacaacagcagaaaaggaagtggacacttcaaggaaatttattaatattccctccacgttattcagtaactataatatatatatatatatatagtaactatgatatatatatacagtaatatatatacagtgactataatatatatagaatgattcctattatttcatagctttcctctataatatca

SEQ ID NO: 672322 - DNA, 804 bp, Homo sapiens
ctgtaattattccacaacactcccattatacagaggtaccatattcaagcacatgtttttgattatttacatcactataaatattaggacataatatataagtgggcaataaatgttcttgaggctaaaattgagatcaattacaattgtgtattttgaattcatcccacatagaagaattcctcagttcaatgctgtgcacacgataagattttactatttattgtcaaattattctccaggagtgctgtgcatttccaccagcatggataggagtttctgcctctcagtaaaatgcatgttttaatgttatttgtaatagattatttcagtctaactaatataagcttattttaaatgatattatagaggaaagctacataataatatgaaccattcaaataattaagaatgtatatgaaaatatagaaagagggaatatatytgatccataaagctcacttatataagccattattttaacagtcactttcatattctatgtaaaagaagtaggaacagtacttaactactctccttgtggtaaaaaacaatagttgaatacatatctacacaactgccacacaatttttaaaaaagcctttaaaactgtaaaaacaacagcagaaaaggaagtggacacttcaaggaaatttattaatattccctccacgttattcagtaactataatatatatatatatatatagtaactatgatatatatatacagtaatatatatacagtgactataatatatatagaatgattcctattatttcatagctttcctctataatatca

SEQ ID NO: 672323 - DNA, 661 bp, Homo sapiens
tgaattcacatgagatttggttgtttaaaagcatgtggaacctgccccactctctctggctccctttcttgccacgtgatttgccggcttcccccttgccttccgccatgaacgtaagcttcctgaggcccttaacagaaatagatgttggcactgtactttgtgtataggctacagaaccatgagccaattaaacctcttttctttatgttacccagcctcaggtatttctttattgtaacacaaacacagactcatacaatattctaagattttacaaaacagcattttaaatttcactttagtattcacatcattcattactcacctgaragcagggtagagtgtcaatggagagtttgtatcacagcgccaccatggatcagctgacaaagaccttcagcaatcacttaacctctcggcttctttctctccagatatgtaaaatggcaataactaccacattgtgtcattaatgatgaaatgactgatgtaaagcacttagaatgaaacctggcttccgataagtattacatgttagttaatgtaactgtttgttcatatactcatagcctggtatttaatttcttctttcctctgccaacccccatccccacacccactacctgcaaaaaaaatcaccttagtcaacttattgaat

SEQ ID NO: 672324 - DNA, 1506 bp, Homo sapiens
cctgggaagtggaggtgacagtgatttcagcagtgagccgaaatcaggccattgccctccagcccgggtgacagggtgagactccatctaaaaaaaaaaaaaaagaaagaaagaaaaagaaaaagtgctatctagttccatttattatgaggatcaaactaaatagtgtatgtaaaaacatttcataaactgctatgcaccatacagagaagatattgggatttttttttattggactgaatccacaatcgagtaagtacagctgggaagaaacagacacatgtaggagaaagaacacgagagcctggcccctttgtgtaataagggactgtgtgtgactgcgtcagcataatgcagaaaacctgaacctaaagaagatcacacatgrgatcagcactccagagccacagcattcactatggaggcaccacccatgtgtggctactcaattaaaaatgaaacaaaactacaaatttgatttctcaggtgtactaggcacatcacaagtggtgaggaggcacatatggctagtggctactatattggatataaaaaaaaatttcattattgcagacaatttatggaaaggaaaggctccagaaaaatgatgaagaaaagggaaatttgaatttttttccaaaatgcaaaaagactgtctgagttcatccaagctgctataacaaaaatatcatccatggaggggctacaaacaatagaaattgatttctcacagttttggagtttgagaagtttaagatcaaggcgcctgcagattcaatgtctggtgaaggctcatctcccatatatagcaccttttcatgacatcttgacttggtagagtgggcatataagagccctagggctcttttatcaggacacaaatcccatacatgagggctacatcatgacctagtcacccaccaaaggccccacctactaataccattactttgaggatttgatttcagcatatgaattttatggggacacaaacattcagatcatagcaaagacaagtgaatttaaagagattattttattttgcagtggatcatgatttatggctttatagtttctgacatttctcagtttggcagaattagcttatattacttcagagaactgttctgttgttactgcttttaatgagaaaatacaactgtcttattctaacttaattctcagcacctctattactcagtcgtcattgctcatctagaacaaacctttcccgacagttaagaaaagggaaaggtttttaattgtttacttttactcattatgttatgtgctcatttaatgtgtgatctctgattatgtaagtttcaagatagaatctggaattaaagtcaaatgacttgaaaaaaaactggtataaatctaggttaaaacaactatataaaaataaatttgtgttgtttaatatactcaacattccatatgctggaggctgatttctactcccactactcatcacatttgaatgaatatgagaaaatcagaaca

SEQ ID NO: 672325 - DNA, 1506 bp, Homo sapiens
cctgggaagtggaggtgacagtgatttcagcagtgagccgaaatcaggccattgccctccagcccgggtgacagggtgagactccatctaaaaaaaaaaaaaaagaaagaaagaaaaagaaaaagtgctatctagttccatttattatgaggatcaaactaaatagtgtatgtaaaaacatttcataaactgctatgcaccatacagagaagatattgggatttttttttattggactgaatccacaatcgagtaagtacagctgggaagaaacagacacatgtaggagaaagaacacgagagcctggcccctttgtgtaataagggactgtgtgtgactgcgtcagcataatgcagaaaacctgaacctaaagaagatcacacatgagatcagcactccagagcyacagcattcactatggaggcaccacccatgtgtggctactcaattaaaaatgaaacaaaactacaaatttgatttctcaggtgtactaggcacatcacaagtggtgaggaggcacatatggctagtggctactatattggatataaaaaaaaatttcattattgcagacaatttatggaaaggaaaggctccagaaaaatgatgaagaaaagggaaatttgaatttttttccaaaatgcaaaaagactgtctgagttcatccaagctgctataacaaaaatatcatccatggaggggctacaaacaatagaaattgatttctcacagttttggagtttgagaagtttaagatcaaggcgcctgcagattcaatgtctggtgaaggctcatctcccatatatagcaccttttcatgacatcttgacttggtagagtgggcatataagagccctagggctcttttatcaggacacaaatcccatacatgagggctacatcatgacctagtcacccaccaaaggccccacctactaataccattactttgaggatttgatttcagcatatgaattttatggggacacaaacattcagatcatagcaaagacaagtgaatttaaagagattattttattttgcagtggatcatgatttatggctttatagtttctgacatttctcagtttggcagaattagcttatattacttcagagaactgttctgttgttactgcttttaatgagaaaatacaactgtcttattctaacttaattctcagcacctctattactcagtcgtcattgctcatctagaacaaacctttcccgacagttaagaaaagggaaaggtttttaattgtttacttttactcattatgttatgtgctcatttaatgtgtgatctctgattatgtaagtttcaagatagaatctggaattaaagtcaaatgacttgaaaaaaaactggtataaatctaggttaaaacaactatataaaaataaatttgtgttgtttaatatactcaacattccatatgctggaggctgatttctactcccactactcatcacatttgaatgaatatgagaaaatcagaaca

SEQ ID NO: 672326 - DNA, 1506 bp, Homo sapiens
cctgggaagtggaggtgacagtgatttcagcagtgagccgaaatcaggccattgccctccagcccgggtgacagggtgagactccatctaaaaaaaaaaaaaaagaaagaaagaaaaagaaaaagtgctatctagttccatttattatgaggatcaaactaaatagtgtatgtaaaaacatttcataaactgctatgcaccatacagagaagatattgggatttttttttattggactgaatccacaatcgagtaagtacagctgggaagaaacagacacatgtaggagaaagaacacgagagcctggcccctttgtgtaataagggactgtgtgtgactgcgtcagcataatgcagaaaacctgaacctaaagaagatcacacatgagatcagcactccagagccacagcattcactatggaggcaccacccatgtgtggctactcaattaaaaatgaaacaaaactacaaatttgatttctcaggtgtactaggcacatcacaagtggtgaggaggcacatatggctagtggctactatattggatataaaaaaaaatttcattattgcagacaatttatggaaaggaaaggctccagaaaaatgatgaagaaaagggaaatttgaatttttttccaaaatgcaaaaagactgtctgagttcatccaagctgctataacaaaaatatcatccatggaggggctacaaacaatagaaattgatttctcacagttttggagtttgagaagtttaagatcaaggcgcctgcagattcaatgtctggtgaaggctcatctcccatatatagcaccttttcatgacatcttgacttggtagagtgggcatataagagccctagggctcttttatcaggacacaaatcccatacatgagggctacatcatgacctagtcacccaccaaaggccccacctactaataccattactttgaggattygatttcagcatatgaattttatggggacacaaacattcagatcatagcaaagacaagtgaatttaaagagattattttattttgcagtggatcatgatttatggctttatagtttctgacatttctcagtttggcagaattagcttatattacttcagagaactgttctgttgttactgcttttaatgagaaaatacaactgtcttattctaacttaattctcagcacctctattactcagtcgtcattgctcatctagaacaaacctttcccgacagttaagaaaagggaaaggtttttaattgtttacttttactcattatgttatgtgctcatttaatgtgtgatctctgattatgtaagtttcaagatagaatctggaattaaagtcaaatgacttgaaaaaaaactggtataaatctaggttaaaacaactatataaaaataaatttgtgttgtttaatatactcaacattccatatgctggaggctgatttctactcccactactcatcacatttgaatgaatatgagaaaatcagaaca

SEQ ID NO: 672327 - DNA, 890 bp, Homo sapiens
cattaggagatatacctaatgctaaatgacgagttagtgggtgcagcacaccaacatggcacatgtatccatatgtaacaaacctgcacattgtgcacatgtaccctaaaacttaaagtataataataataataataataataataataaaagtaaagccaagatgatttactgaagaattgactgaggggaytgagagaaggagaagtaggttacagttggcaaaaaaggtcttggctagagcacatgaaagttgtcattgatgagatggggaagatcgtggcgagagcaggactagagaaatatcagggagctcaattttaaacatgttaagttaaatatgcctattcatatccaagtggtaatgtcaaacaggcagttgtgtactttggtgtgagttcaagaaagagactggagtagaaataaataaatttagaaataatagaaactacatgtttaggagaatcagtgccatactctcaatgtttttatattaagatagaaattgttcatatatgatatttgtatctttgaaatatttattttgtactccattttaatatatagtagataaatttatataaatttgtgattttaagtttatgttgacagattatgtaatgtattgacataggagaactttattacatttgtaaatttaatgtattaggtacacattacacagttttagtacgtagtaagaattcttttagtcattttgattgtactaaaattgtactataattgaagtacttaagaaatcaagtgtgttaagtttacaaaaacaacacaatgtctgaaggtacaaaattagccacgtttataaatgaaaccagtgttatttagaactccttaacattgagggattgcaaaaacctgctcaatttata

SEQ ID NO: 672328 - DNA, 890 bp, Homo sapiens
cattaggagatatacctaatgctaaatgacgagttagtgggtgcagcacaccaacatggcacatgtatccatatgtaacaaacctgcacattgtgcacatgtaccctaaaacttaaagtataataataataataataataataataataaaagtaaagccaagatgatttactgaagaattgactgaggggactgagagaaggagaagwaggttacagttggcaaaaaaggtcttggctagagcacatgaaagttgtcattgatgagatggggaagatcgtggcgagagcaggactagagaaatatcagggagctcaattttaaacatgttaagttaaatatgcctattcatatccaagtggtaatgtcaaacaggcagttgtgtactttggtgtgagttcaagaaagagactggagtagaaataaataaatttagaaataatagaaactacatgtttaggagaatcagtgccatactctcaatgtttttatattaagatagaaattgttcatatatgatatttgtatctttgaaatatttattttgtactccattttaatatatagtagataaatttatataaatttgtgattttaagtttatgttgacagattatgtaatgtattgacataggagaactttattacatttgtaaatttaatgtattaggtacacattacacagttttagtacgtagtaagaattcttttagtcattttgattgtactaaaattgtactataattgaagtacttaagaaatcaagtgtgttaagtttacaaaaacaacacaatgtctgaaggtacaaaattagccacgtttataaatgaaaccagtgttatttagaactccttaacattgagggattgcaaaaacctgctcaatttata

SEQ ID NO: 672329 - DNA, 3083 bp, Homo sapiens
tgcttggataacctattgatcaaaatccagtttttgaggtctattctagttttctcctaaatttacgctttctcacttgccatttaccaccatcgttcattgcccgttttcaatagtctcttcaatattattgccatacatagatctccagccttccattttgctcatagccaattatggtatagacctttgtaactagagtcagaagattctaaaatattatcactgaaagatcaaatgacatgctttggttacagatctgagcaagtatatcatatgaagaaaggcatagcttgattgataaaatagacattgtatataagtcccttactataaattatttctagctctgtgactgttgttcccattggttgttattcttaactgaaaagagtttattccaactataaaatcttgtttatgtaattattgtatccttattttwaaaatactatattaagtattcaactagataagaaagaagcactttatatatggcttttaaccatatctgctttttaaaataataaatgcagctgttccatacttttttgtaaaacaaaacaaaacctaacaaacaaattagtcccaaatagcttccaaacataatcagaagaaggctcagttacacataacatggcttttattggggaagctaggtattcttagggtttaaaagttctctctaaagatgtcctttgttttaattttaaagaaagtttaattaaagaaatctcaagttctcccttgggaaatagtattcttataatgataatattctttttgtgtagtaattattttatagattaaaagtgctggtgtttagagcccagtggaacttattgaaatgcatctgttcccaatgggttttcagaatatctatttagggaggaaaattgaaaccatcataaaagctgacatctggtacaattggatattcacaatttagattttatagaggtctctttaaatgacttctagagatcggcctataaatattttgtttaccaggacattatgaaacttagatatcattttcatgtcctttttaactaacttctctttcaatatttataccaaatgatgtagtttcccattcttttatgatatgagttcaccctcctatcaaaatgtccttctccagggagtgtcaatggtgtcattgaatcagtcctcttcatgtgttaccttctgtcccctgtctagtgtactagagaccacactgattataacctgcagtgactctcctgaccattcaccaatcttgttttttccagtggtgtcccacaaccataggtgctggaagcaattgcgttacctgtatccaaatgtcctatgacactgaaacttgactggtcatctgaaagtatacctttattcacagcaattgttataaggctcaagagatgtcagcataggctagtgtctagcatatggatctgattgctccaaatgcaaactagtagtagttctttcaactcacaaaatatgcaacagtgaggtaagtgaatgaatacatgaataagtgaatgagtgaaaatgatgcaagaccttcctagagcaccagtgatatacctttatttgattagctacttaattttttacaaccatctcccagttggcatgcccatggtaactgaaggaaaggagaacaactagtatatcatctagcccttctttcttacctcccacctgggtccaaaagccagatctttccacttctactaaaatttttgccataatttctgcttcagatcaatgggcagatatttttagagtaaagctcctccttgaaacataaaatatttcctcaaaatatattcacacttttggagaaatgtttgaaagctaacaaaaatgacaaaatagctgaaggataccttgtttgttttatttatatttttttctccacatgttttataaatcactttttatctaaagagatctgattatatattttggttgtggttaatttaaatctcaaagtgtctacccactaacatgttaccacttatgtcactgatgatggaaagatcactcttttcagctactccatggcccaagagaatattctaagataatgaaaatactttataagcatatgcattatcatagagaaaacagttttcataccatgctattcatagaaatgatgatcatatgatataaaatattaccatttccccaaaatacataataatagtgtcatattaatctcacataaagacactgtcattcctccttatccatcctgggtatagaatcttttaagggagggatttgatctgtgatggtctatgaatgtgtttgtgcctgattcctctaaagggcacttttttttctttttttcttttttggagactgagtcttgcactgtcacccaggctggagtgcagtggcatgatctcagctcactgcgacctcctgggttcaagcaattcttgtgcctcagtgtcccaagtagctgggactacagggacacgccaccatacctggctaatttttgtatttttactagggtcagggtttcgccatgttggccaggctggtctgtaactcctggcttcaagcaattcacctgcctcggcctcctaaagtgctgggattagaagggtgagttgccgcacccagcctaaagggcacttttaagccagttgaaaccaaacacttttaccaaaatggtgacacaaaatttatgtaggcaatatcacacttaaagttaaggcttttccttgtggcagagggagttggtattgaagcagcaacaattccttataggcagtggctaagtgcaaattcttgggctcgataactgagctgagttgacagtttggtagtgggaaggagaggaaaaatggaagtattcaaaatcagaaatcagaaaggcaactcgagtctaacgagatgtgcatagacgtggaaagaggtgcacctgaagccagaagccagggtgggaaaggactctaggccaagatcctcaaattagttatcttttcatttagtctctaaatttgaataactgctgtcggaaagatatcaatgaaacacagtgcttaaatgcccaacttaacatctttcaattg

SEQ ID NO: 672330 - DNA, 3083 bp, Homo sapiens
tgcttggataacctattgatcaaaatccagtttttgaggtctattctagttttctcctaaatttacgctttctcacttgccatttaccaccatcgttcattgcccgttttcaatagtctcttcaatattattgccatacatagatctccagccttccattttgctcatagccaattatggtatagacctttgtaactagagtcagaagattctaaaatattatcactgaaagatcaaatgacatgctttggttacagatctgagcaagtatatcatatgaagaaaggcatagcttgattgataaaatagacattgtatataagtcccttactataaattatttctagctctgtgactgttgttcccattggttgttattcttaactgaaaagagtttattccaactataaaatcttgtttatgtaattattgtatccttattttaaaaatactatattaagtattcaactagataagaaagaagcactttatatatggcttttaaccatatctgctttttaaaataataaatgcagctgttccatacttttttgtaaaacaaaacaaaacctaacaaacaaattagtcccaaatagcttccaaacataatcagaagaaggctcagttacacataacatggcttttattggggaagctaggtattcttagggtttaaaagttctctctaaagatgtcctttgttttaattttaaagaaagtttaattaaagaaatctcaagttctcccttgggaaatagtattcttataatgataatattctttttgtgtagtaattattttatagattaaaagtgctggtgtttrgagcccagtggaacttattgaaatgcatctgttcccaatgggttttcagaatatctatttagggaggaaaattgaaaccatcataaaagctgacatctggtacaattggatattcacaatttagattttatagaggtctctttaaatgacttctagagatcggcctataaatattttgtttaccaggacattatgaaacttagatatcattttcatgtcctttttaactaacttctctttcaatatttataccaaatgatgtagtttcccattcttttatgatatgagttcaccctcctatcaaaatgtccttctccagggagtgtcaatggtgtcattgaatcagtcctcttcatgtgttaccttctgtcccctgtctagtgtactagagaccacactgattataacctgcagtgactctcctgaccattcaccaatcttgttttttccagtggtgtcccacaaccataggtgctggaagcaattgcgttacctgtatccaaatgtcctatgacactgaaacttgactggtcatctgaaagtatacctttattcacagcaattgttataaggctcaagagatgtcagcataggctagtgtctagcatatggatctgattgctccaaatgcaaactagtagtagttctttcaactcacaaaatatgcaacagtgaggtaagtgaatgaatacatgaataagtgaatgagtgaaaatgatgcaagaccttcctagagcaccagtgatatacctttatttgattagctacttaattttttacaaccatctcccagttggcatgcccatggtaactgaaggaaaggagaacaactagtatatcatctagcccttctttcttacctcccacctgggtccaaaagccagatctttccacttctactaaaatttttgccataatttctgcttcagatcaatgggcagatatttttagagtaaagctcctccttgaaacataaaatatttcctcaaaatatattcacacttttggagaaatgtttgaaagctaacaaaaatgacaaaatagctgaaggataccttgtttgttttatttatatttttttctccacatgttttataaatcactttttatctaaagagatctgattatatattttggttgtggttaatttaaatctcaaagtgtctacccactaacatgttaccacttatgtcactgatgatggaaagatcactcttttcagctactccatggcccaagagaatattctaagataatgaaaatactttataagcatatgcattatcatagagaaaacagttttcataccatgctattcatagaaatgatgatcatatgatataaaatattaccatttccccaaaatacataataatagtgtcatattaatctcacataaagacactgtcattcctccttatccatcctgggtatagaatcttttaagggagggatttgatctgtgatggtctatgaatgtgtttgtgcctgattcctctaaagggcacttttttttctttttttcttttttggagactgagtcttgcactgtcacccaggctggagtgcagtggcatgatctcagctcactgcgacctcctgggttcaagcaattcttgtgcctcagtgtcccaagtagctgggactacagggacacgccaccatacctggctaatttttgtatttttactagggtcagggtttcgccatgttggccaggctggtctgtaactcctggcttcaagcaattcacctgcctcggcctcctaaagtgctgggattagaagggtgagttgccgcacccagcctaaagggcacttttaagccagttgaaaccaaacacttttaccaaaatggtgacacaaaatttatgtaggcaatatcacacttaaagttaaggcttttccttgtggcagagggagttggtattgaagcagcaacaattccttataggcagtggctaagtgcaaattcttgggctcgataactgagctgagttgacagtttggtagtgggaaggagaggaaaaatggaagtattcaaaatcagaaatcagaaaggcaactcgagtctaacgagatgtgcatagacgtggaaagaggtgcacctgaagccagaagccagggtgggaaaggactctaggccaagatcctcaaattagttatcttttcatttagtctctaaatttgaataactgctgtcggaaagatatcaatgaaacacagtgcttaaatgcccaacttaacatctttcaattg

SEQ ID NO: 672331 - DNA, 3083 bp, Homo sapiens
tgcttggataacctattgatcaaaatccagtttttgaggtctattctagttttctcctaaatttacgctttctcacttgccatttaccaccatcgttcattgcccgttttcaatagtctcttcaatattattgccatacatagatctccagccttccattttgctcatagccaattatggtatagacctttgtaactagagtcagaagattctaaaatattatcactgaaagatcaaatgacatgctttggttacagatctgagcaagtatatcatatgaagaaaggcatagcttgattgataaaatagacattgtatataagtcccttactataaattatttctagctctgtgactgttgttcccattggttgttattcttaactgaaaagagtttattccaactataaaatcttgtttatgtaattattgtatccttattttaaaaatactatattaagtattcaactagataagaaagaagcactttatatatggcttttaaccatatctgctttttaaaataataaatgcagctgttccatacttttttgtaaaacaaaacaaaacctaacaaacaaattagtcccaaatagcttccaaacataatcagaagaaggctcagttacacataacatggcttttattggggaagctaggtattcttagggtttaaaagttctctctaaagatgtcctttgttttaattttaaagaaagtttaattaaagaaatctcaagttctcccttgggaaatagtattcttataatgataatattctttttgtgtagtaattattttatagattaaaagtgctggtgtttagagcccagtggaacttattgaaatgcatctgttcccaatgggttttcagaatatctatttagggaggaaaattgaaaccatcataaaagctgacatctggtacaattggatattcacaatttagattttatagaggtctctttaaatgacttctagagatcggcctataaatattttgtttaccaggacattatgaaacttagatatcattttcatgtcctttttaactaacttctctttcaatatttataccaaatgatgtagtttcccattcttttatgatatgagttcaccctcctatcaaaatgtccttctccagggagtgtcaatggtgtcattgaatcagtcctcttcatgtgttaccttctgtcccctgtctagtgtactagagaccacactgattataacctgcagtgactctcctgaccattcaccaatcttgttttttccagtggtgtcccacaaccataggtgctggaagcaattgcgttacctgtatccaaatgtcctatgacactgaaacttgactggtcatctgaaagtatacctttattcacagcaattgttataaggctcaagagatgtcagcataggctagtgtctagcrtatggatctgattgctccaaatgcaaactagtagtagttctttcaactcacaaaatatgcaacagtgaggtaagtgaatgaatacatgaataagtgaatgagtgaaaatgatgcaagaccttcctagagcaccagtgatatacctttatttgattagctacttaattttttacaaccatctcccagttggcatgcccatggtaactgaaggaaaggagaacaactagtatatcatctagcccttctttcttacctcccacctgggtccaaaagccagatctttccacttctactaaaatttttgccataatttctgcttcagatcaatgggcagatatttttagagtaaagctcctccttgaaacataaaatatttcctcaaaatatattcacacttttggagaaatgtttgaaagctaacaaaaatgacaaaatagctgaaggataccttgtttgttttatttatatttttttctccacatgttttataaatcactttttatctaaagagatctgattatatattttggttgtggttaatttaaatctcaaagtgtctacccactaacatgttaccacttatgtcactgatgatggaaagatcactcttttcagctactccatggcccaagagaatattctaagataatgaaaatactttataagcatatgcattatcatagagaaaacagttttcataccatgctattcatagaaatgatgatcatatgatataaaatattaccatttccccaaaatacataataatagtgtcatattaatctcacataaagacactgtcattcctccttatccatcctgggtatagaatcttttaagggagggatttgatctgtgatggtctatgaatgtgtttgtgcctgattcctctaaagggcacttttttttctttttttcttttttggagactgagtcttgcactgtcacccaggctggagtgcagtggcatgatctcagctcactgcgacctcctgggttcaagcaattcttgtgcctcagtgtcccaagtagctgggactacagggacacgccaccatacctggctaatttttgtatttttactagggtcagggtttcgccatgttggccaggctggtctgtaactcctggcttcaagcaattcacctgcctcggcctcctaaagtgctgggattagaagggtgagttgccgcacccagcctaaagggcacttttaagccagttgaaaccaaacacttttaccaaaatggtgacacaaaatttatgtaggcaatatcacacttaaagttaaggcttttccttgtggcagagggagttggtattgaagcagcaacaattccttataggcagtggctaagtgcaaattcttgggctcgataactgagctgagttgacagtttggtagtgggaaggagaggaaaaatggaagtattcaaaatcagaaatcagaaaggcaactcgagtctaacgagatgtgcatagacgtggaaagaggtgcacctgaagccagaagccagggtgggaaaggactctaggccaagatcctcaaattagttatcttttcatttagtctctaaatttgaataactgctgtcggaaagatatcaatgaaacacagtgcttaaatgcccaacttaacatctttcaattg

SEQ ID NO: 672332 - DNA, 693 bp, Homo sapiens
atctatgctataaagccaattaatgtcaaaattgtgactagagcttacttaacagttcagatttcagaagtttatattctgtgttgtaggaaacagttgtatacctactatctagctttgactttctatcttagtgagaactcataaatggtttgtaattgttgccgaaaacaatgttaagtgaaccaaagactaagtctgtcagattttggtgaatgtgagaaaagagtcagaagagaaaggaaataaaatacgaggaaagtagagaggtatataactgttgttggggtgaattagatagttaatgagaagaaagtcagaaaactactgaaggcaaccacggtgaaattggcttccagatcaggccctcaggccagataggtttggccttgatggaaagaccattagaaagtatccaaagctgccattatagccttaatcatatgacctatccatcctcagtttctaacttggtaaactgagtgttagattacataacttctgaaatctcttccatcttcaaagtctgaattttgccctgaatgctttttagctcacagggaactagatttcaaggacctaamcacagatatcttaaaaaaaaaaaaaaaagaggcttgaggattgcttccttttctaaatgtacatgttttatctctctcattctttattatccatttctcttatttccca

SEQ ID NO: 672333 - DNA, 662 bp, Homo sapiens
ttgggggtttgycatggcaaaagtttatgtgtttagactgtaagtcagcaaaagccaggcgagatagccaaaaatcaatcaaaataccatttaaaataccttacggcatttgacctgtacggtccagggaatattgagaaaatgggagagtttatcatattcgaagtattttaaccttagacagaaaatacattttctgtctaaggttacatatctacaaatcttagattttcttttactctacggggatagtattgaattacccccatttaacaggtgaagaaactgaggcccatgacattaagacacttacctgggaagcagcctggttaagatttgaaccaggtctgtctaactccaaaccctatgctctgccccctccatctttctccctcccatcagggagaacttctctgtgcccatcaacaagcagtactaaaaatacagcaaataaaataaattcaagatggctctgtctctagaactcttctcagggaggctctgcatgcgagtgggaggcattagctccttggtcagggaggcacacagggtgactcatagaccctcaggcaccccagctgggagaacagcaggtgtttgttaccttaccttttaatcttaagctaactgctttattatgtgttttattaagcggaatatgc

SEQ ID NO: 672334 - DNA, 662 bp, Homo sapiens
ttgggggtttgtcatggcaaaagtttatgtgtttagactgtaagtcagcaaaagccaggcgagatagccaaaaatcaatcaaaataccatttaaaataccttacggcatttgacctgtacggtccagggaatattgagaaaatgggagagtttatcatattcgaagtattttaaccttagacagaaaatacattttctgtctaaggttacatatctacaaatcttagattttcttttactctacggggatagtattgaattacccccatttaacaggtgaagaaactgaggcccatgacattaagacacttacctgggaagcagcctggttaagatttgaaccaggtctgtctaactccaaaccctatgctctgccccctccatctttctccctcccatcagggagaacttctctgtgcccatcaacaagcagtactaaaaatacagcaaataaaataaattcaagatggctctgtctctagaactcttctcagggaggctctgcatgcgagtgggaggcattagctccttggtcagggaggcacrcagggtgactcatagaccctcaggcaccccagctgggagaacagcaggtgtttgttaccttaccttttaatcttaagctaactgctttattatgtgttttattaagcggaatatgc

SEQ ID NO: 672335 - DNA, 622 bp, Homo sapiens
atactattcctaagaatcgtaacagctaaggtttaaacatttccaaagtgctaggctgtattctgaatgagacatgcaatatatatatttatttacttctatttatacgtatgtattttgtcccactcatacttataaagtagcactacataatcctcctttacggatgatgagttgagacaaagagaggttcagtaacctccttggtaacttgcccaagactccacaactaataaacggtggagctgagatttgaacccaattaacctgggtctagagtttctgcttttaacgttactctacgtgtttggaagatcccacccttctgcctcctcggaccaagtccttgcaggagaagcagactctctttaagcctgggagtcttggcatctagagtacttgtttccctcctttctcaggagcatcagagaggtggctcctgagccaccacggtgcagcagccagggagcagaagtgacacatgattgtgtccaggagtgagaaggctagagaagcccccttcctcatattkcttgtagagcagagttgggcagcactaagaattccttggcctgcatacccgctgttgaatggggcacagaattggctgagaaaaagctga

SEQ ID NO: 672336 - DNA, 622 bp, Homo sapiens
atactattcctaagaatcgtaacagctaaggtttaaacatttccaaagtgctaggctgtattctgaatgagacatgcaatatatatatttatttacttctatttatacgtatgtattttgtcccactcatacttataaagtagcactacataatcctcctttacggatgatgagttgagacaaagagaggttcagtaacctccttggtaacttgcccaagactccacaactaataaacggtggagctgagatttgaacccaattaacctgggtctagagtttctgcttttaacgttactctacgtgtttggaagatcccacccttctgcctcctcggaccaagtccttgcaggagaagcagactctctttaagcctgggagtcttggcatctagagtacttgtttccctcctttctcaggagcatcagagaggtggctcctgagccaccacggtgcagcagccagggagcagaagtgacacatgattgtgtccaggagtgagaaggctagagaagcccccttcctcatatttcttgtagagcagagttgggcagcactaagaattccttggcctgcataccmgctgttgaatggggcacagaattggctgagaaaaagctga

SEQ ID NO: 672337 - DNA, 594 bp, Homo sapiens
tgaatgagataacttaggtttgccctcatagaacttatattctagtgagttttatgctgtatgtcatttacccctcccaagaatcacaggaaaccagaattactgtcaccgktttacagatgaggccactgaggctcagagaagttaaggaacttgccctggtcccaagagaaaaagtggaggagcctggatttaaacacagttctgtccaaagcctgtgaaccaacagcctgtgctctgagaaagcaagtggagaaaaggcattagacacagccataagaaggctttggggggaatagttggagtcaaggggaagtgatagaagacagatttcaaaggtctaaggagggagtgggtggagattgatggaaggcggagagtttagagattgtatttgaccagaaagggaggcagagggactccttggagattgtatttgaccagaaagggaggcagagggactccttgaagactgggaatctagtgcctgcttgcaggcagagggcaagtgcctgagccttgagaaagtacagacttgaccttgagagagtagttgaaattttgttgccttctaggtggtcagctgtagacaga

SEQ ID NO: 672338 - DNA, 583 bp, Homo sapiens
gctggaatgttgatttcaagtaggaactagatttatattaatacttcccaactttaacagattaaagaaaaaaactgtgttcttcttgatgactcaaggaaaatcatctcataaaattcataatctagtccatatgagttcttaaataaaatctggtttatataataaagcataactcatgaaagctcatggaaaatactatatgggcattctcctgtccaatatggtacytactgaccacatgtggctgtttatctttaaattaaaattaattaaaattttaattttcccatcattctagccatgttttcagtggtcattgtgtccaataactatcacactgaatagcacagaaagttttagttgacaatgctgccatgaacaaaccagaaacagatcccaggtatacatggagttgcaaaaatttaataagagctaactttactgagtgctcttaaattgcctgacgctattttaagtattttatgtgtattatttaatttccatatggtataatatgctaagtcttatcatttccttctcccctgcccctattttatggtcatgaagttggtggggcagg

SEQ ID NO: 672339 - DNA, 583 bp, Homo sapiens
gctggaatgttgatttcaagtaggaactagatttatattaatacttcccaactttaacagattaaagaaaaaaactgtgttcttcttgatgactcaaggaaaatcatctcataaaattcataatctagtccatatgagttcttaaataaaatctggtttatataataaagcataactcatgaaagctcatggaaaatactatatgggcattctcctgtccaatatggtacttactgaccacatgtggctgtttatctttaaattaaaattaattaaaattttaattttcccatcattctagccatgttttcagtggtcattgtgtccaataactatcacactgaatagcacagaaagttttagttgacaatgctgccatgaacaaaccagaaacagatcccaggtatacatggagttgcaaaaatttaataagagctaactttactgagtgctcttaaattgcctgacrctattttaagtattttatgtgtattatttaatttccatatggtataatatgctaagtcttatcatttccttctcccctgcccctattttatggtcatgaagttggtggggcagg

SEQ ID NO: 672340 - DNA, 1439 bp, Homo sapiens
ttcgatgagaacacatagacattagacagagacctaggcatttcttttctcgtgcattaacctttgtgtaaaaaaatcatgtctcatttcctaaaccatttgtttgtcttcccattaggtcaactctcatcccttaacacccaaggatggtattgtgtgggtgaataaatgtgattttccatcaaaagggagtgagaatgtctgctatttaacttggtataattaagtagaaagctttaggagcaatatgagtaacamattattctaatgggctagagatgtgagttgctcaccactaagatcctattcaccataaatgattggcctataaaccattccctgctgttctcagtcaaacagtcagatatttttaactctggctttcttttttcaaactgtctaattggattttttgaatctgttattagacggaaatagcccactggtactacaggaaggctccccatatgctgttatgatgtttgcatagttttgctagatttaatcaaatttcattcataaagattagctgaaaattgagaaggaaactgattgttccctactgaactagaaagaacagagtagtagcttctgaccagacagagatgcttaacagggtaaaatggaagtcatcctttatgcaactaaagtaaccaaaatttccagaagaaaaaacaaaagatatatcaagcaatggcactcaaatatctaaaatctggaggtattaggttgatgcaaaagtaatggtcatttctgcccttacgagtaatggcattaagagaaatggcagaaactgcattacttttgcaccaatataatacttgttttgcttttctttgtcattaaaaaaaaagataatagtattgcatttttgttggaaagcgacatttaaaattacctgaaaatagcataccccagagactgtcatgttctagaggcttacttcctccaaagggtgttataaacatgtatttgaaaaaacaaatgttgttttccacacatttgacatctatttattaagtaaataaaaggaacacagtaatatttacagtactgaagaggtcattggaataggtaatatgcactgactcacggaggagatagatggattatggtgaagttctggattcagtcattttagtcaggcataatttttatttcacaataattagaataataattctggtcatgaataactcagaaacagaaagtcaaatactgcatgttctcacttataagtggctgctaaataacgtgtacacgtggacacagaaagtggaattatagacactggagactcagaagggtggaggttgtgggaaagggatgaggaattacttaatgcgtacaatgtacactatattcaggtgatggctacacaaaaagccgagacttcaccattacacaatacatccatgtaatgaaactgcacttgtacc

SEQ ID NO: 672341 - DNA, 911 bp, Homo sapiens
gattctcccacctcagcctcctgactagctggacaacagacatccatcaccacacatggctaatttgtatttttttttttttttttgtagagagatggtcttggtgtgctgcccagcctggtctcaaacttctggcctcaagtgattacctgcctaagcctcccacttaggcatcagccaccatgcctgacctgcattacattttatttgtgcattccttatttttgtttctttctcaaagccttgtcagcaggtagtggtcttaattaaatcagacagaaaatgcttaccctcccaggccaatagtccatatctttagcagtagcaagtcggtgctactcttacctccctcaggaaaagtaaaaaggataagttaccctaatactcatatgcttgattattctaaaggatcatctaatgcataaaattagtctttttgagttaattcctctttttgttcacaatgccagagaggtcgtgcttacttttggccaaggggattgagtaaaagagcaggattttggtgaacacacctgcgttttatttctcatgagaaaaaatcatttatatatccttatctcaaatttctgattgaaacgttttgtcattatcacaaatgtctcagcaagatatagttctgctcctggatggtagtaacacacgttcagagaatcactggggaaaaaaatgagcattgagtgcctacgttctaattattgaagagattctttaagtaacacgtattgggcacctttgattacataagtaatgtagaatcaatgcagaaatatttgtaaaatataaaaaaacccatccaaattaaaaagacttttaattgcaccagagataccattcttgttaacattttagagtatttcctttcctayacatctctaagcctctaagccatt

SEQ ID NO: 672342 - DNA, 609 bp, Homo sapiens
tgataaaagcaacatgactggatgctgtgggagtgcatgagagggccgcctacctcagaatggggagatggaggcacacttcctgagaaaataagttatatctctgctgaggtctgaatgaaaaaggcaggctygggggaggaaaggaggggaagagagatggaggaaaaatgtttaggcagggttcattgcaagctcttgaagataaagagagaggattgtgctcagggagtagaaatagttgtgtcgcaggagcaaagaggcacaatgaaaagctggaggccacaagaggttaagtgactttcccagtgtcacctattctgtcttctcttctgattcattaatgaacgtgttaaattgcaacaggttcattcatcacgagtacaattatataccccaggaaatgttctgtcaaaaactctattacagcgtattctctgataaatccttaccctagactggagcttggcagttctcagatggctgcaactattcctgttcatctttgcacaccccacagagcctatttgttgccttgcacacagatcatcttcagaggtgttttggttgttgagatccccatcaatataaataactgaaccataaaca

SEQ ID NO: 672343 - DNA, 654 bp, Homo sapiens
tctgcataactgctgggaaggctcttaattaaatgtgtaacaaaataaaaacagccggagaggaaacctaagtagtgctgcgtgacagcgcacagctaatcggtgttcctggaacctcggcagaggctcgtcagatggctctcgtcagagccatcacctttttatgcgcccggtaaaggctgcagatgagcctgacaagggtggtgttaaattgacactcacaacttgttagtctgtggcttacttcttattttgacatccattttcagatttaactaagtcttaggaattcagcaaacattttcatttcacrctctagtttccggaagccatggttccttctcattgctgtccttacctcctcctccccttctcccctcagcagcttcacatcacttttgttggaaaggggctgataagtggggcactgagaaatgggaactgaagtggcagcataaatcccactggagaaaagaaatctgctcccatcctgacaaatcattttatgtccatcttttgtcaaagccagatgagttgattctccaagtttacgtgggctttgttgtgtagtcacagatcctgctaaggcgagtttttatttagtgatgtggatttaatttcccctctcaattttttcaagaaacaacacttgtt

SEQ ID NO: 672344 - DNA, 1323 bp, Homo sapiens
aaaataaataaggccaggtgtggtggctcacacctgtaatcccagcactttgggaggccgaggagggcagatcacaaggtcaggagatcaagaccatcctggccaaagatggtgaaaccccatctctactaaacatacaaaaattagccgggcatggtggcacrtgcttgtaatccccgctacttgagaggctgaggcaggagaattgcttgaactagggagtcagaggttgcagtgagccgagatcacgccaccgcactccagcctggcgacagagtgagactccatctcaaaataaattaataaaaagaaataaaagaaacgcagaatcccaggccccactccagacctccaaaatgaaaattcttgtttaccaagatctctagcaattctcatgaacctcaaagtttaagaagcctgctagagactagtggttctcatacctgatatgcaccagaatcgcagagggcttgtgaaaacaggtggctgcccccctacccaggcactgcttcaggtatcaggtcgagcccaagggtctgcatttccaacacgtccccaggtgtggtccacgttcctcctctggctctagaatccccctgaggtctcagacagggatgcatgtccaagtcacctggggacagctctccccacctccagggacctgaactggctcccttcagttgtcttcaccacagaggacaagtgggatgtcctgctgcgtcacagcactgccgttgctgtctgcaaggcaaaaacgtccatgcacaaaagagagactctggccacaccgtctatgcttggctatattcagagcacacaagctttatttagcaacaatggcagtatttcatgagaatgagctgcacaatagtgtaaatgccattttctgcacacagcctgggagcagatggttacagcgacagagcccagaccccacagtcctcccctgcccttcctgacaggctccggctacttctggcctcattattgtctcagccacagcccaggtcgctgggccagaagggagggtgcaggctggttccgctgctcaggctctgtcatcctgcttcttccttctcaaggccacctcgggagcagctggcaggcaagaatgcccccctcacacacagggaacccaagtccctgctgactcaacctcttctttttttttttttggagacagagtctcgctctgtcactcaggctggagtgcagtggcgccatctgggctcactgcaagctccgcctcccgggttcgcaccattctcctgcctcagcctcccgagtagctgggactacaggcacccaccaccacgcccggct

SEQ ID NO: 672345 - DNA, 432 bp, Homo sapiens
ttttttgttttgggccttgaaaattctatagccttttataatgccacactctaaatccaatcattcagaaatggttcacaaatataaacatggggatctgatacattgacacaaagcctcaagaatctcttcaggccgggtgcagtggtttatgcctgcaaccccagatgtttgagaggctgaggcagrcagattgcttgagcccaggagttcaagagcagcctgggcaacataaggagaccttgtctctacaaaaaaatttaaaaattagccgggcatgttggcgtgcacctgtggtcgcagctacttgggtggctgatatgggaggattgcttgagcctgggaagttgaggctgcagtgagccgtgattgcaccacagcactccagcctggaaaacagagtgagactctatacaaaaaaaaaaaaaaaaa

SEQ ID NO: 672346 - DNA, 1145 bp, Homo sapiens
gacaattgagtaaacactggctgagtctcgcatcagaattctttctttctctctctctctctttctctctctcctccacccccaccccccttctctatgtgattttaaatgccagaagactcaccttgggacattggttgaactgatggacaaacaaaggaatgacaacaaatagacttgtttaactagccaaacaacaaaaatagactgactatgaataatagggaaccagttggtgtcagcttattctgaacttggtgagaaactttgtcaagttatctaccagtcgtacgagaattccagaaactctctttatttggaagcatgagtattggaactgagcaacaagggttgagtatgtttgaaactggaaaataaagcttcacacagtacttactaaatataacttcctgccaggcaggtatgggctgcttgccacattttgatagttgtcaggatccaaaaaccatgaagaaggccaatgttttgataactaaaagtactttcaagacaagcaaatttgccttatttagggggagatgaggttagaaggaattagttaattatctctcactcctaaactttccaaattttaaatataaaagctcatcatttacttttgcataactagaaacaaagccaagataataaaattacctcttatattcacagcatactttctcatagaaagacaacttggaaaatccatttaccaagacaacttaaagggaggtaaatagaaacaaaggaaagtcccattacatcaaatgacattgaccaaacaatgcctcttagaacttctattcctgttttctgttaagtttcttttggacagtaacatccttgagggcaagcaaaaggtctgtcttcttccttgttttattcccagtgcctggtgatgaataaaggaactgcacatgaataaaggaactctcaaattcctgttccctggagaccacaaagaggtaattactcactctgaaagtagcaaaatgggtggtgtgattsaactacttacatgtacagggttaactataagtaaatcctagctctaagtatgaatacaaaggattctgcttttctccatcactaatgtttggctctcttcagagtgaaggcaggcaggctttctcagaggttggcaa

SEQ ID NO: 672347 - DNA, 1250 bp, Homo sapiens
acagctttttttctatatataagagatttaagaaataaaaaaatcccactctcaatggcagcaaaaatataatgtacatagaaaaaatcttaaaaattatgaatctagatttttaaagtttacaaaattttattagatgattattttaaaagaatagagtaagtggagatagtctatgctcctggaaggaaacatttcatgttgtaaagatgttcattcatatcaaaattatatataagtaaattccagagcaagaccactatttattttaaatatattttctaattgatttaaaggtttatttgcaagatcaaatgaatgaaacaaccaatctctttaacatttataagaataagatgaggaatttatcttactggatagtaaagtgtattattaagcggctttaatgataatatcagcctactgctatcagaaaagtgaagatcaatggaaaaacacaaagtacaaaagtctatcaaagtatacagtaaaatctactatgttggtacataagtatctcaaaaatatggaatacaaatgcacagaaactggaaacatacttagatgttacaaagggatttctattctctaacaactaaaaattctattcaaaccccaatcacatatgactttagtaacatattttttaacaatacattcccaacatttcctttcattcacaatagatcccatagtcaacaygcttattgtaagataatgtctgtttgaggacaacagtgaatagctctcaaattctaattatctccatatttatcccaacttgacaacatttttgaggcttattcttcatggttaatatcagcacttttcaatatcccaccttccttgtgcatgtgttttcttttgagtgagcatagggttgcttttataaaacattggtttgttgagacataatttatatcccataaaatctacctattttaggtgtaaaatatcataaattttagtatgctcaccgaattttccaaccatcatcacagtctaattttgaaacattaccatcaccttagaaaggaacttcatgcccatttacagtcactctctattcccatccctagtcctaaccactaatctactttaaatccctatacattgcatactctgttgtatctggcttcaaaataggggcaaaaggaaacagtctttaaaaaaatcttataaatgacacaaatcagatgaagacgaaaatactgctagaagtgacttgtttcagcaatgccactatgaaa

SEQ ID NO: 672348 - DNA, 1384 bp, Homo sapiens
  misc_feature 133, 134, 135, 136, 137, 138, 139, 140, 141, 142, 143, 144,145, 146, 147, 148, 149, 150, 151, 152, 153, 154, 155, 156,157, 158, 159, 160, 161, 162, 163, 164, 165, 166, 167, 168,169, 170, 171, 172, 173, 174, 175, 176, 177, 178, 179: n = A,T,C or G
  misc_feature 180, 181, 182, 183, 184, 185, 186, 187, 188, 189, 190, 191,192, 193, 194, 195, 196, 197, 198, 199, 200, 201, 202, 203,204, 205, 206, 207, 208, 209, 210, 211, 212, 213, 214, 215,216, 217, 218, 219, 220, 221, 222, 223, 224, 225, 226: n = A,T,C or G
  misc_feature 227, 228, 229, 230, 231, 232: n = A,T,C or G
ttttatcaaccttatgctgtagatattagtttccttttccaaaggaggagaatgcgaacagaaaattgagaaactgagaaattacatagtttatttcacgttgcagaatgattaaatgaggggtcaagacttnnnnnnnnnnnnnnnnnnnnnnnnnnnnnnnnnnnnnnnnnnnnnnnnnnnnnnnnnnnnnnnnnnnnnnnnnnnnnnnnnnnnnnnnnnnnnnnnnnnnctttaatggcatattagacagtttaggaactatattaaacctttaaagctctgaggtcacatgttactaggttcatttcctgataccaagcctcagttgtgagcttcaagccttacggagcagcttactcacactgatgagcattttgaatttaggccacacacacacaaaaaaggcccacagatctaagctcctgacaaaatataacagtctacctacatcccaggcaaaagtttctgagagacccatagctaataaggttataactttgttctgtgttgctcttcattcaaggcataattcaatccgaagacaactcaacttgtcaaacccggacttcaatatccagcagcttcaaaaacaggaacagttgactggaattggtagaattaaaccagagttatataagcagaggtcattggataatgatgacgggagacggagtaacagcaaggcttgtgggaaactgaacttcattttaaaatatgactgtgacttagagcagctcatagtgaagattcacaaagctgtcaatttgcccgccaaggacttttctgggacttcagatccttatgtcaagatctatttgcttcctgatcggaaaacaaaacaccagactaaagttcacagaaagaccctgaaccctgtgtttgatgaagtgtttttatttccggttccctacaatgaccttgaagcacggaagcttcacttctctgtgtacgactttgacaggttctctcgtcatgacttaatcggccaagtggtggtggatcacttcctagacttggctgatttccccagggagtgcatcctttggaaggatatcgaatatgtcaccaatgtgagtccagcatttcttcatttttgtggtggggggcatcttggttagcaaggaaacagattacttacacattatcttgaggacaaagtgtaaaattcctgtcaatgtacatgtagcagttatttcagaacctccttgtaccttttcagaaacagggttttaacaatattgattttgaagtttccaagcattattccatgaaaacaatattaaagaataacattctctcttttctactttcagattcttagstagcccctaagagacagcaggtgttatctgtcctccgtaccacattttctttagagctt

SEQ ID NO: 672349 - DNA, 646 bp, Homo sapiens
accagagaccaacaggcgggccatgagcctcttctgtttaatgtttcattagagaaaatctcaagcacacacaaacagagagagaacggcttatgaaaactcattatacaaattgagcttttcctaccacacccaaccaaatcagagtcgagggacccaggaaaagctctcaggcacacggcacctgctcccagagcccccctcccacccccctgccccctgcaagtctagctgctgaaatgacctgctgcaaccttacaaccgggtgtacctaatggctgttggaacaacctacytgacccaaagactaggtttacctactgtgtctttcaccaatctgagcttgccagctccccaaaacttcattagtgccaatgtgttttctttcaaaacaataggtaacatttctctttccaataaaccccccagcatgctcttcgttcttgggaccaaagaccactctggtctgtgtgtatgcctgaattgcaattctgtttttcccaataaaacattttgtttagagattcatctgtacactttttttttttttttctgttgagacagagtcttgctctgtcacccaggttggagtgcagtggcatgatttcggctcactgcaacctctgcctcgtgggttcaagtaatt

SEQ ID NO: 672350 - DNA, 2511 bp, Homo sapiens
  misc_feature 2, 3, 4, 5, 6, 7, 8, 9, 10, 11, 12, 13, 14, 15, 16, 17, 18,19, 20, 21, 22, 23, 24, 25, 26, 27, 28, 29, 30, 31, 32,33, 34, 35, 36, 37, 38, 39, 40, 41, 42, 43, 44, 45, 46,47, 48, 49, 50, 51, 52, 53, 54, 55, 56, 57, 58, 59, 60,61: n = A,T,C or G
  misc_feature 62, 63, 64, 65, 66, 67, 68, 69, 70, 71, 72, 73, 74, 75, 76,77, 78, 79, 80, 81, 82, 83, 84, 85, 86, 87, 88, 89, 90,91, 92, 93, 94, 95, 96, 97, 98, 99, 100, 101: n = A,T,C or G
gnnnnnnnnnnnnnnnnnnnnnnnnnnnnnnnnnnnnnnnnnnnnnnnnnnnnnnnnnnnnnnnnnnnnnnnnnnnnnnnnnnnnnnnnnnnnnnnnnnnnaccaaagcactcagactttaaatagaatttatcaaatgtgtctatatttctatgcatataattcatataaagaacatgtagtttaaatcattgcacattttatgcttttaatcagttgtgatggtcattagtatttttatcacatttctccaaaggtaggctaatcactgttattattttcagctagaaatataaaaggtattttctatttttgatgactttgaaacataacccttggaatataatatctgtgtataatatctgtggaaagcatgaaagtaatattcaaacagtatgcattttttccagaatgaaaatttcctctacaataacattcatccttttttcctgatggrcacataaaagtcaacatttctaacattgctggacgttatttacattaaacttgcctcagcttcaggtgttgcagaaactgggcaagaggccacaaggtacacaatacacacacacacacacaaacttgtattattatacttacctaagtgtctaaagaggtggataaatatattagattgctccagaacaaggatttttatggggcctattggaaagtatgactgcagtttgagtgagatgcctgtaagagattcaatttggccactatttattgagtatccaattttaaaagtactgacagaaggctcatgagttagaaatttacacctaagtctattggaaatgtgctactggatgctgtagtaaagagtggtgtggtaattgtaaaacacatctgatatctaaacctttgttttttacctgaaatctttatggaggtgattgtgtatgtcaatttgaatcttcccatcaacaagataaataaataaatagccagcctacctcgataaattagttcaccttttcggcagtgcttctccgcctttgacagacacaagattcgcccggggatatccttaaaatgcaaaaccatagaccacactttgactagcttggataaggggccagagcattgaaatgagtgtgtaggtgactgtgctaagattctcctgctcatttgggaactggctcgctcaccatataaataaagcttaggacctctagtccttgctggaaaagaaatacacatacataggatgtgactgtgcatatggaatatctgttgtgttctggacattgtgctagacaacagagataaggagtcaaataatcccttgtctgtatttgaaaagagcttccgacacagtggcttctgaggtctttgaaacaagattcactttcagatttgattattttatttatgatttgatattttcattgaaccccatgatatgataaggtttccagaacctgctagaacaattgactttgctttcagcattatgaagccactgaagcatataagtagttcatttatgtttgtgtttgaccagacaggaacaagttgagctactttgctggccaccttcgttgagacctgtttgggtcagttatttttctttgtttgtttttgaaacgggtctcactctgtcacctaggctggaatgcagtggcgtgatcagagctcactgcagcctctaccttctaggctcaagaaatcctctcacctcagcctcctgaaaagctgcgaccacaggctcataccaccatacccagctaattaaaaaatatatttttttgtacagacagggtttttccatgtttcctagacttgtctccaactcctgagctcaagcaatctgcctgcctcagcctcctaaagtgtagagctgtgtttttagtcttttttgagctgttttacaatgcagttttgaattgataagtttggattcattctgatatttacagatttaacatcctacttcactagatgctcatagccttgatccattacagtagccaccttgtccatctctgctcatagcctaaactaacagaagccagagggaagaaatggaagccaacatgagtccagaacacacattttataagagcataagaaatttaaaaatagcaaagtgtatcatgaagtttttaatagatatgcgtggctaaaatttattctcaatcaatatattctataaactgggagaaaatattaaacacatgaaaagtaaggaacttgggctgggcgcggtgactcacgcctgtaatcccagcactttgggaggctgaggtgggcggatcacaaagtcaggagatcaagaccatcctggctaacacggtgaaaccccgtctctactaaaaatacaaaaaattagccaggcatggtggcaggtgcctgtagtcccagctactcgggaggctgaggcaggagaatgctgtcaacctgggaggcggagcttgcagtgaaccaagatcgcgccactgcactccagcctgggcaacagagcaagactccgtctcaaaaaaaaaaaaaaaagaaagaaagaaa

SEQ ID NO: 672351 - DNA, 2511 bp, Homo sapiens
  misc_feature 2, 3, 4, 5, 6, 7, 8, 9, 10, 11, 12, 13, 14, 15, 16, 17, 18,19, 20, 21, 22, 23, 24, 25, 26, 27, 28, 29, 30, 31, 32,33, 34, 35, 36, 37, 38, 39, 40, 41, 42, 43, 44, 45, 46,47, 48, 49, 50, 51, 52, 53, 54, 55, 56, 57, 58, 59, 60,61: n = A,T,C or G
  misc_feature 62, 63, 64, 65, 66, 67, 68, 69, 70, 71, 72, 73, 74, 75, 76,77, 78, 79, 80, 81, 82, 83, 84, 85, 86, 87, 88, 89, 90,91, 92, 93, 94, 95, 96, 97, 98, 99, 100, 101: n = A,T,C or G
gnnnnnnnnnnnnnnnnnnnnnnnnnnnnnnnnnnnnnnnnnnnnnnnnnnnnnnnnnnnnnnnnnnnnnnnnnnnnnnnnnnnnnnnnnnnnnnnnnnnnaccaaagcactcagactttaaatagaatttatcaaatgtgtctatatttctatgcatataattcatataaagaacatgtagtttaaatcattgcacattttatgcttttaatcagttgtgatggtcattagtatttttatcacatttctccaaaggtaggctaatcactgttattattttcagctagaaatataaaaggtattttctatttttgatgactttgaaacataacccttggaatataatatctgtgtataatatctgtggaaagcatgaaagtaatattcaaacagtatgcattttttccagaatgaaaatttcctctacaataacattcatccttttttcctgatggacacataaaagtcaacatttctaacattgctggacgttatttacattaaacttgcctcagcttcaggtgttgcagaaactgggcaagaggccacaaggtacacaatacacacacacacacamaaacttgtattattatacttacctaagtgtctaaagaggtggataaatatattagattgctccagaacaaggatttttatggggcctattggaaagtatgactgcagtttgagtgagatgcctgtaagagattcaatttggccactatttattgagtatccaattttaaaagtactgacagaaggctcatgagttagaaatttacacctaagtctattggaaatgtgctactggatgctgtagtaaagagtggtgtggtaattgtaaaacacatctgatatctaaacctttgttttttacctgaaatctttatggaggtgattgtgtatgtcaatttgaatcttcccatcaacaagataaataaataaatagccagcctacctcgataaattagttcaccttttcggcagtgcttctccgcctttgacagacacaagattcgcccggggatatccttaaaatgcaaaaccatagaccacactttgactagcttggataaggggccagagcattgaaatgagtgtgtaggtgactgtgctaagattctcctgctcatttgggaactggctcgctcaccatataaataaagcttaggacctctagtccttgctggaaaagaaatacacatacataggatgtgactgtgcatatggaatatctgttgtgttctggacattgtgctagacaacagagataaggagtcaaataatcccttgtctgtatttgaaaagagcttccgacacagtggcttctgaggtctttgaaacaagattcactttcagatttgattattttatttatgatttgatattttcattgaaccccatgatatgataaggtttccagaacctgctagaacaattgactttgctttcagcattatgaagccactgaagcatataagtagttcatttatgtttgtgtttgaccagacaggaacaagttgagctactttgctggccaccttcgttgagacctgtttgggtcagttatttttctttgtttgtttttgaaacgggtctcactctgtcacctaggctggaatgcagtggcgtgatcagagctcactgcagcctctaccttctaggctcaagaaatcctctcacctcagcctcctgaaaagctgcgaccacaggctcataccaccatacccagctaattaaaaaatatatttttttgtacagacagggtttttccatgtttcctagacttgtctccaactcctgagctcaagcaatctgcctgcctcagcctcctaaagtgtagagctgtgtttttagtcttttttgagctgttttacaatgcagttttgaattgataagtttggattcattctgatatttacagatttaacatcctacttcactagatgctcatagccttgatccattacagtagccaccttgtccatctctgctcatagcctaaactaacagaagccagagggaagaaatggaagccaacatgagtccagaacacacattttataagagcataagaaatttaaaaatagcaaagtgtatcatgaagtttttaatagatatgcgtggctaaaatttattctcaatcaatatattctataaactgggagaaaatattaaacacatgaaaagtaaggaacttgggctgggcgcggtgactcacgcctgtaatcccagcactttgggaggctgaggtgggcggatcacaaagtcaggagatcaagaccatcctggctaacacggtgaaaccccgtctctactaaaaatacaaaaaattagccaggcatggtggcaggtgcctgtagtcccagctactcgggaggctgaggcaggagaatgctgtcaacctgggaggcggagcttgcagtgaaccaagatcgcgccactgcactccagcctgggcaacagagcaagactccgtctcaaaaaaaaaaaaaaaagaaagaaagaaa

SEQ ID NO: 672352 - DNA, 2511 bp, Homo sapiens
  misc_feature 2, 3, 4, 5, 6, 7, 8, 9, 10, 11, 12, 13, 14, 15, 16, 17, 18,19, 20, 21, 22, 23, 24, 25, 26, 27, 28, 29, 30, 31, 32,33, 34, 35, 36, 37, 38, 39, 40, 41, 42, 43, 44, 45, 46,47, 48, 49, 50, 51, 52, 53, 54, 55, 56, 57, 58, 59, 60,61: n = A,T,C or G
  misc_feature 62, 63, 64, 65, 66, 67, 68, 69, 70, 71, 72, 73, 74, 75, 76,77, 78, 79, 80, 81, 82, 83, 84, 85, 86, 87, 88, 89, 90,91, 92, 93, 94, 95, 96, 97, 98, 99, 100, 101: n = A,T,C or G
gnnnnnnnnnnnnnnnnnnnnnnnnnnnnnnnnnnnnnnnnnnnnnnnnnnnnnnnnnnnnnnnnnnnnnnnnnnnnnnnnnnnnnnnnnnnnnnnnnnnnaccaaagcactcagactttaaatagaatttatcaaatgtgtctatatttctatgcatataattcatataaagaacatgtagtttaaatcattgcacattttatgcttttaatcagttgtgatggtcattagtatttttatcacatttctccaaaggtaggctaatcactgttattattttcagctagaaatataaaaggtattttctatttttgatgactttgaaacataacccttggaatataatatctgtgtataatatctgtggaaagcatgaaagtaatattcaaacagtatgcattttttccagaatgaaaatttcctctacaataacattcatccttttttcctgatggacacataaaagtcaacatttctaacattgctggacgttatttacattaaacttgcctcagcttcaggtgttgcagaaactgggcaagaggccacaaggtacacaatacacacacacacacacaaacttgtattattatacttacctaagtgtctaaagaggtggataaatatattagattgctccagaacaaggatttttatggggcctattggaaartatgactgcagtttgagtgagatgcctgtaagagattcaatttggccactatttattgagtatccaattttaaaagtactgacagaaggctcatgagttagaaatttacacctaagtctattggaaatgtgctactggatgctgtagtaaagagtggtgtggtaattgtaaaacacatctgatatctaaacctttgttttttacctgaaatctttatggaggtgattgtgtatgtcaatttgaatcttcccatcaacaagataaataaataaatagccagcctacctcgataaattagttcaccttttcggcagtgcttctccgcctttgacagacacaagattcgcccggggatatccttaaaatgcaaaaccatagaccacactttgactagcttggataaggggccagagcattgaaatgagtgtgtaggtgactgtgctaagattctcctgctcatttgggaactggctcgctcaccatataaataaagcttaggacctctagtccttgctggaaaagaaatacacatacataggatgtgactgtgcatatggaatatctgttgtgttctggacattgtgctagacaacagagataaggagtcaaataatcccttgtctgtatttgaaaagagcttccgacacagtggcttctgaggtctttgaaacaagattcactttcagatttgattattttatttatgatttgatattttcattgaaccccatgatatgataaggtttccagaacctgctagaacaattgactttgctttcagcattatgaagccactgaagcatataagtagttcatttatgtttgtgtttgaccagacaggaacaagttgagctactttgctggccaccttcgttgagacctgtttgggtcagttatttttctttgtttgtttttgaaacgggtctcactctgtcacctaggctggaatgcagtggcgtgatcagagctcactgcagcctctaccttctaggctcaagaaatcctctcacctcagcctcctgaaaagctgcgaccacaggctcataccaccatacccagctaattaaaaaatatatttttttgtacagacagggtttttccatgtttcctagacttgtctccaactcctgagctcaagcaatctgcctgcctcagcctcctaaagtgtagagctgtgtttttagtcttttttgagctgttttacaatgcagttttgaattgataagtttggattcattctgatatttacagatttaacatcctacttcactagatgctcatagccttgatccattacagtagccaccttgtccatctctgctcatagcctaaactaacagaagccagagggaagaaatggaagccaacatgagtccagaacacacattttataagagcataagaaatttaaaaatagcaaagtgtatcatgaagtttttaatagatatgcgtggctaaaatttattctcaatcaatatattctataaactgggagaaaatattaaacacatgaaaagtaaggaacttgggctgggcgcggtgactcacgcctgtaatcccagcactttgggaggctgaggtgggcggatcacaaagtcaggagatcaagaccatcctggctaacacggtgaaaccccgtctctactaaaaatacaaaaaattagccaggcatggtggcaggtgcctgtagtcccagctactcgggaggctgaggcaggagaatgctgtcaacctgggaggcggagcttgcagtgaaccaagatcgcgccactgcactccagcctgggcaacagagcaagactccgtctcaaaaaaaaaaaaaaaagaaagaaagaaa

SEQ ID NO: 672353 - DNA, 895 bp, Homo sapiens
acacacaggcaaatactataaagcttcttaggacctagcctggaggtcctagaacaggacttctgctccatcccttttggaaaagcaagtcattgtgaccagcacagattcaagaaatgggagattcgactctgcctgtcaatgtaaacagcagcatgtgcatgcagggaggaaagaaatcgagggcatcatctagaagactatcatatcacaccattattccaactaatgaacattatgttttagatgggtagtactagctactcatctctcccccagaaacccaagctaagcatggacatattgaagagaatgtcagcaccattaaaaaaaaactctagaaaaatcacatgtgatgactgaggttaattcagtctgtcaattacatcaatataattgccttcttgtarccctaagtatggtgaagcagaattgaattctacaaaagtctttcatctgttttcctatggaataattaacaaacccaataaatgtataaatagcatgaagtccgacttattttagatttttacctcataatttcaaagcttatagaaatccagagaactaatcatcataatccataatgcctggaccagaagtccttgttctaagagtatcttgtggcatgctaaaaatgtattactaactaggaaatttaaaacttttttgttagtggttttaagagagctgactagctcatcaccacaattcacacagattaagaaaggaggttactctgtggagtggattcatagtgatcagaaaaaaaaaaaatcacaaaagaggaaaggagatagggaaggggaaagatactgtcaatccctaagtgatttttcgaatggtttgattttgtatttgcaaaggaaaggcagcttaatgtgatagaataaga

SEQ ID NO: 672354 - DNA, 650 bp, Homo sapiens
aaggactcctagtgctctatatagttctacacttattaagattatatctgacattattgttctgtcttattaacatgtttctaagaatgtgtatgtttatatacaaatgactaaggattgcagtatttttctaaaattatgtaacatatatgttcttaatattgtcagtctatttttgtttgcttattttaaaattcttcataatttgtaagaacaattaattattgaaataatttttgcaataactgataacattaataaatttcaacatacaaagcacgtaatgaaattttgtttttgtttttttccatgtggatttatctagaatgcttatccttccaagatagtaaatatgcagatattaacaataaatacaaatgacgcatcttatatataccastaatattataatggtaattaatatgacagtcacacacttattgattatggttacctgaagttcaggaatggcaggaatgtgtttaactggatatccaataattcatccttccaaaggtcagatttatatctcacaccaaagagaatttttttgcaaaattcaagagtcaaatatagactttgtaatatctctagtaggtattattatttcttttttacagataaggaaatcaaagtttagtaaatggcaa

SEQ ID NO: 672355 - DNA, 1058 bp, Homo sapiens
ctttattatctctaactgcttaatccccccacccatcagttacaaaaacaaaaacaatctctgtttatctttcctctttgggcttcacctctcatttcttagcctgaactccatggcatgcgaaatcagcaacttcccttaggagaaactagattgtttagcttttctgtccttccaccatacctgtccagccaatctcctaccctgcagaaagcaacttccatttattttcttccatccttctctcaggggaccaagtgttcctggacaaagtcataaaatagggccaattggtttttttaataaatccacatttttcaaccttaactgggaccctcatttctgttgggaattctattggtcttttctaaccaattgcctttcatatcccatctcctgccccacttacctgaaaactttatactctcttaccccaagccctcaaactgaccactgtcactttttgcagatgaccttgctttctctcttatgaagatggagattatttaatatgagttaattgcttggcttctcaacttgtacactgttctgagcattactcattcatcttatggcagaggaagatgcatgcattctcctcctcttcaaggtcaacttctccgcttttgtctttgacctcattccccttcctttcattttctcaactctcctttctttcctgcatatctcatcttttccctgtgcccatacagtgatcttasttcactgtttttataatacatatttcttcattattgtgatctccgaagtcaggatgcattttataattggtggtgttttgtctcccttactggtacgtcaactaaggtgtgtcttacaatcaaggccttcttagatttgatgggatacagtagttgctaagacctacgggttccttttaagccatagctctttggccagtgcacctcattgtgacaacttttcttccaagtgactgcaaagcctgtgatgacactgtaccccctccaatgcctgattaatattcctaaagcacatctctagtcactatcctgttcagaaattctcaaaggtttatt

SEQ ID NO: 672356 - DNA, 644 bp, Homo sapiens
tcccgtggatgcctggagaggagacctgcttggaaacctccaggaaaggtttccagacttctcctggacacaagatggcaaaggctggaaagggagagagataaatgctggtgtgggtaatggtaaaattccatttctctctccactttccagggtgaatttggatggcatcctgcatagcccatcatggtcttaagggattttaaccctggctcagttgcagtctacctgggggacttggaaaagtcacttcagatttctagactctgccttcttatctgtaaaataaaggggrtggattagaaaactccagggtccacctcggttcacaggttttacatgctgtgtgctgcacaaacacgttggattggtgagttgagatattccttttcaatgaatgtgttctcctgtttccagtcccctcccccatttccaaaatgacactagaggtacatttcaggcttaagttgcttcacctcccgactcctgaacttcactcccagtgaccttcttttcatgccacagatatatccacagtagtagtaacaagcatcaaataagtacctttaacatatcaggtgttgggttagatagattcttacatttggtggttctaatccttaaacactcctcaaagaagacac

SEQ ID NO: 672357 - DNA, 644 bp, Homo sapiens
tcccgtggatgcctggagaggagacctgcttggaaacctccaggaaaggtttccagacttctcctggacacaagatggcaaaggctggaaagggagagagataaatgctggtgtgggtaatggtaaaattccatttctctctccactttccagggtgaatttggatggcatcctgcatagcccatcatggtcttaagggattttaaccctggctcagttgcagtctacctgggggacttggaaaagtcacttcagatttctagactctgccttcttatctgtaaaataaaggggatggattagaaaactccagggtccacctcggttcacaggttttacatgctgtgtgctgcacaaacacgttggattggtgagttgagatattccttttcaatgaatgtgttctcctgtttccagtcccctcccccatttccaaaatgacactagaggtacatttcaggcttaagttgcttcacctcccgactcctgaacttcactcccagtgaccttcttttcatgccacagatatatccacagtagtagtaacaagcatcaaataagtacctttaacatatcaggtgttgggttagatagattcttacatttggtggttctaatccttaaacactcctcaaagaakacac

SEQ ID NO: 672358 - DNA, 625 bp, Homo sapiens
tctggcagttaccaagaaggcgtgaattaaccctgggtatcactcctccgcgtgcagccgattttcaaaattagaactggggaagctcaataacaagtgctcacacctccccaggtagagtccaggtatgtctgcctcttccagagcctccgctgaagtgttgtgcccgatggtgacagatgccattgtgttcgcgaagctatctgacatgatgagtctattctatcgtctcaaaagtttccagcatctttgtgcaaactctctgcatggtacagaaaacgggataaagtgtaggaggcccagggcaggaggcatgaggaatgggggtgagcagccaggtaacctcagtataaaaaagtggctaagaccagatggaccatggagtcaggcaaacctgggtgaatcccagctccatgtttactagctgtgtgaccttagcaagtcccgagacctctctgagtctccatttcctcatctgcaaatggactaacagggtgcttgggaaggttgagtgaggtgatacatgtgagctctcagcagaatgtggttacmgtaggaaagggggctccttgggatgtgctatctccttgcattaagcctggcccctccccgaagggctccctcc

SEQ ID NO: 672359 - DNA, 1842 bp, Homo sapiens
ataaaagtatcctactgttccacgttcttacaaattatcaaaattcttatttttagacattttggtgaatgtgaagtgatatctcatgatcgttttattttttatcttactgacaataacttcatatcattattttccacctttgtattcttttgtgaagtattcctaatttcttacaatttttgttagatcatgttactgctttgtaattaatttttaagttaaaatttttattaatttgaaagtgttctttatatgtcttaatggaagccctcctttgtttctatatattgaaaacaatctttttctactttgttttactgaattctcatgataaacagaagtcgacaatttaaatgtagtccaattttaaagctttcccctatgactggtattcttagttttatttaaacctttgttattttgcaaagttatattcttttgaattccccaattttactttttaccacttaaagattcatctgaaatttattatttctgagttgtgaaatagagagtaagacttttattcacatggacattcaatttcccaagaagggttattgaaaacagttattttcttcattgttcttgagtactaccgttatcataatcaagtggttatatatgcataagtctgtttctgttctgtcattctgtttacagmgtttattttactaccctgatgctataacacaatatcttaatcattgtagctataaataaattatgaaaattagtagggtatgttttttcattttcttcattgttccccttgtcctttttcagtaatatcttgcttctttttgatacaatagaatgttgcaatggaggtgctgtgggtaggcacaaatggctttaaccctgatattaaatgttttactttgcatctaaaatttattttcacgcctattagtttataaatatgctttacaagttttcttctttttctagtttgctaagagctttctatcatagatgttgactttgtcatactttatctgcatctcttgagtattcatatatttttcttttattttgtaaatatggaaacaatatatttttgaatgttaaaccaaactttcattactagaatattttcaatttagttataaggtatataaagatacagatatggatacggatatggatagatttagatttatacatttttcgctatcaatagcttctgttattagtattctttgtatttacatttataaaaaacaattttcctttctcataatgcccttataaggctttggtaagaaggtcatggaggcctcatgtaaatatccaggaaatatttatttgtagctgtactggaagagatattgttaagtcagttgttttattctccctcatagattaggaaggtttactattaaaactacctgtgcctggtatagtttgtgagaagttttttttttcttttttgaatgtcatagattgattttttctcactagtcatagagctattgtatttttcaataattttatattaattttgataagttttactttttcaggagtcaatttcaactaatcattcctcattattttaatgcttttatcttcttgaacatatgattccaatttacaaaagctgtgtgattatactcatattctaattctctaatctctgtcatttttaggtctgtttctattaattttttttcctagttatgggcacatactactgttttgttatgcccaggaatttctgacttttggatacttcgaattttatattgtttggtgctaaattttggtgtattcctttaaatatggctggacatcttttctgacttacagttactaaagatcactgtattcttttcc

SEQ ID NO: 672360 - DNA, 642 bp, Homo sapiens
tatatactcatatacacacacatgcatttttttcttcttaatcattctctattaatgtttccagttcttcaaatcacctgaatattcatcttcrtcttgaatctttaagtgaacattcagaaaatgctaagatgattcatatagtttggacacttactttactgatcctactgtttttcatgggtcagaaagtacagtgactggattaatattgaatttctgaattaataaaacaacttcctaatggaaatttttcagggggaaaattgtttgacatcaaaaggcaccaccacccaacctcaagaacaaaagagtaaacataaacacataaataacactttcctagaactaacagttataggttaattaatagctcttgaagataaatgacttctattgaatcaataatatatcattaagttaagaagagaaaccaggtgcagtgtctcacatctgtaattccagcactctgggaggctaagataggagaatcacttgatgctaggagttcgacaccagcctggacaacatagcaagaccctatctctacaaaaaatttaaaaataagccatcatggtggcatgcacctgtagtactagctacttaggacgctgaggtgggaggatcacttggaccccagac

SEQ ID NO: 672361 - DNA, 642 bp, Homo sapiens
tatatactcatatacacacacatgcatttttttcttcttaatcattctctattaatgtttccagttcttcaaatcacctgaatattcatcttcatcttgaatctttaagtgaacattcagaaaatgctaagatgattcatatagyttggacacttactttactgatcctactgtttttcatgggtcagaaagtacagtgactggattaatattgaatttctgaattaataaaacaacttcctaatggaaatttttcagggggaaaattgtttgacatcaaaaggcaccaccacccaacctcaagaacaaaagagtaaacataaacacataaataacactttcctagaactaacagttataggttaattaatagctcttgaagataaatgacttctattgaatcaataatatatcattaagttaagaagagaaaccaggtgcagtgtctcacatctgtaattccagcactctgggaggctaagataggagaatcacttgatgctaggagttcgacaccagcctggacaacatagcaagaccctatctctacaaaaaatttaaaaataagccatcatggtggcatgcacctgtagtactagctacttaggacgctgaggtgggaggatcacttggaccccagac

SEQ ID NO: 672362 - DNA, 1121 bp, Homo sapiens
aggtgaggctcaggatgagtgaagaacacttctactttgaccttcacctttacctgggaaagaagtcttagaattgctgagccacacacaaaattgtgatgtgactaaacattaatgtataatttctctttcattgataatccttttccctttagtagcctggactcaggcattcaatgccagctaaatccactctgatgaccctcttaagtctgtctttctatataataccccacacttccaactcccctctttcatcaaaacttgcttgtctcatctcttattccttcagcaccttactctaaagcaaatctaaagaatgaagttgggctaagagctgatggatattggttagcatgtgacccctcttatttttattccttattgccttagcctgaaggtaaatttcaagtgtaataaatttcaaacatttataataggcatatcaagaaaatatttaatcaagactgtacataccataccctaaaagcatatcctagagtttttactgataaagaaggtagaatttaatgtcaaaagtccttcttcccatggcaagatttttatwaaatattgttttattttatatttgatcattacttaaaaataagtcaactttagtttgagattttaattttacaaaaaagaagaaatgtgtttaacagctcaagttgacacttggtgatcatcccccaccttcccagtactattccttatgtaagaaaattgatacaaacaataatatgcctgggaactccaggaacaagacccccaccctccttccttaataagcctggacaactcttacccaagaacttgaccacagactattgacaacaaagcttaatgaataaagactttcacagaagctctaaagttcaaggttagcaacaagaacctcagcagtaatattattggttaacacataccaatcagtaaccaataaaccttagtcagaaaatgcctccggtacacaactcaattacttgggttgtaatataagtcccttcgttcagttttccagaggtctagagaaccaaggtgagtcattggttctgacctgtggagtgatgtcttcatagataatgtcctctggagaactttaaattattcccatggca

SEQ ID NO: 672363 - DNA, 611 bp, Homo sapiens
agcttctgccctggtatctttaaatacagtttttgcatctagttaccaagtgttgctagggcaacacagacaaaagacttttacattaacctcaggcattgtttgcctattaaacacatctggaactggtgtagaatagcaaaggagggttaagatgccttgcaatagtacagttttttgtttttgtttttgtttttcttacaygagcagaacgttttagttgggagaaagagattctggatacaggctgacatgattttccttagaattaacccagagagaaatagatcccttagaagctgtaccattttacctgagataagaatgcctgtagggatgagtggctgataccataaggtatataaagctatagaaatatcatggaatatcttcctggaagtcagttaattaattgaataattttgataaaaacattcctttaatgtgaaacagcaaattatgaaatagaaggcatgatttgcactaatatttaaagcaaagactttaaaggaatttcatgttgccacatactatagaagttcaccctcttctgttcttagaataggaagaaagcttcaggaagcactggtgaaaggcaaataaataacacc

SEQ ID NO: 672364 - DNA, 1966 bp, Homo sapiens
tagccaggcctggtggcgtgcacctaaagtctcacctacttgtgaggctgaggcacaagaatcgctggaatccaggaggcaaaggttgcagtgacccgagatcccgccactgcactccagcttgggcaacagagcgagactccatctccaaacaacaacaaagattcacagaattataaccagaaggagtgaattctactatatgtaaactgagattttaatgattaatgtttttaagtgttgagaaaattggctagctcactccagcaaaataagccccagatggataaaggtttaaatatataaaatttcattataaaagcacttttatattattagagtggggacttttttaaaaaaataagtatgacctataacctggaaactataaagaaacaggctaataaatctgattacataaaaaaaaacaacttttctttgaaaaaaaggtaaaaagctgacagacaacctggggaaaacacctgtaatacatttgcaaaagcacctgttccattgagcctagaccccgctttccaccattgtatcacattgatggagagttttccaaacacaggagagaggttcaaatgtcaaatgtccaattttcatttctgaaaagaaaactgaagaatcatgcccacagaatatcatttatggaaaaatgataaataatgctacacttgtataggctaatctatatatgtgtgcaaatacatttaaaaaactttaagaagcktatttaccaaactatgaccatggagaggaaatcagggaaggggatggcggttacaaagaattttggtttgcctattagtttgaatttctcaacaagaatatattcatgtaacacttgttaaatttaaaattaatttgagagcatgcaaatcatccataaaaatcatctcctcaaaatttctaaatgtttaaaacctaagcaaaataactattttaaagcgagtgatttggtttagacaaatatagttaggaaacagcttacttatagtttctgtactacttaatagtacaaaggaaatccctgaataattgagatagtccatgtattaatgcccatttttgcaactcatagtctgtattgtcttcaattgctgtatctttgcttctaacaacatattgttgggcactctgaattctattaaagtatagatggtggcttattcacatttttatttcaagtttcatctggcatatagtaagcacacagtgaaaactaaatcgaattaagcaactctgttttgtgagatccttcaaaacacataaattttatttgttgggccgggtgcagtggctcatgcctgtaatcccagcactttgggaggccgaggtggtggatcacctgaggtcgggagttcgagaccagcccgatcaacatgaagaaaccccgtctctactacaaatacaaaattagccaggcatggcggcgcatgcctgtaatcccagctacttgggaggctgaggcaggagaatcgcttgaccccgggaggcggaggctgcagtgggccgagattgcaccattgcactccagcctgggccacaagagtgaaacaccgtctcaaaaaaaaaaaatgttcatgcgtttgtttccaaagcatacagtataatgcttagatcacttattgagcccttgccgaatgccaaggacttttctaagtcctgtactttacatgttttaatgcatctaatcctcacaacaattctgtgaggaattgttatacaatcctcattttatactaggaaaccaaggcacagaaaggtccagtaatttgcctaaagacattaagagctggaatttaatctgaggcaatatggccagagttcagttttaaccattacaatataatgcttcccaatcactgaatgaaagaatatgtgtacagcccttggtctacaatgcgtctctgaattataacatcattcccagggaaacaatcaaagaagccctattcta

SEQ ID NO: 672365 - DNA, 596 bp, Homo sapiens
caattctagtgatatctctgttttaaagttttgtcctccttcttggaatacagccccacttttcttccctcttgactgtatcctggtctatctgtctttctgggaggtagctcccagcccttatctcttttgctaaaagaaatctctctcactattctaattttttaaagcatttctccatgttctaccttatcctatgattatttatacgcataacctacttccttgaagagaaataaatggaaactcagtcataaatcagtgaataaatgagcaaatacatatgatttatttcaaattcacttaccgacttggtcatactctcccagaaacaatcaagtttgttaattgtcccctttaaattattgtaccaagagcctaaaacaaaaatctgaaaaacaaagagtrgagaatgttctgtatgttataaatcttctaatttaacctaacatgtgtatataaacatacaaacatgtacgtgtacacacatatgtacgttctcatacagggaaatagaaaggggggaatgctacattaaaaatttatattgtttttcaatcaactgaggctgtcctttctttttcatatattctgct

SEQ ID NO: 672366 - DNA, 1110 bp, Homo sapiens
acatagatatctcgcattcttttttacttaccccaattgctgctttcatcaggaagaatgctctatttatctaaaatatatgaaaatatctgaatatcaccactagttgtctaatacacatatcatacatcttttttttttttttttttttttgagtttcactcttttcactcaggctggagtgcaatggtgcatctcggctcactgtaacctccactgactgggttctagtgattctcccaccacagcctcctgagtagctgagattacaggcacccatcatcatgcctggctaatttttgtattttttagtagagacggggttcaccatgttggctaggctggtctcgaactcctgacctcaggtgatccgcccacctcggcctcccaaagtgctgggattataggcgtgagccaccgcacctggcctatgcacatcatttttgcatatctttcagaaaatagagtcatcaaaaaattgcccttaagtttttaatgtattttaattaagtttatcaaatcattgcagtatattttagctctggggatrggcccagcttgcctttaggctctcaggtctgtttagttttttaaaaattgcacagtaaattgtattccagcaaactctttccaaatgccctctcttctctgaattcccacacattagtgccactaggagtctttcctccactactgccatagcaacttgaagcagtttctccctgctttaagctcactcctagcagagcttccaaatcaacactcctgaaaccttactctgatcatttcattctcccaatcagtagcctgaatacagttttttcaaagcatacttctttctccttccttttggccaactccagttccattcaaatccaaatcctcagctcccctttcatgcccttcactttgccaccttattcctagatttagtctgtctagttggtctagaaagccctataatatctacataataatagctatcatatattgtgtattgactacctgctttgttccaggaattgaataaggtttccaaatgttatcacattgactttatcacatatgatagcctctatttcacatacgaaacaactgtggctcatttaa

SEQ ID NO: 672367 - DNA, 628 bp, Homo sapiens
caaactcttaatataccgagtaatgaaaccatagtgtgattgcctcagaataaattgagaagtccaacttcctagttttgtttaattagtttcactttttctactctccccagtatgctagaaatgggaatcgttgccctgcagattacggcaaaacatctgttttaagcaaagctgcattttttgactcagaaattgtcccagacggtggatataagatgaaattcagaaaaacgttctgccaagtcacaggcttttagatattatggaaacaagaaatggaaaacaggatgatctccatgagaggccttgatcctgagagtaaaaggcttgtgtagataggttagacaaygtcctctagaaaagagaccagggataagtccaggtttccaggaaaaccaagaagcctgcgggtagctgaaggtagagtgctagttgttcatcttaacttaccaatgagctacagaaaggacttagcatctgatgtcatcagctttgccaggagagtgatcaaggaggttaaagctcaggtaaaggtgtgccttctcagagattggctacaagcaacagagaccacctcaacagagaccacctcaacagactcagcccagccatacaaggtgccaaa

SEQ ID NO: 672368 - DNA, 2387 bp, Homo sapiens
tgtcattttcaggactagattaagaaaattattttctagaaagttctgtttatttaatgtccatgtgccaggccctgttctaaaggcattccaaatattaactccaaataccctctgtgacaaccctacaaagaatttagtcgtaccatccccacttactagatgccgaatcccacacagagaaggtgaagggcttgccgggagttggatttgaaccccagaagtctgactctggaatccatgctctgaactcaaccacccactgtgctgggtctgttcaccttctgttctgtacaggttatctctttaatcttcctgagttgctgctttcaaactttggtggctggtcgccctggaacaggcagcagctccttcttgccttcctgatcagtctttctgtcattcaaggccttggatggtcagtcctgtccaacatcccctcctgtgaggtctggttgcagccctcatccattgtgatgtttctgttcacaactccagcctacatcaatgtttccctctgcagaattcttattgtggttgttttctacgcagcagttattttaacaattgatttcataattttttttttttttttcgagatggagtttcgctctgtcgcccaggctggagtgcagtggcatgatctcggctcactgcaagctccgcctccggggttcacgccattctcctgactcagcctcctgagtagctgggactacaggtgcccgccaccatgtccagctaatttttttgtatttttagtagaaacggggtttcaccatgttagccaggatggtcttgatctcctgatctcatgatccacccgcctcagcctcccaaagtgctgggattacaggcatgagccaccgcgcccggccctcataattcttaaaataaaattccatacggcaaagaccatgtgtatgtcacatcatctctagatgacttgcacataataaccagatagaagattcaaagaatgtgtttatgaaagcctcacctaaatcaaaattagtgtaatttaagatgaatttttcccgttggcatagaatcaatgtatctttttgggggtaaggtggaggcagggggtgtgttcctggaatgcaaacatttataaccatttcagtgcactgtggttttgatgctgccttcagttttcttggcattatatggagactctccctgggttagcaagcagcatggcacagtggactagctgtttggcctctctcattgtgtttttattgcgtttagattctgtttcaaagctattggctttggtacctggttttcagtgctgacactactacttatatgcctgcatgtaatttcaagaaaccatcaaaagcatcttaaattagaatactagtgaaggttaaaataatcctgcagcagttaccaggaccactccaaagttctcttgtgtctaaacatctccacagtggggtaggggccagcatcatttctgtttacagctgaaacagagcctccatgtgactgtagcatgaacatagctctgctgcccttggctaccagccttgaaattatgtaatgcctgacaagcttttaaaatctgggtgactttacattgttaccatttatgtggcataaagtgaactgcattaatatttttatattataccatttaaattttcataagatacaactgcacagtagtgaaaatcctcattgaattgatgtattttataccttttctagcatcacccggcacagtatctttatatttcattgggttgttgggagaggaaaatgtctaactgtcctaaaactaaaaacatgtatctttattctcttaatagcctgtgacctgttgttacagccggacaatctagcttgtaaaccctgtaagtaatagtgttcttatctatcaagtytcaaagtatcgccactatgatggtgttagggtagcctctggttgctcactctgggtcctaccttcttccagtctggaagcctcggaacctgaacatcagccagcatggctcggacatgcaggtgtccttcgaccatgcaccgcacaacttcggcttccgtttcttctatcttcactacaagctcaagcacgaaggacctttcaagcgaaagacctgtaagcaggtgagctgctgggtgtatataaaggaacactgcgtgtttcaaagcgacccccaggccactggaatttgggttgctcaatgtgagcattaggctttgttggctctcagtggttggtagatacttgagaatgtaatcattgggcatgtctcagggccatcttgccactgtccttcattccctagttatctgtaacccagctgtcctggtggtgatatagcctggtaacagtattgccaaggaataaacaagaagtatttctcatttgttca

SEQ ID NO: 672369 - DNA, 659 bp, Homo sapiens
ttaaaaatataatggcacttttacaaaatgatatgtcacctatattcattgagaattatttgactaccacatttttcccctgatgatagtcatctatcataacttgtgtttgttttcctcctgagatcaaacacttggtgcttattcctgatgtatactctgagaccagctcttaccttctgagtggcagctacccctccctcccaattttagatcctatttttacacatctctatagatatcmcctttatttcatgactcacaatattaaatggtacagacttcagtttaaccactggtgtggtaacagcagtagttgctaagtaccaccttcccattgctgtgtgagggctaatttgcaaagacatttgaatctcccagtgaagatgtctggggaattttggccagttgtcttccctcttgcccttttgttctttaaaattcagcttggaccatagacacctccaggatcttgtttatgttctgctctcaattgaccaagcactgcgttttgcacaatcagaagtctcacaaaagcaaacagttatgactgcatatctgatgtttatatcctataaaatttcaggaagattcagagtcaatcttctatttgtacatgatgtagacaaaattagctgctccaattgttagacaaaaaa

SEQ ID NO: 672370 - DNA, 659 bp, Homo sapiens
ttaaaaatataatggcacttttacaaaatgatatgtcacctatattcattgagaattatttgactaccacatttttcccctgatgatagtcatctatcataacttgtgtttgttttcctcctgagatcaaacacttggtgcttattcctgatgtatactctgagaccagctcttaccttctgagtggcagctacccctccctcccaattttagatcctatttttacacatctctatagatatcccctttatttcatgactcacaatattaaatggtacagacttcagtttaaccactggtgtggtaacagcagtagttgctaagtaccaccttcccattgctgtktgagggctaatttgcaaagacatttgaatctcccagtgaagatgtctggggaattttggccagttgtcttccctcttgcccttttgttctttaaaattcagcttggaccatagacacctccaggatcttgtttatgttctgctctcaattgaccaagcactgcgttttgcacaatcagaagtctcacaaaagcaaacagttatgactgcatatctgatgtttatatcctataaaatttcaggaagattcagagtcaatcttctatttgtacatgatgtagacaaaattagctgctccaattgttagacaaaaaa

SEQ ID NO: 672371 - DNA, 1724 bp, Homo sapiens
tttttttaaaaaaaaaaaaacccagcatccaaagcagcaatcacaccatttagtattatgtgctttggaaaccaaaggtaaaaatacctggtaagtttctgcacaagtatggcacatctgtggtgagttgtaacaataagaaatctaatttagatactaattaaaaactgaaaaactgctaatgaagatattcaaggacagccgtcttacgatatccaactttactattgacaaagatgctcccaacaggacttgaaatyagctgatgtcactatacaaacgtgttccagaaaactaaccaacaatcaatattaatgataatgagagtctgaatttgggcaactgcattgaatgttaaaagggggaaatgccatgggggggaaatctctgggtcttagaaatacttgtattccacaacaatatgagccaaaatagcagcaattgttttatatatggtgtgcaaatgatgcctacccagttagtatgcagtttcaaaagaattttagcaacaaggaacacttattaggtcattattgcaaatagaaaaactaggcctgagataatttattacatatcataatattaaagtctcataacaatgcaatgaatacatgggtagatacagtgcaagcatacagattagtgaggaggggatccaaagcattggtggatagtcagtcttaagaaagaataaagacatccccacaggaaagactaccaagagattcattatatgttgaagacaaaaggaaaatcatgcatatcattatcaatcatgacacacttgtaatttaaatacagatgcatcactaaataggaataagaacatgtatatgtatatattcataaaatatagacagcacataagtgcaaaccttatacataaacatatataacctgcagcagggtctttgagcaacaccatgcattttttgaaaccaagattagggaataaagatgacagagttgggcttttcatttttagtggcaccctttattatccatttcacatttatcttcttatcactaggattttaatcttcatttcagtttgagtccaagtaaggatggagaaaaaaaaatcaagaaactatatttcaatgacattcaataataattattccctagtacttttcatctgtatttttttaatgtgagttccaattttattaattggtaaaactgtgacatagcaattggctttcccaagatcgcaaagtgagctggagcctgaagtcagaataactgccttgtatatttaggcaattgtattacaatacaatgccttcatgtcaaacactactcctatttgaagcagagagaaatcagcagaagggggcaaaaactaaggctttacgtattctaatgtgcaaaatatggaagcctcctattttcaaaacatctacttttttctctgattctgtgaccctgcaaagtgcaaagcacggttttagctactgtgggatgatagagatgagcaagacttattttcttctttcaagcaacctactttctagttggaggaattaaaacaatgatagacatgtaattaatacaaggaaaaatgagggcagaattacaaggaatcacattagatttggtggcactaggaaaggaaccatgtaagaagtgcatctgataaaggttttaaagaatggatgaaatgtccaggtagaaaggaggaagaaaggatggcatgaggaagtgattctgcatagagagag

SEQ ID NO: 672372 - DNA, 656 bp, Homo sapiens
tatccaagaatggtgagacaactacaaaaggtgtaacatacacttaatgagaaaaccagaaagagaagaataacagaaaggatcaaagaaacatttgaagcaataatgactgagaatttcccaaaatcgatgtctgaaaccaaaccacagaccccaaaattttaaacaacaacatgcagggtaaataccaaaaaatctatatgtaggcatatatagattatgataataaaatatatgtcttcccaggtaataaatttggtttgacaaaccatactgtaaatcacactataaactgaaacasagatgtagtataaacaaaatcataagaccaatgctagagtcgcagaaagttatgtgtaatgtaggtagtgaataaaatatctaaaatatacaaagagcccctacaaagtgagatgataatttagtgggcagatgatatcaccactgacaataaatgtttttatcttagtatgtttgtactttataaaaataacaataggccgggcatggtggctcacacttgtaatcctagcactttgggaagccaagtcaggtggatcaactgaggtcaggagttcaagaccagcctggccaacatggtgaaaccccgtctctacgaaaaacacaaaaaattagctgggtgtggtggtgggtgg

SEQ ID NO: 672373 - DNA, 644 bp, Homo sapiens
ttctgctgtattacactgttcaaaggagtcatggtgcctgcccagattcaaaggggcatagaaataaactccactacttgatgaggtattgtaaggtctcatttcaaaaagagtatgtgggatgggggatgtttccaaagccatctttggaaaatacaatctgtcacatgtcactcactcaagattaggcaaagaaacagtctcctaaggtacatatacctagatatgarggtcatattatatgtatcatttaggaacaagtgcatttattggtaatggaaatgtgggtggtagaatattatagaattccatctttacagaatgtttactctgtttctttgcatattttcttggcatttttgagaaaagcaaactcatatcacatgcacattttaacatttatttcatttgtcctacacactttcttcatgagcgagacttcaataatcagtgcgtccaatgtattgcatagccttggaatgtttgaatgtactcatgagccaattttagatttatatatcctctgacttttcttgagttttaaaaaattcatacactcctgtcttaactcctcagtggtatttcctcttttccaataatacctaaaaatccagtttctttgctctatcagatgtgggtcttcc

SEQ ID NO: 672374 - DNA, 603 bp, Homo sapiens
tcgcttttcctggttaaattgcacctaatgtagcgaagtgtttgcaactaagctctaatgtatgaacactttaccttgacatttgagattgtagagtactggaagtcattgaatgtagagctcatgaataaaagtgattatggattcagaggatttagcttttctracaaaatacctaataacatgacttcaattctcaatttcttatggcactttttgaaaaggtcagcttgcttccagtttaaaaaaatcaattgatcttcaaaaaaatgtttacattctgttttgttgtcttatttcaggaagagagtcaaaattacggtgatcatcattgaaatatatgccagtgtagtgaggaaagagtttcaactgcttctacttgctttgaataacgcttttgcaagcagcaatcaggaagcagtgctatcaccttgctgctgcctaatggccctgaaaggcagttgtaacatccttggaagccccattagagcaattcctgagtttataataaagaggactgggtcttttatcctaaatgtagcaaggaataaaatttatttctgaaagaggtagtgcttctgcctttttgtcccctaagtctta

SEQ ID NO: 672375 - DNA, 1506 bp, Homo sapiens
agctgagaatgccayatatatttctcaatagcataagatataacttaaattagtaaaaattatattaattttgattataattagaattgcccgcttcataatgtgtcatcttttatacaaagaattttcaaatcggttgcaattatgcacattaagtgtgaattaagtccttttgccatttggcttccttaaaaaatatgttacagtaaataatactttctagtgtgcacacaataaagtagggaaaatttggactgtctatccctttatactaaagatggctataaacctgcatattaattctattttgtccagcatcaattataatttgagtgttataacataattgcacactaatgatataaaaatatcattatgatgtttttctgaaagcatcattacttatctaatttcttgcttgcttctgtttttttttttttaaattttatcctgtattgaaaatgtgtacctagaagcatgcctcagctatctctttagtaggccaatttttggcatctgccacctgcacgtttagttctaccataccatctgcttcagcttgtcttcatttctgcttgggctcagaacacaataccccaaaatatggttccttggcatgttaatctgtctttgtaagttttattttcaggcccagtcaggaaccctaaggaggttgaggaaagcttccttccctactcctccatttatgactcacactttctactttctgtgggtaccttttgcctttacactaaatttcccaaccatctcattcataaaattttatccctttacaaaatctattctttaaatatgagactgaaaatcagtgcaatacagatttttaactgtaatcagtaataagaattactggagtgacaaaagcaaatacttacaaaggatgaagtagatatcttctaaaggagtgaagtggcctggtaggatcaatacagtaacagaattttggccaaagagaaaaattactggtccagagagggaggatgcagaatcttatgaaacaataaagagattagtagaaaattagccatttcagaactaaggaaaaattaattccacgtattcaaaatcaagaaataaaatgtaagaaaagttagggtaaaaactgagtaatggtaaaactttaaaaaaaaagcccaagggatacataatacattgatattatgatgtaagaaatttatttaaaaacacttcagtgtggaggctgtgactaaaatctatattagtttcaatttgcatcctaggggcagcagttgccctaatcaagaattcacactctggaggtggtctgctgtcctttaatctaaaaggccatccccaaaggcagcttctactggtgtttcagctatctttctcttccatcaacacttgaagctacactaatttatacagtgaaagttaaaatgcttatccattggtaaaattagtagtttctcaactagcacagaggattttggacaggagctttctttgataaaattgaaaaaa

SEQ ID NO: 672376 - DNA, 1506 bp, Homo sapiens
agctgagaatgccacatatatttctcaatagcataagatataacttaaattagtaaaaattatattaattttgattataattagaattgcccgcttcataatgtgtcatcttttatacaaagaattttcaaatcggttgcaattatgcacattaagtgtgaattaagtccttttgccatttggcttccttaaaaaatatgttacagtaaataatactttctagtgtgcacacaataaagtagggaaaatttggactgtctatccctttatactaaagatggctataaacctgcatattaattctattttgtcyagcatcaattataatttgagtgttataacataattgcacactaatgatataaaaatatcattatgatgtttttctgaaagcatcattacttatctaatttcttgcttgcttctgtttttttttttttaaattttatcctgtattgaaaatgtgtacctagaagcatgcctcagctatctctttagtaggccaatttttggcatctgccacctgcacgtttagttctaccataccatctgcttcagcttgtcttcatttctgcttgggctcagaacacaataccccaaaatatggttccttggcatgttaatctgtctttgtaagttttattttcaggcccagtcaggaaccctaaggaggttgaggaaagcttccttccctactcctccatttatgactcacactttctactttctgtgggtaccttttgcctttacactaaatttcccaaccatctcattcataaaattttatccctttacaaaatctattctttaaatatgagactgaaaatcagtgcaatacagatttttaactgtaatcagtaataagaattactggagtgacaaaagcaaatacttacaaaggatgaagtagatatcttctaaaggagtgaagtggcctggtaggatcaatacagtaacagaattttggccaaagagaaaaattactggtccagagagggaggatgcagaatcttatgaaacaataaagagattagtagaaaattagccatttcagaactaaggaaaaattaattccacgtattcaaaatcaagaaataaaatgtaagaaaagttagggtaaaaactgagtaatggtaaaactttaaaaaaaaagcccaagggatacataatacattgatattatgatgtaagaaatttatttaaaaacacttcagtgtggaggctgtgactaaaatctatattagtttcaatttgcatcctaggggcagcagttgccctaatcaagaattcacactctggaggtggtctgctgtcctttaatctaaaaggccatccccaaaggcagcttctactggtgtttcagctatctttctcttccatcaacacttgaagctacactaatttatacagtgaaagttaaaatgcttatccattggtaaaattagtagtttctcaactagcacagaggattttggacaggagctttctttgataaaattgaaaaaa

SEQ ID NO: 672377 - DNA, 576 bp, Homo sapiens
agaaagacaaggtgtataccctcaaggttataattctacctgggcagatggatgttaggcattgggaaattgrtaaggataaatgccatgaaggacataaaaagaggagggtgatgggactactggaggggagaaactcttcctcccaagagctaggagggtcctgagatggggagagcctcacctctgcctctcaacctgggcatcaactttaaacagattgccagcaagaacaaaagccatgggtctggaccccctctcccacagggtgacatcctaaagcggtggttctcaaacttggttgaatttggcaatgacttagggagtttggaaaaaaacaactgatacctgattcccaaccccaggggttcttgtttaattggtatggagagctgcctggagaggttgaaaagcttcccaggtgtcgatcatgttcagcaccggtggagaactcttaagcagtggttctcaaacttcccttggtgcctaaatcacctggaagtcttgttaaaacagtgattattgaacttccaacaaggtccctgatcagtacatcttggggttcggggttggggt

SEQ ID NO: 672378 - DNA, 576 bp, Homo sapiens
agaaagacaaggtgtataccctcaaggttataattctacctgggcagatggatgttaggcattgggaaattgataaggataaatgccatgaaggacataaaaagaggagggtgatgggactactggaggggagaaactcttcctcccaagagctaggagggtcctgagatggggagagcctcacctctgcctctcaacctgggcatcaactttaaacagattgccagcaagaacaaaagccatgggtctggaccccctctcccacagggtgacatcctaaagcggtggttctcaaacttggttgaatttggcaatgacttagggagtttggaaaaaaayaactgatacctgattcccaaccccaggggttcttgtttaattggtatggagagctgcctggagaggttgaaaagcttcccaggtgtcgatcatgttcagcaccggtggagaactcttaagcagtggttctcaaacttcccttggtgcctaaatcacctggaagtcttgttaaaacagtgattattgaacttccaacaaggtccctgatcagtacatcttggggttcggggttggggt

SEQ ID NO: 672379 - DNA, 623 bp, Homo sapiens
tctttccagacaacaccctagttaattttccagttggtctaacactgtatttaagaaacttgcctcctaagagattagttgggccccactgcgttagcgtggcaatgtaacccaattgctaagcagttaatctattcattatgtatattttcattctcaattttttttttctgagaaccaactgaagcatgagggataacatggctttcttaagcaattgctttcaagtcctgatgaagaaatttccaagcatagatttcagcacagtctttctcaaagtggtcaaagtcagctagaaggttatatctataggtgccttctctataagatactccttctcccaaacagaattcatatttcaatcaaggtgactcacacttggtcttctttacatttagatgtctctccayacactccatgcctttctgaaatatcctctaggactgaaaatgtaatgcattaaataaaatctccagagacgttcatatatcatcccaactgttccactcagatgggtaatattgactattccaactgtttgtgctgacgctaatgttagagactaaagaaatatcaaggaggaatatctgtacaaatttgcaaatgctcatggaacaaccacg

SEQ ID NO: 672380 - DNA, 1489 bp, Homo sapiens
catccaagaaagggagagttgggattgaatcctagtcggacctcagagcctgtatcttaccctttgcagtattattgagccataatctttttctttctctctcattctcagcagcccagaccctcagctagctgggctacacagtatgaaactagcttttcttctctgtcccaaactcattggaaaccacagaaaccacatgaaaaatggagtctgaccacctctcatctatggatctcagacttctccttctgtaatgattcaccatcaagggttatggaagccacagcagcaataaaagactcttgtattgatccactttgaaattatagaggaaaacaaattaccctgaggttctttattggcattgagtgttaggtccagacagattccagaacaatttagcttttaagatttaattcaaaagtcccttgcaaactatggatacaggaaaatgaatcatttcatattaggggatggggcgataatgatgataaatgcctttttgaaagctttgtgttccaaccataagcccttctctaatagttcttcggagctgattagaagcttaaaaagccccattttggtcaagagctggtaattcctagtttccctttggtggaaataattggtctgataatatccaaataatatttattaattaaataatattcattttatgtgattgtactatgtacatgttaattggatgctgaataatcagttttactatcttcattatgtaagtaatgcataaatccaattttgtttaagagtttcagataatatgtactatgcaggagaaaaatagaaagtctttcttcaacatccttctcccacctgcctcagccatcctgttccaggtgtagccacagccggtagatgagtatggatccttaattctccttgctgtacacacayaagtacgtatatgaatgtacataaacaaataactttttccataaatgagaacacactgtaagttttttcctgtgaccttttttccacttgacatgttgaggaagtcttttcattttaatttgatacaatgcctctatttcattctttgtaaggtttatttaccatatttgaattaacatggcaaataaatgtctaaacgtctaaaatgtacctgagattttgtttttactcaggtgtagtgaggccatagatcaggagacaactgccattgaaaagagagtgtgttacgtacagttcccaagaggaaggggcacgccacaccatgccacactgttactggtggcaaatccatgcaggtctgcagtaggtcttttttcctgtataggtctccagtaggccttgcctcctaggaggaaagaattcgaccgagaggcataagggagagggagagacggaggcaagttttagagcaggagtgaaactttattaaaaagctttagagtggaatgcaaagaaagtaaagtacatttagaagagggccaagcgggtgacttgagagatcacgtgc

SEQ ID NO: 672381 - DNA, 596 bp, Homo sapiens
agaatgtagggaggggtatgaatgtaatccaagggtctcaggagagaggagataaatatctgaatgtctaatgtaattatcttagagaaaaatctcaactcttacgtataaaatgaaatatttttcctagtgactgctattgtctgttttcttttgaaactcccttttctagcaattcaataattttcagtaactttcaactattagaatggtcattttcagtttttacaacttcttgctgttaatttcacaacttaaacctcatatgtaatttttttttcaagagtcttgctctgttgcccaggctggaatgcagtggcatgacctcagctcattgcaagctctgcctcctgggttcatgccattctcctgtctcagcctcccgagtagctgggactacaggtgcccgccaccatgtctggctaattttttttatttttatttttttaatagagaygaggtttcaccatgtcagccaggacggtctcgatctcatgaccttgtgatctgcccacctcagtctcccaaagtgctgggattacaggcgtaattttaaggtctcccccagtaagccccttattcaccctagtttttat

SEQ ID NO: 672382 - DNA, 663 bp, Homo sapiens
atgtgactctgctgtgtggtttttccagtatcacactgttcctgtgctcagaccagcaaggttcctttgcttttcgtgaaaacacatctgttggacttaaccttccaataccactgatagcatgttaccacagctgttaggaactatctggcccaggcagtggacttgtttgtagatacaccacacagacctatgggactgcattgggatgaattttgtacagttagaactttgggaaaaagtcattactgcttatccatttgtcagggataagtgctgacttacacggggttttcctagtgtatttttttccttccccaaaaaggtggyattatcttttagaaggtttaaaaaatactaagcataggttaccatagaaattattatatttcttaccacttaaaaaaattaaacagaattacaagaaggcagagcaatgtgttgataattgtaggagctagggaataactatgagaagggctattatgctattttctatatttttatgtatgtttgaaagcatttaaataaaaattttttaaagactctgaacacccaattgaagtgatataaagacaatttttttctttattcaactcaactactattaagaattatcaggccgggcacaatagcctgtacctctagtcctaacttttcagg

SEQ ID NO: 672383 - DNA, 663 bp, Homo sapiens
atgtgactctgctgtgtggtttttccagtatcacactgttcctgtgctcagaccagcaaggttcctttgcttttcgtgaaaacacatctgttggacttaaccttccaataccactgatagcatgttaccacagctgttaggaactatctggcccaggcagtggacttgtttgtagatacaccacacagacctatgggactgcattgggatgaattttgtacagttagaactttgggaaaaagtcattactgcttatccatttgtcagggataagtgctgacttacacggggttttcctagtgtatttttttccttccccaaaaaggtggtattatcttttagaaggtttaaaaaatactaagcataggttaccatagaaattattatatttcttaccacttaaaaaaattaaacagaattacaagaaggcagagcaatgtgttgataattgtaggagctagggaataactatgagragggctattatgctattttctatatttttatgtatgtttgaaagcatttaaataaaaattttttaaagactctgaacacccaattgaagtgatataaagacaatttttttctttattcaactcaactactattaagaattatcaggccgggcacaatagcctgtacctctagtcctaacttttcagg

SEQ ID NO: 672384 - DNA, 623 bp, Homo sapiens
atagcatcatgcagtgtccagcgcataaccaggactcaagtacaaccccagacctactgcccatcaaccaagtaacctttgaaatgcacttccctcattcttttgctgatgaactcttgtgcatcccttaagacccaactcaaacatcacctcattcgtgaattatccccatttcctccagggggaaggagtgtcctccactctgggcttctgcgctcacattcataactctcaccacagcactcgtccccctgagctgtgattcctgctgtgtctatcttccctgctagatgctgagctccttgagagcagagactttgtccaatttatcttaaggcccccagcccctttccctccagtgcccaacacagtgctggcctagtacatcccaggcattaatcaatgcagaatgaatgaatgtttgatggaatgaattcactttgcttgctaagttgctcacggagcagaccctttgtgctgagtgactaagtggagcaggtcagtcacctgggattcaccaattgttsatggcctctctccaaacagcagattctcacttggcacaaaggcaggagtcagagtgttcctgctgccaccccacctccctctgaagagatttgtcc

SEQ ID NO: 672385 - DNA, 1460 bp, Homo sapiens
gatcatttccattaacattaggaatataaaaagattttcttcctagcttgctctccagcaacaagatctcatggactttcttaaccmtttgacacttaacaccgttgtaaatagtgcttcctgtgaaggtttgtaatgcagcctgactcccaatccttaaacatcctgctgtgcagagggaatagccaaagccagaaaaccctagaactatttttcctctctccttcaaagccaccaaaacctggtagaagcatgagtttcttctcctctaccttttggacttgggaaatctggacctattgacatgagataacatgtacacattctgcctaaatgtaatgaatgtttcaaaggtttcacagaaagctcaagcaatgcaacagaatggatcttttatggggtttttttttttttttttttgcattttgagagggtaggtgaggaaaacatgtttttcaagctctgtgatgttgcttgataaatcacagcaatatttctgaagcgtatttaattacaaattggcttgagttttcaaaaggacagggcttacagatagatatgtcctgaatatgaaacattactatactaatgatgcattaaattattttataaaacaaaaacccgagagtacataaaaatgtatccacagctcatcatatacgctatgtgaaagagagaggctcttggctaaatttcaaatgcctatgagcacaagaaaatggaaccgtctaactaagccttatgttttcattccctcatcccacaaatatttagcaagggtttactatggacgacactattctaggtactgaggatacaacagtgagtgaaataaagtcttcttctccagggacagaggttctatttggggaaacatgataaaaaacaaaacaatgtgcaataaaatgttaaggagggatttggtctctgcagatgagttttgcaacaaaagagggcaggatggaaggtggctaggaagggtgatcgaaggaaggtcttatgaaatggtttgccaatgtcatacctcctatcaagaggtggtgaaatccagaaaatgtcttgagttagatggccaggagatatggaccctcactatacccttctcaccaagggctcgtttttgttagggacacttatattcaagatcttaggcaagcccagaaaactaagaagacttgagatattaaataattggaaagagatctctcaacactgtttgctcgaaggccaggtcttttgctttattgggaagcaggaaagaacaaggacattggaagcagaaagacctaagttcaaattctagttcaacgtcttgtctgtgtgacctctggtaagctgctttatcacctttctcactccaactcagtatcttcatccatcaactagaaatctataactgcctcaggaatttccgtgaagattaagtctgatcatgcatgcaaaattaactcaacgcttgg

SEQ ID NO: 672386 - DNA, 1460 bp, Homo sapiens
gatcatttccattaacattaggaatataaaaagattttcttcctagcttgctctccagcaacaagatctcatggactttcttaaccatttgacacttaacacmgttgtaaatagtgcttcctgtgaaggtttgtaatgcagcctgactcccaatccttaaacatcctgctgtgcagagggaatagccaaagccagaaaaccctagaactatttttcctctctccttcaaagccaccaaaacctggtagaagcatgagtttcttctcctctaccttttggacttgggaaatctggacctattgacatgagataacatgtacacattctgcctaaatgtaatgaatgtttcaaaggtttcacagaaagctcaagcaatgcaacagaatggatcttttatggggtttttttttttttttttttgcattttgagagggtaggtgaggaaaacatgtttttcaagctctgtgatgttgcttgataaatcacagcaatatttctgaagcgtatttaattacaaattggcttgagttttcaaaaggacagggcttacagatagatatgtcctgaatatgaaacattactatactaatgatgcattaaattattttataaaacaaaaacccgagagtacataaaaatgtatccacagctcatcatatacgctatgtgaaagagagaggctcttggctaaatttcaaatgcctatgagcacaagaaaatggaaccgtctaactaagccttatgttttcattccctcatcccacaaatatttagcaagggtttactatggacgacactattctaggtactgaggatacaacagtgagtgaaataaagtcttcttctccagggacagaggttctatttggggaaacatgataaaaaacaaaacaatgtgcaataaaatgttaaggagggatttggtctctgcagatgagttttgcaacaaaagagggcaggatggaaggtggctaggaagggtgatcgaaggaaggtcttatgaaatggtttgccaatgtcatacctcctatcaagaggtggtgaaatccagaaaatgtcttgagttagatggccaggagatatggaccctcactatacccttctcaccaagggctcgtttttgttagggacacttatattcaagatcttaggcaagcccagaaaactaagaagacttgagatattaaataattggaaagagatctctcaacactgtttgctcgaaggccaggtcttttgctttattgggaagcaggaaagaacaaggacattggaagcagaaagacctaagttcaaattctagttcaacgtcttgtctgtgtgacctctggtaagctgctttatcacctttctcactccaactcagtatcttcatccatcaactagaaatctataactgcctcaggaatttccgtgaagattaagtctgatcatgcatgcaaaattaactcaacgcttgg

SEQ ID NO: 672387 - DNA, 1460 bp, Homo sapiens
gatcatttccattaacattaggaatataaaaagattttcttcctagcttgctctccagcaacaagatctcatggactttcttaaccatttgacacttaacaccgttgtaaatagtgcttcctgygaaggtttgtaatgcagcctgactcccaatccttaaacatcctgctgtgcagagggaatagccaaagccagaaaaccctagaactatttttcctctctccttcaaagccaccaaaacctggtagaagcatgagtttcttctcctctaccttttggacttgggaaatctggacctattgacatgagataacatgtacacattctgcctaaatgtaatgaatgtttcaaaggtttcacagaaagctcaagcaatgcaacagaatggatcttttatggggtttttttttttttttttttgcattttgagagggtaggtgaggaaaacatgtttttcaagctctgtgatgttgcttgataaatcacagcaatatttctgaagcgtatttaattacaaattggcttgagttttcaaaaggacagggcttacagatagatatgtcctgaatatgaaacattactatactaatgatgcattaaattattttataaaacaaaaacccgagagtacataaaaatgtatccacagctcatcatatacgctatgtgaaagagagaggctcttggctaaatttcaaatgcctatgagcacaagaaaatggaaccgtctaactaagccttatgttttcattccctcatcccacaaatatttagcaagggtttactatggacgacactattctaggtactgaggatacaacagtgagtgaaataaagtcttcttctccagggacagaggttctatttggggaaacatgataaaaaacaaaacaatgtgcaataaaatgttaaggagggatttggtctctgcagatgagttttgcaacaaaagagggcaggatggaaggtggctaggaagggtgatcgaaggaaggtcttatgaaatggtttgccaatgtcatacctcctatcaagaggtggtgaaatccagaaaatgtcttgagttagatggccaggagatatggaccctcactatacccttctcaccaagggctcgtttttgttagggacacttatattcaagatcttaggcaagcccagaaaactaagaagacttgagatattaaataattggaaagagatctctcaacactgtttgctcgaaggccaggtcttttgctttattgggaagcaggaaagaacaaggacattggaagcagaaagacctaagttcaaattctagttcaacgtcttgtctgtgtgacctctggtaagctgctttatcacctttctcactccaactcagtatcttcatccatcaactagaaatctataactgcctcaggaatttccgtgaagattaagtctgatcatgcatgcaaaattaactcaacgcttgg

SEQ ID NO: 672388 - DNA, 639 bp, Homo sapiens
aatggaagtcacctgggcctggaatgactgggtagaggctacctggccagaagcatactctgttacttgagtatgaaataaacttgccttatttaagccactgatggtctttggtttacttgttttcagtgaccattatattaactaatacattaatattagtgagtgcttgctatatggtaggcacatacacacttctttttttcctggtgatagaatataccaacataaaatttaccatcttaaccattttaagtgtacagttcagtgttactaagcactttcctaacgttatgcaaccatcactaccagccrtctccataactcttttcatcttataaaactgaaactctacacctattaaaaactccacattccctgctctctgcatgccctggtaaccactgttctactttctgtatgattttgacaactttaagtatctcatataagtgcaataatacagtatttgtctttttgtaactgacttactccatttaatacaacgtcctcatttcatattcatgttgtagggtatgtcagaatttatttcctttttaaagttgaataatagtccattgtatgttgatacggtgtggctgtgttcccacccaaatctcatcttgaattgtaggtccc

SEQ ID NO: 672389 - DNA, 1028 bp, Homo sapiens
aacatggaacattccgctatctaaccaaagctgctgcacaggatataaaaaagcctcaaggtacagatctgatagcaaaagagacagggaactctgatctcttcctgcaacattatttgaacatccctgactattgagaacaatcccaactaatattggttaaaggaaagacaaacatggctctcaaaggataacataccatgaaggcctaggcaaagtctagctaagacgtgggctccaaataaggtttttagtgtacggtgagcatcaacttgctcaatacttgtgtggataaagctaggaggcctagctgccagagcagggtgctgggaacaatgaccgagcacaagtacataaactaataaacaccgtagctttgacctctatatatgaatcaccatgaaaactgaggggtctgaatcagtgaaggcatcctggtggcaaaggtcaatcattatcagattgcaggaccggttataatggcaataatacagcaagtgagtccatggaaacaacagaatgatcagaatggccttttttccccttcttctgacttgtraagaaagattgccttccttggacttaggaaaccccttagcttcttggaaaattcaaagaaggaagacacaggagagagccccaggggacaagattttctgttaaactggacattacaagactcaataactaattagaaaagtcaggccaggcatggtggctagcactttcagaggccgaggcagggggattacttgacctcaaaagttcaagaccagccagggcaacagagtgagaccttgtctctacaaaaaaaaaaaaaaaaaaaggaaaggaaaggaaaagaaatcaaagacatggctccttttatcccatgcatggggattatacttagaataaaatgaataacattgagatccctagggataaaggtctcaaaaatccagaaaaaatcttgcactctacttctaactaatctagacttctgcttgatttctggctaaaaggcagactaactcttcgctatttca

SEQ ID NO: 672390 - DNA, 1394 bp, Homo sapiens
  misc_feature 1387: n = A,T,C or G
cccatgtccctgcaaaggacatggactcattcttttttatggctgcatagtattccatgttgtatatgttccacattttctttatccagtctatcrtcgatgggcatttgggttggttccaagtcttggctattgtaaatcatacaaaatcagcattcccaaatgctttcacctaatgacattcgctcgtgttttactttcagccagaattctgtggccaactcctaatttttctccattgactattttcttcttatttttccatgtggtaatgaaacttcctttaatttaataaattgaaaaaaattattttaggatctcactctgtcatccaggctggagtacagtagtgtgatcatagctcactgcagcctcaaactcctggggtcaatggattctcctgcctcagcctctcaagtagctgggattacaggcatgtgccaccatacctagctaagattttttttccagagatggagtcttgctgtgttgccaaggttggtcttgaactcttagcctcaagtgatctcacctcagcctcccaaagcactgggattagagttgtaagccacagcaactgacctccctttaattttagttagacatggccacacaggtaaagactacctttccttctacctcctctagcatggcacctaatatacatatgacactaatatccaccgtgctctgctcagctactcaggaaattacgtatttattctggatcctgagacagaagatggattttgctctctggatctgtcagttcccagtcagaggacattgtgaatctcagtaaattatcttgagctcaggatccctgtcttaaagtgtggcagctagaccagatgacttatgacttgccttcacaaagtggctgatttctaatatctcttcaagctttaaaattctgtgaccctgtagagcacagagagcctgtgtttaaatttttccaaagtagtctatctatatatgtaatttcatttactatctttggttaattttggcaaatcttgattcagtgcctattgtaagtatgaaactattttatatgttacatgtagacatatgcctcctttaagaagttcattaagggtggaaagtctgtcctatgttttgtagttcttatagcatccagcaacacaactcattaaatacttgccaaactctgtttaattcatgataagaaaataaacctttgtctccctgatacagagtagaagttgcacatgaaagttaagctgtgttagttctcactcataagtgggaattgaacaatgggaacacatggacacagggagggaaacatcatacacggaggcctgtcgggggtgggagcaaggggagggagtacattaggacaaatacctaatgcatgcagggnctaaaac

SEQ ID NO: 672391 - DNA, 1394 bp, Homo sapiens
  misc_feature 1387: n = A,T,C or G
cccatgtccctgcaaaggacatggactcattcttttttatggctgcatagtattccatgttgtatatgttccacattttctttatccagtctatcatcgatgggcatttgggttggttccaagtcttggctattgtaaatcatacaaaatcagcattcccaaatgctttcacctaatgacattcgctcgtgttttactttcagccagaattctgtggccaactcctaatttttctccattgactattttcttctkatttttccatgtggtaatgaaacttcctttaatttaataaattgaaaaaaattattttaggatctcactctgtcatccaggctggagtacagtagtgtgatcatagctcactgcagcctcaaactcctggggtcaatggattctcctgcctcagcctctcaagtagctgggattacaggcatgtgccaccatacctagctaagattttttttccagagatggagtcttgctgtgttgccaaggttggtcttgaactcttagcctcaagtgatctcacctcagcctcccaaagcactgggattagagttgtaagccacagcaactgacctccctttaattttagttagacatggccacacaggtaaagactacctttccttctacctcctctagcatggcacctaatatacatatgacactaatatccaccgtgctctgctcagctactcaggaaattacgtatttattctggatcctgagacagaagatggattttgctctctggatctgtcagttcccagtcagaggacattgtgaatctcagtaaattatcttgagctcaggatccctgtcttaaagtgtggcagctagaccagatgacttatgacttgccttcacaaagtggctgatttctaatatctcttcaagctttaaaattctgtgaccctgtagagcacagagagcctgtgtttaaatttttccaaagtagtctatctatatatgtaatttcatttactatctttggttaattttggcaaatcttgattcagtgcctattgtaagtatgaaactattttatatgttacatgtagacatatgcctcctttaagaagttcattaagggtggaaagtctgtcctatgttttgtagttcttatagcatccagcaacacaactcattaaatacttgccaaactctgtttaattcatgataagaaaataaacctttgtctccctgatacagagtagaagttgcacatgaaagttaagctgtgttagttctcactcataagtgggaattgaacaatgggaacacatggacacagggagggaaacatcatacacggaggcctgtcgggggtgggagcaaggggagggagtacattaggacaaatacctaatgcatgcagggnctaaaac

SEQ ID NO: 672392 - DNA, 1394 bp, Homo sapiens
  misc_feature 1387: n = A,T,C or G
cccatgtccctgcaaaggacatggactcattcttttttatggctgcatagtattccatgttgtatatgttccacattttctttatccagtctatcatcgatgggcatttgggttggttccaagtcttggctattgtaaatcatacaaaatcagcattcccaaatgctttcacctaatgacattcgctcgtgttttactttcagccagaattctgtggccaactcctaatttttctccattgactattttcttcttatttttccatgtggtaatgaaacttcctttaatttaataaattgaaaaaaattattttaggatctcactctgtcatccaggctggagtrcagtagtgtgatcatagctcactgcagcctcaaactcctggggtcaatggattctcctgcctcagcctctcaagtagctgggattacaggcatgtgccaccatacctagctaagattttttttccagagatggagtcttgctgtgttgccaaggttggtcttgaactcttagcctcaagtgatctcacctcagcctcccaaagcactgggattagagttgtaagccacagcaactgacctccctttaattttagttagacatggccacacaggtaaagactacctttccttctacctcctctagcatggcacctaatatacatatgacactaatatccaccgtgctctgctcagctactcaggaaattacgtatttattctggatcctgagacagaagatggattttgctctctggatctgtcagttcccagtcagaggacattgtgaatctcagtaaattatcttgagctcaggatccctgtcttaaagtgtggcagctagaccagatgacttatgacttgccttcacaaagtggctgatttctaatatctcttcaagctttaaaattctgtgaccctgtagagcacagagagcctgtgtttaaatttttccaaagtagtctatctatatatgtaatttcatttactatctttggttaattttggcaaatcttgattcagtgcctattgtaagtatgaaactattttatatgttacatgtagacatatgcctcctttaagaagttcattaagggtggaaagtctgtcctatgttttgtagttcttatagcatccagcaacacaactcattaaatacttgccaaactctgtttaattcatgataagaaaataaacctttgtctccctgatacagagtagaagttgcacatgaaagttaagctgtgttagttctcactcataagtgggaattgaacaatgggaacacatggacacagggagggaaacatcatacacggaggcctgtcgggggtgggagcaaggggagggagtacattaggacaaatacctaatgcatgcagggnctaaaac

SEQ ID NO: 672393 - DNA, 648 bp, Homo sapiens
atattttctggaaaataactaaattgagttcctcttaactaaatcagaaagagaaggaatcctcaatcaggatttcatgtagtactgtatcactcaaaggaaaactgattgtatagtggtactcaaataaagtgggtccaaagaaaaattatgagagaaacgtaccgatcagtgatctggaccaaacagacatgtggctgtgaaatccaggcagttgcttggtgacgaggtcaccrtcagatagtcatggcttatgtgcaggaatgtgagaatggccatggggaggaatggcctgggttatgggtcttgcaggagtcccactgcttgtgccattgctcaaacttctgactgccctgtgcagccggtgccaggtcagcagtactctctgctctgaatcagtgtcagcactggtctctctaatgtagtacctttcttcaaaaaatgctttgtgaagctgctggttagcactgttcttacttctgtagttaatattcaccacatattccccttcttttgtggagagataaagaaattaaggaaaatcactctccataagtccacaatctgaagacatggaggctgaggaggcagacctgaatgaataagtggatcatatgatagggctagatcttaaatttggatacagga

SEQ ID NO: 672394 - DNA, 593 bp, Homo sapiens
ctgcccataatttctaagagcccctacacagtgttttacatgggctcaagaataaggcatatctgcggccacgtggatatctgcagccacgtggatatctgctgctgagttttcttgaacacttctagtactcatcagtgagccagccccattaagccaggtcattaccatgtgctgctggacatcttcatgacctccgttgtggccctcaaagaatcaaaatgcttgtttcctggaatctccaatactgcaaaatcgtgccatcattttctgcacaagyggcaacaagctgtaacccctcatcttttgattatgttgtgtgatgtagtaatgattttagtgcactcctatttctgctcttggtactttcctagtggactccacgaggctgtattggaatatgaatcttcaagataggtaaggtgtcattccctcaatccaaggattaacagctggcatggcatgggcactgaccaactggaacactggctggtgcactgtagctgtgcaaattgactgaaaagcagtctggccaacccccacctctctgtcatccacacttcttggcagtctttccaccaaaacccttatgt

SEQ ID NO: 672395 - DNA, 593 bp, Homo sapiens
ctgcccataatttctaagagcccctacacagtgttttacatgggctcaagaataaggcatatctgcggccacgtggatatctgcagccacgtggatatctgctgctgagttttcttgaacacttctagtactcatcagtgagccagccccattaagccaggtcattaccatgtgctgctggacatcttcatgacctccgttgtggccctcaaagaatcaaaatgcttgtttcctggaatctccaatactgcaaaatcgtgccatcattttctgcacaagcggcaacaagctgtaacccctcatcttttgattatgttgtgtgatgtagtaatgattttagtgcactcctatttctgctcttggtactttcctagtggactccacgaggctgtattggaatatgaatcttcaagataggtaaggtgtcattccctcaatccaaggattaacagctggcatggcatgggcactgaccaactggaacactggctggtgcactgtagctgtgcaaattgactgaaaagcagtctggccaacccccacctctctgtcatccacacttcttggcastctttccaccaaaacccttatgt

SEQ ID NO: 672396 - DNA, 638 bp, Homo sapiens
gaggaagagagggaaggaaacaaggaaggataaattcttattcagcatctctcatgaagcttgtggtgaaacaatgaacaagtaagtaraagataaaatagtttccagagagtggtatgtgtaatttaaaaattaataaatcagcataaggagatgggcaatggatgaataaataaatgaatgtatgaacttaccaaatttctggtaaatgcaaacaacacaaatatttaagttatgcccacccaggatttttcccaccagatgtatagagctagagggagccactaaatgtttaaattagtttgtgagggctgtcataacaaaataccacagactgggtggtttaaacaacagaaatttgctgtcttacagttcaggaggctagaattctgatatcaaactgtcagcagtgttgcttccttctaaggattgagggaagtatttgttccagatctctcttcttggcttgtagatgtccatctcttccctgtcttttttttttttttgagatggagtctcgctctgtcgcccaggctggagtgcagtggtgcaatctcagctcactgcaagctccaccctcccgggttcatgccattctcctgcctcagcctcccaagtagctgggactacaggcaccc

SEQ ID NO: 672397 - DNA, 639 bp, Homo sapiens
gaacatccacagggcaagacggcaggtggcagctgggagttaggccaccacacagccagcttaatgtgagggaatcttctgaggcctaaagggcattatgtggtgtccaggatcccctagttggtgcttgaaagtaaagccagaactggggttcaagaactcagagtcagaggatgagcgcttgtgctaatagagccccaagaaacacaaagtcaggcaaagaaatgaggtgtgctttcatagattttaataaggatttgaaggagaaatggaagaaaatgagatccaaggagacgagggtggaattgaactggactaaagacctattctgtctacgagctgatcttaccctaagctgaccctgatgtctagagagcttgtatcatttacttttctcttttatctttccttggtgcacaggtagtgactacttatctcccatctccctgttcatgtcctgatrgaaacttttcttcctctgtctccaaacacattggcttttcctaccagaaactgaagggggcctcatgtggaatctgtcattgactcatgaagtgtccagtcagaaagtgtatccaaatgaatgtgaggaatgtatgttggccaggtatggtggctcatgcctatactcccagcctt

SEQ ID NO: 672398 - DNA, 639 bp, Homo sapiens
gaacatccacagggcaagacggcaggtggcagctgggagttaggccaccacacagccagcttaatgtgagggaatcttctgaggcctaaagggcattatgtggtgtccaggatcccctagttggtgcttgaaagtaaagccagaactggggttcaagaactcagagtcagaggatgagcgcttgtgctaatagagccccaagaaacacaaagtcaggcaaagaaatgaggtgtgctttcatagattttaataaggatttgaaggagaaatggaagaaaatgagatccaaggagacgagggtggaattgaactggactaaagacctattctgtctacgagctgatcttaccctaagctgaccctgatgtctagagagcttgtatcatttacttttctcttttatctttccttggtgcacaggtagtgactacttatctcccatctccctgttcatgtcctgatggaamcttttcttcctctgtctccaaacacattggcttttcctaccagaaactgaagggggcctcatgtggaatctgtcattgactcatgaagtgtccagtcagaaagtgtatccaaatgaatgtgaggaatgtatgttggccaggtatggtggctcatgcctatactcccagcctt

SEQ ID NO: 672399 - DNA, 639 bp, Homo sapiens
gaacatccacagggcaagacggcaggtggcagctgggagttaggccaccacacagccagcttaatgtgagggaatcttctgaggcctaaagggcattatgtggtgtccaggatcccctagttggtgcttgaaagtaaagccagaactggggttcaagaactcagagtcagaggatgagcgcttgtgctaatagagccccaagaaacacaaagtcaggcaaagaaatgaggtgtgctttcatagattttaataaggatttgaaggagaaatggaagaaaatgagatccaaggagacgagggtggaattgaactggactaaagacctattctgtctacgagctgatcttaccctaagctgaccctgatgtctagagagcttgtatcatttacttttctcttttatctttccttggtgcacaggtagtgactacttatctcccatctccctgttcatgtcctgatggaaacttttcttcctctgtctccaaacacattggcttttcctaccagaaactgaagggggcctcatgtggaatctgtcattgactcatgaagtgtccagtcagaaastgtatccaaatgaatgtgaggaatgtatgttggccaggtatggtggctcatgcctatactcccagcctt

SEQ ID NO: 672400 - DNA, 1227 bp, Homo sapiens
  misc_feature 6, 7, 8, 9, 10, 11, 12, 13, 14, 15, 16, 17, 18, 19, 20, 21,22, 23, 24, 25, 26, 27, 28, 29, 30, 31, 32, 33, 34, 35,36, 37, 38, 39, 40, 41, 42, 43, 44, 45, 46, 47, 48, 49,50, 51, 52, 53, 54, 55, 56, 57, 58, 59, 60, 61, 62, 63,64: n = A,T,C or G
  misc_feature 65, 66, 67, 68, 69, 70, 71, 72, 73, 74, 75, 76, 77, 78, 79,80, 81, 82, 83, 84, 85, 86, 87, 88, 89, 90, 91, 92, 93,94, 95, 96, 97, 98, 99, 100, 101, 102, 103, 104, 105: n = A,T,C or G
ggcttnnnnnnnnnnnnnnnnnnnnnnnnnnnnnnnnnnnnnnnnnnnnnnnnnnnnnnnnnnnnnnnnnnnnnnnnnnnnnnnnnnnnnnnnnnnnnnnnnnnnacatgcagaattagctcagtgaatatgctgaatttccctgtctgcagactggtctgccatacccaaggaccaagctgaactctatttggggattgttgaaatctaggtcagttccaatttagtgtaagctcctagggtgcaggaactttgtcttttttgtatcttcagtgcctagaagaaagtttggtgcacagtaagtggttgagaaatatwtgttaaatgaatgaatgaagggccatagtgatgactggaagacctctataagtaaccccatctgtttcctggagtcttagctggaaaccatagctaagtgcatgacactcaagcttcctcttgttggggaaggtttctagtcttatgaaaggaaagtagcacttagtggaacattactttcagctgcttaggaatttgtactgtcttagtgtagtattttaaagccaatcagtgcagaagattaagtctgtccttctacctggtcttaaaggaacacagtgggggctctgacaggaagtggctgtgcaatgccgcagagattcttgggtggttgaagagatagacttcaggccataaattaatcaacgatgtttctcattcatctctacttcccaattatgtgaactagctaaacactactttaaaagtaaagcaatatctcctacataatttggaggccccatgaacacaaactcagatttatactctctgtaggcttgagcatgtattgagatctcttttgtgtgccagtatttactactaggtccagtgccagtacaataaataataaattggttttgtaaatccttccaaggactgagcattgcataggctgagtaaatgattaccttgtgattaacttcttaaggaatgtcttttcaatttttctatgaaatcttctgggtgcaaacaaccccagagcctgggaacatgacctgttccttccctctcaagtcagtctgtttggagcatttactgagcagccattgctgcagaacttatctaatattttcgtttggcaaaaatgtagagttgctatctaacaacagtaattcttcattgaaataaaaaggcaaaaatgaatgcaatctctctgtgaaaagactaaatttacaactacttataaaa

SEQ ID NO: 672401 - DNA, 626 bp, Homo sapiens
gtggctcacatatgaatcccaacattttgggaggctgagacgggaggatcacttgaggccaggaattcaacactagcctgaataacacagcgagaacttatttctgcaataataataataataataattttttaattagccagatgtggtggtcacgtgcatctatagtttcagctactcaagtggctgaggcagaaggatcacttgagcccaaaggttcaaggttataataagctatgatcatgccctgagaccctgtctctaaaaaaattaaaaggctgggtacaggggtcatgcttataatcccaacactttgggaggtcaaggcaagaggattgcttgagcccaggtgttccagaccagcccagtatttacaaaaaataaaaaaaaccagacaggtatggtggcacacacctatagtcccagctacttggatggcaggatgatcccctgagcctgggaggtcgaggctgcagtgagccatgatcacaccactatactccaaagaccctgtctcaaaaagtaattaattaattaaaataaaatttaaaagataggaaaatcagcttgtatctstatgctccacagccaaacttgagattaaaaagctctttcagataatctcc

SEQ ID NO: 672402 - DNA, 578 bp, Homo sapiens
gagaaaaggagggaactaatattgctgtgtactgtgtcaagccctgctctaaggcagctagagacagcaatacttactacttttagtaaccacacacacagataaacttacttagaaatactcagagaacagctttttccaagcttcatcaggggcctttctggggcatgcccaagcctcttcagctttacccttgggctagtgagtctggggacaataatgtctcactgttgtcaaatgtccaagccccatgcccagcctctcgccttccctgactggcaaagggctttgcaaaaagtgcctggaagtgaagggttgacagtaatgaggcagaaacaggaggtgtctctcttccagagagcaccaccactactagtaattagtctttcttggtagtttccaccttgggggaaaaagctttatttaaccaacccagaacaaatagaactgtaactggaatttcacaatatttctagctgactcctgcttaaatgctaccttctcaatgaagcctttcttgaccrccttatctagccatttcagacccttgcttgttttattttacttactaaaacttg

SEQ ID NO: 672403 - DNA, 491 bp, Homo sapiens
ccccttaaatgtagtatttctcaattctctatctttggccctctgcccttcccacactatgaattccccctgtgtatcacatttactttctatattttaaatagggatggctcccagatccatatctccatcccacgtcactgtcctgatcatcagactcatacagctgagagctcagtagacacctgtgagccctaggaagataggatcaacgtcctgcttgcacaaataagtgggtgtggggatatgcatgtatgagtgtgtgtgtgtttgtgtgtgtgtgtaggaagagcaaactgtctggaaagtgtttatatcagtaagctgaggttatttttatggaagaggtgaactttcccctttttatattatgtgcatgtccacgtattcwtttgaatgttccataatgagcatgaactgcttttatgatttttagaaatctaaagaaatacaaaggattatttaaaattgcatactcataccctcaactg

SEQ ID NO: 672404 - DNA, 1464 bp, Homo sapiens
tgttggtagcttgaaactggccttagtgaggtggaaatattcctaataaacaaaaccagttgcttttgtttgtttgttttcagggattggttgttaagcatttgccagactgcctctgcacctgtacctccaaacttttaaactgtttttttgcattcactgttttcttttgccatagtgtatatcaccttggatcgtaagatatgcagtaatcacaagcttctgttcgaagacctaaggcatttgcagtgcagccttgatgatacagacatgtcctgtaatccaacaagtacacagtatacttcttcatggggagctcagatcctcagctctggcaaacattactgggaggtggatgtgaaagactcttgtaattgggttataggactttgcagagaagcctggacaaagaggaatgacatgcgacttgactctgagggtatctttctactcctgtgtctcaaagtggatgaccatttcagtctcttctctacctccccactgttacctcactatattccaaggccccaaggctggctaggggtgttcctggattatgaatgtgggatagtgagctttgttaatgttgcccaaagttccctcatttgtagtttcctctcacgcatcttctattttcctctcagacctttcatttgccacggatctaaataatcagggacaggtcacaaacctgaccaaggccttgggaattctaatagcagaggaggctcctattctggttactttcttaatggggaaaatcagtcatatctcattaccttttacttcattttacctcctggatatatatttatcgtatcattttttaaagtgttgataatgaacatttgtcatttctattttatttgaatagatgtaacrtctcttattatattgtataggatgcatgttcttttaacttgttatcaaagcgtactagaggtgaaagaatacatgagcatgaaaacccagctaactgagtcaaattaaagcacagacaagttgccttccagatagcccttatttaaaactcagtgtcagcctaaaattctctattccctgccttcatctggataaacctttcccttcaccagttcccacctttctgaactagacgaggtctcagatgtcaagaatggctcatacatttcctctataaaactcctaacagaacttgggtctttttttcaagtttgtaaattacaaaaagggaatgccagtgatagttcttctcattcattataggaataagaaacagtctgatgatatgagagatattcaagaaatatgtaaataattaaatgaataaacatgtaaaaattattaaaatcaaaagctatagacccaacaaaaatatgctacagtatagccataattagcaagacagaacaggctgagaaatatcattacataaaggatacatagatatggtaccatggtacttaagccttcttgttcaattga

SEQ ID NO: 672405 - DNA, 1464 bp, Homo sapiens
tgttggtagcttgaaactggccttagtgaggtggaaatattcctaataaacaaaaccagttgcttttgtttgtttgttttcagggattggttgttaagcatttgccagactgcctctgcacctgtacctccaaacttttaaactgtttttttgcattcactgttttcttttgccatagtgtatatcaccttggatcgtaagatatgcagtaatcacaagcttctgttcgaagacctaaggcatttgcagtgcagccttgatgatacagacatgtcctgtaatccaacaagtacacagtatacttcttcatggggagctcagatcctcagctctggcaaacattactgggaggtggatgtgaaagactcttgtaattgggttataggactttgcagagaagcctggacaaagaggaatgacatgcgacttgactctgagggtatctttctactcctgtgtctcaaagtggatgaccatttcagtctcttctctacctccccactgttacctcactatattccaaggccccaaggctggctaggggtgttcctggattatgaatgtgggatagtgagctttgttaatgttgcccaaagttccctcatttgtagtttcctctcacgcatcttctattttcctctcagacctttcatttgccacggatctaaataatcagggacaggtcacaaacctgaccaaggccttgggaattctaatagcagaggaggctcctattctggttactttcttaatggggaaaatcagtcatatctcattaccttttacttcattttacctcctggatatatatttatcgtatcattttttaaagtgttgataatgaacatttgtcatttctattttatttgaatagatgtaacgtctcttattatattgtataggatgcatgttcttttaacttgttatcaaagcgtactagaggtgaaagaatacatgagcatgaaaacccagctaactgagtcaaattaaagcacagacaagttgccttccagatagcccttatttaaaactcagtgtcagcctaaaattctctattccctgccttcatctggataaacctttcccttcaccagttcccacctttctgaactagacgaggtctcagatgtcaagaatggctcatacatttcctctataaaactcctaacagaacttgggtctttttttcaagtttgtaaattacaaaaagggaatgccartgatagttcttctcattcattataggaataagaaacagtctgatgatatgagagatattcaagaaatatgtaaataattaaatgaataaacatgtaaaaattattaaaatcaaaagctatagacccaacaaaaatatgctacagtatagccataattagcaagacagaacaggctgagaaatatcattacataaaggatacatagatatggtaccatggtacttaagccttcttgttcaattga

SEQ ID NO: 672406 - DNA, 1562 bp, Homo sapiens
taaaacacaaaagatgatagcttctgtattgttccttttcttgaactatagagcaatgccattagaaattatgttctttaagcatttgatgatcccaatttctatttcagattcacttttttctgcagtaaaaaattttacagaaattgcttccaagttcagcgagagactccaggactttgacaaaagcaagtatgttctacatatatgtrcatatgtgtatatgtgtgtgtgtgtatatatatatatatatatatatatatatatatatatatatatttaaaagtaaactaacatcactgttgctgaactagctttgggaatttcttgctgttttcttttttttaaatttgtcgaacttaaagtctccgggacgcatgggcagaacgtgcaggtttgttacataggtatacaagtgtcgtttcctgctgttttctgtctttccactctagcacatcctatgtagggctgccgtatctcaaaagacctactttcaacattctgagtggcaattgtgctgctcagaaatgtcagtccctccctcctgccatttgatcagttacaaaatactctgcttaacattgaaggtcctctactgtgtgaccccagctgtttccagttttatttcttgctttttcagtatctgtacatcataactcagccagactatttatttttcaaagcatgatttctttctacctcttttgtttttgtcattacctccacatagagctccttatttccacttccatctggcaaaattctgtttatccagaatagcaaatattgtgaagccattaattttggaaatgttaaacatttaggattaattctgtgtaagattacacaagtacaacacaatttgaacaaaattttaagatggaaggaaaaatacttggtgagaatactaaggtaatttttttaaagtataattttgagggcacagatctgtgtattaaatatagtatcatgatataaatatcaaatccccaggagctgatgtaaggacacataaaaacattacagtagatgatgtagaaataggctcagtgatctataaggaagtattagtaataaacgatacagcaaaaattaatggggaaagattactcaaccataataatatataaactatgttagtacctgctataaaagtaaattcagaatcgcacttcacattgtatgctaacataaacaacaggtgtaaagaattatttagtaaaaatggaaatttcttgaaagatgccaagtttagaagcaatggggaaatgatgcaatcagacttgagaccatttgaaatggttcagaatacgaaaattaatattcacaagaaaaattaagaaagttgaaaacttattttctagcaaaaatggagagtaatatatacattctaaaaatattttttgaaaattaatttaaacagtccaaaagaaccagctgaaaatattggtaagaaacaagacaatatacacctgtaaggaaacatagcaaaatattgcagttcactaatgcataattcagaaatacaaatgaaagtaatgtgatgttatttttataacaca

SEQ ID NO: 672407 - DNA, 2834 bp, Homo sapiens
tgccttagcggtgtcccccgggtctgtgctgagcagaacgcagctccgccctcgcggtgcccccggcccgcctgggtctgtgctgaggagaacactgctccgccttcgctgtatctctgaagtctgtgcagaggagaactcagcaacgccctggcgatgctctccttggctgtgctgggaagaacgcagctccgccctcgcaaaggcgcacagcgcgggcgaaaggcgcagagaggcccacagcgccggggcaggcgcagagaggcccacagcgccggcgcaggcgcagagaggcagaaggcccatgaggggaaggtgagacacctggggcaaagaagaaaaaaaaatgcgccgcgaagcagtgtctgggtcatccagggacgaaagttttttcccatcaggccttgcgctgggccccagggaccctggcatccctggttcacgcccggggtgtgcctcaggcgactaggggtaccccaacttggacagaaggcccatgagtggaagttgaagtttgtgggaggagaggtgaggcaccaggggcagaaaaaataaaaaaagaggaccgcgtctcagagaagcggggcctgggtcccccacggatgaaagtgccttcccatcaggccctatgctgggcctggtggaccctggcgaccctggttcgagcccagggtgcgcctcgggacagcttggggtaccacaaagcaaagaaaaggtccatgaggggaaggtgaggcacctgaggcagagaaaaaaaaaatgctcagccgagaagcagtgcctgggtcccccacggatgaaagtgccatcccatcagccccttcgctgggccctggggaccctggcgtccctggtttgaccctggggtacgcctcgggacagtaggggtaccccaaggtgggcagaaagcccctaaggggaaggtgaggcacctagggcagagaaaaaaaaaaacttcaccacggagaaacacggcctgggagccccacagacgaaagtgtcttcccatcagtccctgcactgggacccaggaaccctggtgtccctcgttcgagctcagggtgtgcctcggccgctaagtgcaccccaagggggctttggggacacaaaacccgtgaggggaaggtgagttttgagggaggagaggtgaggcacctgtcacagaaaaagaaaaaaaagaaacccgcaccgcggagaggtggggcctgggtaccccacggatgaaagtgccttcccatcagcccctgcgctgggccccggggaacctagagtccctggttggagctcagggagagtctcgggccactagggataccccaacacggtggaaagcccatgagaggaaggtgagctgtgagggaggagaggtgaggcacttgtggcagaaaagaaaaagaaaccgcgccacggaaaagtggggcctgggtctcccatggaaaaaaagtgccttcccatcagtccctgagctgggccacgtggacccaggcgaccctggttctaggcctgggtgcacctcgggcccgctaggtgtaccccaaaacgggcagaaggcccatgaggggaaggtgaggtttgagggaagagaggtgaggcacctgcggcagaaaaaaaaaaaaaccgtgcggaagagaagcggggcctgggtctcccacggacgaaagtgccttctcatcagcccctgcgctgggccccctggactctggcgaccctagttcaaggaccagaagagactccggcatgctagggtaccctaaggaagccagaaagcccatgaggggaaggcgagatttaagggaggagaggtgagtcacctgtggcagaaaaaatatatatatatatatatatatatcagcacctcggagaagccgggcctgggtccccactgatgaaagtgccttcccatcagcccctgcgctagccccgagaacctggcgaccctgattggagacccgggagcgcctcgggcctgctcgtggtaccccaaagcaggcagaaggccagtgaggggaaggtgaggcaccaggggcggagaaaaaaaaccgcagctttgagaagcggggcctgggtacccacggatgaaggtacattcccatcagcccctgcgctaggccccggcgaccctggcatccatggttcgagtccagggagagccttgggccggaagggtaccccaagtagagcagaaagcccatgatgggaagttgacgtttgagggaggagaggtgaggaaactgtggcagaaaaaaaaaaagaaaacaagccgcgcctaggagaagctgggcctgggtaccccaaggatgaaaatgccttcccatcagtccctgcgctgggccctgtggacgctggagaccccagttcgagccccgggtgcgccccgggcctgctaggggtaccacaaggrgggcagaaatcccatgaggggcagttgaggtttgaggaaggagaggtgaggcacctgtggcagaaaaaaaaaaaactgcaccacggagaagcggagcctggatccccaacggaagaaagtgtcttcccatcagcccttgcgctgggcacaggggaccctggcattcctggttcgagaccagggtgcgattcaggccgctagggtaccccaagacagacagaaggcccatgagggaaaggtgagacacctggggcagagaacaaaataaaaaactgcgcccaccagaagtggggcctgggttccccatggacgaacgtccctacccataagccctacactgggccccggagaccctagcatccctggctcaaaacaagggtgcgcctcgggccggctaggggtacctcaaggcgggcagaaagcccatgacggg

SEQ ID NO: 672408 - DNA, 2834 bp, Homo sapiens
tgccttagcggtgtcccccgggtctgtgctgagcagaacgcagctccgccctcgcggtgcccccggcccgcctgggtctgtgctgaggagaacactgctccgccttcgctgtatctctgaagtctgtgcagaggagaactcagcaacgccctggcgatgctctccttggctgtgctgggaagaacgcagctccgccctcgcaaaggcgcacagcgcgggcgaaaggcgcagagaggcccacagcgccggggcaggcgcagagaggcccacagcgccggcgcaggcgcagagaggcagaaggcccatgaggggaaggtgagacacctggggcaaagaagaaaaaaaaatgcgccgcgaagcagtgtctgggtcatccagggacgaaagttttttcccatcaggccttgcgctgggccccagggaccctggcatccctggttcacgcccggggtgtgcctcaggcgactaggggtaccccaacttggacagaaggcccatgagtggaagttgaagtttgtgggaggagaggtgaggcaccaggggcagaaaaaataaaaaaagaggaccgcgtctcagagaagcggggcctgggtcccccacggatgaaagtgccttcccatcaggccctatgctgggcctggtggaccctggcgaccctggttcgagcccagggtgcgcctcgggacagcttggggtaccacaaagcaaagaaaaggtccatgaggggaaggtgaggcacctgaggcagagaaaaaaaaaatgctcagccgagaagcagtgcctgggtcccccacggatgaaagtgccatcccatcagccccttcgctgggccctggggaccctggcgtccctggtttgaccctggggtacgcctcgggacagtaggggtaccccaaggtgggcagaaagcccctaaggggaaggtgaggcacctagggcagagaaaaaaaaaaacttcaccacggagaaacacggcctgggagccccacagacgaaagtgtcttcccatcagtccctgcactgggacccaggaaccctggtgtccctcgttcgagctcagggtgtgcctcggccgctaagtgcaccccaagggggctttggggacacaaaacccgtgaggggaaggtgagttttgagggaggagaggtgaggcacctgtcacagaaaaagaaaaaaaagaaacccgcaccgcggagaggtggggcctgggtaccccacggatgaaagtgccttcccatcagcccctgcgctgggccccggggaacctagagtccctggttggagctcagggagagtctcgggccactagggataccccaacacggtggaaagcccatgagaggaaggtgagctgtgagggaggagaggtgaggcacttgtggcagaaaagaaaaagaaaccgcgccacggaaaagtggggcctgggtctcccatggaaaaaaagtgccttcccatcagtccctgagctgggccacgtggacccaggcgaccctggttctaggcctgggtgcacctcgggcccgctaggtgtaccccaaaacgggcagaaggcccatgaggggaaggtgaggtttgagggaagagaggtgaggcacctgcggcagaaaaaaaaaaaaaccgtgcggaagagaagcggggcctgggtctcccacggacgaaagtgccttctcatcagcccctgcgctgggccccctggactctggcgaccctagttcaaggaccagaagagactccggcatgctagggtaccctaaggaagccagaaagcccatgaggggaaggcgagatttaagggaggagaggtgagtcacctgtggcagaaaaaatatatatatatatatatatatatcagcacctcggagaagccgggcctgggtccccactgatgaaagtgccttcccatcagcccctgcgctagccccgagaacctggcgaccctgattggagacccgggagcgcctcgggcctgctcgtggtaccccaaagcaggcagaaggccagtgaggggaaggtgaggcaccaggggcggagaaaaaaaaccgcagctttgagaagcggggcctgggtacccacggatgaaggtacattcccatcagcccctgcgctaggccccggcgaccctggcatccatggttcgagtccagggagagccttgggccggaagggtaccccaagtagagcagaaagcccatgatgggaagttgacgtttgagggaggagaggtgaggaaactgtggcagaaaaaaaaaaagaaaacaagccgcgcctaggagaagctgggcctgggtaccccaaggatgaaaatgccttcccatcagtccctgcgctgggccctgtggacgctggagaccccagttcgagccccgggtgcgccccgggcctgctaggggtaccacaaggagggcagaaatcccatgaggggyagttgaggtttgaggaaggagaggtgaggcacctgtggcagaaaaaaaaaaaactgcaccacggagaagcggagcctggatccccaacggaagaaagtgtcttcccatcagcccttgcgctgggcacaggggaccctggcattcctggttcgagaccagggtgcgattcaggccgctagggtaccccaagacagacagaaggcccatgagggaaaggtgagacacctggggcagagaacaaaataaaaaactgcgcccaccagaagtggggcctgggttccccatggacgaacgtccctacccataagccctacactgggccccggagaccctagcatccctggctcaaaacaagggtgcgcctcgggccggctaggggtacctcaaggcgggcagaaagcccatgacggg

SEQ ID NO: 672409 - DNA, 2834 bp, Homo sapiens
tgccttagcggtgtcccccgggtctgtgctgagcagaacgcagctccgccctcgcggtgcccccggcccgcctgggtctgtgctgaggagaacactgctccgccttcgctgtatctctgaagtctgtgcagaggagaactcagcaacgccctggcgatgctctccttggctgtgctgggaagaacgcagctccgccctcgcaaaggcgcacagcgcgggcgaaaggcgcagagaggcccacagcgccggggcaggcgcagagaggcccacagcgccggcgcaggcgcagagaggcagaaggcccatgaggggaaggtgagacacctggggcaaagaagaaaaaaaaatgcgccgcgaagcagtgtctgggtcatccagggacgaaagttttttcccatcaggccttgcgctgggccccagggaccctggcatccctggttcacgcccggggtgtgcctcaggcgactaggggtaccccaacttggacagaaggcccatgagtggaagttgaagtttgtgggaggagaggtgaggcaccaggggcagaaaaaataaaaaaagaggaccgcgtctcagagaagcggggcctgggtcccccacggatgaaagtgccttcccatcaggccctatgctgggcctggtggaccctggcgaccctggttcgagcccagggtgcgcctcgggacagcttggggtaccacaaagcaaagaaaaggtccatgaggggaaggtgaggcacctgaggcagagaaaaaaaaaatgctcagccgagaagcagtgcctgggtcccccacggatgaaagtgccatcccatcagccccttcgctgggccctggggaccctggcgtccctggtttgaccctggggtacgcctcgggacagtaggggtaccccaaggtgggcagaaagcccctaaggggaaggtgaggcacctagggcagagaaaaaaaaaaacttcaccacggagaaacacggcctgggagccccacagacgaaagtgtcttcccatcagtccctgcactgggacccaggaaccctggtgtccctcgttcgagctcagggtgtgcctcggccgctaagtgcaccccaagggggctttggggacacaaaacccgtgaggggaaggtgagttttgagggaggagaggtgaggcacctgtcacagaaaaagaaaaaaaagaaacccgcaccgcggagaggtggggcctgggtaccccacggatgaaagtgccttcccatcagcccctgcgctgggccccggggaacctagagtccctggttggagctcagggagagtctcgggccactagggataccccaacacggtggaaagcccatgagaggaaggtgagctgtgagggaggagaggtgaggcacttgtggcagaaaagaaaaagaaaccgcgccacggaaaagtggggcctgggtctcccatggaaaaaaagtgccttcccatcagtccctgagctgggccacgtggacccaggcgaccctggttctaggcctgggtgcacctcgggcccgctaggtgtaccccaaaacgggcagaaggcccatgaggggaaggtgaggtttgagggaagagaggtgaggcacctgcggcagaaaaaaaaaaaaaccgtgcggaagagaagcggggcctgggtctcccacggacgaaagtgccttctcatcagcccctgcgctgggccccctggactctggcgaccctagttcaaggaccagaagagactccggcatgctagggtaccctaaggaagccagaaagcccatgaggggaaggcgagatttaagggaggagaggtgagtcacctgtggcagaaaaaatatatatatatatatatatatatcagcacctcggagaagccgggcctgggtccccactgatgaaagtgccttcccatcagcccctgcgctagccccgagaacctggcgaccctgattggagacccgggagcgcctcgggcctgctcgtggtaccccaaagcaggcagaaggccagtgaggggaaggtgaggcaccaggggcggagaaaaaaaaccgcagctttgagaagcggggcctgggtacccacggatgaaggtacattcccatcagcccctgcgctaggccccggcgaccctggcatccatggttcgagtccagggagagccttgggccggaagggtaccccaagtagagcagaaagcccatgatgggaagttgacgtttgagggaggagaggtgaggaaactgtggcagaaaaaaaaaaagaaaacaagccgcgcctaggagaagctgggcctgggtaccccaaggatgaaaatgccttcccatcagtccctgcgctgggccctgtggacgctggagaccccagttcgagccccgggtgcgccccgggcctgctaggggtaccacaaggagggcagaaatcccatgaggggcagttgaggtttgaggaaggagaggtgaggcacctgtggcagaaaaaaaaaaaactgcaccacggagaagcggagcctggatccccaacggamgaaagtgtcttcccatcagcccttgcgctgggcacaggggaccctggcattcctggttcgagaccagggtgcgattcaggccgctagggtaccccaagacagacagaaggcccatgagggaaaggtgagacacctggggcagagaacaaaataaaaaactgcgcccaccagaagtggggcctgggttccccatggacgaacgtccctacccataagccctacactgggccccggagaccctagcatccctggctcaaaacaagggtgcgcctcgggccggctaggggtacctcaaggcgggcagaaagcccatgacggg

SEQ ID NO: 672410 - DNA, 2834 bp, Homo sapiens
tgccttagcggtgtcccccgggtctgtgctgagcagaacgcagctccgccctcgcggtgcccccggcccgcctgggtctgtgctgaggagaacactgctccgccttcgctgtatctctgaagtctgtgcagaggagaactcagcaacgccctggcgatgctctccttggctgtgctgggaagaacgcagctccgccctcgcaaaggcgcacagcgcgggcgaaaggcgcagagaggcccacagcgccggggcaggcgcagagaggcccacagcgccggcgcaggcgcagagaggcagaaggcccatgaggggaaggtgagacacctggggcaaagaagaaaaaaaaatgcgccgcgaagcagtgtctgggtcatccagggacgaaagttttttcccatcaggccttgcgctgggccccagggaccctggcatccctggttcacgcccggggtgtgcctcaggcgactaggggtaccccaacttggacagaaggcccatgagtggaagttgaagtttgtgggaggagaggtgaggcaccaggggcagaaaaaataaaaaaagaggaccgcgtctcagagaagcggggcctgggtcccccacggatgaaagtgccttcccatcaggccctatgctgggcctggtggaccctggcgaccctggttcgagcccagggtgcgcctcgggacagcttggggtaccacaaagcaaagaaaaggtccatgaggggaaggtgaggcacctgaggcagagaaaaaaaaaatgctcagccgagaagcagtgcctgggtcccccacggatgaaagtgccatcccatcagccccttcgctgggccctggggaccctggcgtccctggtttgaccctggggtacgcctcgggacagtaggggtaccccaaggtgggcagaaagcccctaaggggaaggtgaggcacctagggcagagaaaaaaaaaaacttcaccacggagaaacacggcctgggagccccacagacgaaagtgtcttcccatcagtccctgcactgggacccaggaaccctggtgtccctcgttcgagctcagggtgtgcctcggccgctaagtgcaccccaagggggctttggggacacaaaacccgtgaggggaaggtgagttttgagggaggagaggtgaggcacctgtcacagaaaaagaaaaaaaagaaacccgcaccgcggagaggtggggcctgggtaccccacggatgaaagtgccttcccatcagcccctgcgctgggccccggggaacctagagtccctggttggagctcagggagagtctcgggccactagggataccccaacacggtggaaagcccatgagaggaaggtgagctgtgagggaggagaggtgaggcacttgtggcagaaaagaaaaagaaaccgcgccacggaaaagtggggcctgggtctcccatggaaaaaaagtgccttcccatcagtccctgagctgggccacgtggacccaggcgaccctggttctaggcctgggtgcacctcgggcccgctaggtgtaccccaaaacgggcagaaggcccatgaggggaaggtgaggtttgagggaagagaggtgaggcacctgcggcagaaaaaaaaaaaaaccgtgcggaagagaagcggggcctgggtctcccacggacgaaagtgccttctcatcagcccctgcgctgggccccctggactctggcgaccctagttcaaggaccagaagagactccggcatgctagggtaccctaaggaagccagaaagcccatgaggggaaggcgagatttaagggaggagaggtgagtcacctgtggcagaaaaaatatatatatatatatatatatatcagcacctcggagaagccgggcctgggtccccactgatgaaagtgccttcccatcagcccctgcgctagccccgagaacctggcgaccctgattggagacccgggagcgcctcgggcctgctcgtggtaccccaaagcaggcagaaggccagtgaggggaaggtgaggcaccaggggcggagaaaaaaaaccgcagctttgagaagcggggcctgggtacccacggatgaaggtacattcccatcagcccctgcgctaggccccggcgaccctggcatccatggttcgagtccagggagagccttgggccggaagggtaccccaagtagagcagaaagcccatgatgggaagttgacgtttgagggaggagaggtgaggaaactgtggcagaaaaaaaaaaagaaaacaagccgcgcctaggagaagctgggcctgggtaccccaaggatgaaaatgccttcccatcagtccctgcgctgggccctgtggacgctggagaccccagttcgagccccgggtgcgccccgggcctgctaggggtaccacaaggagggcagaaatcccatgaggggcagttgaggtttgaggaaggagaggtgaggcacctgtggcagaaaaaaaaaaaactgcaccacggagaagcggagcctggatccccaacggaagaaagtgtcttcccatcagcccttgcgctgggcacaggggaccctggcattcctggtwcgagaccagggtgcgattcaggccgctagggtaccccaagacagacagaaggcccatgagggaaaggtgagacacctggggcagagaacaaaataaaaaactgcgcccaccagaagtggggcctgggttccccatggacgaacgtccctacccataagccctacactgggccccggagaccctagcatccctggctcaaaacaagggtgcgcctcgggccggctaggggtacctcaaggcgggcagaaagcccatgacggg

SEQ ID NO: 672411 - DNA, 580 bp, Homo sapiens
agcagagtatgcatccagcattctggctttttggagggctatctgagggagtggtatctgactctcctgattcagggaactgatggcatacacttggtggctgcttagaacaggggacagctgggtagcttcctgctctaaaatcagataacttgcagtgttgcagacagacatcaaagggtgcaaggattatgggctcctgaaaaaggattcagagttccctaaaatctgttgcaaagatgactggtgaggggcttctgctgtagcaagccagtctctatactggaagaggtggctgattcttcaaatgtgcagatcccaatacagctacaagagacagaacaaacaggaaaacatggttcaatggaacaaaatgaatttccagaaattgaccgtaaagaaacaaaggtataagaattacctgcataaacactgtaaagatrctcaacaagctaaaaaaagatgaataaacaaaatgagaatatcaacaaagagaaaatatttaagggaactaaatagatattttcaagctgaagaatataataactgaaatgaaaaattcagatgagaggctcaagag

SEQ ID NO: 672412 - DNA, 1369 bp, Homo sapiens
attcaaatgtctctttttctgttgaacaaatcccaatttctacttattttaatgaggaatacaggctagaatgacaatatgtgcaacatcttatgtttttcactttcctcccaataccagggcttgctcgggtttgttcmctgttaccaagctatggtacgtaaatctgtttctacagcagcataaagggctagtcatttaggctatatttttacaaaggaactaatcgaggaagtgctgatgttcaatgagaaatgcttcactactatttcactggcttcataaggcaggagtcaataaagtaagctcaaaataaagcattttaaaatcacatctccttaaatctgtccattttgaacagtgaaatagaaatgccaagtggctcttacggacacagcttgaccatgcaaattattccagtgctagaatcccatgataagaaagatacacattttacacacacacacacacacacacacacacacacacacacaaacaaaacaacaacaacagcaacaacaacaaaaaacaatggtaaaaaacaacgggagagaggctgcagccatggagatgtcacattctcagactcaggacaactacatttgtaatagacacgatgaagaaagacaaagtaggaatttgcttttttattcccccaccttttgtctttgcttttacagttctttagggatgcatacatactgtttttagaagacaatactagcaaaatagatttcagagatggcagaaaaatattacatttgacaaagaaaaggcatggagatagaaaataccacaaactcataaaattgttttaagttaggaagtgataatttttaaaaaatgaaattgaaaatactagatacaagaaaagttgttgtggttatatgtcaatagatttaaatcagtaagacctttcataatatatacaacaacattttatctaaaaggcaagttttcgaagtcacttaggatttcatttacttatattaggggttaatccccaaagtatataaggaactcaaaacaatacaatagcaagaaaacaaagcaattaaaaaatgggcaaaggactttgctatggtttcattgtatccccttcaaacttcatatcgaaacttaatcctcattgtgtagtattaagagatggtgccttttggaaagtgattgagtccctcatgaagcggtaagtgtcttatagaagtgctggagtgatataggttagacccttttttgcccccgtcttctgtcatgtgaggatacaacatttatcctcacaaatgctgtcaggaaaatctggaaaactgtaagaaggctcctcaaaaaactaaaaatggaattaccaaataatctagcaatcccacttctg

SEQ ID NO: 672413 - DNA, 1324 bp, Homo sapiens
caacagttccacatacttcatggtttctgggaacaatagacctgaaaaaggtctatgttagaaaatctcaaagtttatgtactcaactaatagaagatacgagacattttccagtgaaagagtggaaagtctcatatcccagtgaaagagtggctggagccaggcaagtgcaatcagagaaagggcaaagccatcattctttattcaagtcagaggctgaaggaaagttaatgcacagttgctgtgcagtggccaagttagttgaagctgggtgaagtcataacagttagagacctctccccacaacagcattttaaacttccagtaattacaaggctctcacactagagtgttcatatttacttaagaagasactaatgggaaaaatattagcttggctagtaccatctttacaatactgagtaggttaatcaactttagaacgccagcttttcaatttaaaaaatgggaacagtatccttctatgagattgtgaagctcagatggaagaagtaacctacaaactattatactaacaaaccagtctcatttctggctaaatggccaatgaagcaagctggctcaggcaatctgccaagccgtttcctacatttgtgatgtataatgctctgatctgggagtggttattcttttagatatgaaatatacagaaatgctctgcagggctatgtgggctttctttaatacgggaatactgctcttaaatgtctcttcaaaaaggtggggggctccttgtgcttatttgtttcatgtttttgctacatggaatgggtatgtagacgctatggcttattttttcataaagggactatctaaatatccagggttgaggtggtgagagggagagggagcggaggcatgtgtctgatctttggtaaaatttctctaactagaagacaagtatgtagaagtcatgtcatatatataattaatgtctatgggaatgaggaatggggtgatatggtatttttgacctgtgtttatgccacatcgctagctccagaacacgaagccctctgccttgcctggcactagtgctaggaggatttatggaggcatttgtctcctatctgaagtggaaacaaaggtagaagaaattacttatttttcaataaaggtaccagggaaagtaagggcctttatttggatggttgagaaggcctaactcttaatcatttcatacacagactgctgtaggaagattgtgaaaagggaggaaaataaggtctgaataaagccagtcactttatttttattttatttttgagacaggctctcactgtcacgcaggctagagtgcaat

SEQ ID NO: 672414 - DNA, 3082 bp, Homo sapiens
  misc_feature 910, 2169, 2227, 2230, 2232, 2238, 2239, 2240, 2241, 2242,2243, 2244, 2245, 2246, 2247, 2248, 2249, 2250, 2251, 2252,2253, 2254, 2255, 2256, 2257, 2258, 2259, 2260, 2261, 2262,2263, 2264, 2265, 2266, 2267, 2268, 2269, 2270, 2271: n = A,T,C or G
  misc_feature 2272, 2273, 2274, 2275, 2276, 2277, 2278, 2279, 2280, 2281,2282, 2283, 2284, 2285, 2286, 2287, 2288, 2289, 2290, 2291,2292, 2293, 2294, 2295, 2296, 2297, 2298, 2299, 2300, 2301,2302, 2303, 2304, 2305, 2306, 2307, 2308, 2309, 2310: n = A,T,C or G
  misc_feature 2311, 2312, 2313, 2314, 2315, 2316, 2317, 2318, 2319, 2320,2321, 2322, 2323, 2324, 2325, 2326, 2327, 2328, 2329, 2330,2331, 2332, 2333, 2334, 2335, 2336, 2337: n = A,T,C or G
tctcccttgtcatgaccctcaaagtaatgtgagaattttagaaggatgcggcaaatcatttactttgtgatctttcggtttcagctaactccatacctctttctacaaagcctattttcccaaaaagagatcatggtctaaggtgaagcattccatgctccaatattccttacctgatgtattccaaaaggaagatgacaaaagggtttgtgttagatatggtccttcctaatttggacacttgaaaacagttcagataaaaaataaaacaaaaaataattataaaagtgttgtttacaaagctgctctggtaatatgtaaaatgttaatgaaagatatgggtttccagtggcagggtctggagaaggggtggcaggcaccagatccagccatcaaagtggcaagaagcagccctgaaatgagccaaggagatgggcgaggaggcgagggcttctaagcagaaacaaaaagaaaagacaaagaaactctggagctgaaagcaaaggctgtgggcaagggtcccctgcccaaaaggttgatttaagaaatctgtccacaagtaagttgttctttgcgtctgaggtgatggtgatccttgccttccgttcttacttaaacatctgtattccctgccataacatattttgccacctacagctaaaatgaagtgctgtcttggaatctgttgaacatttaaaaataaacttttgtaaaaaaacaaaaacaagcaaagaaaacaacaacaacaacaataaaaaagcaaaaaagatacagtatagttgaaatataaagtcctttaaataaagatctgggtggacaaaggaaggctagttttaaaaaagaataattctttcaatctcatatatgcattattatatattttggaaaatctaaaataacaataaatcanatgtattcctcgccagtctccattccaaagcagttgatcatctcagtggtgcaagcgtgcataccatgagggtcgccatctgattcagtactgcggatagtaaatcaaacgggaggcctctttgccagagaaacacaggtgtggaaaggcaactacagcagtgtgtaaagagtggaaggacatgtgttcgtggacaaacaccaaaaacaagaagttcaaaatgaatcctttcagatcctttcctctgaatacccatatgtcaataatacactgaaaacagacatgttgtcacaaacttctgtaaggaatgacattaggtataatctttctggaggtaatttagaaatatgttttcagaactgtaaacagttcctaccatgtgccccatgacacccctaggaatcttaagaaaataaaagagatatgtgcatgtgtgtgtgtgcagtgctattttataaatgaaaaactaaaaaagagtatgtctgaaagtgggggaaaagttaaattatgataaatctatttaacaaaaaatactacatgcatttaaaaatgaatatgtttataaatgatctagggacagaagaaacaaaaccataattacatatcatttcacagtcaccaaataccagattgatgaaaaccaaaaatgtttctaaaaaacttttaataagaaactgtttatgataacatacagagtgaaaagaataagacgccaaaactgtgttatactatgattccacatagatttaaacagtctcttcctgggagtgctgttagcaagacagcagaataggtagtcccagctcccatctccccaataaaaatattgagtaatcartgatttatggaccaaaatacctactaagacaataccaaaatccagtgaagaggttgtggtaccccaggagagcacaaagccaagaaacccacgctgaaacaggtaagaagagtgatttcatcttacccacatcaacccctccctgaagctagcatgcctcagcaccagaagagaatgccctggcccctgacatctctgatgggggaaaggaaagtggtctttgctattctggcttttcagagggctgcctgggtaatggcttaatcttggttcaattgggatactgagggaactgcaatagtgtggatacctgggcactgctatgaacttaggcaagtggtgggtggttcgctgcagtctgcctgcttgatgcaattgggtgtattggtggtcagctgatcttctctttgttgctgcgttngtgtgttgcctttttttttgttgcttgctcttgttctctctttcctttgttcgcctcnctnantttttnnnnnnnnnnnnnnnnnnnnnnnnnnnnnnnnnnnnnnnnnnnnnnnnnnnnnnnnnnnnnnnnnnnnnnnnnnnnnnnnnnnnnnnnnnnnnnnnnnnnggacccggaagcaaggtggataccctaaaacgaaaacggaaggggccctgcagggggagctaagcaatggctaaaagacaggaactagagcatacatgtgagcaaatcggaaaaacatgatgagtgaaaaagaaattacaaaagaaagcctttaattagtttttatatcaagtataaaacctagagaatacacttctggttttgttttgttttgtttttttgagatggagtcttgctctgtcacccagactggagtgcagtggcgcaacctcgactcactgcagcctccatctcccaggttcaagtgattctcctgcctcagcctcctgagtcactgggattacaggcacgtgctaccacgcctggctaatttttgtatttttagtagagacagggtttcaccatgttagtcaggctggtctcaaactcctgaccttgtgatccacctgcctcagcctcccaaagtgctgggattacaggcgtgaggcaccccacacccggctacacttctgtatttttatggttacatatctttatatatgaataacactgaaaaggaatgagatgagcacgtacatgtgtagggagtttccatttatttatattttatttcttaaattcctatgttagattcatgggtgtttttcatatatcattcaatatgactttttatatatttaaaactttttttagaaaagaaggaaaatacatcatgcttttattttttgaagtggtccagtcacta

SEQ ID NO: 672415 - DNA, 3082 bp, Homo sapiens
  misc_feature 910, 2169, 2227, 2230, 2232, 2238, 2239, 2240, 2241, 2242,2243, 2244, 2245, 2246, 2247, 2248, 2249, 2250, 2251, 2252,2253, 2254, 2255, 2256, 2257, 2258, 2259, 2260, 2261, 2262,2263, 2264, 2265, 2266, 2267, 2268, 2269, 2270, 2271: n = A,T,C or G
  misc_feature 2272, 2273, 2274, 2275, 2276, 2277, 2278, 2279, 2280, 2281,2282, 2283, 2284, 2285, 2286, 2287, 2288, 2289, 2290, 2291,2292, 2293, 2294, 2295, 2296, 2297, 2298, 2299, 2300, 2301,2302, 2303, 2304, 2305, 2306, 2307, 2308, 2309, 2310: n = A,T,C or G
  misc_feature 2311, 2312, 2313, 2314, 2315, 2316, 2317, 2318, 2319, 2320,2321, 2322, 2323, 2324, 2325, 2326, 2327, 2328, 2329, 2330,2331, 2332, 2333, 2334, 2335, 2336, 2337: n = A,T,C or G
tctcccttgtcatgaccctcaaagtaatgtgagaattttagaaggatgcggcaaatcatttactttgtgatctttcggtttcagctaactccatacctctttctacaaagcctattttcccaaaaagagatcatggtctaaggtgaagcattccatgctccaatattccttacctgatgtattccaaaaggaagatgacaaaagggtttgtgttagatatggtccttcctaatttggacacttgaaaacagttcagataaaaaataaaacaaaaaataattataaaagtgttgtttacaaagctgctctggtaatatgtaaaatgttaatgaaagatatgggtttccagtggcagggtctggagaaggggtggcaggcaccagatccagccatcaaagtggcaagaagcagccctgaaatgagccaaggagatgggcgaggaggcgagggcttctaagcagaaacaaaaagaaaagacaaagaaactctggagctgaaagcaaaggctgtgggcaagggtcccctgcccaaaaggttgatttaagaaatctgtccacaagtaagttgttctttgcgtctgaggtgatggtgatccttgccttccgttcttacttaaacatctgtattccctgccataacatattttgccacctacagctaaaatgaagtgctgtcttggaatctgttgaacatttaaaaataaacttttgtaaaaaaacaaaaacaagcaaagaaaacaacaacaacaacaataaaaaagcaaaaaagatacagtatagttgaaatataaagtcctttaaataaagatctgggtggacaaaggaaggctagttttaaaaaagaataattctttcaatctcatatatgcattattatatattttggaaaatctaaaataacaataaatcanatgtattcctcgccagtctccattccaaagcagttgatcatctcagtggtgcaagcgtgcataccatgagggtcgccatctgattcagtactgcggatagtaaatcaaacgggaggcctctttgccagagaaacacaggtgtggaaaggcaactacagcagtgtgtaaagagtggaaggacatgtgttcgtggacaaacaccaaaaacaagaagttcaaaatgaatcctttcagatcctttcctctgaatacccatatgtcaataatacactgaaaacagacatgttgtcacaaacttctgtaaggaatgacattaggtataatctttctggaggtaatttagaaatatgttttcagaactgtaaacagttcctaccatgtgccccatgacacccctaggaatcttaagaaaataaaagagatatgtgcatgtgtgtgtgtgcagtgctattttataaatgaaaaactaaaaaagagtatgtctgaaagtgggggaaaagttaaattatgataaatctatttaacaaaaaatactacatgcatttaaaaatgaatatgtttataaatgatctagggacagaagaaacaaaaccataattacatatcatttcacagtcaccaaataccagattgatgaaaaccaaaaatgtttctaaaaaacttttaataagaaactgtttatgataacatacagagtgaaaagaataagacgccaaaactgtgttatactatgattccacatagatttaaacagtctcttcctgggagtgctgttagcaagacagcagaataggtagtcccagctcccatctccccaataaaaatattgagtaatcaatgatttatggaccaaaatacctactaagacaataccaaaatccagtgaagaggttgtggtaccccaggagagcacaaagccaagaaacccacgctgaaacaggtaagaagagtgatttcatcttacccacatcaacccctccctgaagctagcatgcctcagcaccagaagagaatgccctggcccctgacatctctgatrggggaaaggaaagtggtctttgctattctggcttttcagagggctgcctgggtaatggcttaatcttggttcaattgggatactgagggaactgcaatagtgtggatacctgggcactgctatgaacttaggcaagtggtgggtggttcgctgcagtctgcctgcttgatgcaattgggtgtattggtggtcagctgatcttctctttgttgctgcgttngtgtgttgcctttttttttgttgcttgctcttgttctctctttcctttgttcgcctcnctnantttttnnnnnnnnnnnnnnnnnnnnnnnnnnnnnnnnnnnnnnnnnnnnnnnnnnnnnnnnnnnnnnnnnnnnnnnnnnnnnnnnnnnnnnnnnnnnnnnnnnnnggacccggaagcaaggtggataccctaaaacgaaaacggaaggggccctgcagggggagctaagcaatggctaaaagacaggaactagagcatacatgtgagcaaatcggaaaaacatgatgagtgaaaaagaaattacaaaagaaagcctttaattagtttttatatcaagtataaaacctagagaatacacttctggttttgttttgttttgtttttttgagatggagtcttgctctgtcacccagactggagtgcagtggcgcaacctcgactcactgcagcctccatctcccaggttcaagtgattctcctgcctcagcctcctgagtcactgggattacaggcacgtgctaccacgcctggctaatttttgtatttttagtagagacagggtttcaccatgttagtcaggctggtctcaaactcctgaccttgtgatccacctgcctcagcctcccaaagtgctgggattacaggcgtgaggcaccccacacccggctacacttctgtatttttatggttacatatctttatatatgaataacactgaaaaggaatgagatgagcacgtacatgtgtagggagtttccatttatttatattttatttcttaaattcctatgttagattcatgggtgtttttcatatatcattcaatatgactttttatatatttaaaactttttttagaaaagaaggaaaatacatcatgcttttattttttgaagtggtccagtcacta

SEQ ID NO: 672416 - DNA, 555 bp, Homo sapiens
agtgttcagtattttaagtaataatcaaatctaagaaaaaaattccaaataaatctgggagtaaaaaatatatatcaagatataaatttagttatattaagaacatagaaaggacaaagataaagcaagcaaataaacgaaacggtgaaagaagcaccacaggagaaatttatcctgaaaacatgatcctctgaatttgaatttgaactcaggaagaaaaaacagtaagttttttatgtgttttttttttccccttcttgagttaatattgagtcattactaaagtggtgtatgtctccaagtattttttttttctgaattctattttcttaatgcctttcacctttgaggatgtctttcaatygccttgacacatcacatgactaaatgataatattattggatcactattgtttctccccaaactctatagatagccctatttttaacatgctaactgttgcaaagttgtccgaagttagtgtgatgtttttttcatttactctaagtttttttttttttctggatgtttacagggttttctatttgacatta

SEQ ID NO: 672417 - DNA, 629 bp, Homo sapiens
tttacagtggtaatggtacatgatagtgtatgcatttgtcacataatgtgaaaagtgccaaatttttatgatgtggaaggagactaaattatatcatattccattaaggaggggagaaagatacatgaaataaacagaatcaaaaaccggaataaacaaagatgttggccgggcacggtggctcctgcttgtaatcccagcactttgggaggccgaggtggagagatcacctgaggtcaggagttcaagatcagcctgcccaatgtggtaaaaccccatctctactaaacaaatacaaaaattagccgggcatagtggcaggtgcctgtagttccagctattcaagaggcttaggcacaagaatcgcttaaacctgggaagcagaggttgcagtgaaccgaaatgatgccactgcactccagcctgggtgacagagcgagactctgtcttgggaaaaaaaaaaaaaaatatatatatatayatatatatagatagatagatagatagatatagatatagatatatagatatagatatagatttattatgcccaaattttcctgtattcctccactcttgaataactaggaggaattcagattaaaagcttatttttttcagcaatgaga

SEQ ID NO: 672418 - DNA, 629 bp, Homo sapiens
tttacagtggtaatggtacatgatagtgtatgcatttgtcacataatgtgaaaagtgccaaatttttatgatgtggaaggagactaaattatatcatattccattaaggaggggagaaagatacatgaaataaacagaatcaaaaaccggaataaacaaagatgttggccgggcacggtggctcctgcttgtaatcccagcactttgggaggccgaggtggagagatcacctgaggtcaggagttcaagatcagcctgcccaatgtggtaaaaccccatctctactaaacaaatacaaaaattagccgggcatagtggcaggtgcctgtagttccagctattcaagaggcttaggcacaagaatcgcttaaacctgggaagcagaggttgcagtgaaccgaaatgatgccactgcactccagcctgggtgacagagcgagactctgtcttgggaaaaaaaaaaaaaaatatatatatatatakatatatagatagatagatagatagatatagatatagatatatagatatagatatagatttattatgcccaaattttcctgtattcctccactcttgaataactaggaggaattcagattaaaagcttatttttttcagcaatgaga

SEQ ID NO: 672419 - DNA, 629 bp, Homo sapiens
tttacagtggtaatggtacatgatagtgtatgcatttgtcacataatgtgaaaagtgccaaatttttatgatgtggaaggagactaaattatatcatattccattaaggaggggagaaagatacatgaaataaacagaatcaaaaaccggaataaacaaagatgttggccgggcacggtggctcctgcttgtaatcccagcactttgggaggccgaggtggagagatcacctgaggtcaggagttcaagatcagcctgcccaatgtggtaaaaccccatctctactaaacaaatacaaaaattagccgggcatagtggcaggtgcctgtagttccagctattcaagaggcttaggcacaagaatcgcttaaacctgggaagcagaggttgcagtgaaccgaaatgatgccactgcactccagcctgggtgacagagcgagactctgtcttgggaaaaaaaaaaaaaaatatatatatatatatatakatagatagatagatagatagatatagatatagatatatagatatagatatagatttattatgcccaaattttcctgtattcctccactcttgaataactaggaggaattcagattaaaagcttatttttttcagcaatgaga

SEQ ID NO: 672420 - DNA, 1202 bp, Homo sapiens
  misc_feature 373, 374, 375, 376, 377, 378, 379, 380, 381, 382, 383, 384,385, 386, 387, 388, 389, 390, 391, 392, 393, 394, 395, 396,397, 398, 399, 400, 401, 402, 403, 404, 405, 406, 407, 408,409, 410, 411, 412, 413, 414, 415, 416, 417, 418, 419: n = A,T,C or G
  misc_feature 420, 421, 422, 423, 424, 425, 426, 427, 428, 429, 430, 431,432, 433, 434, 435, 436, 437, 438, 439, 440, 441, 442, 443,444, 445, 446, 447, 448, 449, 450, 451, 452, 453, 454, 455,456, 457, 458, 459, 460, 461, 462, 463, 464, 465, 466: n = A,T,C or G
  misc_feature 467, 468, 469, 470, 471, 472, 575, 586: n = A,T,C or G
tccctaggtcgccccctccccgtcgttccctcctcagcccttcctagcactagcagcacgcgcgcgcrcacacacacacacacacacacacacatacacacacgcacacgcactttaccttcagtttgttccattctaaccccccggccgtgtcagtgcgatcacaggagagacacggaggcccggagtggggctggggtgcgggcagccgctggggccgcgcgaggaggaggcggaacgcgagctaggccgcatgaaatccccgggctagattttccgccgcgcggacgccgtactccatggcggccggcactgaggagcgcacgcgggccgggccgggcgtgctgcgggaagaggaaggctcgggaggtgnnnnnnnnnnnnnnnnnnnnnnnnnnnnnnnnnnnnnnnnnnnnnnnnnnnnnnnnnnnnnnnnnnnnnnnnnnnnnnnnnnnnnnnnnnnnnnnnnnnnaaattagctgagtgtggtgacgcacacctgtaattccagctacctggggggctgaggcataggaatcgcttgaacccgggaggcaagaggttgcagtgaaccnagatcgtgccnctgtactccagcctgggtgacagagactctgcctcaaaaaaaaaagattagtaatacacatcaaatctgtcagaatttcaaagccttaataatattacttatataaatttcaaaaacatagagtaaaatcatagtccctaaaagaacaaaaaactgatgtcaacattaaagttggaaagaaaattttaaaggtaataaattgtgcatttttattttactttctgaatgacttaagtttgtaaccttaaaaataaaaaatgtgggccaagtgcagtggctcacacctgtaatccaagcagtttgggaggccaaggtgggtggatcaccctaaggtcaggggttcgcgaccagcctggccaacataatgaaaccccatctctactaaaaatacaaaaactagccaggcgtggtggcacacccctgtaatcccagctactgaggaggctgaggcaggataatcgcttgaatcctggaggcagaggttgcagtgagccgagactgcaccactgcactccaccctgggcaacagagtgagattctgtctcaaaaataaacacataaaatcaaataaaaaatgtgtacaataaagaacattttgcatataaagagtttctaa

SEQ ID NO: 672421 - DNA, 1202 bp, Homo sapiens
  misc_feature 373, 374, 375, 376, 377, 378, 379, 380, 381, 382, 383, 384,385, 386, 387, 388, 389, 390, 391, 392, 393, 394, 395, 396,397, 398, 399, 400, 401, 402, 403, 404, 405, 406, 407, 408,409, 410, 411, 412, 413, 414, 415, 416, 417, 418, 419: n = A,T,C or G
  misc_feature 420, 421, 422, 423, 424, 425, 426, 427, 428, 429, 430, 431,432, 433, 434, 435, 436, 437, 438, 439, 440, 441, 442, 443,444, 445, 446, 447, 448, 449, 450, 451, 452, 453, 454, 455,456, 457, 458, 459, 460, 461, 462, 463, 464, 465, 466: n = A,T,C or G
  misc_feature 467, 468, 469, 470, 471, 472, 575, 586: n = A,T,C or G
tccctaggtcgccccctccccgtcgttccctcctcagcccttcctagcactagcagcacgcgcgcgcacrcacacacacacacacacacacacatacacacacgcacacgcactttaccttcagtttgttccattctaaccccccggccgtgtcagtgcgatcacaggagagacacggaggcccggagtggggctggggtgcgggcagccgctggggccgcgcgaggaggaggcggaacgcgagctaggccgcatgaaatccccgggctagattttccgccgcgcggacgccgtactccatggcggccggcactgaggagcgcacgcgggccgggccgggcgtgctgcgggaagaggaaggctcgggaggtgnnnnnnnnnnnnnnnnnnnnnnnnnnnnnnnnnnnnnnnnnnnnnnnnnnnnnnnnnnnnnnnnnnnnnnnnnnnnnnnnnnnnnnnnnnnnnnnnnnnnaaattagctgagtgtggtgacgcacacctgtaattccagctacctggggggctgaggcataggaatcgcttgaacccgggaggcaagaggttgcagtgaaccnagatcgtgccnctgtactccagcctgggtgacagagactctgcctcaaaaaaaaaagattagtaatacacatcaaatctgtcagaatttcaaagccttaataatattacttatataaatttcaaaaacatagagtaaaatcatagtccctaaaagaacaaaaaactgatgtcaacattaaagttggaaagaaaattttaaaggtaataaattgtgcatttttattttactttctgaatgacttaagtttgtaaccttaaaaataaaaaatgtgggccaagtgcagtggctcacacctgtaatccaagcagtttgggaggccaaggtgggtggatcaccctaaggtcaggggttcgcgaccagcctggccaacataatgaaaccccatctctactaaaaatacaaaaactagccaggcgtggtggcacacccctgtaatcccagctactgaggaggctgaggcaggataatcgcttgaatcctggaggcagaggttgcagtgagccgagactgcaccactgcactccaccctgggcaacagagtgagattctgtctcaaaaataaacacataaaatcaaataaaaaatgtgtacaataaagaacattttgcatataaagagtttctaa

SEQ ID NO: 672422 - DNA, 1019 bp, Homo sapiens
gagccactgcatcctgctttgaatgtattttaaattaactccagtatacagagtacttacaatgtaaatattgtgaattcttgcatgtttgaaaatagctttggcctgggtcataattgcttgatagtttggctgggtgtagaaatttaaattcaaattaattctctcttacaacttagaggtttttgctcaattctgttgagcatcaagacggtaagatgtctgatgctattctgtcttgttattttctaaatgatcctttccctcgctcacaaagataagctttagtatcttatctttgtccttcgtagttatggaattttataattatgtgtttagatatgaattgtttttgttattctttgctggactcagtaggtcctttcagttgaaatgcaagtgtctcccttcagttatggaaaatgttcttttattatttccttggtaatatttcttagtctatgtttgcccattttgggatacttactagcagaatattggctttcttgattgatcctcatttctttatctcttttctcaagttttctgtcttttttattctgtattttgacagatgttttcaattgtatgtttctgacctgcgaatgtttataaattgttaatgagtagcttttgcttattttctgctggtatcatttcaagagacaacacaggatagtagctaaaagcattgacaatggaaccagacttcctgactgtgtggrtttagatcacagctccacaacttcaaaaccatgacaatgggcaaatgattaatctctttgtcctcagtttctagtctacaaaatgaggataataatacctaccttgtgagtaaaggagttcatatttattaagcatttgtaacagttcttggcatagtggactcttgtattattatttgttaaatatacctatttttgtttaattgaatgcggtatcttcagtagtcctttgagaatactttgttctattttgagatttcttctatgtcctgaataaactatgatttttttgaa

SEQ ID NO: 672423 - DNA, 589 bp, Homo sapiens
taaaaacaaacaaaaaagaataaatctataagacaatgaaaagaacagagagaaagtgtttacaatagatttctggagaacagaaagcagacccaagtgtgttaagtttaaacagaactaagcgaagcacagcccaaaatctacacatgaaaggactacagtggaggtctaagtcaatctttcagagattctacgctcccctcaatgactaagcaagggccagtgtcacctgtaggtacaaaaagtgaaatactctttttttcctaaagacagtwaacaaactgaacagaaagaaactgggtcttctggtgtcaatgtcagtatctgtagagcccatttctatatggcaattggaaagctccgaagcctaaaaacaggttccctgatcttttgccctaaacctaacttgccagcaaacaagagatgctccaactatgtacaaagagttgccagtcttctcattccaagatggcaattagaaaacaagtccatgactacaatccaggaaaccaacagcagtacctaatataatcaagatggtcctttagcaagaaccatgaactaacaataaggatccccagatatacaa

SEQ ID NO: 672424 - DNA, 1878 bp, Homo sapiens
aggttgctatgggtttaaaaaaaaaaaaaaagcaaaacacttatccagtgcctggtacatagtacatgttttaaaaatagccacgattctcattttacttgttcttgattttactatgctcatatttcttattttcatatgttgtttccttacaggcaaggtgaaaagattaaattacatttatgatacatgtttattttaaaggttacccattcaaactagttataaaatagtttgatagttaagaatgtaggtgtcagttctctggaatgcgartcaattgattgtataattatttagagaaatagggattctattcaactattgtggacacaagtgtaacaacagaataaatacatacctatactgttcaaacagagtttgcttttgtaggagctagaaaatatgaatcagattattctaagaaatctttgtgtgagaataatagcaaagccctacaatgttatttgctatggtcatgtctgttcttacaaagggactttaaatgacatagtttacaaaaatggcttaggacagaaataatacatttactcctgagaattatacagaacaagagaatatttatttctctgttgttaccactttgatcatttccctttacaatatagacatcagcaaagatgtcaacctgaagcaaataattcaagatactttctgatttggagtagaaaggcaattgttccaagatgttctgaatgtggtctgcacaaatgaacagtttcttatggcaaaaagattattataataattcctgggctataattgtgaaattgtgccataattaatacattttagaaatatgagttcacatatactttgctgataggcttttatataaatggatgttctaatttaaatctatattttaaattgtgactgaattcttaaaaactgcaagtcaacttaagcctgaaattaaaggctctcattatacctaatcactgagatctgcaacatcacagtctttcaaaatttatatataaatatacacgtttctttagactacattcatattattaattgttagttgtattcaaatattttattcctactactctaagagcacctcagagaagggaacttgctttattcatctaagatctgttcccttgtttggcacatttgagatgtgcaatattaattgaaagaaaatcagtaatgtcacaggtaatctatgcttaatagtaaatttatgagcgttaagaaaaattgaaatacttactaaaaatactaaacattgttcattatattagttcatatatatttttatttaaacatcttaattgtacaaaacataggaatgttcaggaagcttactgcatcctatactttggtaaaggcacagctggttcttcgtgtcactaatatgataccttttatgataaatatgacaaaacatctgtgtctcttaaggcatggatagcttctcttatcaataacaggcacttctagttgaatcaatacaccaggaggcctatgcagctaatttaaagtagtgatgagtaatatgaagaatgagtaaaacaaagtaagggaatagagagtgagtagaattgtagtgggctttctctttttaataaggtggtcagggaaagcctgtatgagtaagaaatatttaagtagaactctaaatgaagacatgaacagcacggtgacaatgtgaaaagggagaacattctggtgaaagaaacagaagttcaactctctgaggcaggaaataactctaatttcttaacaaacttaagaaatttcaagaaggacagtgtgatccagacagagttagcatagctaaagcaggaagaagtttaggttaaaagttaaatagtatgaggccttgtagcctgcattaggaagtta

SEQ ID NO: 672425 - DNA, 597 bp, Homo sapiens
aaaaacctgtaagtctaattctgtgaagttttcaagtagccaaaattttaattcagagttactattttgattatatccatttcatggatttcaaaattggaagtcacccaagatatttgtggttcaactacaatttgaaacacatttcacagggacctaagcagaagtggttttaaaaattccaattaaagctatgttaacattttcttttgtaaaccttttggtctctacgatggtttgaaaagcaatgaaataaaagcaaaaaataattttaacaaatataaacagaaccaataattgccttcaagtaaaaacttgatgcaaccttttaggaggactgctaatatctttaaactagtatgtattttcaaggaacaaatttgaaaataaatgtgttacatttgaatttttattctgttaataactagtttaattaaaaagaagtatgaaagctttactgagaaagaacaaaaacttcagaccacagtaattgtttggtttataatgcctttgcatcctataatatttcctttttaatatactgcacaaacttccttggagtggaaaaaargtgccttaatattttgacgaatgaac

SEQ ID NO: 672426 - DNA, 1233 bp, Homo sapiens
tttttctggttgatgaatttttcctttggacacagccgttattattgtgctaagaaattttaatttgtaaattctaaatataaattttttccttcttcatccattttgtccatcatctatttgagggttataagttgttttctttacctcttcttttttattgtttatgtattcatagtgctaagtggagcaatagaagtttgaactcttactatttaacagtttcttataagttgtttaaacaccctagttatttcacatatgaaagatattgcagttaaactgccaaaaatattaaaagagtgcaaagcctcacttcaaagtgatgttctaatgtgaccttcctccaaaagaccagactattttctgctaaggctatggaatcattacaactggatcacaaggtgtaattaatctgtattttatttataagaaatgaaagttttttacttagaagaaaaaaatctctttcaattgaatttacttccatagcaaacatagattcaattaaaaatgtaacattttcctatttagagttgacctttgctagtgaataagattctcctgatatatttgaaataatgagtttcgaaagaaaaagaggaaggtggaactaaaaataaaagacaaaattttattcttaccaatataaaaatattaactgcttataaaatagtaaagaaatctatatgtaataaaatcttgaatcaaaaaagttgggtttaaaaccaagagagagcaaatcaggaaaacattagagaacatttcagaaagctaaaaattgtaaaactccagctgtctagaattctttgaataacattattttgcatagtcagattttatagacatatgatgttttacctctaaaagttaaaaagcaaaattttggtttgtaaatgtttctaaaatatattatacgtttatctgaatccttaaataaaaaattctgctgagaatgtaagtctgcatccagatggtgaaacatgattattatgaacatctatttcactatctgtatataaaaagtgcataagactgaccattttaaatgtctccagactttgtactttgtgatcataatagctacttttcataattatgtggtttcctccattgtggataatctgctctcttacttctacatttatcactgtacctgyatatagcatcactctacagtttattttgttgtttctagtctatataagacatgttaatattgtgtgcaaaata

SEQ ID NO: 672427 - DNA, 575 bp, Homo sapiens
acasacacacacaatacaaggaacaatattttgggtatagccataacctatttgaggcaaataaactggaaaactttgctttagggggatacatgaatgttatcagggcttttgcaaatgccaggacttctgacaactgtttagtgtttttgctttcacagcttcacaatatcttatatagagaaaatggtgtcatacttctaagaaattacttttgtacaacatgcagggaactagacctgtttttctcctttttcactatagagtactcagtggcacatggatttatgtaaatattaaatggctataacttgctttgttaaaaactgttatagaactattcctgctgatttcagtgtaaattaattttggtaaaccttaacagtttctctttgtaacttaaattttttaaatagaaaatactatattcacatggcaaaacattcagaaagtatattaaggcataacgaagaaactaaaaatctataatcctacattctgaaatggtaattatgcataatttagaaacttacctttttacttatctataaaaatatatttttatatgagtaaat

SEQ ID NO: 672428 - DNA, 575 bp, Homo sapiens
acagacacacacaatacaaggaacaatattttgggtatagccataacctatttgaggcaaataaactggaaaactttgctttagggggatacatgaatgttatcagggcttttgcaaatgccaggacttctgacaactgtttagtgtttttgctttcacagcttcacaatatcttatatagagaaaatggtgtcatacwtctaagaaattacttttgtacaacatgcagggaactagacctgtttttctcctttttcactatagagtactcagtggcacatggatttatgtaaatattaaatggctataacttgctttgttaaaaactgttatagaactattcctgctgatttcagtgtaaattaattttggtaaaccttaacagtttctctttgtaacttaaattttttaaatagaaaatactatattcacatggcaaaacattcagaaagtatattaaggcataacgaagaaactaaaaatctataatcctacattctgaaatggtaattatgcataatttagaaacttacctttttacttatctataaaaatatatttttatatgagtaaat

SEQ ID NO: 672429 - DNA, 627 bp, Homo sapiens
gcagtctctaactcctgggctcaagcaatcctctcacctcagcttcctgagtagctgggactacaggaatgcgccactgagaccagttttcttttttttgaatttgtttgtagagatggggtttcactttatttcccaggctgagagattctgtagttctaacaggtgatggtgatactgctggtttaaggactacatttaagttaactgttatagattagtgcatttaaaatgcaaaaaaataaaaataaaaagtccctgataatgtgttaatagatagctaatagtttagctttcttaaatcatattatgttttactcagttaaattagccagagttagcaaccttttctgtaatrggaaaaatatagtaaatatttttggctttgtgggccatggagtctgttgcaactaatcaactctgccattgtcatgtgaaagcagccgtagacagtatgtaaatgtgtgggcatgaatgtgttccaatgaaactatttacaaaaataggcatctagccagggccatagtttacctacccctaaattatacatttgaattttattttatttgtttttgtttgtttgtttttcttttttctttcttttttttttttttagtagagttgggg

SEQ ID NO: 672430 - DNA, 604 bp, Homo sapiens
cttgaggcttgcctcttaattcaccattacatcagactgccaagcacaatatttgacaatgtgcatatttgctgagtgctgaatgaattcttgacataatgccatgcacccgccccctcaccccgccaaaatgctaaaatgactgtagtgacaaagagagggataaaactcatcaaaaccaaaaagtatctaagaccatccaaaggacactcaacaaagtgaggttcttacagtgctctacayagccctagggtgatgcagaatttatgccacgtacatttttacattcaccaatctttactaaacacttactatgtatcgggtactatgccagatatatgaatactgagagtacaaaagtgagtagaaaaagacaaggtctctccctaagaattgtttacaatctaatgtaaacattattagagagagacaaataatttattttcatttctatttgttgaatacatgtcatgaaagagaggtatatggtacaatgaatctataaagagggaaatggattcaatttgctgggacctgagggagtgaggcttgggccaagtggtaaggttaagaataaattaatcaaaaaagagaagtataggag

SEQ ID NO: 672431 - DNA, 1588 bp, Homo sapiens
gatggtcttcatctcctgacctcgtgatccacccaactcgtcctcccaaagtgctggaattacaggagtgagccaccacattcggtgtctgtttttatttttaagtcttctattctttttgatgaattttattctttttttttttttttttttttttttttggcagaggctcactctgttgcccaggttggagtacagtgatgccatcttggctcactacaaagtccgcctcctgaggtcaagcaattcttctgcctcagcttcttgagtagctgggagtacatgcacccaccaccgtaccctgctaatttttgaatttttagtagagatggggtttcatggtgtttgccaggctggtcttgaactcctgacctcagatgatttacccatctcagcctcccaaggtgctgggattacaggcgtgagccaccatgcctggccctggatgttttcttcttaaaaagccagttgagaattctaagtgtactcacttaaaaggaaaatttagtttgctataatatttctcatatttgctgtggtgaattcatctctaggaggtttctttgtataattatttcattatctctctaatagttaattctccacatgttttgtaatatttttkcacactcaccttgaatgagaagttctctacatgtcatagtcatataacaaacagaattcaccctccttcaccactaatcacacttctgtatattcaataaaatgtgcatttcttcatggatactctttgaatcatctaaatggagactctttatagaaatattgaatcattaattcttccatctactgtactcctttccaacatactgtcttactgatttttcactttttcctatttatatccattttgttctactaacccgtctgtcattggccttcttctatagccaacctcaaatttcagttcacattagctgtgaacagcactcaaattgctgctgtattcttaaaatataaatttacttcataaagcaaaagtgaattatatgcatgttacaaaaaatattcctagcagagataagatgggatggtatttgctgggatgtgcagcatcgttttttccaaattaatttctctcagaattctctcctccctactgccaggcagagctcaccactcacatgtcatgaatgacatttttagtcatttttcatcatatctgatcatatgacttgaattaatgtttagatctgctaagggcaaacaccaccatggaattaaatttgcaagagggaggaaggaggaagcaggagaaggtgggtagagtcttcagactagggtgcagatcttacacctgtagagggaaagagggaaggaaggctggttggggtagaaagagactgcagcatggttccaagaatgctttggcctaggtcactgcagactccttaaattaaagttactcattggagactctcacaactcactggaaacgtcctcacatacaatccccatgtagctctatgactgttggaaacatgactgctgcacaagtgtagaagtgcttccagagacagagggctaaagccaggctgtcgctgacttatgctgtctgattcaggat

SEQ ID NO: 672432 - DNA, 1588 bp, Homo sapiens
gatggtcttcatctcctgacctcgtgatccacccaactcgtcctcccaaagtgctggaattacaggagtgagccaccacattcggtgtctgtttttatttttaagtcttctattctttttgatgaattttattctttttttttttttttttttttttttttggcagaggctcactctgttgcccaggttggagtacagtgatgccatcttggctcactacaaagtccgcctcctgaggtcaagcaattcttctgcctcagcttcttgagtagctgggagtacatgcacccaccaccgtaccctgctaatttttgaatttttagtagagatggggtttcatggtgtttgccaggctggtcttgaactcctgacctcagatgatttacccatctcagcctcccaaggtgctgggattacaggcgtgagccaccatgcctggccctggatgttttcttcttaaaaagccagttgagaattctaagtgtactcacttaaaaggaaaatttagtttgctataatatttctcatatttgctgtggtgaattcatctctaggaggtttctttgtataattatttcattatctctctaatagttaattctccacatgttttgtaatattttttcacactcaccttgaatgagaagttctctacatgtcatagtcatataacaaacagaattcaccctccttcaccactaatcacacttctgtatattcaataaaatgtgcatttcttcatggatactctttgaatcatctaaatggagactctttatagaaatattgaatcattaattcttccawctactgtactcctttccaacatactgtcttactgatttttcactttttcctatttatatccattttgttctactaacccgtctgtcattggccttcttctatagccaacctcaaatttcagttcacattagctgtgaacagcactcaaattgctgctgtattcttaaaatataaatttacttcataaagcaaaagtgaattatatgcatgttacaaaaaatattcctagcagagataagatgggatggtatttgctgggatgtgcagcatcgttttttccaaattaatttctctcagaattctctcctccctactgccaggcagagctcaccactcacatgtcatgaatgacatttttagtcatttttcatcatatctgatcatatgacttgaattaatgtttagatctgctaagggcaaacaccaccatggaattaaatttgcaagagggaggaaggaggaagcaggagaaggtgggtagagtcttcagactagggtgcagatcttacacctgtagagggaaagagggaaggaaggctggttggggtagaaagagactgcagcatggttccaagaatgctttggcctaggtcactgcagactccttaaattaaagttactcattggagactctcacaactcactggaaacgtcctcacatacaatccccatgtagctctatgactgttggaaacatgactgctgcacaagtgtagaagtgcttccagagacagagggctaaagccaggctgtcgctgacttatgctgtctgattcaggat

SEQ ID NO: 672433 - DNA, 2524 bp, Homo sapiens
tgttttaaaggttagagataaacctgtagtttaataattctaagatactctatttctcatattttaacatctctgacattgaaatgccacttataagtcattatttgttacaagtatattctgcagaaatttaaacaatcttttattgttacataaataaggaggcatcacacaattcacggtgccttccatgaagtggcatatggtatatacaacaggatgatggcagtcctagtcataggattaacacttaaagaaattttagcttttaagagtgctacacaaaaggagagttgaaataaaaacaaactgttaaaacaaagtacttctttaatatttttaaaacttcaagccaaagaaaacttgggattaaagtaggtatggatcattttattccatatttagatttatagaatgtatgtaaattcatatttaaatttatagaatgcatgtaaattaggtatttccaatgattaatattactatttaaagctgttataaatttccaaaatcatggttggtagttatcttttactagtttcttacttcagaagtgtttttgttttaaagatgagaggaaaagcttcaattgagattcagtcctagtactccaactttaaatctctcactttgctaaggctgagcaggtaaatgtaaaatttttaaggatgaaaggattttgagagttaatgtatcttctacataataggcattcagcttacatgtgataaattgattaaaaggataaatacagttgagaagttcaataccttaaaaaaactgctataaataaagcacttatattttctattttattttcttaataataaaactacactaattaatctataattattgacatatatgtaataaatctatatataataaaaatatgtgtctaataagatgtatatgtaaatcaacaagcacaggtaaaaagattgtcttttgaagatgctaaaagttcacagaatatactaattcacaaaaaataaaaattaaagtatggaaagtgagaaattattttcattggtgcaaaattatattcctgctcttcccaaaaattatttcattaataataaactttttctaatagcattgtacatgctcaatgtggaaatcaaagataataaaaaggaaaaacattttatattaaaacaaatgccctcaaataacaaattttatcaggtttcatacacaatttcagataacacaagactgtagtctgtgtgtatgtataatcaaactgaactttaccctcacttgatacaccaaaatacattttcaaatgtcacctacttctctacatatttctaccttcagtggtcacatattatcccatgctgtaaattcactgaaatgtatttataaaagtcattatatggattcttcttaataatatggtacttaccaccaaattgtctatttgaaaagttatctgcaacttaaactttaaacagcagtgtaaatatcactgctctttttcctcataaactttgtagatagaaagcagtgtttgattcctcttttaacttaaatgccttctgtaaccaggaacactaaatattgttttctgtgtgcataggtcacttgcagatcttaagaaaatacttttccaattttaaattagaagcaaagtactatttttagacctgcaatttagacctctaatttaaattgctcaattttaaatgagggttttttgttgatttaagtgaattatctataaaaggamgatttttaaatctaatatgtatacacacacgcacatacatgtgtagtaaatattttacaagtatgcggccttttattttttctcattacagtttaatttaattttgttttgcttaattatccttcagactgcttgcttctgagcttcttagaaaggtgttgtcaacataaaaatgtacctgtgtaaataggcatttatgttttcttctggtgcttttatcattttgtatattaaaaaaattaatctatattccgttagaaatttactttgtggcataaaaatctagttttctccaaaaagcaggcatttcccttatgaaactattctttccctactagtataaagtgtgagcattatcaagttctaaattcttagatattcgggtgtttctggattttctactctgttgtattcatttacctgtcttttcagctgttatcaaagaatttgtgatttatgtatttatttttgagacacagtctcactctgtcgcccaggctggagtgcagtgatgggatctcagctcactgcaacctccacctcccagtttcaagcgattctcgctcctcagcctcccgagtagatgggcttacaggctaccgacatcgtgcctggctaatttttgtatttttgtagagtcggggtttcaccatattggccaggctagtcttgaactcctgacctcaggtgatccacccgcctcggccgcccgaagtgctgggaccacaggcatgagccagcacgcctggacttttttttttcttttttcaaattttatttatttattta

SEQ ID NO: 672434 - DNA, 933 bp, Homo sapiens
ctatctctttggaaaagtgaattgataatatgccattgtcagtaagtgaagacggtatcagtgttccctagatatttaaaatattgtaagacatttgttcatataaaaattgttaatcatcttgcttgctatgggctttttaaaaagaattaagggctactccttttagtaaacatgtaactctatacattgaaaaaatccaattgtaaattgacttgctatcctttccttcaatacaaacattagcctcaaatgcaaaagtggcatggattcagagtaaattaagtgaaaatatgaagggatggccagcccctccacacctgtgggtacttctagtcaggtgggatgagagactgagaaaagaaataagacacagagtcaaagtatagagaaagaagtgtgggcccaggggaccggcgctcagcataccaagcacctgcaccggcaccggcctctgagttccctcagtttttattgattattattttcattatctcagcaagaggaatgcggtaggagagcagggtgataatagggagaaggtcagcaaaaaaacatgtgaacagaagaatctgtgtcataattaagttcaaggggaggtactatgcctggatgtgcacgtaggccagatttatgtttctctctgcacaaacatctcagtggagtaaagaacaataaagcagcattgctgccaacgtgtcttgcctcccaccatagggtggtttttctcctatctcagaattgaacaaatataaaatcaggttttataccgagacagtccgctcccaggagcaggcaggagacagtggmcttcctctatctcaactgcaagaggctttcctcttttactaatccacctcagcacagaccgtttatgggtgttgggctggggggtgatcaggtctttctcatcccatgaggcatatttcagac

SEQ ID NO: 672435 - DNA, 1021 bp, Homo sapiens
gcagccacgacctcttgggctcaagcaatcctctcacctcagcctctggagtagctgagaccacaggcacatgccaccacccctggctaattttagtrtatatatatatatatatatttttttttttttttttttttgtagagacagagttttgccatattacctaggctgacctcaaactcctggactcaagtgatccgtctccctcagtctcccaaagtgctgggattacaggcgagagccgtggaatctggccacaagcgttcctttagtgtatatgtattaaatattccaacaaggacaaaaaatatttaaggcctaaatattttctaagtaaagttatttatatcacactctttacagaagcacctcctcttaattaattctttccacatattcttctctgaatttaattcataagagttattgtccagtgttctgtaacttgtgccactttttcatcaaacaaggaagatatgtgtgtgtccctgcaccctgggtggcctgctacaaatttttcactcctggtactacatagtccctctctggaaatcaggtcagttggtagtcttctgtatttttgcctcctgccgcagtgtattaaaaatgataaaaagataggcctcttctttgtgctgtaaaataacccaagcatagcaaagctctgattaaatgagtgcagaatggttttctgacagtagttggtagctgatgcttgccattccccagtgtgatggttaataatgagtgtcaacttgattggattgaaagacgcaaataactgttcctgggtgtgtctttgagggtattgccaaaggacattaacatttgagttagtggactaggagacatagaaccaccctcaatctgggtgggcactgtctaatcagctgccattgtggctaagagaaaagcaggcagaagaactcggaaggactagactggctaagtcctcaggtctccatctttctcccgtgctggatgcttcatgccctcaaacatcagactctaagttcttcag

SEQ ID NO: 672436 - DNA, 1021 bp, Homo sapiens
gcagccacgacctcttgggctcaagcaatcctctcacctcagcctctggagtagctgagaccacaggcacatgccaccacccctggctaattttagtatrtatatatatatatatatttttttttttttttttttttgtagagacagagttttgccatattacctaggctgacctcaaactcctggactcaagtgatccgtctccctcagtctcccaaagtgctgggattacaggcgagagccgtggaatctggccacaagcgttcctttagtgtatatgtattaaatattccaacaaggacaaaaaatatttaaggcctaaatattttctaagtaaagttatttatatcacactctttacagaagcacctcctcttaattaattctttccacatattcttctctgaatttaattcataagagttattgtccagtgttctgtaacttgtgccactttttcatcaaacaaggaagatatgtgtgtgtccctgcaccctgggtggcctgctacaaatttttcactcctggtactacatagtccctctctggaaatcaggtcagttggtagtcttctgtatttttgcctcctgccgcagtgtattaaaaatgataaaaagataggcctcttctttgtgctgtaaaataacccaagcatagcaaagctctgattaaatgagtgcagaatggttttctgacagtagttggtagctgatgcttgccattccccagtgtgatggttaataatgagtgtcaacttgattggattgaaagacgcaaataactgttcctgggtgtgtctttgagggtattgccaaaggacattaacatttgagttagtggactaggagacatagaaccaccctcaatctgggtgggcactgtctaatcagctgccattgtggctaagagaaaagcaggcagaagaactcggaaggactagactggctaagtcctcaggtctccatctttctcccgtgctggatgcttcatgccctcaaacatcagactctaagttcttcag

SEQ ID NO: 672437 - DNA, 1021 bp, Homo sapiens
gcagccacgacctcttgggctcaagcaatcctctcacctcagcctctggagtagctgagaccacaggcacatgccaccacccctggctaattttagtatatatatatatatatatattwttttttttttttttttttgtagagacagagttttgccatattacctaggctgacctcaaactcctggactcaagtgatccgtctccctcagtctcccaaagtgctgggattacaggcgagagccgtggaatctggccacaagcgttcctttagtgtatatgtattaaatattccaacaaggacaaaaaatatttaaggcctaaatattttctaagtaaagttatttatatcacactctttacagaagcacctcctcttaattaattctttccacatattcttctctgaatttaattcataagagttattgtccagtgttctgtaacttgtgccactttttcatcaaacaaggaagatatgtgtgtgtccctgcaccctgggtggcctgctacaaatttttcactcctggtactacatagtccctctctggaaatcaggtcagttggtagtcttctgtatttttgcctcctgccgcagtgtattaaaaatgataaaaagataggcctcttctttgtgctgtaaaataacccaagcatagcaaagctctgattaaatgagtgcagaatggttttctgacagtagttggtagctgatgcttgccattccccagtgtgatggttaataatgagtgtcaacttgattggattgaaagacgcaaataactgttcctgggtgtgtctttgagggtattgccaaaggacattaacatttgagttagtggactaggagacatagaaccaccctcaatctgggtgggcactgtctaatcagctgccattgtggctaagagaaaagcaggcagaagaactcggaaggactagactggctaagtcctcaggtctccatctttctcccgtgctggatgcttcatgccctcaaacatcagactctaagttcttcag

SEQ ID NO: 672438 - DNA, 1021 bp, Homo sapiens
gcagccacgacctcttgggctcaagcaatcctctcacctcagcctctggagtagctgagaccacaggcacatgccaccacccctggctaattttagtatatatatatatatatatattttwttttttttttttttttgtagagacagagttttgccatattacctaggctgacctcaaactcctggactcaagtgatccgtctccctcagtctcccaaagtgctgggattacaggcgagagccgtggaatctggccacaagcgttcctttagtgtatatgtattaaatattccaacaaggacaaaaaatatttaaggcctaaatattttctaagtaaagttatttatatcacactctttacagaagcacctcctcttaattaattctttccacatattcttctctgaatttaattcataagagttattgtccagtgttctgtaacttgtgccactttttcatcaaacaaggaagatatgtgtgtgtccctgcaccctgggtggcctgctacaaatttttcactcctggtactacatagtccctctctggaaatcaggtcagttggtagtcttctgtatttttgcctcctgccgcagtgtattaaaaatgataaaaagataggcctcttctttgtgctgtaaaataacccaagcatagcaaagctctgattaaatgagtgcagaatggttttctgacagtagttggtagctgatgcttgccattccccagtgtgatggttaataatgagtgtcaacttgattggattgaaagacgcaaataactgttcctgggtgtgtctttgagggtattgccaaaggacattaacatttgagttagtggactaggagacatagaaccaccctcaatctgggtgggcactgtctaatcagctgccattgtggctaagagaaaagcaggcagaagaactcggaaggactagactggctaagtcctcaggtctccatctttctcccgtgctggatgcttcatgccctcaaacatcagactctaagttcttcag

SEQ ID NO: 672439 - DNA, 1021 bp, Homo sapiens
gcagccacgacctcttgggctcaagcaatcctctcacctcagcctctggagtagctgagaccacaggcacatgccaccacccctggctaattttagtatatatatatatatatatatttttttttttttttttttttgtagagacagagttttgccatattacctaggctgacctcaaactcctggactcaagtgatccgtctccctcagtctcccaaagtgctgggattacaggcgagagccgtggartctggccacaagcgttcctttagtgtatatgtattaaatattccaacaaggacaaaaaatatttaaggcctaaatattttctaagtaaagttatttatatcacactctttacagaagcacctcctcttaattaattctttccacatattcttctctgaatttaattcataagagttattgtccagtgttctgtaacttgtgccactttttcatcaaacaaggaagatatgtgtgtgtccctgcaccctgggtggcctgctacaaatttttcactcctggtactacatagtccctctctggaaatcaggtcagttggtagtcttctgtatttttgcctcctgccgcagtgtattaaaaatgataaaaagataggcctcttctttgtgctgtaaaataacccaagcatagcaaagctctgattaaatgagtgcagaatggttttctgacagtagttggtagctgatgcttgccattccccagtgtgatggttaataatgagtgtcaacttgattggattgaaagacgcaaataactgttcctgggtgtgtctttgagggtattgccaaaggacattaacatttgagttagtggactaggagacatagaaccaccctcaatctgggtgggcactgtctaatcagctgccattgtggctaagagaaaagcaggcagaagaactcggaaggactagactggctaagtcctcaggtctccatctttctcccgtgctggatgcttcatgccctcaaacatcagactctaagttcttcag

SEQ ID NO: 672440 - DNA, 3438 bp, Homo sapiens
gcttctgggattacacgcataagccaccgtgcccagcctccaattgcctttatgcatattgcttctgggattacacgcataagccaccgtgcccagcctccaattgcctttatgcatattttacttctgggattacatgcataagccaccgtgcccagttgccaattgcctttatacatattacttctgggattacacgcgtaagccaccgtgccagtcaccaattgcctttatacatattacttctgggattacatgcataagccaccgtgcccagtcgccaattgcctttatacatattacttctgggattacatgcatacaccaccgtgcccagtcaccaattgcctttatacatattacctcatttaaatatgcatttttccaatggaaggaactggagcttagataaattatatacctctaaaaataacaccacacggatttttaaaaaagtctttaagcatttatttacctacttatttatttggctaacgggaaaaaaaaaagcttccagtcacaaatatccccagtcacaaacatcacgatccatgatgatagagcaaaatcaaatatgctaaaaattagccaaatatattgcatacagtaggtcatcaatacatgcttattgaattaattaaaatccaacttgaaaaggaaattgaacctgtcaaatatttgtatattttatctcatcaaatttagttgtgcgtgagccaaagaaaacatataaaaagtgttttattttgtagggacagatgtataaaataccaaattttaatatactaaaggcatagttacagttttcctttaaatatcattttgatcttaatgatatggcttactattttactctccaaaaatagtatactttataattataattgctggaacatgccactttctagaattatgacaaataattcattacatataaaggctttattttagaatgaatatatgaatgttggctgtcatcctaatttgtgcctcccaaaagattggtttcctacctctacatagagataaaataaaatttaatctttaagaattcacatttcttgtttggcaagagtttgtattgctactaattagctaaattagaaattaaagaatcttggctacattgaactgggctttgaatctgtctaaaactgtttcctcagaagagaactggtgaggtgattgcatcgagtcactgggctatactgctgaaagggggatgactggaaacaatattgtatccttaaaatttccattgaggagcacaatgtctacatatacacatttgattgcatcgagtcactcggtgataytgctgaaagacagatgactggaaacaatattgtatccttaaaatttccattgaggagcataatgtctacatatacactattatcagtttcccttcagaattttctctatatttggttttaattatcccaaattcatttatccccaatatttaagttccccctccctcttcccctatatttccccttgaaccttttatcttttctgtgtccattgcagagagatcacttccttgtaactgaacacagatctgaatgcttaccacttgcagagtccaattcacaagagcgaggtctcgtataaagaaagtgattttactaaccaaaactagtaaaggggatgtggccggattcccatctaaaccaaccacttcaattttgggggtgagggcaggggtttaaaagtggaaacattgataaggaaggcatgcaagaattgtgctgagtacaatgtctgtgtgtcttgctctggtggctattttgggtctcagtccacctgaatcacgggctggcagcatctcaacaatggcggggttgttaactagccagccaccttgaagtgatcgcgggaattttgcagctgagtctccaagcttcctttgtcagactcaagattagcccctgcaacttctaagaaggcacacagatgatagcatacaattagataaatgtgaagggagtatacatggtaggaaagggagggatatggagtctattttatagctaacagaaaaggcttccgcagttttcttcaaggttatatcttgaaacccaaggttaaaaaacaataaaatgcattttgaagttaagctatctggttacttaatgaggattatagctctgggggtcttctcttttctaaatatccccaagccctaggatgtattttgggcaatattttgtactaaatatgtgagttcaaaatgagatatttatttaccttgtactttatgttgcaaatttcctaaaactgtaattttaacaatctacacgtttatatttatgtgatggttttgttaatttcatttcaacacttttctccaacaagtggatttatacaaaactgacaatgtgaagcttcttcagcgtcccccttcaacatcttaataggataaaattaatcataatttgaaactacatttcttaatttaaagaaaaaaattatgtggacatattcacattcaaggtgagcatccagcaaacagtaaatcaggcaggtggttatatttagaaatagtagcaaaacatttacaattgatgccatatggctttcagcctagtagggccaactagctgtgttcaatgactctggggaaattaggctgtttgaaggtcatgaatgctaactctaaacctctgggacagtgacaggaagttggcagcaatatgcagggaaatcatacctccagctgagtggataagcctccttcataagtggaccgaggattgttcatgttgagcctgtgctccgatttgcagacaaagaaccaggtataaccactattgctgcatatacacagcaggcagtaacgtatattctggtcccgtcattgtctttcttaaactagccaggagtccttatcataattataaagttcaaatccccttccattatcttcctgtttgagcttacctgataccactgtcctctggactaagccccaggcacattaagtttcgaagttgacatttttattaagttttaaagacatacttggagaattttttaatgcacaagtatctacagatgtccaacttaaataattccactttcaatgtgctttccagggtttcttgaatgccattgagaaattacaatacatataaagaaaatagaaaagaaatagtaatcactgaatcactgattagaaaaaaaaatagcaaaagctaaagcttttcagcaattaagtttaccaattttcaacaaataactcaagtgaaaaaaataatttatctaattgaaaatggctaatgcagagtcaaagattaaaatgttggaaataaattttcttcttacatgccaacctttaaggaaaatattattgaacttttctggaacacaaaatctttgcaaccagcattattatgtatcttattcacttacattaaactaaaactatatatg

SEQ ID NO: 672441 - DNA, 600 bp, Homo sapiens
tctcatttagtcatcgtaaaacattttatggaatgtattgtcaacactttgtgaatgaaaagtggagtaaattgtttgcattcccrtaggtgggcaggttttttatgctaaaaaaaagaaaatggttgcattcacatctcttaacctatatgcacacttcctttgcacagtggggtttggcaaagctctatcttctgctagtgatagagcaattctgattgaaatcataccattttagataaacaaaattaaaattaaacttatatttgtgcaacttgaaaattgtgaatttttcctgcagtgacaggaagacacacatcatgattgacactcaggtttatgttttagagtaggaaacagatagtgataagccagaaaaatgagtttgtacataaactgcaaatatttttacttaatatagtaagcagtaaatgattagtcaatgtttttgatcatatgaatgataatttatacatgggaatattgcagcccttatgcactgcagatgagattatggattgtcacactagttaaaaaaacaatatggaattatacaatatattttaaggcgattcataggtgaatcacaacctatgatcc

SEQ ID NO: 672442 - DNA, 600 bp, Homo sapiens
tctcatttagtcatcgtaaaacattttatggaatgtattgtcaacactttgtgaatgaaaagtggagtaaattgtttgcattcccgtaggtgggcaggttttttatgctaaaaaaaagaaaatggttgcattcacatctcttaacctatatgcacacttcctttgcacagtggggtttggcaaagctctatcttctgctagtgatagagcaattctgattgaaatcataccattttagataaacaaaattaaaattaaacttatatttgtgcaacttgaaaattgtgaatttttcctgcagtgacaggaagacacacatcatgattgrcactcaggtttatgttttagagtaggaaacagatagtgataagccagaaaaatgagtttgtacataaactgcaaatatttttacttaatatagtaagcagtaaatgattagtcaatgtttttgatcatatgaatgataatttatacatgggaatattgcagcccttatgcactgcagatgagattatggattgtcacactagttaaaaaaacaatatggaattatacaatatattttaaggcgattcataggtgaatcacaacctatgatcc

SEQ ID NO: 672443 - DNA, 600 bp, Homo sapiens
tctcatttagtcatcgtaaaacattttatggaatgtattgtcaacactttgtgaatgaaaagtggagtaaattgtttgcattcccgtaggtgggcaggttttttatgctaaaaaaaagaaaatggttgcattcacatctcttaacctatatgcacacttcctttgcacagtggggtttggcaaagctctatcttctgctagtgatagagcaattctgattgaaatcataccattttagataaacaaaattaaaattaaacttatatttgtgcaacttgaaaattgtgaatttttcctgcagtgacaggaagacacacatcatgattgacactcaggtttatgttttagagtaggaaacagatagtgataagccagaaaaatgagtttgtacrtaaactgcaaatatttttacttaatatagtaagcagtaaatgattagtcaatgtttttgatcatatgaatgataatttatacatgggaatattgcagcccttatgcactgcagatgagattatggattgtcacactagttaaaaaaacaatatggaattatacaatatattttaaggcgattcataggtgaatcacaacctatgatcc

SEQ ID NO: 672444 - DNA, 600 bp, Homo sapiens
tctcatttagtcatcgtaaaacattttatggaatgtattgtcaacactttgtgaatgaaaagtggagtaaattgtttgcattcccgtaggtgggcaggttttttatgctaaaaaaaagaaaatggttgcattcacatctcttaacctatatgcacacttcctttgcacagtggggtttggcaaagctctatcttctgctagtgatagagcaattctgattgaaatcataccattttagataaacaaaattaaaattaaacttatatttgtgcaacttgaaaattgtgaatttttcctgcagtgacaggaagacacacatcatgattgacactcaggtttatgttttagagtaggaaacagatagtgataagccagaaaaatgagtttgtacataaactgcaaatatttttacttaatatagtaagcagtaaatgattagtcaatgtttttgatcatatgaatgataatttatacatgggaatattgcagcccttatgcactgcagatgagattatggattgtcacactagttaaaaaaacaatatggaattatacaatatattttaaggygattcataggtgaatcacaacctatgatcc

SEQ ID NO: 672445 - DNA, 612 bp, Homo sapiens
ctccaagggagtctccaaagcctgctcatcctggtcttttcagagctgctctgagcatccaagaggtccagagaaaaggtgccgtggagacacacacaggctgacagaagctgggaagggtcagcgtggaccacaagtgaagacgaccttagcagatggaggcagtctgtcagatcccctccaccaccccctgggccagtgtgccgcagctgggggcaggccagcccctctatcacttactatggctgccgttttgtgcctggccatccatcatagacaaccttcaactggaatctctcctaatgaagccctaccacacagaggcagtcagccctgcaacggtgtaggctcgaggccatggccgcagcaggaggcagtggcagtagagggtggcagttagggggcaggaatcactggactctcagaaccccattggggtgtggcttcctcaagccctccaaggcaagacatacactgggacaaataaataagttttcagggccaggtgcggtggctcacgcatgtaatcscagccactgtgggaggcctaggcgggaggatcatctgaggtcaggagtttgagaccagcctggccaacatggtaaaaccccg

SEQ ID NO: 672446 - DNA, 1025 bp, Homo sapiens
cataattgctctgtacttgggggaatgcagtacttacattttagttgtgtgaaaaagaaaaccacacataaaattattagagctaatttactccaagacgtggtttatgtccgggtgctgtttgttcacagaagggagaacctgtgtgagttgagatgatgactggcatcgtagaggattgagcattaaaggatgaatcagacttaaaatataatcatggaaacctgataattggcactgaatataatgtattacataaatttgggtcatgcagttttaatttcactaaacttatatcccaagctggaaaattatgaggaattctcacagtggataaaaataaaacactttgaatactattagagctatatcaaatacttttacattcagtagctactagcagagttaccatcaatattaacttaaaaaaattaatcatatctatagacatatacattttgaattatgcaaagattgtttggaataaaaaccccaaatccccgtgttttatgactttttttaatgtggttcaatgtagacaaagaagtaaagtttcccatgcatgcatgctttgtttcacaatttcataaattgcatgaagatctgtgcttttggaaatttatagaggcaaaaagggttcaaggctataaacctatgacaagwaagcagtggataactgagggaataagttactgaggaaagacgtcattacggggtcagagttacagacctattgtgaaatgaggcatgggacactacgactgccagagttttaagttaattgctggcacttctctgtgcatttgatcagacatgaggggagaaattcttcttgcccttcataaactgtcaacaagccaaatgaaatatgtgttgagagtaaatgcaaacctttttcatagttagagaagaacacgatgcaatgatttaggcacctgggaaacagagctctttctccattacacttattttttatattaaagtaatgtactgattgtgtacttgaaaggatatatttggacagt

SEQ ID NO: 672447 - DNA, 729 bp, Homo sapiens
ctctgctcccagtttctatgaatttaagaagtttatatgaatttaagataaaatctatctctaaagcatatgaatttctttctaaagcatctgtgtccttcctaaaaaatttttcattaatgtagtacccagatttttcccaatgataagggggagttgaattaccactgaattgagagctacttttgggtgggactggggaggagggacaggtagtattttgagaaaacagccttatttatatttaatgaacttcatgtattttaagtttacagtttgatgagttttggcaaatgtttatagtcatgtgactataagcacaatcaagatatagaatatttctctcttccttaaaaagcccctctttcccctttgtggttttctcttcccatgtcctagatcccaagcagtcacttgtctgctctctgtcactaaaattttggcttttctatagctcatataaatggatatatgttttcatttatcttgggtagatacctagggatagaattgctgggcctcatggtaagtatatgtttaaatttacaggaaactgacaaattgttttccaaactgactgtaccattttgccttcccrccagcaatatatgagagttccagtatctccgtattctcactatcacttggtattgtcattctttttacttgttctagtgcatgtggagtggtatcttattttggttttaatttgcattttcctacagacta

SEQ ID NO: 672448 - DNA, 729 bp, Homo sapiens
ctctgctcccagtttctatgaatttaagaagtttatatgaatttaagataaaatctatctctaaagcatatgaatttctttctaaagcatctgtgtccttcctaaaaaatttttcattaatgtagtacccagatttttcccaatgataagggggagttgaattaccactgaattgagagctacttttgggtgggactggggaggagggacaggtagtattttgagaaaacagccttatttatatttaatgaacttcatgtattttaagtttacagtttgatgagttttggcaaatgtttatagtcatgtgactataagcacaatcaagatatagaatatttctctcttccttaaaaagcccctctttcccctttgtggttttctcttcccatgtcctagatcccaagcagtcacttgtctgctctctgtcactaaaattttggcttttctatagctcatataaatggatatatgttttcatttatcttgggtagatacctagggatagaattgctgggcctcatggtaagtatatgtttaaatttacaggaaactgacaaattgttttccaaactgactgtaccattttgccttcccaccagcaatatatgagagttccagtatctccrtattctcactatcacttggtattgtcattctttttacttgttctagtgcatgtggagtggtatcttattttggttttaatttgcattttcctacagacta

SEQ ID NO: 672449 - DNA, 2139 bp, Homo sapiens
agatagagaccacggtgaaaccccgtctctacccaaaatacaaaatattagccaggcggggtggcgggcgcctgtagtaccagctacctgggaggctaaggcaggagaatggcgtgaacctgggaggcggagcttgcagtgagccgagatcacgccactgcactctagcctgggcgacagagcaagcgagactccgtcttcaaaaaaaaaaaaaaaaaaaaaaaaaaaaaaaagaaagaaacatatttatagattctgagaattaggacaaagtcatatttggggggccattactgtgatcaccacacaccttaacagcaagagaggagaaaagagatgggtcatgttaataagaagtttaagtttggtaggacaagtgggaggggctcataatcactaagggcttagggagaatgaggactatcattcagcatctctcattctatctacatgccaagcaccatgtaggcagactatgatgtaggctggtgcacagcagtccatgttggattcccctcttccagtccatgttggatccctcttctagactgttcagtccaggaggctggaaaactggcaaaaaggtaaccacrtgagtgtgtgtgtgtgtgtgtgtgtgtgtgtgtgtgtgattgtttccatgggagttgtttccatgagagagaaaattgggagaaacaaaaggttatggtccaggaggagatttatggtgggaaatattggaattagagtagttggcatattagcaaggactagagtttagtcttatgagttggcttctcaaatgagggggagagaaacattattggaataatgaaaaccaagaaactgacccttcaaatcggatgcagaaatcactcaaatgctgaaaggagacaggaaaactgaaccagaatccagagccctagaatctcaatgcattagggtggaaacccagaggctgggaggagtgaacatagtgtgattaatcagatggcatgagcttcagagaaggaatggatgaaagagggtgaaagaagaaaggttcttccaaagggtccctgggaatactgatttctcctcctagctttgaaacattggagttaagaagttgggaggataggagaaaggaccacctccacttaaaaagaaaccctactgcatttctaatttaatttactatatatctcattttaattttaattttattttcattctccccagtagaatgcaagcttaattggggtggttcaatgctgtatctgtagtgcctagaacagtgctgggcacatattaagtcccttataaataattgttgaatgaataaatggaaggaagggagaaagaaaaaaagaaaggaagtaaaggaggaagaagaaagagacaaaggaagaaagaaaaagagaaagaaagaaggaaagacagaaaggtattcatatttgaacactgcagattagttgaagaaagagtcaagtttctctaaaggtgaggaaatgtgtgttctaggagatgactaaagacataaagaagtttaggataaagtgaaagctccaaaggcaacagtggaagagaggggaagggagaggaattagcagaaggatatttttgagggagttaatgagctaaaaggggagttatggtggagatgcggtagcataaactggatcatcttctctgtgagcctcctgagtgcagggagcttgtttcattcattaattggcccctggccaagagtgggaacgcagcaggtaagtggctggttcaagggtaagaacaataattgtctaattccagaactgggctctccttcctcgattgcttcaggcaagagccaaatgaccacctttccgagatgtcctgtggctgaaacactggctggaactaacgttagatgacatattgggtcccatttaattcccaagtcatcaaatggccaaagggagaatcatcactcctccttccaatttacgttccagctgttccattcaggttaatgtcgggagagcagaatgaccttttacaaataccatagcttagaactcgatggacaaacggtgggatcacagctctttcttgaccgaggttgtaagcatgctatggtgtgatagcatgccagaaccactaagggaaaaggaatagctctgtggatttaatttccca

SEQ ID NO: 672450 - DNA, 2139 bp, Homo sapiens
agatagagaccacggtgaaaccccgtctctacccaaaatacaaaatattagccaggcggggtggcgggcgcctgtagtaccagctacctgggaggctaaggcaggagaatggcgtgaacctgggaggcggagcttgcagtgagccgagatcacgccactgcactctagcctgggcgacagagcaagcgagactccgtcttcaaaaaaaaaaaaaaaaaaaaaaaaaaaaaaaagaaagaaacatatttatagattctgagaattaggacaaagtcatatttggggggccattactgtgatcaccacacaccttaacagcaagagaggagaaaagagatgggtcatgttaataagaagtttaagtttggtaggacaagtgggaggggctcataatcactaagggcttagggagaatgaggactatcattcagcatctctcattctatctacatgccaagcaccatgtaggcagactatgatgtaggctggtgcacagcagtccatgttggattcccctcttccagtccatgttggatccctcttctagactgttcagtccaggaggctggaaaactggcaaaaaggtaaccacatgagtgtgtgtgtgtgtgtgtgtgtgtgtgtgtgtgtgattgtttccatgggagttgtttccatgagagagaaaattgggagaaacaaaaggttatggtccaggaggagatttatggtgggaaatattggaattagagtagttggcatattagcaaggactagagtttagtcttatgagttggcttctcaaatgagggggagagaaacattattggaataatgaaaaycaagaaactgacccttcaaatcggatgcagaaatcactcaaatgctgaaaggagacaggaaaactgaaccagaatccagagccctagaatctcaatgcattagggtggaaacccagaggctgggaggagtgaacatagtgtgattaatcagatggcatgagcttcagagaaggaatggatgaaagagggtgaaagaagaaaggttcttccaaagggtccctgggaatactgatttctcctcctagctttgaaacattggagttaagaagttgggaggataggagaaaggaccacctccacttaaaaagaaaccctactgcatttctaatttaatttactatatatctcattttaattttaattttattttcattctccccagtagaatgcaagcttaattggggtggttcaatgctgtatctgtagtgcctagaacagtgctgggcacatattaagtcccttataaataattgttgaatgaataaatggaaggaagggagaaagaaaaaaagaaaggaagtaaaggaggaagaagaaagagacaaaggaagaaagaaaaagagaaagaaagaaggaaagacagaaaggtattcatatttgaacactgcagattagttgaagaaagagtcaagtttctctaaaggtgaggaaatgtgtgttctaggagatgactaaagacataaagaagtttaggataaagtgaaagctccaaaggcaacagtggaagagaggggaagggagaggaattagcagaaggatatttttgagggagttaatgagctaaaaggggagttatggtggagatgcggtagcataaactggatcatcttctctgtgagcctcctgagtgcagggagcttgtttcattcattaattggcccctggccaagagtgggaacgcagcaggtaagtggctggttcaagggtaagaacaataattgtctaattccagaactgggctctccttcctcgattgcttcaggcaagagccaaatgaccacctttccgagatgtcctgtggctgaaacactggctggaactaacgttagatgacatattgggtcccatttaattcccaagtcatcaaatggccaaagggagaatcatcactcctccttccaatttacgttccagctgttccattcaggttaatgtcgggagagcagaatgaccttttacaaataccatagcttagaactcgatggacaaacggtgggatcacagctctttcttgaccgaggttgtaagcatgctatggtgtgatagcatgccagaaccactaagggaaaaggaatagctctgtggatttaatttccca

SEQ ID NO: 672451 - DNA, 2139 bp, Homo sapiens
agatagagaccacggtgaaaccccgtctctacccaaaatacaaaatattagccaggcggggtggcgggcgcctgtagtaccagctacctgggaggctaaggcaggagaatggcgtgaacctgggaggcggagcttgcagtgagccgagatcacgccactgcactctagcctgggcgacagagcaagcgagactccgtcttcaaaaaaaaaaaaaaaaaaaaaaaaaaaaaaaagaaagaaacatatttatagattctgagaattaggacaaagtcatatttggggggccattactgtgatcaccacacaccttaacagcaagagaggagaaaagagatgggtcatgttaataagaagtttaagtttggtaggacaagtgggaggggctcataatcactaagggcttagggagaatgaggactatcattcagcatctctcattctatctacatgccaagcaccatgtaggcagactatgatgtaggctggtgcacagcagtccatgttggattcccctcttccagtccatgttggatccctcttctagactgttcagtccaggaggctggaaaactggcaaaaaggtaaccacatgagtgtgtgtgtgtgtgtgtgtgtgtgtgtgtgtgtgattgtttccatgggagttgtttccatgagagagaaaattgggagaaacaaaaggttatggtccaggaggagatttatggtgggaaatattggaattagagtagttggcatattagcaaggactagagtttagtcttatgagttggcttctcaaatgagggggagagaaacattattggaataatgaaaaccaagaaactgacccttyaaatcggatgcagaaatcactcaaatgctgaaaggagacaggaaaactgaaccagaatccagagccctagaatctcaatgcattagggtggaaacccagaggctgggaggagtgaacatagtgtgattaatcagatggcatgagcttcagagaaggaatggatgaaagagggtgaaagaagaaaggttcttccaaagggtccctgggaatactgatttctcctcctagctttgaaacattggagttaagaagttgggaggataggagaaaggaccacctccacttaaaaagaaaccctactgcatttctaatttaatttactatatatctcattttaattttaattttattttcattctccccagtagaatgcaagcttaattggggtggttcaatgctgtatctgtagtgcctagaacagtgctgggcacatattaagtcccttataaataattgttgaatgaataaatggaaggaagggagaaagaaaaaaagaaaggaagtaaaggaggaagaagaaagagacaaaggaagaaagaaaaagagaaagaaagaaggaaagacagaaaggtattcatatttgaacactgcagattagttgaagaaagagtcaagtttctctaaaggtgaggaaatgtgtgttctaggagatgactaaagacataaagaagtttaggataaagtgaaagctccaaaggcaacagtggaagagaggggaagggagaggaattagcagaaggatatttttgagggagttaatgagctaaaaggggagttatggtggagatgcggtagcataaactggatcatcttctctgtgagcctcctgagtgcagggagcttgtttcattcattaattggcccctggccaagagtgggaacgcagcaggtaagtggctggttcaagggtaagaacaataattgtctaattccagaactgggctctccttcctcgattgcttcaggcaagagccaaatgaccacctttccgagatgtcctgtggctgaaacactggctggaactaacgttagatgacatattgggtcccatttaattcccaagtcatcaaatggccaaagggagaatcatcactcctccttccaatttacgttccagctgttccattcaggttaatgtcgggagagcagaatgaccttttacaaataccatagcttagaactcgatggacaaacggtgggatcacagctctttcttgaccgaggttgtaagcatgctatggtgtgatagcatgccagaaccactaagggaaaaggaatagctctgtggatttaatttccca

SEQ ID NO: 672452 - DNA, 589 bp, Homo sapiens
ttaagccattagttttccttggtagagaaaatgaaacctgttgtcagttgcaaagctgtgtctctggacctgaatttagctgggtgcatttgcaactataaaaacaaggagggtaggaggagacaaaatatgtatggggakgggaaggaggcagacatgcaggttttgctggtgttatagacagaccatgagacctcctcacacaggactgaggctggcccagaagtcagtccacttgcccaggatgagtctcgttgtttgcaccatcagcaaggcctggagttcgagtgcaatggccctattgactatgcccttcatcatccaaggcagccgccaggtgtggctctccttccacacttggaacctgaccttcaactggagccctagcagccacagtggtgccagcctgggagtgcgaatggggtgggcctgggaatggggtgagccctgggggctgtgtctttctccagggctcctggtgccctaaagagacggaggatcctatagcatttaacgttaagacagttcagccaaggccttccatgccagaaggtggctctgcttctatgctctggtgcaaagtgggtgc

SEQ ID NO: 672453 - DNA, 589 bp, Homo sapiens
ttaagccattagttttccttggtagagaaaatgaaacctgttgtcagttgcaaagctgtgtctctggacctgaatttagctgggtgcatttgcaactataaaaacaaggagggtaggaggagacaaaatatgtatggggatgggaaggaggcagacatgcaggttttgctggtgttatagacagaccatgagacctcctcacacaggactgaggctggcccagaagtcagtccacttgcccaggatgagtctcrttgtttgcaccatcagcaaggcctggagttcgagtgcaatggccctattgactatgcccttcatcatccaaggcagccgccaggtgtggctctccttccacacttggaacctgaccttcaactggagccctagcagccacagtggtgccagcctgggagtgcgaatggggtgggcctgggaatggggtgagccctgggggctgtgtctttctccagggctcctggtgccctaaagagacggaggatcctatagcatttaacgttaagacagttcagccaaggccttccatgccagaaggtggctctgcttctatgctctggtgcaaagtgggtgc

SEQ ID NO: 672454 - DNA, 589 bp, Homo sapiens
ttaagccattagttttccttggtagagaaaatgaaacctgttgtcagttgcaaagctgtgtctctggacctgaatttagctgggtgcatttgcaactataaaaacaaggagggtaggaggagacaaaatatgtatggggatgggaaggaggcagacatgcaggttttgctggtgttatagacagaccatgagacctcctcacacaggactgaggctggcccagaagtcagtccacttgcccaggatgagtctcgttgtttgcrccatcagcaaggcctggagttcgagtgcaatggccctattgactatgcccttcatcatccaaggcagccgccaggtgtggctctccttccacacttggaacctgaccttcaactggagccctagcagccacagtggtgccagcctgggagtgcgaatggggtgggcctgggaatggggtgagccctgggggctgtgtctttctccagggctcctggtgccctaaagagacggaggatcctatagcatttaacgttaagacagttcagccaaggccttccatgccagaaggtggctctgcttctatgctctggtgcaaagtgggtgc

SEQ ID NO: 672455 - DNA, 545 bp, Homo sapiens
atggactcagttccatgtggctggggaggcctcaaaatcatggtggaaggtgaaaggcacatcttatatggtggcagacaagagagaaaatgaaaaccaagcgaaagaggtttccccttataaaaccattagatcttgtgaggcttattcactaccacgagaacagtatgggggaagctgcccccatgattcagtgatctcscactgggtccctcccacaatatgcgagaattatgggagctacaattcaagatgagatttgggtggggacacaacccaaccatatcacagcccgactggccttttggggtcaaaggatgactcactgactaagaaaggatgtgagacagtcctaccaagaccacacacaacaggacagagattgctccccagaacagagctggggtacagtgccaagagaaagtgccagtggctgcaggaggctggaaagatcacaaaatccactgcagagggcagtaattcccactgggtagggccactgtgaggcagatatgagatcaagcagtacagcacttagcacggca

SEQ ID NO: 672456 - DNA, 545 bp, Homo sapiens
atggactcagttccatgtggctggggaggcctcaaaatcatggtggaaggtgaaaggcacatcttatatggtggcagacaagagagaaaatgaaaaccaagcgaaagaggtttccccttataaaaccattagatcttgtgaggcttattcactaccacgagaacagtatgggggaagctgcccccatgattcagtgatctcgcactgggtccctcccacaatatgcgagaattatgggagctacaattcaagatgagatttgggtggggacacarcccaaccatatcacagcccgactggccttttggggtcaaaggatgactcactgactaagaaaggatgtgagacagtcctaccaagaccacacacaacaggacagagattgctccccagaacagagctggggtacagtgccaagagaaagtgccagtggctgcaggaggctggaaagatcacaaaatccactgcagagggcagtaattcccactgggtagggccactgtgaggcagatatgagatcaagcagtacagcacttagcacggca

SEQ ID NO: 672457 - DNA, 1238 bp, Homo sapiens
cacagcatcccaggggagcagttctgggggcagtagtattctcggttttgtagatgaggaaataaggccaggaagatgcaatagtcagacttcagcacagaccccacctccattcagtggatggccagggaaatctacaatctaatactctgcattcacaggaaggatttccttttacaggtcccttttcacattacatcactgtcttaaggctacagggatctagtgcaatgaatcatttctggaaatatgtacattggaagatagtagtgatgaccaaccgataagctgacagcccaaggctggcttctgttcctgtaataccacaatctcaatggcttcatcaggtggcatcaggtgaactggattgcactgctctgtgrccttggttccatgcccttgtccacctcctctcacactctcagtgaatccagatgaattccagaatatgttccagttgctgttggctggaggaaatcacctccttcctaggaaagcaccaaggatgtggtgtggggcagagcaggctgaactccacaaagggaagggaaaccccttaacaccatttgcccgggtagacttttgaaggacttcaggcactgctgttccttccctgaattgctgagaaaatgcctaagacagcagggtgagtagtcggggggtgaatgagctccccagttaggctggcgcctgcctgctccaggccctggtctcccttgggatttgcatctggggctgacccggccacgggtaaaaagcaggatatgagtctctcctcactcccctgacacctctgaggcagtgagtggggagagagtggtcccatcagggagagctggcctacctctgtataccaggcccagccttacagtttagctgagcagactgtgatgtgactgaacagaaatccctaatggcccattgcatgttggctctcttatgcctgatttttccaccagtattaccaggagccatcccccagaaggccccttttgaatgtcactttgggatctgagagttagaagtcaagtcctcggtggtgatggtcccgggggcacatcttggtccctgtgttaggtagctgggatagagcagatgtgggccctctgagaacaggatcaggagagggagctgctggggtgcacatggggaggcaaggggtgaaggaatgacgaaccagaattagaatatcctaactgtgtcctgcactgcctcaacctttcccttagaacaccgct

SEQ ID NO: 672458 - DNA, 1238 bp, Homo sapiens
cacagcatcccaggggagcagttctgggggcagtagtattctcggttttgtagatgaggaaataaggccaggaagatgcaatagtcagacttcagcacagaccccacctccattcagtggatggccagggaaatctacaatctaatactctgcattcacaggaaggatttccttttacaggtcccttttcacattacatcactgtcttaaggctacagggatctagtgcaatgaatcatttctggaaatatgtacattggaagatagtagtgatgaccaaccgataagctgacagcccaaggctggcttctgttcctgtaataccacaatctcaatggcttcatcaggtggcatcaggtgaactggattgcactgctctgtgaccttggttccatgcccttgtccacctcctctcacactctcagtgaatccagatgaattccagaatatgttccagttgctgttggctggaggaaatcacctccttcctaggaaagcaccaaggatgtggtgtggggcagagcaggctgaactccacaaagggaagggaaaccccttaacaccatttgcccgggtagacttttgaaggacttcaggcactgctgttccttccctgaattgctgagaaaatgcctaagacagcagggtgagtagtcggggggtgaatgagctccccagttaggctggcgcctgcctgctccaggccctggtctcccttgggatttgcatctggggctgacccggccacgggtaaaaagcaggatatgagtctctcctcactcccctgacacctctgaggcagtgagtggggagagagtggtcccatcagggagagctggcctacctctgtataccaggcccagccttacagtttagctgagcagactgtgatgtgactgaacagaaatccctaatggcccattgcatgttggctctcttatgcctgatttttccaccagtattaccaggagccatcccccagaaggccccttttgaatgtcactttgggatctgagagttagaagtcaagtcctcggtggtgatggtcccgggggcacatcttggtccctgtgttaggtagctgggatagagcagatgtgggccctctgagaayaggatcaggagagggagctgctggggtgcacatggggaggcaaggggtgaaggaatgacgaaccagaattagaatatcctaactgtgtcctgcactgcctcaacctttcccttagaacaccgct

SEQ ID NO: 672459 - DNA, 602 bp, Homo sapiens
tgaatcatgtatatatatatatatayacacacacacatatgtatgtatgtattttatatacatacatatttcaaagtacaaaaaggtagactgaagctattcacagaagataactttggtcatgcttatattcttggcctgttatggatgtaacataacagtatgtttctgtatattttgtgttctgctagatagactttaggttagaacagccattgactttgtgtgtccttaaggaagtaactgtgtctctctgaatcttgaatgaccacgggcacactggaaatgaaagtatttgccagtttccacatgaaaagtgagtaaagcaggattttgcttgctgtctcttcttaggctcagggttagagcaactgtaaaataattaataatcctctcatagaaaaatttgctggactttaatgatgcttaagtaatctaggactcaacctgagatactatgataccaaggtagtggctatctatgcattcacagaggaattgtgtctagccctagggtatcctggggctagacagctttagaattttgtttagattggaggttgagagctagaagataaaggtttacaaattagaacagcaac

SEQ ID NO: 672460 - DNA, 1457 bp, Homo sapiens
tatttcttatctctttaaccatttaggtaatctgttgagaatttctttaccaacatatttttaaaatatcaagatttgatatttgctcaacaacaatgttcctaacatattttctttgttttctcatcgataaagtgggattaataacagcatctattttatggcactattaggaggaatacattgactgattaatctcttttgaaagagcatggcacagaataagtactatgtaagtccttaaaaattaaaggaatttatttacataatctaataaataacaccaaagatgtgtgtaatcaatttactatatctctatcttgcagacatttgtctagctcaatctcaaaactttgagaaaggccatgtccttttattagtatgatctatagttgtgaaagtgagacataaatatttatgatcaaactctgccagtctttataactgtatatgtgtctctccgatagagataattaaattgaaaaaattgtctaaagcatgkttcaaagaacaataaaagaacatatcaattattgactttttaagaacacaaaaaggtacactaaaattaattctaaattgattatctaaactaccctacacaaagacattgaggattctgtgttttattaaaaatgaattattacagtaagtttaaatctataaagtaacacagttgtgaacattaaactattttttattaaatttacagaaaaaatcacaaaacacatagtattaagatgtaagaagaaattttataaatcaaattatgaaaatgttgggtgaaataactagagtaatctagtttcttgcttctcaaggactcccagattctatttctgcttttctctttcattgttttttgctgtcttgttatacacaaatagaaaatagaagagtcaacacaagactttgtaatattaaaacttattgtgtaaaaattttagttatctcaaaataaatgttagcatactgcctttacatttatgttgaaagcatagtgcatttacatttatacacatatgtgtttgtaaacatacatgcccatataaggatttagagagcatcattttaaaattccaatttctgggtccactttagacctgctgaaggtatcagaattattgggaccactccaggtaattctgatgatcaggccaggtctgaatagctaagtttgagaacagccgttctagcttatgtagtactagctattcatgcaattagtttaagtcatgactacatttttcatcattataaaaatcctgtgaactgtgctgctctctttattattaaaaatttgtttgctacattaaacggtacatactctaaaagaactttcggaacatattttgaggaatggcgtattgattcaagaaattatatcatgtgtgctatatgatggtttctgtggtagaaacgcaaaggagaacaaaatagaaaagaccccatctcat

SEQ ID NO: 672461 - DNA, 907 bp, Homo sapiens
tctactgctttcttagctcacctgtgtcttccctgggtctttccagcaccttgtctagacatggtttcttctttcctctccagaagattctgtgctgacacaaagagatagtaactttagagtttaaaaaattaaactgtaaatattctacctattagttttgccatccttctaaaccagttttctcacttgtaaaatcatactagctaccttataggattattgggaaagttaggaagctaaggtagcagagagcacagagtaagcactcaaatgtcagctattgttgtatgcctgggtacatgaccttggaaccattgctcatctgttaaatggggacaacattcactacctaaaagattgccctgatgttaaataaaataatgtatgttatgtgtctagcacagagtctgatatataatttggataataaattcttatttgaaattataattgattgtctaaagtgttatctactaaaggtttcatgtcycctaatacataaggcaagttaactaagtttcacatacatttctgaaatcatggtagaacaaaaggcagaaactagcatacatttaatattagtgtgactggttttaagctaaagaaaccagcatggtttataagaggaaagatgagaagactgaaggctggggaactccaacctgtagaagttgggggaatcaggagtgagcagcccaggagatgaagaaggtaatgccagtgaggtctgggagcatgtgatgccttggaagttaggtgaaggaggagtttcaaggaggagagagtgatcagctgcatcacgttgtgctgcttggtcaaaacgtgaaaggcactaatttactatctaatacttgaaagtttcccttgatcggtgttcataattttgcatctgtgtaaaatgatg

SEQ ID NO: 672462 - DNA, 1441 bp, Homo sapiens
tcatttttaaaagctaagaatacagcacacaaaacaaatttttaaaagtttgttatgaaagtatattaaggttatgcataatgttatactctagcctgataagattagattacttattttagatataaattaccttacttgtttaacatatctcggagtaaaaatataaatgataaayatataatatagttaaaattatttattattttccttgtttcctgttttacatgaaaaagttattttctcttaaaaatgtgatgttttctgattgaataaactattatagacaaaaatctacaaataattagctttaccataatattttattcataacagattttacattttaaatgcatttgattctatttctaaaaattttctacatttaatttttcctactaccattaattactaagtgaaagctcaagttagttttctaagtttttatctttagagattcctaatctaatgaaaaaaatgggtatatatttccaaatcatgtagacatctgaggctaattataagttagactacttattgatagggtttctatcatgttttaagttactgatttcccagaaagcatacgaacttttttcaagtttatgcttcatgataatttttccacttatttatttacttatgattaattaacatggtatgatgcctttatacatatttgactttgaaattgtcaagttgtgtataaagcaaaacttatttggcttttaaatggctttttttctgccacattttttgtctgtatcagacaatcaaacatatgatttactacaacactttctttctatttgtttaagtatgataaatgcatgtctttccaaggcatttttctttcgttgaactcttaagtatacatttctctaagtgtcattgtttgcttttatttttctatatttgctctatctggacagtttcattcattgtcacattttcgactccatctaaatctacaagtatactcatgactttttccttttgattctgacctggtagttattgttcaatatccaacagatattttgtttacagaaaaatactattgagaaaaactcagtaggaaatattcaggaaagtgtaaagaaaaaatagtgtctactttgtttgttgagagaatactaatatttttccattttataaggtttttgaccatgtacatttttgcaccaggagcaaaaggattttgcattctaattaaatgctccatctcctatctttgttctcatggatgccataaaatcaacatggtctctccctgctgctaatatggccagcctttacttggttcaattaaaatgattttagatgggggatctcatactaaagcagttttacagtaaatagaaataaataccttgtgtctgaaatgtttttcttgtgatcctctaagtgatatcattcaatttttctgtgtgtctattaa

SEQ ID NO: 672463 - DNA, 1441 bp, Homo sapiens
tcatttttaaaagctaagaatacagcacacaaaacaaatttttaaaagtttgttatgaaagtatattaaggttatgcataatgttatactctagcctgataagattagattacttattttagatataaattaccttacttgtttaacatatctcggagtaaaaatataaatgataaacatataatatagttaaaattatttattattttccttgtttcctgttttamatgaaaaagttattttctcttaaaaatgtgatgttttctgattgaataaactattatagacaaaaatctacaaataattagctttaccataatattttattcataacagattttacattttaaatgcatttgattctatttctaaaaattttctacatttaatttttcctactaccattaattactaagtgaaagctcaagttagttttctaagtttttatctttagagattcctaatctaatgaaaaaaatgggtatatatttccaaatcatgtagacatctgaggctaattataagttagactacttattgatagggtttctatcatgttttaagttactgatttcccagaaagcatacgaacttttttcaagtttatgcttcatgataatttttccacttatttatttacttatgattaattaacatggtatgatgcctttatacatatttgactttgaaattgtcaagttgtgtataaagcaaaacttatttggcttttaaatggctttttttctgccacattttttgtctgtatcagacaatcaaacatatgatttactacaacactttctttctatttgtttaagtatgataaatgcatgtctttccaaggcatttttctttcgttgaactcttaagtatacatttctctaagtgtcattgtttgcttttatttttctatatttgctctatctggacagtttcattcattgtcacattttcgactccatctaaatctacaagtatactcatgactttttccttttgattctgacctggtagttattgttcaatatccaacagatattttgtttacagaaaaatactattgagaaaaactcagtaggaaatattcaggaaagtgtaaagaaaaaatagtgtctactttgtttgttgagagaatactaatatttttccattttataaggtttttgaccatgtacatttttgcaccaggagcaaaaggattttgcattctaattaaatgctccatctcctatctttgttctcatggatgccataaaatcaacatggtctctccctgctgctaatatggccagcctttacttggttcaattaaaatgattttagatgggggatctcatactaaagcagttttacagtaaatagaaataaataccttgtgtctgaaatgtttttcttgtgatcctctaagtgatatcattcaatttttctgtgtgtctattaa

SEQ ID NO: 672464 - DNA, 1441 bp, Homo sapiens
tcatttttaaaagctaagaatacagcacacaaaacaaatttttaaaagtttgttatgaaagtatattaaggttatgcataatgttatactctagcctgataagattagattacttattttagatataaattaccttacttgtttaacatatctcggagtaaaaatataaatgataaacatataatatagttaaaattatttattattttccttgtttcctgttttacatgaaaaagttattttctcttaaaaatgtgatgttttctgattgaataaactattatagacaaaaatctacaaataattagctttaccataatattttattcataacagattttacattttaaatgcatttgattctatttctaaaaattttctacatttaatttttcctactaccattaattactaagtgaaagctcaagttagttttctaagtttttatctttagagattcctaatctaatgaaaaaaatgggtatatatttccaaatcatgtagacatctgaggctaattataagttagactacttattgatagggtttctatcatgttttaagttactgatttcccagaaagcatacgaacttttttcaagtttatgcttcatgataatttttccacttatttatttacttatgattaattaacatggtatgatgcctttatacatatttgactttgaaattgtcaagttgtgtataaagcaaaacttatttggcttttaaatggctttttttctgccacattttttgtctgtatcagacaatcaaacatatgatttactacaacactttctttctatttgtttaagtatgataaatgcatgtctttccaaggcatttttctttcgttgaactcttaagtatacatttctctaagtgtcattgtttgcttttatttttctatatttgctctatctggacagtttcattcattgtcacattttcgactccatctaaatctacaagtatactcatgactttttccttttgattctgacctggtagttattgttcaatatccaacagatattttgtttacagaaaaatactattgagaaaaactcagtaggaaatattcaggaaagtgtaaagaaaaaatagtgtctactttgtttgttgagagaatactaatatttttccattttataaggtttttgaccatgtacatttttgcaccaggagcaaaaggattttgcattctaattaaatgctccatctcctatctttgttctcatggatgccataaaatcaacatggtctctccctgctgctaatatggccagcctttacttggttcaattaaaatgattttagatgggggatctcatactaaagcagttttacartaaatagaaataaataccttgtgtctgaaatgtttttcttgtgatcctctaagtgatatcattcaatttttctgtgtgtctattaa

SEQ ID NO: 672465 - DNA, 545 bp, Homo sapiens
catttttgcattagtataacttgaaactttagaatatttaataatcctaaaaaatacaatcctgaacagctgtcaagtctgcaaattaaaartaaacataaacaatttgaggcaaataattattagattatcattaatataagaaatatattatttttatgtggcaaaatgcaaaaattttataatacaatatattttaatattgttttgtgcattttattatgatgttaaattgccatatgttaaaatatttatgttttcaggttgaattacataactatttggtaatcattggtttgtagctgcctggaagtgttgagatacagcaggggtccctaagccctgggacacacgggtactggtctatgacctgttaggaactgggtgccactgcaggaggtgagtggccgataagagagcattatttcctgagctctgcctcccgtcagatcagcagcagcattagattctcacagaagcgccaacaaccctattgtgaactgctcatgtgagggagctaggttgcacactcctgatgagatcta

SEQ ID NO: 672466 - DNA, 545 bp, Homo sapiens
catttttgcattagtataacttgaaactttagaatatttaataatcctaaaaaatacaatcctgaacagctgtcaagtctgcaaattaaaaataaacataaacaatttgaggcaaataattattagattatcattaatataagaaatatattatttttatgtggcaaaatgcaaaaattttataatacaatatattttaatattgttttgtgcattttattatgatgttaaattgccatatgttaaaatatttatgttttcaggttgaattacataactatttggtaatcattggtttgtagctgcctggaagtgttgagatasagcaggggtccctaagccctgggacacacgggtactggtctatgacctgttaggaactgggtgccactgcaggaggtgagtggccgataagagagcattatttcctgagctctgcctcccgtcagatcagcagcagcattagattctcacagaagcgccaacaaccctattgtgaactgctcatgtgagggagctaggttgcacactcctgatgagatcta

SEQ ID NO: 672467 - DNA, 640 bp, Homo sapiens
tgcatcaaccagatgttagaatgcagagagagatacaaagcatattagatagatcatatagcacccaagcaggtcagatgccatatcccctaatgttccatggttatattcactcagtctttaagttctatggctaggacaagatcttttttttttttaagttattttttagatgcttgactccaaaacatagggaacttcactgtaattatgttatcagggatttttatggcctctttacaacttccttttccattacagacattgtgatattctgagccataagtactgcatggcaatgatgctttcagtattgcccaaaccagctggaaaatcttgtcttgctctaaaacccactcaaagcagccaatcttctgggccatttaggggataaatgagagcattagaaacattttgccttcaagaatccaaggaaatcacctcctatatcccaactttgtaatgayagaagattcaaggtgcagaactgttcactttggaggggatatctagcatatcttaagcaaagaaacaaccaaattcatcaagatagcaggtcataatgtttgtagcagaccttcagcatgcatatatcttgtaaaagaaattaagaactgatatacaggtccaaataacatta

SEQ ID NO: 672468 - DNA, 587 bp, Homo sapiens
tacagaacgacatatcatatcagatggcagacatacatcatttaaaggagcaccttgccgagrgcttcgtcaggagtttcttcgacaagaagaccagcttcaggactataggaagaacaatacttaccttgtgaagaggttagaatatcaaagttttcagtgtggacagcagatcaaggaattgagagcacagcatgaagaaaacattaaaaagttagtagaccagtttttacaggaacaaaaggaagaggccctcaagattcaatcaaatgacggaaaagaactgggtataaacgatcaagtagtacctaaaaatattccaaaagtagctgagaatgttgcagataagaatgaagaaccctcaagcaatcatattctacatgggaaagaacaaatcaaaagaggtggtgatgcagggatgcctggaataaaaaagaatgacctagcaaaagtcgatgatcttccccctgctttaaagaagcctcctatttcagtttttcaacatgaaagtcatcaggcaatctcccatcttccaactggacaacctctctccccaaatatgcctccagattcacaggtaaaccaca

SEQ ID NO: 672469 - DNA, 788 bp, Homo sapiens
caaacactggacagtatgtgtacaaagtcacctccctactccttttattttacatgagtgctgatgcgttttggcagatgagctttcagctgaggcctgatggaagttgagataacctgcaaagacataacaatatttatagttacatatcttagttttttgttttgttttgttttcttttttcttttcttttctttttttttttttttttgagacggagtcttgctctgttgcccaggctggagtgcagtggcgggatcttggctcactgcaagctctgccttccgggttcatgccattctcctgcctcagcatccgagtagctgggactacaggcgcccgccaccacgcccagctaatttttgtttttttgtatttttagtagagacggggtttcaccgtgttagccaggatggtctcgatctcatgacctcgtgatccgcccaccttggcctgctgggattaccggcgtgagccaccgcttccggccacttagttcttgaaattgtgtgatgaggcagcagggaggagggcagggcgggctccaggcgggggccggctctggggccagtctgggccacggtcggggcccagtcgaggkccggactggtcagggttcaggcgggatctggcgtccgagttctggtgggccggcctggggcaagatctggctctggctgcgggtcctggcccgggtcagggttgggcctccgatccagcccgccccggggcagggttcaatccctcgcttgccgaagtccctggggctggccggggtggaagacggg

SEQ ID NO: 672470 - DNA, 609 bp, Homo sapiens
tcagtatcacctaaagacatctaaaggcacatgagtttatgtacctagaggtggaaataaagtttacacggtatggaaaaatatctttggggaattttatgaaataggtgtgaagtgtttgaaatgaggttaaaaaaaaggatacctcaaaaaaggaggataaagaattagaaagcatttttaataataaaaawcagttttcagttaacccagaggtgatgacttggaggaaagatgataaaagtctccattttgggttgaacagctagaaagatactatcagcactatgtttatatggcagtgtctaatatcatgatagcagacttgggtaaatctttaaaatgtaagaaaaatcattggtattcatctgaattaagaaaatagtgcttttcaaatgagatgcacttttactctttagtgcatatctgtgtgtgcttatttaatccactgtggtccatttattaatctctaaatgttagtgccaaaaaagcaccagggataactaatgatttgtaaatgaatattccttcattatcacttttgtctcatttttttttttttaacgatttcagattgtcagcttgggttccatgatactttgatagaaa

SEQ ID NO: 672471 - DNA, 609 bp, Homo sapiens
tcagtatcacctaaagacatctaaaggcacatgagtttatgtacctagaggtggaaataaagtttacacggtatggaaaaatatctttggggaattttatgaaataggtgtgaagtgtttgaaatgaggttaaaaaaaaggatacctcaaaaaaggaggataaagaattagaaagcatttttaataataaaaatcagttttcagttaacccagaggtgatgacttggaggaaagatgataaaagtctccattttgggttgaacagctagaaagatactatcagcactatgtttatatggcagtgtctaatatcatgatagcagacttgggtaaatctttaaaatgtaagaaaaatcattggtattcatctgaattaagaaaatagtgcttttcaaatgagatgcacttttactcyttagtgcatatctgtgtgtgcttatttaatccactgtggtccatttattaatctctaaatgttagtgccaaaaaagcaccagggataactaatgatttgtaaatgaatattccttcattatcacttttgtctcatttttttttttttaacgatttcagattgtcagcttgggttccatgatactttgatagaaa

SEQ ID NO: 672472 - DNA, 3657 bp, Homo sapiens
ttgtgtgccaagtaatgcaaattttttctgtggaacagtggatgaaataaatagtacatgataacaacatgtcaatttgtaatttctgatttttcatttttaatttatgttgtgcttttgatggattatgaagagtaccataaattcaaagtgagcttatatttgttgacatggttataattaaattatatgtaaaaatttgaaagatattgccatatagatttaatagttatatctagtgcttttaaagtaagagatactattttgctttgcaactacaaagaagatctcttattataaacaagaataaggaagtgtggaatatggattctttagcactaaggtttgtagatataaacatcacataccttaaactatctaacagtcaatattccaaaatactgatggaaaatagtcaaaatttatgtcaattatataaaaataatcttttaaattcatatgccaacagatgataatgaatgtggaaatttaactcagtcctgtggcgaaaatgctaattgcactaacacagaaggaagttattattgtatgtgtgtacctggcttcagatccagcagtaaccaagacaggtttatcactaatgatggaaccgtctgtataggtaagttcggttatctaagttagaatttgtatatatctcttattgtttgttacctccagaggttaaacatattcaaaccaaattctgccagaccttgatcgtaccctacgtgttaagtactttcagaaatktaattaatgtccttatttctccagtgttttaaagtctgtgggatagttatccaaggatacaggaagaaggtttaatttttgagagaataagtttgcaaaaataaataaataaaagaaagtgagagaaatgttcatggagtcatgagatctagtatagtggcaaacaacagaataaatgtttacactttagaataataaaatactccaagaaaattgtcatttgcattaaaagatactgaggcctttgtaaatatgcactctgtgatgggttctacatatttttcagacaatcatcatttataaaataattgttctagtggttttacctctgctttaataaaagtcacacttcagatatgcattaagtttttctgaacactagagtcagaaaattctttataaaatcatgtagggtcactaaaatgtcctttgtagggaaaataatttcaatgtaatttttaagtgattgttcacttattgtgtgtctgaagggagtacctagacaatttttaaaaatatccttctattgtaatttggtcatgcatgtgatttatcagatcctagagaactggattacagcctgagaaaaaataattatttataaacttcaacagatgaataattttcagaagcaaattctctggagccaaagactttaattttgaaaataaattttaaataatcttaagcatggtttctaaaaaatattcaacttatcaataactattataattatgattggtaatctacaaaattaataggtatgctgaggccctgagaatgtaatcatgtagccaaggttagacatgggactagaattcaggaacctacatgcaacatagagaagggtaatgcgctgcttctaaatgatatagttagataaaagagatagatattcaagttaatctaaatcacaataaagcctttgattagtgccctattgagatatatatatatatatatattttttttttttttgagacagagtctcgctctgtcgcccaggctggagtgcagtggtgcgatctcggctcactgcaacctctgcctcccaggttcaagcagttctcctgcctcagcctaccgagtagctgggactacaggtgcacgctgccacacccagctaattttttgtattttagtagaggcagggttttaccgtgttgcccaggctggtcttgaactcctgagctcaggcaatctgcccacctcagcctctcaaagtgctgggatggtaagctatgacacaatgttcaaaaattttatctgtgaaatgtctgtgttaaagaaatcatccagtctcatgtacctacgcttcacaacatttactctgttatgtaaaaaaggaatattttattctcctcattttattgccaaggaagtaaaggactactctagattcatacattttggataaaggtaaggctacactcacagtcttgtatctaaaaaccctttgttatttccatggaatacttaaatgtgtagtagaccatttaaatatcactttgatctgaatcatccaaatacagccgatcaagctttgcaagggtataaaatatttaaaatatgagaaaacaatgctattactgttgaatggtaattttacctttagtgtttctagaaaaaagttttattgcaatatagcataacaacattctcaggaaataggaatcaatgatattctgcccagaaaacttacagtacttcactgtttgttcttctcaagcctatattcttgttactagtcttagaatgtcatataatgtgctttttacctttggtagttcagttctaatatgcagccctgcaagctttagtggaaatgttccagttagtgaagaagtctaacttgtaacatcttaatcactgtaatttaatacagttttaactgtgctctccattccctaatgtctcttgtctgtagaagacatctgtctttttatctgatcatgtttacttttaataaccctcaactcacaaagggctacatttctcggttcatgttccttgaagtagagaatttctgcattagaaaactctgaatcataaatacagagaaaacaaaaacacaaagattactgaatggcaacattttatggaggtagtatatttgtaattgaagactctttctcttgatactcaatttctattgtgttaaggtggaatgggcctgagtttgtgctaattccatttttagctattttaagtagtcagtaaaggcactaaccttattaaagcccaatacccagtattgagcccttctgtttctacctgttttgtttgatggattattcagtgaaaaattcattctctagaaaaatgttatttctcatcaatttttgttgtctttaaggattaagcttttttgaaaagcagtgcagctatttctttttatttcagtcctgcagtaattttcgttgcacaatatcataatcctcagggaatttgaacagagaaacataaatctactcccttttgcgttagtatatcaccttacagtgtattgcttctgatttgaaattttagcttatccttaaatttgacatttctggtaattatagtcattaaaatctctatgaataaaaaatggaagactttgatacagggcaagaaataatccaagcaaaattctttacctttagtccatattcaaatactattttcgacacataagttcattttgctgcagaaagcgctgggtgagatttagcactgcacatatttctcctcctctttgaatcacagtaaaacagaacttcagaagtccagctcctgagaaacctagttacacacaagaatttcacaaggggaagctgaggcatccaatagtaaagtcaatctcctaaaaccaaattaatagaagccatgaattccttcaatttcaccatgtgttttagagca

SEQ ID NO: 672473 - DNA, 3657 bp, Homo sapiens
ttgtgtgccaagtaatgcaaattttttctgtggaacagtggatgaaataaatagtacatgataacaacatgtcaatttgtaatttctgatttttcatttttaatttatgttgtgcttttgatggattatgaagagtaccataaattcaaagtgagcttatatttgttgacatggttataattaaattatatgtaaaaatttgaaagatattgccatatagatttaatagttatatctagtgcttttaaagtaagagatactattttgctttgcaactacaaagaagatctcttattataaacaagaataaggaagtgtggaatatggattctttagcactaaggtttgtagatataaacatcacataccttaaactatctaacagtcaatattccaaaatactgatggaaaatagtcaaaatttatgtcaattatataaaaataatcttttaaattcatatgccaacagatgataatgaatgtggaaatttaactcagtcctgtggcgaaaatgctaattgcactaacacagaaggaagttattattgtatgtgtgtacctggcttcagatccagcagtaaccaagacaggtttatcactaatgatggaaccgtctgtataggtaagttcggttatctaagttagaatttgtatatatctcttattgtttgttacctccagaggttaaacatattcaaaccaaattctgccagaccttgatcgtaccctacgtgttaagtactttcagaaatgtaattaatgtccttatttctccagtgttttaaagtctgtgggatagttatccaaggatacaggragaaggtttaatttttgagagaataagtttgcaaaaataaataaataaaagaaagtgagagaaatgttcatggagtcatgagatctagtatagtggcaaacaacagaataaatgtttacactttagaataataaaatactccaagaaaattgtcatttgcattaaaagatactgaggcctttgtaaatatgcactctgtgatgggttctacatatttttcagacaatcatcatttataaaataattgttctagtggttttacctctgctttaataaaagtcacacttcagatatgcattaagtttttctgaacactagagtcagaaaattctttataaaatcatgtagggtcactaaaatgtcctttgtagggaaaataatttcaatgtaatttttaagtgattgttcacttattgtgtgtctgaagggagtacctagacaatttttaaaaatatccttctattgtaatttggtcatgcatgtgatttatcagatcctagagaactggattacagcctgagaaaaaataattatttataaacttcaacagatgaataattttcagaagcaaattctctggagccaaagactttaattttgaaaataaattttaaataatcttaagcatggtttctaaaaaatattcaacttatcaataactattataattatgattggtaatctacaaaattaataggtatgctgaggccctgagaatgtaatcatgtagccaaggttagacatgggactagaattcaggaacctacatgcaacatagagaagggtaatgcgctgcttctaaatgatatagttagataaaagagatagatattcaagttaatctaaatcacaataaagcctttgattagtgccctattgagatatatatatatatatatattttttttttttttgagacagagtctcgctctgtcgcccaggctggagtgcagtggtgcgatctcggctcactgcaacctctgcctcccaggttcaagcagttctcctgcctcagcctaccgagtagctgggactacaggtgcacgctgccacacccagctaattttttgtattttagtagaggcagggttttaccgtgttgcccaggctggtcttgaactcctgagctcaggcaatctgcccacctcagcctctcaaagtgctgggatggtaagctatgacacaatgttcaaaaattttatctgtgaaatgtctgtgttaaagaaatcatccagtctcatgtacctacgcttcacaacatttactctgttatgtaaaaaaggaatattttattctcctcattttattgccaaggaagtaaaggactactctagattcatacattttggataaaggtaaggctacactcacagtcttgtatctaaaaaccctttgttatttccatggaatacttaaatgtgtagtagaccatttaaatatcactttgatctgaatcatccaaatacagccgatcaagctttgcaagggtataaaatatttaaaatatgagaaaacaatgctattactgttgaatggtaattttacctttagtgtttctagaaaaaagttttattgcaatatagcataacaacattctcaggaaataggaatcaatgatattctgcccagaaaacttacagtacttcactgtttgttcttctcaagcctatattcttgttactagtcttagaatgtcatataatgtgctttttacctttggtagttcagttctaatatgcagccctgcaagctttagtggaaatgttccagttagtgaagaagtctaacttgtaacatcttaatcactgtaatttaatacagttttaactgtgctctccattccctaatgtctcttgtctgtagaagacatctgtctttttatctgatcatgtttacttttaataaccctcaactcacaaagggctacatttctcggttcatgttccttgaagtagagaatttctgcattagaaaactctgaatcataaatacagagaaaacaaaaacacaaagattactgaatggcaacattttatggaggtagtatatttgtaattgaagactctttctcttgatactcaatttctattgtgttaaggtggaatgggcctgagtttgtgctaattccatttttagctattttaagtagtcagtaaaggcactaaccttattaaagcccaatacccagtattgagcccttctgtttctacctgttttgtttgatggattattcagtgaaaaattcattctctagaaaaatgttatttctcatcaatttttgttgtctttaaggattaagcttttttgaaaagcagtgcagctatttctttttatttcagtcctgcagtaattttcgttgcacaatatcataatcctcagggaatttgaacagagaaacataaatctactcccttttgcgttagtatatcaccttacagtgtattgcttctgatttgaaattttagcttatccttaaatttgacatttctggtaattatagtcattaaaatctctatgaataaaaaatggaagactttgatacagggcaagaaataatccaagcaaaattctttacctttagtccatattcaaatactattttcgacacataagttcattttgctgcagaaagcgctgggtgagatttagcactgcacatatttctcctcctctttgaatcacagtaaaacagaacttcagaagtccagctcctgagaaacctagttacacacaagaatttcacaaggggaagctgaggcatccaatagtaaagtcaatctcctaaaaccaaattaatagaagccatgaattccttcaatttcaccatgtgttttagagca

SEQ ID NO: 672474 - DNA, 3657 bp, Homo sapiens
ttgtgtgccaagtaatgcaaattttttctgtggaacagtggatgaaataaatagtacatgataacaacatgtcaatttgtaatttctgatttttcatttttaatttatgttgtgcttttgatggattatgaagagtaccataaattcaaagtgagcttatatttgttgacatggttataattaaattatatgtaaaaatttgaaagatattgccatatagatttaatagttatatctagtgcttttaaagtaagagatactattttgctttgcaactacaaagaagatctcttattataaacaagaataaggaagtgtggaatatggattctttagcactaaggtttgtagatataaacatcacataccttaaactatctaacagtcaatattccaaaatactgatggaaaatagtcaaaatttatgtcaattatataaaaataatcttttaaattcatatgccaacagatgataatgaatgtggaaatttaactcagtcctgtggcgaaaatgctaattgcactaacacagaaggaagttattattgtatgtgtgtacctggcttcagatccagcagtaaccaagacaggtttatcactaatgatggaaccgtctgtataggtaagttcggttatctaagttagaatttgtatatatctcttattgtttgttacctccagaggttaaacatattcaaaccaaattctgccagaccttgatcgtaccctacgtgttaagtactttcagaaatgtaattaatgtccttatttctccagtgttttaaagtctgtgggatagttatccaaggatacaggaagaaggtttaatttttgagagaataagtttgcaaaaataaataaataaaagaaagtgagagaaatgttcatggagtcatgagatctagtatagtggcaaacaacagaataaatgtttacactttagaataataaaatactccaagaaaattgtcatttgcattaaaagatactgaggcctttgtaaatatgcactctgtgatgggttctacatatttttcagacaatcatcatttataaaataattgttctagtggttttacctctgctttaataaaagtcacacttcagatatgcattaagtttttctgaacactagagtcagaaaattctttataaaatcatgtagggtcactaaaatgtcctttgtagggraaataatttcaatgtaatttttaagtgattgttcacttattgtgtgtctgaagggagtacctagacaatttttaaaaatatccttctattgtaatttggtcatgcatgtgatttatcagatcctagagaactggattacagcctgagaaaaaataattatttataaacttcaacagatgaataattttcagaagcaaattctctggagccaaagactttaattttgaaaataaattttaaataatcttaagcatggtttctaaaaaatattcaacttatcaataactattataattatgattggtaatctacaaaattaataggtatgctgaggccctgagaatgtaatcatgtagccaaggttagacatgggactagaattcaggaacctacatgcaacatagagaagggtaatgcgctgcttctaaatgatatagttagataaaagagatagatattcaagttaatctaaatcacaataaagcctttgattagtgccctattgagatatatatatatatatatattttttttttttttgagacagagtctcgctctgtcgcccaggctggagtgcagtggtgcgatctcggctcactgcaacctctgcctcccaggttcaagcagttctcctgcctcagcctaccgagtagctgggactacaggtgcacgctgccacacccagctaattttttgtattttagtagaggcagggttttaccgtgttgcccaggctggtcttgaactcctgagctcaggcaatctgcccacctcagcctctcaaagtgctgggatggtaagctatgacacaatgttcaaaaattttatctgtgaaatgtctgtgttaaagaaatcatccagtctcatgtacctacgcttcacaacatttactctgttatgtaaaaaaggaatattttattctcctcattttattgccaaggaagtaaaggactactctagattcatacattttggataaaggtaaggctacactcacagtcttgtatctaaaaaccctttgttatttccatggaatacttaaatgtgtagtagaccatttaaatatcactttgatctgaatcatccaaatacagccgatcaagctttgcaagggtataaaatatttaaaatatgagaaaacaatgctattactgttgaatggtaattttacctttagtgtttctagaaaaaagttttattgcaatatagcataacaacattctcaggaaataggaatcaatgatattctgcccagaaaacttacagtacttcactgtttgttcttctcaagcctatattcttgttactagtcttagaatgtcatataatgtgctttttacctttggtagttcagttctaatatgcagccctgcaagctttagtggaaatgttccagttagtgaagaagtctaacttgtaacatcttaatcactgtaatttaatacagttttaactgtgctctccattccctaatgtctcttgtctgtagaagacatctgtctttttatctgatcatgtttacttttaataaccctcaactcacaaagggctacatttctcggttcatgttccttgaagtagagaatttctgcattagaaaactctgaatcataaatacagagaaaacaaaaacacaaagattactgaatggcaacattttatggaggtagtatatttgtaattgaagactctttctcttgatactcaatttctattgtgttaaggtggaatgggcctgagtttgtgctaattccatttttagctattttaagtagtcagtaaaggcactaaccttattaaagcccaatacccagtattgagcccttctgtttctacctgttttgtttgatggattattcagtgaaaaattcattctctagaaaaatgttatttctcatcaatttttgttgtctttaaggattaagcttttttgaaaagcagtgcagctatttctttttatttcagtcctgcagtaattttcgttgcacaatatcataatcctcagggaatttgaacagagaaacataaatctactcccttttgcgttagtatatcaccttacagtgtattgcttctgatttgaaattttagcttatccttaaatttgacatttctggtaattatagtcattaaaatctctatgaataaaaaatggaagactttgatacagggcaagaaataatccaagcaaaattctttacctttagtccatattcaaatactattttcgacacataagttcattttgctgcagaaagcgctgggtgagatttagcactgcacatatttctcctcctctttgaatcacagtaaaacagaacttcagaagtccagctcctgagaaacctagttacacacaagaatttcacaaggggaagctgaggcatccaatagtaaagtcaatctcctaaaaccaaattaatagaagccatgaattccttcaatttcaccatgtgttttagagca

SEQ ID NO: 672475 - DNA, 3657 bp, Homo sapiens
ttgtgtgccaagtaatgcaaattttttctgtggaacagtggatgaaataaatagtacatgataacaacatgtcaatttgtaatttctgatttttcatttttaatttatgttgtgcttttgatggattatgaagagtaccataaattcaaagtgagcttatatttgttgacatggttataattaaattatatgtaaaaatttgaaagatattgccatatagatttaatagttatatctagtgcttttaaagtaagagatactattttgctttgcaactacaaagaagatctcttattataaacaagaataaggaagtgtggaatatggattctttagcactaaggtttgtagatataaacatcacataccttaaactatctaacagtcaatattccaaaatactgatggaaaatagtcaaaatttatgtcaattatataaaaataatcttttaaattcatatgccaacagatgataatgaatgtggaaatttaactcagtcctgtggcgaaaatgctaattgcactaacacagaaggaagttattattgtatgtgtgtacctggcttcagatccagcagtaaccaagacaggtttatcactaatgatggaaccgtctgtataggtaagttcggttatctaagttagaatttgtatatatctcttattgtttgttacctccagaggttaaacatattcaaaccaaattctgccagaccttgatcgtaccctacgtgttaagtactttcagaaatgtaattaatgtccttatttctccagtgttttaaagtctgtgggatagttatccaaggatacaggaagaaggtttaatttttgagagaataagtttgcaaaaataaataaataaaagaaagtgagagaaatgttcatggagtcatgagatctagtatagtggcaaacaacagaataaatgtttacactttagaataataaaatactccaagaaaattgtcatttgcattaaaagatactgaggcctttgtaaatatgcactctgtgatgggttctacatatttttcagacaatcatcatttataaaataattgttctagtggttttacctctgctttaataaaagtcacacttcagatatgcattaagtttttctgaacactagagtcagaaaattctttataaaatcatgtagggtcactaaaatgtcctttgtagggaaaataatttcaatgtaatttttaagtgattgttcacttattgtgtgtctgaagggagtacctagacaatttttaaaaatatccttctattgtaatttggtcatgcatgtgatttatcagatcctagagaactggattacagcctgagaaaaaataattatttataaacttcaacagatgaataattttcagaagcaaattctctggagccaaagactttaattttgaaaataaattttaaataatcttaagcatggtttctaaaaaatattcaacttatcaataactattataattatgattggtaatctacaaaattaataggtatgctgaggccctgagaatgtaatcatgtagccaaggttagacatgggactagaattcaggaacctacatgcaacatagagaagggtaatgcgctgcttctaaatgatatagttagataaaagagatagatattcaagttaatctaaatcacaataaagcctttgattagtgccctaktgagatatatatatatatatatattttttttttttttgagacagagtctcgctctgtcgcccaggctggagtgcagtggtgcgatctcggctcactgcaacctctgcctcccaggttcaagcagttctcctgcctcagcctaccgagtagctgggactacaggtgcacgctgccacacccagctaattttttgtattttagtagaggcagggttttaccgtgttgcccaggctggtcttgaactcctgagctcaggcaatctgcccacctcagcctctcaaagtgctgggatggtaagctatgacacaatgttcaaaaattttatctgtgaaatgtctgtgttaaagaaatcatccagtctcatgtacctacgcttcacaacatttactctgttatgtaaaaaaggaatattttattctcctcattttattgccaaggaagtaaaggactactctagattcatacattttggataaaggtaaggctacactcacagtcttgtatctaaaaaccctttgttatttccatggaatacttaaatgtgtagtagaccatttaaatatcactttgatctgaatcatccaaatacagccgatcaagctttgcaagggtataaaatatttaaaatatgagaaaacaatgctattactgttgaatggtaattttacctttagtgtttctagaaaaaagttttattgcaatatagcataacaacattctcaggaaataggaatcaatgatattctgcccagaaaacttacagtacttcactgtttgttcttctcaagcctatattcttgttactagtcttagaatgtcatataatgtgctttttacctttggtagttcagttctaatatgcagccctgcaagctttagtggaaatgttccagttagtgaagaagtctaacttgtaacatcttaatcactgtaatttaatacagttttaactgtgctctccattccctaatgtctcttgtctgtagaagacatctgtctttttatctgatcatgtttacttttaataaccctcaactcacaaagggctacatttctcggttcatgttccttgaagtagagaatttctgcattagaaaactctgaatcataaatacagagaaaacaaaaacacaaagattactgaatggcaacattttatggaggtagtatatttgtaattgaagactctttctcttgatactcaatttctattgtgttaaggtggaatgggcctgagtttgtgctaattccatttttagctattttaagtagtcagtaaaggcactaaccttattaaagcccaatacccagtattgagcccttctgtttctacctgttttgtttgatggattattcagtgaaaaattcattctctagaaaaatgttatttctcatcaatttttgttgtctttaaggattaagcttttttgaaaagcagtgcagctatttctttttatttcagtcctgcagtaattttcgttgcacaatatcataatcctcagggaatttgaacagagaaacataaatctactcccttttgcgttagtatatcaccttacagtgtattgcttctgatttgaaattttagcttatccttaaatttgacatttctggtaattatagtcattaaaatctctatgaataaaaaatggaagactttgatacagggcaagaaataatccaagcaaaattctttacctttagtccatattcaaatactattttcgacacataagttcattttgctgcagaaagcgctgggtgagatttagcactgcacatatttctcctcctctttgaatcacagtaaaacagaacttcagaagtccagctcctgagaaacctagttacacacaagaatttcacaaggggaagctgaggcatccaatagtaaagtcaatctcctaaaaccaaattaatagaagccatgaattccttcaatttcaccatgtgttttagagca

SEQ ID NO: 672476 - DNA, 773 bp, Homo sapiens
gggtccatttaaaagtaattgtgttttccaaataagccattttcaaagttttgggtggggttaggaggcatggtgttgaaactagtattgattacattgaaagtagttttatcagtgtacaaatgaatggtgatgcatattgcaaaagcattgtgaataaagtaccagtcaaaaggataaatccacaagtgtctccttcctatcatatccaccttttctgattcctgaactgtacagccattaaatggtcagagtacattattcccttggcattttgagtccatcatctcatgacttgttaggatctaccttgaccaatgatcttttggattttgtttgtctgtttgtttaaagacaaagtctggctctgtcacccaggctggagtgcagtggcgcaatctcagctcactgcaacctccaccttctggtttcaagcaattctcctgtctcagcctcccaacttgctgggattacaggcgtgtgccagcacacctggstaatttttgttcttttggtagagatggggtttcaccatgttggccaggctggtctcgaacccctggcctcaagccatccacttgcctcggtctcctaaagtgctgggattacaggcatgagccaccatgcccagccggatataacacatttaaacttctatttaagaatcctttgcatgttcataatataaagcaatcaacatagcaaattagaatgtttcctgcttcatgcaaattcatacttaaaatattcagaatcttgtatcaaattgagga

SEQ ID NO: 672477 - DNA, 669 bp, Homo sapiens
cacccttctatgaaactgccccagcagaagatatattaataatcttccttcaaatattttaaatttagttttctaaccatttgatatagtttggatatttgtcccttccaaagcttatgttgaaatttgatgtccaatgttgggggtgagcctagtgggaggtgtttgggtcacaagggcaggtgtctcatgaacagcttggtgccatcctcgggataatgagtgaattatcactgttatcagttcccatgagatctgactgtgaaaaagagcctgatactttccctctccttttgttcctctcaccatgtgatgcctgcatcccttctctttctaccaggaatggaagttccctgaaccctcaccataaacaaatgctggtgccatccttctcttgaaaagtctacagaacaatgatcttaataaacctattttaaactaaattatccagcctcatrtattcctttatagcaatggaaaacagactaaagcaccattgtaatcaaagcaatcctgaattacatagaaaaaaaaaactgcagaactaatttagatttgcttatatttttaaaagaaaaaatggttgagattacatactgcattccaaatatacacattactgttatacttcaataaatacaaatatttttacactgctagatgcttgca

SEQ ID NO: 672478 - DNA, 494 bp, Homo sapiens
  misc_feature 2, 3, 4, 5, 6, 7, 8, 9, 10, 11, 12, 13, 14, 15, 16, 17, 18,19, 20, 21, 22, 23, 24, 25, 26, 27, 28, 29, 30, 31, 32,33, 34, 35, 36, 37, 38, 39, 40, 41, 42, 43, 44, 45, 46,47, 48, 49, 50, 51, 52, 53, 54, 55, 56, 57, 58, 59, 60,61: n = A,T,C or G
  misc_feature 62, 63, 64, 65, 66, 67, 68, 69, 70, 71, 72, 73, 74, 75, 76,77, 78, 79, 80, 81, 82, 83, 84, 85, 86, 87, 88, 89, 90,91, 92, 93, 94, 95, 96, 97, 98, 99, 100, 101: n = A,T,C or G
tnnnnnnnnnnnnnnnnnnnnnnnnnnnnnnnnnnnnnnnnnnnnnnnnnnnnnnnnnnnnnnnnnnnnnnnnnnnnnnnnnnnnnnnnnnnnnnnnnnnnccctaagtattgttttaaacagtaaagttaggaagagtaaactaatatatatcattaaaacaaattgcatttaaaatgaataaaaatgtaacaagttataatttttcaggaaagtaaattggctacacatttttacttcataaagctaggcttyagtagctgtagtttttcttcataacacttatttcaattttaaattatacatttatctgtgtaattatttgattaatgtgattatttgattagtggcattaatctgtctcattaaggagattatttctgacagaaataatctgtctcattaaggagaaaacttcatgagatataagagcctatccatattgttctctatttgtcctccaaatttctcttcctggcacatggaattaattt

SEQ ID NO: 672479 - DNA, 700 bp, Homo sapiens
cattttaagccattaggttttaaaggtagtttcgttatgtaacataattggtaaaatatcactttatagtacttacaatttgcaatatatagtatcttccgagtcagggatcagcaaacattttctataaagggcctgacagtaaaaacttcagactttracggccatatggtctatgtcataccaactcaactcagcacttgcagtgcaaaagcagctatagataatgggtaaataaactgcaaatagttttattgtgatccaataaaactatttacaaaaataggcagatgaatggatttggttttcaggcacagttttctgaatcctgttctaagttgacagtctagaagaatgtgttaattctcatctcatagtgtgcattcaattactaataattagtctctttattgactttagaaaattatgtaagagaagaattcttgaaggctttgctctaaagaatatcaagctgccaccgtggttcatacctgtaaactcaacactttggtaggccaagacgggaggataactcgaggccaggaatttgagaccagcctgggcaacacagtgagctcccatctctacaaaaaaaaaaaaaagcaatatcaggaccaactatgatagttaacatccttgtgtgcagtgtggttgttgtgccaaatccctgttgactctagtagagatggcacctagtgca

SEQ ID NO: 672480 - DNA, 700 bp, Homo sapiens
cattttaagccattaggttttaaaggtagtttcgttatgtaacataattggtaaaatatcactttatagtacttacaatttgcaatatatagtatcttccgagtcagggatcagcaaacattttctataaagggcctgacagtaaaaacttcagactttaacggccatatggtctatgtcataccaactcaactcagcacttgcagtgcaaaagcagctatagataatgggtaaataaactgcaaatagttttattgtgatccaataaaactatttacaaaaataggcagatgaatggatttggttttcaggcacagttttctgaatcctgttctaagttgacagtctagaagaatgtgttaattctcatctcatagtgtgcattcaattactaataattagtctctttattgactttagaaaattatgtawgagaagaattcttgaaggctttgctctaaagaatatcaagctgccaccgtggttcatacctgtaaactcaacactttggtaggccaagacgggaggataactcgaggccaggaatttgagaccagcctgggcaacacagtgagctcccatctctacaaaaaaaaaaaaaagcaatatcaggaccaactatgatagttaacatccttgtgtgcagtgtggttgttgtgccaaatccctgttgactctagtagagatggcacctagtgca

SEQ ID NO: 672481 - DNA, 700 bp, Homo sapiens
cattttaagccattaggttttaaaggtagtttcgttatgtaacataattggtaaaatatcactttatagtacttacaatttgcaatatatagtatcttccgagtcagggatcagcaaacattttctataaagggcctgacagtaaaaacttcagactttaacggccatatggtctatgtcataccaactcaactcagcacttgcagtgcaaaagcagctatagataatgggtaaataaactgcaaatagttttattgtgatccaataaaactatttacaaaaataggcagatgaatggatttggttttcaggcacagttttctgaatcctgttctaagttgacagtctagaagaatgtgttaattctcatctcatagtgtgcattcaattactaataattagtctctttattgactttagaaaattatgtaagagaagaattcttgaaggctttgctctaaagaatatcaagctgccaccgtggttcatacctgtaaactcaacactttggtaggccaagacgggaggataactcgaggccaggaatttgagaccagcctgggcaacacagtgagmtcccatctctacaaaaaaaaaaaaaagcaatatcaggaccaactatgatagttaacatccttgtgtgcagtgtggttgttgtgccaaatccctgttgactctagtagagatggcacctagtgca

SEQ ID NO: 672482 - DNA, 1234 bp, Homo sapiens
agaaaaatttttactagaatacaaaaatgttgcaccaccataggtactattttggatgcaagagtagcaactgtagaataaattgaaaacctcttcatgagggctgatgtgctttagtgccacctgtttgctggagctcctccaagtctacttggcatctttctgccaccttgtcctgttgccttcacgttctcctaaagtatattcattcttttcttttcatattatgtataaaatattacctaactgaagatttctacctgatgtgatgaagtgaataaaggagcagaaataataataacaaaggtcaatacaaaacactatagggggatagcaaaggttggttaaacaaaaagtacagctagataggaagattacattctaggtgttctatagcactatagggtgaatataactaacaataaccttttgtgtatttcaaatagctagaagtacagatttagaatatttctaacacaaagaaatgataaatgttcgaggtgatgggtatgctaattatcctgatttgatcactacacactgtataaatataccagtattgaaatgtcacactgtaccccatgaagtctaattattatgtrccaattaataataaagcaaaaactacactatttaaacatgctttatctcatcaatttatttaaatgacataaaattatatacagtaatatgcacaacaatgtattattgagtatgtatgacaataattgccaaaaaaggaggtaagagacaatagagctctacaggagtaacatttctacatcttttaatatttagtataaatctgaggtagattccagtaagctaagaagtatatgataagcacaatgggaagcattcaaaaaacctcaaatgtaacacaaaaaattttaatacattagaaatattaatacaaataaagcagtaaaagaggaaaagagataaacagataggaagcatatagaaaattaaatgtgaaacggcagacctaaatcaatttatatcaattacaatgttactggcaggtctttgttcttagagctcttaagatggtggcaggccgttcccaggacggtgagattacttcctctacgtgtttttctcttgcctgatcttgaactcagcccccatcagtcataccagtatgggtgaagtaagtccaacagacagtggctccaagccctgcagcacaattaggattaattattttttcctgtccaataagaagtatttg

SEQ ID NO: 672483 - DNA, 1596 bp, Homo sapiens
gaactctctgatcttctttagatccccttaagcttgtgtaactgaattttcaagtctgatactgtataatcatagttttacggatcctgatctgtgataataattgtacctctttgggatccaggagtggcttaaagaagacagacaccaagttgaatgctaataattttgaaaattttgttgtccttttgcattcaaaagccacatagaaaaataagctctgtgatatttccaatcttcctctgagtagtaaattattaaccaaggcctttacagaccaccaccaccaacttttttcctgttacaacaatattcaactttttatttctttttacccaatttaagtcaccttccaaacaatgcaaaaactatgcagatgaatggtatcatgccagcaacattactaagaaaaacacaatatatcatcttgtcatgacaatatttgtactttatcctgaagatctgtttctgcgttcctgttatcttgtgacatatagtctttagcatctgaaagaggcagggatggcttcatagctatgttttgttgagatggtttactgtcagttgtttacacagtgactcaccctaaggatcttgcacttggggttttaatgctctgcagttgtcgttttgtaattgttagtaatttgtttgaatttatgttttgaaagtgaaatttgacaggtcagtgaaccatgaataggaggcttggagatagagctcccatattgtgctacctacatctgtatctgtttgaatgagttctgggctgctcacagccccacactttagcaccctgagccaaagtgagccctgccaccttctgctcctggtaaggtccttgaagtaaacttgagaggtgtcaggtttgatgcctgtgtcacaccatatctcaggctggacatggagagggacatctttgccctgcgttgaaagcaccaaggcatatatggtaggtgaccagcctgaggctgcctgttggtggtggtgagtttctcttccatccctgatttaggtattgagtatctcctggcacagaggtttaaaaaactttgaaggatacccacctatcatgagttatggtattgggtccattgataaaagagacacatggcttccccagtcaggacatgamaaaaattttggcaggtggctgaatgattgacccagagccctcagtcttgtggcagagcaaagccctctggtgtctgagtgtctgaactgagtgtgactgtgtttgttgctttggacagttcttgtcccctggcaagacacaaaataggaattgtgtagttttactgattccacatgcaggttaaatattctgagcattggcatttaaaactggccctgcaaaatttagatgagtggtaaaaatttatgctaataatttacaatttaattctttttgaaatattaaatagcaaataaaaacaccatgatacattgagagacagaccatgaagaaaggcagttcctgatcgaatggcacttttccactgctttttgaacagtggaaaagtggtcccacatttttattttgtactaggtcctctgaattatgtagccagcattggatgagtctgagattttgct

SEQ ID NO: 672484 - DNA, 1596 bp, Homo sapiens
gaactctctgatcttctttagatccccttaagcttgtgtaactgaattttcaagtctgatactgtataatcatagttttacggatcctgatctgtgataataattgtacctctttgggatccaggagtggcttaaagaagacagacaccaagttgaatgctaataattttgaaaattttgttgtccttttgcattcaaaagccacatagaaaaataagctctgtgatatttccaatcttcctctgagtagtaaattattaaccaaggcctttacagaccaccaccaccaacttttttcctgttacaacaatattcaactttttatttctttttacccaatttaagtcaccttccaaacaatgcaaaaactatgcagatgaatggtatcatgccagcaacattactaagaaaaacacaatatatcatcttgtcatgacaatatttgtactttatcctgaagatctgtttctgcgttcctgttatcttgtgacatatagtctttagcatctgaaagaggcagggatggcttcatagctatgttttgttgagatggtttactgtcagttgtttacacagtgactcaccctaaggatcttgcacttggggttttaatgctctgcagttgtcgttttgtaattgttagtaatttgtttgaatttatgttttgaaagtgaaatttgacaggtcagtgaaccatgaataggaggcttggagatagagctcccatattgtgctacctacatctgtatctgtttgaatgagttctgggctgctcacagccccacactttagcaccctgagccaaagtgagccctgccaccttctgctcctggtaaggtccttgaagtaaacttgagaggtgtcaggtttgatgcctgtgtcacaccatatctcaggctggacatggagagggacatctttgccctgcgttgaaagcaccaaggcatatatggtaggtgaccagcctgaggctgcctgttggtggtggtgagtttctcttccatccctgatttaggtattgagtatctcctggcacagaggtttaaaaaactttgaaggatacccacctatcatgagttatggtattgggtccattgataaaagagacacatggcttccccagtcaggacatgaaaaaaattttggcaggtggctgaatgrttgacccagagccctcagtcttgtggcagagcaaagccctctggtgtctgagtgtctgaactgagtgtgactgtgtttgttgctttggacagttcttgtcccctggcaagacacaaaataggaattgtgtagttttactgattccacatgcaggttaaatattctgagcattggcatttaaaactggccctgcaaaatttagatgagtggtaaaaatttatgctaataatttacaatttaattctttttgaaatattaaatagcaaataaaaacaccatgatacattgagagacagaccatgaagaaaggcagttcctgatcgaatggcacttttccactgctttttgaacagtggaaaagtggtcccacatttttattttgtactaggtcctctgaattatgtagccagcattggatgagtctgagattttgct

SEQ ID NO: 672485 - DNA, 1596 bp, Homo sapiens
gaactctctgatcttctttagatccccttaagcttgtgtaactgaattttcaagtctgatactgtataatcatagttttacggatcctgatctgtgataataattgtacctctttgggatccaggagtggcttaaagaagacagacaccaagttgaatgctaataattttgaaaattttgttgtccttttgcattcaaaagccacatagaaaaataagctctgtgatatttccaatcttcctctgagtagtaaattattaaccaaggcctttacagaccaccaccaccaacttttttcctgttacaacaatattcaactttttatttctttttacccaatttaagtcaccttccaaacaatgcaaaaactatgcagatgaatggtatcatgccagcaacattactaagaaaaacacaatatatcatcttgtcatgacaatatttgtactttatcctgaagatctgtttctgcgttcctgttatcttgtgacatatagtctttagcatctgaaagaggcagggatggcttcatagctatgttttgttgagatggtttactgtcagttgtttacacagtgactcaccctaaggatcttgcacttggggttttaatgctctgcagttgtcgttttgtaattgttagtaatttgtttgaatttatgttttgaaagtgaaatttgacaggtcagtgaaccatgaataggaggcttggagatagagctcccatattgtgctacctacatctgtatctgtttgaatgagttctgggctgctcacagccccacactttagcaccctgagccaaagtgagccctgccaccttctgctcctggtaaggtccttgaagtaaacttgagaggtgtcaggtttgatgcctgtgtcacaccatatctcaggctggacatggagagggacatctttgccctgcgttgaaagcaccaaggcatatatggtaggtgaccagcctgaggctgcctgttggtggtggtgagtttctcttccatccctgatttaggtattgagtatctcctggcacagaggtttaaaaaactttgaaggatacccacctatcatgagttatggtattgggtccattgataaaagagacacatggcttccccagtcaggacatgaaaaaaattttggcaggtggctgaatgattgacccagagccctcagtcttgtggcagagcaaagccctctggtgtctgagtgtctgaactgagtgtgactgtgtttgttgctttggacagttcttgtcccctggcaagacacaaaataggaattgtgtagttttactgattccacatgcaggttaaatattcygagcattggcatttaaaactggccctgcaaaatttagatgagtggtaaaaatttatgctaataatttacaatttaattctttttgaaatattaaatagcaaataaaaacaccatgatacattgagagacagaccatgaagaaaggcagttcctgatcgaatggcacttttccactgctttttgaacagtggaaaagtggtcccacatttttattttgtactaggtcctctgaattatgtagccagcattggatgagtctgagattttgct

SEQ ID NO: 672486 - DNA, 636 bp, Homo sapiens
tgcctatcttctctcctgaggtcttaagaccatgcagaggggtctctaccttttaagtgaacctttggagtgcccatgttaaaatgattgtttgctttcttcctatagtgcagctrcagagctccttgaggacaggaactgtgtcattcatttctgtatttttaatgcctaccagaaatgccttgctcatggtagacattcaatacaaattgattaagtagatgtcaagagttcatcacctcaaggagcttatgctccaaagaaaagcttgttcttaacgtattgaaaacttgcacagattccttgtttactaggaccaaagatgtgttttctacaactcagacataaaagtcaagtggctgtctatgatttttataactgacttcatcttgttcttggattctcatttaagcaggcaacagaaagtatttaaactttaagttcaaagttaattcaaactcttcaggtataaaaacaatcttctttggataaatattcaattcaaaatttggcaacttgccaggcttatttttctcttcttgggcagctttccttccttcttccgtgatgacatcaagtggacagtgaccttggttcaaatgacatactatttcctggctggctccaatgaaatgt

SEQ ID NO: 672487 - DNA, 1430 bp, Homo sapiens
tggagaaagcaaaaaaatacatgaaaatattttttatcttagactctaagatcataacgagaagcttataactaagcctgtcttacaaacacctgcgataacctgctagaaatgtcaatatcaatatacaggccatgtctgcacctgtctagttacaactgttggctgcacatctggggaaaccgaggaagaacacaccccaaagtgcggggagcctgatgagttcaccaaaccccaggctaccaggaggaaaggaaatccctggagccttgagttagggggtttttaaataaaacagtgggcagaattattttatgcttcaataggaaacgtatgggcatcccctcaccaagaggctctatgtaatcctgctgaattgcttgaaaaaagaacccaggcaatccacgcatgacagtcataatgttttgtgagagaaatgaaaaggcgtttggggtgtgttgggactgacatctggaagggaatcacgtgctgctccgtrctctattcccgtgactccaaaatcagagacggttggcagaaacagaccactcacctaagccaggggcggggccaggagaagacaggaggctgatattcgttgctgaacacccatcatgcgccacatagtgaagtggaaagtggttgctcacttccaggtttgtctgtctcaaagtgagtgtcccgctgctccaaaccacgcagggtccggctaccagctgcgcccgctgctctccagacattgaacagggagctcggcagtctccaggcctcagggtcagcctggtcctaagggtctcggactcaaccctggcagccagctgggatcgcttccaggcaagggtcacaggacattacatactgtccaattttatctgagtcagcaaaaggagttgctcaaggaattctacagggatttgcccagagcggagtaggctagaatgaaaaactagcacatcaaaggaagaaaaataacttcagtgtttccaaattgtgtttctggatacctgggatcatgagactctaggaaaatctgatccactttttgttgtgtttcatcccaaagcagccggctgaccaagaggatgagaccattaccgtgaaccgcagcagcagcagccaggccattttctatcctatgttttaacaggcaaagcgctgccatatacttatgtcacagaatgctcagaagaactctgttggcatgttttactgacccaccacacagatgaggagagatggagtgtgctagtgacctccccacagtcagagcttcttggtggtaaggccggcattaccacctggatctgttgactctggctccaggggacattctgtgactcgggagaacccgagttgagaccgacttcatccagggtgcactgggaatctgcctgtgtatcccatagatgtttcaggcttaccatgtttta

SEQ ID NO: 672488 - DNA, 2329 bp, Homo sapiens
  misc_feature 994, 995, 996, 997, 998, 999, 1000, 1001, 1002, 1003, 1004,1005, 1006, 1007, 1008, 1009, 1010, 1011, 1012, 1013, 1014,1015, 1016, 1017, 1018, 1019, 1020, 1021, 1022, 1023, 1024,1025, 1026, 1027, 1028, 1029, 1030, 1031, 1032, 1033: n = A,T,C or G
  misc_feature 1034, 1035, 1036, 1037, 1038, 1039, 1040, 1041, 1042, 1043,1044, 1045, 1046, 1047, 1048, 1049, 1050, 1051, 1052, 1053,1054, 1055, 1056, 1057, 1058, 1059, 1060, 1061, 1062, 1063,1064, 1065, 1066, 1067, 1068, 1069, 1070, 1071, 1072: n = A,T,C or G
  misc_feature 1073, 1074, 1075, 1076, 1077, 1078, 1079, 1080, 1081, 1082,1083, 1084, 1085, 1086, 1087, 1088, 1089, 1090, 1091, 1092,1093: n = A,T,C or G
caaatattcattgagtatacctagtatgtaacatgctttaagaatacaccagtgaaccaaacagaaatatctgacattacagaacttaacattccagtatttggagacagacgataaaaaagtgaacatgtatatttacagtttgtcaaggaatgataaatgaagactcttaaagtagatggggaattgggagtgaagtctgtaatttaaatagggtgggcaggaaagcttcacagagaatgggacatttaagaatagacttgaaggacaggcaagagcaatctctatgtttatatgggagaaaaggttccaggcagatgcagtaacaatggcaaatatcctgaagtaggatcatgctggagtttttgtggagcagcaaggaggctagtgtgactgccacagaatcacccaagggaagatgagaagatcagaccagaccagcacttgggcatctaatgggaaaagtttctcaagccatcataaagatttcayctttactataaatactatgagaaaccatgggatgttttacagtaagaaaggtggcataatatgttacatgttttaaacaaactctatagcttctgagttgaaatagattgtaggggctcatggcagaagcagagggaacatttaggaggctactgtaaagaatatcatgaaaagaacaaacaacgctatgtaacatgcttaaatggactgaagaagatgaatgaaatcaaaatgatgttaccttcacaccttgaatcagtacaataaacccccctccccaatcacaaaagaaaaactaaacacaaaaaccaggctttggttgctcagacaattttacaggtgagttctagcaaacatgcaaaaaacgtttaattgcactgttacagaaattcttctggagacaagaaaataaggcacatcacccaactaatttcatgataacaatgtcaatgtataataacagaaaaagtggatctccaaagaaataaatttatttggaaannnnnnnnnnnnnnnnnnnnnnnnnnnnnnnnnnnnnnnnnnnnnnnnnnnnnnnnnnnnnnnnnnnnnnnnnnnnnnnnnnnnnnnnnnnnnnnnnnnntattgtgcactttatttctattattactacatagtaatatataatgaaatgattctacaactcactataacgtagactcagtgggatctctgagcttgttttcctgcaactagactgtccatctggggtgatgggagacagtaacagaatatcaggcattagattctcataaggagtacacaacctagatccctcgcatgcacatttcacaacagagtttgtgctcctatgagaatctaatgctgctgctgatctgacaggacatggagctcaggtggtcatgcaagcgatgggaggggctagaaatacagatgaagtttcccttcactcgcctgctgctcacctccagctctgtggccctgtggttggagactgctgctcaagtgcattcgaaaggatccatcccatgccattcttcagagtcatctttactgctgcagtggtcaacttgtagcacccctaagctcgcaggacatatgcttcaactggcatttcacaatcaacagtatgtggtagcttgagtcattgtgaggtcacttcctggaaatcaccagcatcccatatcccattagcaaggagctcagcactgctccttggataaccaaacctattcccaaatcccatctgtgtgcatctatctcctggtacccttcctagcatcaattctgtatttgtaggagtccaatcaggagacacaaaccactcaaaagtttaaactagaatgagcaagatggctcacacctgtaatcccagcactttgggaggccaaggtgggtggactgctttgagctcaggagtttgagaacagtctgggaaacatggtgaaacctcgtctctacaaaaaacacaaaaatcagctgggtgtggtggcacttacctgtaatcccagctactcgggaggctgaggcaggagaattgcttgagcctggcaggtggaggctgcagtgagcagaggttgtgccactgtactccagcctgggtgacagtgtgagacccggtatcaaaaagaaaaaacatatatatatgtaaatttaatataaaaagtattaattttggccaggcacaatggctcatgcctgtaatcccagcactttgggaggccaaggcagacagatcacctcaggtcaggagttcgagaccagcctgaccagcatggaccaaccccatctctactaaaaatacaaaattagctgggcatggtggcacatgcctgtaatcccaactactcgggaggct

SEQ ID NO: 672489 - DNA, 545 bp, Homo sapiens
  misc_feature 478, 486: n = A,T,C or G
aggccccattaatcacaaatactgtatcatttagagatattggaccatgatttttttcagcttttatcaagttgatttttaacatttgaaaatcttaatattttccattttaatttacagtacatgcagaaaactaaatcaggaacacacacattccagacattttacagaccatttcatcattgttatttaagagctaaattcactgccatcatcatcgtcataatcatccagcaaacttattttgctactcatcacctttctagatctcaaactctcaacacgcaggaggtctagtkagaggggcaagtaaaaatgctaatgagactgggtgtggtggctcacacctatagtcccagcactttgggaggccgagacagggcgactgcttcagcccaggagttcagcttgggcaaccgtggtggcacatacctataatccctgctacttgggaggctgaggcaggaggcttgcttgngagcccangagtttgaggctgcagtgagctatgatcatgccactgcactccaacctgagtgacagag

SEQ ID NO: 672490 - DNA, 650 bp, Homo sapiens
agagtgagatccgggtgtcaaaaaagaaaaaaaaaggcctctgtacatattttgcttctttctcttctccttctagtgttcccatttcccgtgttacaccttttgtaattgtcccacagttcttgaatatttggggttttatctatttatttatttcactctttgcattgcagttttggaaggttgtatcagtatcttcaacctcattgattcttcggctgtgaacagtccaacwacgaacccatcaaaagcattcttcatgtttgttacaatgttttatatttatttttcccttttcatttctgtcaggtaatgtgctgacttcgcaggaagggttgagggaggcacatctcacagatccaagtgaaagcccaatcatcaagtgtgagagccgaatcaaccatcatgcttaggaattacaaaaagattacagtgttttttttatttctaacatttccttttgattctttcttagggttttcatctttctgcctactttacccatctgttttcgtttgtttttcccaaattgaattttctttttctttctttctttcttttttttttttttttagatggagtttcactcttattccccaggctggagcacaatggcgctatctcggcttaccgccgcctccacctcttgg

SEQ ID NO: 672491 - DNA, 653 bp, Homo sapiens
atatatatatatatatatatatatatatatatgtattgccctctgtaagtccccattcagcatctggtacagcatctgctactaattagtaaaagagacttaaagctttcaattcccattaaatagacarttcaccctcattaattgggcagtccttttgacatagtttggggttctaggcacacatggtttgttatctatagaactatgactagtttgcctcttttcccaaaataggaagagaacccagcttttgggaacctgagatgaccaaaactttttttataacagccatgccagcattatgtagacaagagtgtgctgtatatctttctgaactaacacttaccacacaactgattaaaggcctaggatttaggactgaaagatatgtgaaaaaattcagaatctaagctgttggagatctaaattattttgagccttaaaagaatgtgacctaaaaaagaaaactatagaccaatatccccaatgaacatagatgcaaaattcctcaacaacatactagtaagccaattcaaacagcacatcgaacagcacacatcatgaccaaggatgggatgcaagcatggttcaacatatgcaaattaataaatgtaatacatcatataaacagaattatagataaaaaccat

SEQ ID NO: 672492 - DNA, 645 bp, Homo sapiens
caaactcttggcaaactgaattggacgatgtataacaaattgataattaatactttatgacaagctgtctttattccaagaatgtaaggttggttcaaaatagaaaatcttttcatgtgatttgccatgtgtattagttttccattactgatgtaataaatcctgaaaatktatcatattatagttctgaagctcagaagtcagatggaggcctcactgcactaaaatgagggtgccgacgaggctgaattattttctggaggctgcagtggacaatttgtttccttggtcattcggattgttggcaaaatccagtaccctgtggctgtagcaccgaggtctctgttctcttactggccataaactgtgtgctgattccagctttgggaggccatggcattccttggctcatggtttcctttctccttcttcccagccaacaatggtgggttagtccaatactgcatctctctgacccactctttcccgccctcttccatttttaaggatcatgtaattagacggggctcacctctatcacccaggatgatatccccacctcaacatctttaaacttgatcccttctgcagagttccttttgccatgtgggctaacaaactcacagctgccagggatgagatcat

SEQ ID NO: 672493 - DNA, 645 bp, Homo sapiens
caaactcttggcaaactgaattggacgatgtataacaaattgataattaatactttatgacaagctgtctttattccaagaatgtaaggttggttcaaaatagaaaatcttttcatgtgatttgccatgtgtattagttttccattactgatgtaataaatcctgaaaatttatcatattatagttctgaagctcagaagtcagatggaggcctcactgcactaaaatgagggtgccgacgaggctgaattattttctggaggctgcagtggacaatttgtttccttggtcattcggattgttggcaaaatccagtaccctgtggctgtagcaccgaggtctctgttctcttactggccataaactgtgtgctgattccagctttgggaggccatggcattccttggctcatggtttcctttctccttcttcccagccaacaatggtgggttagtccaatactgcatctctctgacccactctttcccsccctcttccatttttaaggatcatgtaattagacggggctcacctctatcacccaggatgatatccccacctcaacatctttaaacttgatcccttctgcagagttccttttgccatgtgggctaacaaactcacagctgccagggatgagatcat

SEQ ID NO: 672494 - DNA, 1047 bp, Homo sapiens
tgaaagcactaaactggaactcagaaaacttgttcttattccaggatctatagatttcagccctggtgtgagcatttgtgcaaacttcccctctaaatgccaggtcttcaaggaggcacaagagatatacataaataaaaaacaggctatggggagaagtgaataatataacaaaggacagagctgctgtgttagagttcttttggctttgaggaggaaccatcccagtccagtccacagtgaatacttgtaaatagatatgttttcacacatgggctttacctacaaacttcaaatccttgaaactctaggcagaagatatgttacaatggcgccaccttctggatactgtccaaaacacatattttcttcatatttttctcccactcagaattcctcaatggctccctattgttgacagaagagtctaaaatcttcagcattcaaggccttttataatctagcacaagtttatgttcaggtctcatctactgacactctacatgggtaatctgtgctactcgccagaataaattcagaattgtctgcattctaatgttcaaacctagcattaattcaatgcagttaagccagagagaaacacaaagcagtttaggggattcagggccagagtctcagttcgaaaatggctagcaggtatgggatgtccccatacctacattatgcaggtcactcagtgctcacaacaagacagctcttctctgtggctatttagaggtttaaatagaagcaaagttagccatagataaaacagattaaaggacataagtacacacaaaaaatgtacataataaaaataaatataaggaaacagatggctaaattcacagatgatcaaaaatgyatggtaaagtcaagcaatattatgtttgtccatcaaacttgtaaagattcttttcacactgatggtgatgccatgttggtaagggcccaggaaataggcaacctcatcaacttctgcaaggcagcattgctggagggcaatctgcaaacattcagcacaagctgagaactgtccttacatta

SEQ ID NO: 672495 - DNA, 651 bp, Homo sapiens
tccacccacctcggccttccaaagtgttgggattacaggtgtgagctactgcacccggccaacataagatctttaataatttaagttccaagcgttttggcttctgttttttggtatactgtacttgaaacaaataagtatggctttttgtataacacaagattttactagccctaccaaaaatgttttctaatgaaataaataaattcagcttacctctaagcttaacatgtacagtggtaatatgccacttagcaaaaggtcaactttcccagaacatagcctcagagaagagaaggaaacatgcctttgtaccaccattatgaatgttgctaagcttcagcgttaaaaccatgtacttttcctggcagtttttctcagaattcttatgcacttaattttttttaaagaatagaattcttatcgggtttagttctttttttttctctgccacagagaaggatatacrgatggaggaagtccagaataactattagtagagtaccagtggtaagcacagagagaggaagtaacatatgacacttaacattaaggagaaaaactatagtctgttgaagcatgttcatgatgatctcgagtaactggaaaaggtcaagtcacatttggtgaaaaggtggggaaaatgcaaca

SEQ ID NO: 672496 - DNA, 600 bp, Homo sapiens
atttagacaaactgaataacctaagtgtgaaaaccaactcagaagatttttacttaaatacatgggctttttttcyttacaatcatgtaattttatttgaatttaagtatctaacacttttattaatactttaccttaaatgacccgattctgcagtgaacaatgatgaatagggagatatattttaacatttattgccagggctcccttttgtttgtcattttactgaaagtgcatgtttagctcactcgggatcatcataatatggtcaggtctactaataatgaacaaacaccaaatattctagcagctgtattttttttaagttctgatcatttatcaactatcttggatctgtaaatattctgctggatcatgagcctggttctgctataccacaaagcaccctataaatactgacgtataaaataaatgcttccttggagtattctgagttctcccttttctctcagcatgtattccagggaaaagttatttttcctcattataagtgctgctcatcatgataaggaaaaaaaagttactgactcttcatgagtaagacttactcatgaacatattctgatagaagtggtggat

SEQ ID NO: 672497 - DNA, 602 bp, Homo sapiens
ctatattttttaaaaatcctatgtttaaaaatatttcttgtttttacatatacatacatagatgtaaggaatcaagaaaagtttggaaatgactatgctcaagctcagttctcagttcctcttgacaagtttctaaggtatatttcagtgacgcagaatgtttcacaccatgttctttgagatgtaaggagcattggggtcatcacaagagtagagagggttggtctgatcactcaactttgttcagttagacagcttctctttggtttcttttgtatactgtggctctacctaagatttattttaatagataaatgacattgatttaaaaataaggttaccttacttttaaggtacatcaaacagagtagtgtgstatatggcaagcagttctctgtatccacgggttctgccaccacgattcaaccaaatatggataaaaatattttaaaataatattagtataataaaaataaaacagcaatacaaaacaatacaaataaaaacaacacaatataacaattatttacataacacttacattgcattaagtatcataagtgagatgatttaaagtataggggaggatgtgtgtatgttat

SEQ ID NO: 672498 - DNA, 651 bp, Homo sapiens
ataaccttattagggaggtactattgttatcaccattcccccaaaggggaaattgaagaatgggaaggtgagtaacttgcccaacgttacatacatagtaaacgataaactgaaatctgaactcaggtcatctggctccagagtccacacaattcaccactgtcttagagcttccttgttaagttgatagtgtggtggagcattctaagaaaagctcattgaaactgagtctttattacttgaagtatgatatatcgaacaggtgaagtttccattctactacatcatgactaaggattggataaggattggatttagatcggttagaggtaagaggactgagttttagaatattgctgaagttaaagtgaaacagagtaaagctcagtataagacaaaactgtcctgtaatgacagctgtccaaatgtgaagtggatggctccaaaacaaatttaatttccactcactaagggtgattaaggataggaaacaatytggtgggaatatttttaaagaaatccaaacattaaatacataacatgaccagagaatcttattgggaaatttactggtcagttccacagtatcttggaaacaagaatattttgctcccagttagtataagctattgaagagttcataagactgtg

SEQ ID NO: 672499 - DNA, 661 bp, Homo sapiens
tggggtaagggttagaaagccatgaagagagctataaagaagaaaaagaataaagtgagctgagaacaaatatagtcatgctctcatttcagttttcttttgactcaccattaagttggatttatcataccccagttttcaaaaagcaagttggttctattacaatttcagtgctcctgcaaacttggggaataatacctgcgcctacatttacatctgattctatatatcttcatctctcactctctctctctctctttctatatatatatatatatatatatatatatatgtagaaatctttagtctcaaaagtatatataaactagctatagaaatacaatttttgcatatacaaaaatatttctttttcagagataaacaatttattaacagataagcatattagaaccacaaaacaccaaaaacaggacattgatacttttcaatataaaaaattataatgtgtgtctaaaacaccaaaagcaatggcaacaaaagccaaaattgacaaatgggatctaattaaactaaagagcttctgcacagcaaaagaaactaccatcagastaaacaggcgacctacagaatgggagaaatttttgcaacctactcatctgacaaagggctaatatccagaatctacaatgaactcaaacaa

SEQ ID NO: 672500 - DNA, 661 bp, Homo sapiens
tggggtaagggttagaaagccatgaagagagctataaagaagaaaaagaataaagtgagctgagaacaaatatagtcatgctctcatttcagttttcttttgactcaccattaagttggatttatcataccccagttttcaaaaagcaagttggttctattacaatttcagtgctcctgcaaacttggggaataatacctgcgcctacatttacatctgattctatatatcttcatctctcactctctctctctctctttctatatatatatatatatatatatatatatatgtagaaatctttagtctcaaaagtatatataaactagctatagaaatacaatttttgcatatacaaaaatatttctttttcagagataaacaatttattaacagataagcatattagaaccacaaaacaccaaaaacaggacattgatacttttcaatataaaaaattataatgtgtgtctaaaacaccaaaagcaatggcaacaaaagccaaaattgacaaatgggatctaattaaactaaagagcttctgcacagcaaaagaaactaccatcagagtraacaggcgacctacagaatgggagaaatttttgcaacctactcatctgacaaagggctaatatccagaatctacaatgaactcaaacaa

SEQ ID NO: 672501 - DNA, 661 bp, Homo sapiens
tggggtaagggttagaaagccatgaagagagctataaagaagaaaaagaataaagtgagctgagaacaaatatagtcatgctctcatttcagttttcttttgactcaccattaagttggatttatcataccccagttttcaaaaagcaagttggttctattacaatttcagtgctcctgcaaacttggggaataatacctgcgcctacatttacatctgattctatatatcttcatctctcactctctctctctctctttctatatatatatatatatatatatatatatatgtagaaatctttagtctcaaaagtatatataaactagctatagaaatacaatttttgcatatacaaaaatatttctttttcagagataaacaatttattaacagataagcatattagaaccacaaaacaccaaaaacaggacattgatacttttcaatataaaaaattataatgtgtgtctaaaacaccaaaagcaatggcaacaaaagccaaaattgacaaatgggatctaattaaactaaagagcttctgcacagcaaaagaaactaccatcagagtaaacaggcracctacagaatgggagaaatttttgcaacctactcatctgacaaagggctaatatccagaatctacaatgaactcaaacaa

SEQ ID NO: 672502 - DNA, 1492 bp, Homo sapiens
cttttattatgaggcttaatttatttccagtagatatcagaagacagaaggaatggagattaatgataatgataatacagattatcttagtcattgttaaacaagtattcctaggtatacacatataagtaaaaccaagtttttggaaaaaaaagatatattgcaatacagtgataatatgctgctgttacatatgaatcatgttattctttaatatattctgggtgagttctcttactttctatttatttttttataattacaggtgcagagaaaagtcagtgggttcagccttgccagataaaaagtaatcaaaggtaaaaatgaatcaagattacttttgcataaacacgtcttctttaaatcaacctgatctctctttgaaacgtaatatctcatatgaatttaaacatcttttttcttgcattcttcttttcataaacaaaggagtttttaaaaagtttctagtagcaattctttgatatatagggtctattctcttcaaaaattaaagtacataaataaattacaaatttaggttataaatttaataaatttgtcttctacttgttgggaaaatattgagaataatcaaaaattaaggaataaatctgaaaattataagcatagatattgtgaagcagtacaaacaaaacataaaaactttagataatttagtctaaaaattaactcttttctctgaatttaaagatgttagaacacatttgctaaactaaatgaagaagattaattgaaaacctatctaaagtggattttttaataatttggaaaatagcacatgataccttatggctggtatatagctacactgacacatttaagcctattttgggaaaaataaaccaaaaataggatattgatctatggcttaaagacgttggatataaagagacaattatgcagctaaaaacacatgggtatttattatttgtgaagtgattttatttcagaattgaagtttatgaaaatggcatatcacttttatttaattagttatactttaccaactttcattgtgacagtttttcttcaaattgtttccatagaaattgcaaaacataaataaaaatacatttagtataactaaaattcctacacatgtttaagtatgttcttttaaatactttatttttaaataaaattacatatatttatcatgtgccgacataatgttttgaaatacatacacgttgttgaaggcctaaattgtgctcactgacatatgcattacctgatatactcatcttttgtgtgcgtgtgtgtttgtgtttggtgaaatttactctagtagtgattttcaagtatacaatgcattgtaattgactgtagttgccatgttgtccaatatatctttgaatttatacttcytatatgactgacattttgtattctttcctacccttctcccccagttcttagtaaccagcattatactctatccttttgtgagtgaaacttttaaaaattccac

SEQ ID NO: 672503 - DNA, 1282 bp, Homo sapiens
ttttcctgttgggattttttactctttgtccaggaaaattgtatgtttacccatatttccttaaacctcagtcatccaaactccatccagttcccatctctgtcaacagaatgatataactaaaaacatattttgacataatatttgaatttagtatgatttggtaaccatttttctttcgttgtttctttttttcttttcttttctttttttctccccgcccctctcctctgttttggattgttgattcactgactaggtttcagaaagttgatccagcacttactataaagctcctcattgacctaaagtgaactggccttagcaggtcaactcaaatgttgaaactcaaggtctgatcccataagggcaagttgtcagccctaatccacacaggatggtgactgctgtctcatacatcctgcttatgaccacagagaggaatgaggtgagaatgggagtatgagtcagggcaattggagctccattctggaaatactgattcaaaaacatttgcccatgtcaatggtcagtgattygatcttttcccatgaaggaaatcacatggaagtgatctgggtttccccttgtccaaattatttattcattttcagttgtggtatttaaatattccagtaagtcacctcaacacacttggaaggaagctaggaaagaagcactaataatattttatctgtcactgtcattaaatgccacgaccaaaatcaaaacactgataattatccagttgccaatatcctgaatcaaggtctccactagaagaaaaacgggatctctcacttatttaactaactttgatgacaatttctggtgcctgaaacatactagagaaaaattatgttaggagtatcaggcaaggagttttaaatatttaaccccaaatatccctctgtactgcagcccctttgtcaggtagacagtgaataattcaggacaggtgcctgctttataggaaatcaaaagattttgcctggaatattcctctcaagtttactgctagtgatatagaatataaaatcacaaaatttccctccagaggaatttcttaaaattaaatttcacaccatgaatcataactaataaaagaggtatcatgctgggatgtctaatatggtggccattgacagtcacatgtgactattttaaatttgaatgaattaaaattagtacaataaaaaaaatttcagttatcagtcacactagccgcattttaaacgtctgatagccacatgggggctagaggcttctggattgtacactg

SEQ ID NO: 672504 - DNA, 1282 bp, Homo sapiens
ttttcctgttgggattttttactctttgtccaggaaaattgtatgtttacccatatttccttaaacctcagtcatccaaactccatccagttcccatctctgtcaacagaatgatataactaaaaacatattttgacataatatttgaatttagtatgatttggtaaccatttttctttcgttgtttctttttttcttttcttttctttttttctccccgcccctctcctctgttttggattgttgattcactgactaggtttcagaaagttgatccagcacttactataaagctcctcattgacctaaagtgaactggccttagcaggtcaactcaaatgttgaaactcaaggtctgatcccataagggcaagttgtcagccctaatccacacaggatggtgactgctgtctcatacatcctgcttatgaccacagagaggaatgaggtgagaatgggagtatgagtcagggcaattggagctccattctggaaatactgattcaaaaacatttgcccatgtcaatggtcagtgattcgatcttttcccrtgaaggaaatcacatggaagtgatctgggtttccccttgtccaaattatttattcattttcagttgtggtatttaaatattccagtaagtcacctcaacacacttggaaggaagctaggaaagaagcactaataatattttatctgtcactgtcattaaatgccacgaccaaaatcaaaacactgataattatccagttgccaatatcctgaatcaaggtctccactagaagaaaaacgggatctctcacttatttaactaactttgatgacaatttctggtgcctgaaacatactagagaaaaattatgttaggagtatcaggcaaggagttttaaatatttaaccccaaatatccctctgtactgcagcccctttgtcaggtagacagtgaataattcaggacaggtgcctgctttataggaaatcaaaagattttgcctggaatattcctctcaagtttactgctagtgatatagaatataaaatcacaaaatttccctccagaggaatttcttaaaattaaatttcacaccatgaatcataactaataaaagaggtatcatgctgggatgtctaatatggtggccattgacagtcacatgtgactattttaaatttgaatgaattaaaattagtacaataaaaaaaatttcagttatcagtcacactagccgcattttaaacgtctgatagccacatgggggctagaggcttctggattgtacactg

SEQ ID NO: 672505 - DNA, 588 bp, Homo sapiens
gtacaagctaacagattgtcataaaggaaaacagaatttctcaaccagttcggctaatagctgagcttcagcaaagggccctgtggtatgtgttgaacaataactacctctctccagcactacttgcagtttttaattgaattkctatcccatggatatcatgttggaactattcatctgctccactaagtcttctgatattaaacaagttctttcaggttattattgtaatacaaatacggttggacagttgatttccattaaaaattcactgccatggtaaggctaacacagtgaagggagcttatcctgaacatggccaagcaaagaaatcacattaataagggtgaaaatgcagtgtgcttatcttgtttgcttccttctcacaccctcctctttgtttaagaggatttggtcatgctgacatattttgacaaatgacaaaatactgggcattttcagagtttctagtttggttttagatatctgccatttggatctgccaataagaagacatgtccattcctctgggtttctcttctacctccatttttcctttgctatcttgtctctagcacacattgtcat

SEQ ID NO: 672506 - DNA, 588 bp, Homo sapiens
gtacaagctaacagattgtcataaaggaaaacagaatttctcaaccagttcggctaatagctgagcttcagcaaagggccctgtggtatgtgttgaacaataactacctctctccagcactacttgcagtttttaattgaattgctatcccatggatatcatgttggaactattcatctgctccactaagtcttctgatattaaacaagttctttcaggttattattgtaatacaaatacrgttggacagttgatttccattaaaaattcactgccatggtaaggctaacacagtgaagggagcttatcctgaacatggccaagcaaagaaatcacattaataagggtgaaaatgcagtgtgcttatcttgtttgcttccttctcacaccctcctctttgtttaagaggatttggtcatgctgacatattttgacaaatgacaaaatactgggcattttcagagtttctagtttggttttagatatctgccatttggatctgccaataagaagacatgtccattcctctgggtttctcttctacctccatttttcctttgctatcttgtctctagcacacattgtcat

SEQ ID NO: 672507 - DNA, 649 bp, Homo sapiens
gccacggtactccagcctgggcaacagagcaagactccgtctcaaaaaaaacaaaaacaaaaacaaaaaacaaaaaaaaaacctttcagttattgaaacttttggggaaaagacccttaagttttccttttgcttatctcaatttatcagacttttaaaggcatgcttaagtaactttagctttgaaaaatttttacaataacagtagtaatctacaaattaatgtgttagggttttttaagtttgaaaaagtaatgaacatttttttttacctcaagactttcatcagtttagtacataaaggtgtgttaatcataaaatagccaacatcatatcacattaatctttgcaaaaaagcaaaggcarcgtacagatactttactacactgttttttaaagatttactttaaaaatttacctcatgagccaacattctgtataattcttcttttgtaatagctagtcgttccctgtcaatgctatcaacaacaagaatgatgaactagaagaaaattaaaaggaaagacagaaaattgaatgggatgctgaaaagttttctgtaaaactactcaagtaatctaagtactttctctacatggcatcatcattactataaaacatctactgctttttcaccataaacagcttt

SEQ ID NO: 672508 - DNA, 1909 bp, Homo sapiens
gttgtctgggttgatctaaaattcctgggctcaagtaatccacctgccttggcctcccaaactgctagcatcacaggcatgagccaccgtgcctctcctaatgtaattgaaagtattttttctaacagatcgataggtacatcagcatgatatctgtttagataatacacaactatattctgttaatcaatcatattacttttgataattgtggctatttttctttccctccagtttgtaaaaattttagatttccaaatcagcaaacaaaacttttaaatatgaaaaaatatttttaaaatattagaacagtctcattgtcaggtaaattgttcataagaaaggtgttaaaagtaagttaaaagtaaattttaacgaactgaaaacttcaacactaaagttttctgaaatttcaaagaaacaaaaccaataaaaatatcaagagccatgttcaaataaatacattcattccacttagttaaaagtagaagtataattcaaacttactgtctctaaaatatcatraaaatgtttaagaaatctatagttttttttgcttcaaatctctgcattttctttattttatttttatttttatttttttagacggagtctcactctgtcgccaggctgaagtgccctggtgtgatctctgctccctgcaacctctgcctcccaggttcaagcaattctcctgcctcagcctcctgagtagctaggattacaggcgcgtgccaccacacccggctaatttttgtatttttagtagagacagggtttcaccatgttggccaggatggtctccatctcttgacttcgtgatccacccgcctcagcctcccaaagtgctgggattacaagcatgagccccagcgcccagccaaatgtctgcatcttcatacaaaaatgctttgttcttttcagaaatggtttcttagaaatccgaaagccagaaaaaaaaaaaaaaagcagaatgtggtttacatccatgtctaacaattgaagaagctgttacggaatctaaagtttgttttgtgataatgaagctaggactaaaaatgtccttttaagccattacttacacaaacacaaaattattcacatttatggtccaactgatagtcatgaaagttaagtttgcatagggtcagtacattctttttcctctacataggaggttgaaacttgcctttaatgttgtaacgttggagcatattatcctgcatctaagtcttaaagggtctttaaaccatagcactgggaggacgtaagtcatacattctccttgtacaggttaactcaagagtttggcatgttaaaaggccacgttgccaaggttaaaatccaaccatctgactgaagtcagagtctaaaaaaattttaagcttgctcctccgtcaactggtttcaaggacattcagtttcgtttcatgccaggctgtgaagcttttcttttcaatgctagaacctaaccatggaaagtggaattgaaaacaattacacagcgaattggcttatgcgtggacttcgatctgggatccacgaacatacctaatgcttggcaaaatggagaggggtgctatgtgttattattatgtgttattattaatcacataactgaactctgtggctccaggccttccatggctcgtctcccaatcaattcttttcagaactaagaatcacgacaggggccgggcgcggtggctgagcctgcaatcccaccactttgggaagtcgaggcaggaagatcgcttgagcccaggaaattgagtccccctgggcaacacagcccgacctcgtctgcaatcgatcaatcaatcaatgagtacataaatgcataagccaatgaatgaatacgtgaatgaatagattaataaatgaatgaagaagaatcacggcagaactc

SEQ ID NO: 672509 - DNA, 672 bp, Homo sapiens
gccttatactgtaagcttttgataggactgagacccaataattgatattcaaaaatgtaagaaattgaactcataaagtagatatactagagcttttgtataatgagatatttgtaaatttgttaagctgttggttattatgcacttgtggaaaatgtgtcaaataactgtccagtgatacgtgaatatgttaggagctatataatgcaatataatgtcttaaattagtaaattacaatacattattcttcaaatgtaagacatgttgtgactaatatcaacaacaacatttcagaaataatctgttaacgctcttgagtcttagtttacagtgtacttaagcatttcctcttataaaatattactaataaacttttaaagtaatgtaattggaatacgctttattactttttaagagtcctaktttgatactttcggtgctgtgatttgaaggccttcctctaatacagtttatttgcaaacacagtttagtaacagtaatagcatacagagattcaaattggagaagtacgtcattccttgcatttatcaaattatgtcagttcaatccccaattgtgcagaaacctgcgaaaacttggctggtatatttctttgttttcttatatcaagcagttgtttttgcaaacaaatgggaggggatgtgggtttt

SEQ ID NO: 672510 - DNA, 518 bp, Homo sapiens
tttgcttggatcaaacaaccagttaaccctgacaggtctgattcttgggctagagctctgagtcagggctggcaagttctagtttttgggcaaaattgagccagctgcctctttttgtatcacctgcaagttaagaatagggtttacattttcaaatagctgggaggagaaaatcacaggagcattttatgatacatgagagttacatgagattcaaattccagcatccataaataactttttcgtggaacatagccaaactgatttgcttcatcagtggctgtttgcgctttgcaatgggaggagtcagtcgctgtggcacagacagyatggcctcgaaagcctaaagtatttcagcccctctgctggaagtaactgagtttttttctccccactgggagaggggaattcagtggaaacaagccaaattctctaaagcagcaaattcctcctcaaatgtccactgctcctgtacccttgcacctccttccttagtctcctttcaagtggcaattaga

SEQ ID NO: 672511 - DNA, 807 bp, Homo sapiens
  misc_feature 375, 376, 377, 378, 379, 380, 381, 382, 383, 384, 385, 386,387, 388, 389, 390, 391, 392, 393, 394, 395, 396, 397, 398,399, 400, 401, 402, 403, 404, 405, 406, 407, 408, 409, 410,411, 412, 413, 414, 415, 416, 417, 418, 419, 420, 421: n = A,T,C or G
  misc_feature 422, 423, 424, 425, 426, 427, 428, 429, 430, 431, 432, 433,434, 435, 436, 437, 438, 439, 440, 441, 442, 443, 444, 445,446, 447, 448, 449, 450, 451, 452, 453, 454, 455, 456, 457,458, 459, 460, 461, 462, 463, 464, 465, 466, 467, 468: n = A,T,C or G
  misc_feature 469, 470, 471, 472, 473, 474: n = A,T,C or G
attaaatgctgttagcattgaggcttggtacagcagtagtttccaaataactgtaggatggagaggaacttgccagaacaatagaagaaaaacattcaagagcaagaatgactccatggggtccatgatagaaactcaggacctgctgaggctcagtaaggtttgtgcagaggaacttggcattctagtaaaacacacattggcacctgcatgcctctgccatgttccagtctgcatattccttaaggacaagttcggatgtcaacttctcagggaattctcattaaattagaatcactgactctgtttaacccatctaaagctttacratcattttacagagtatagtttacatcataatcttatgtgaattcnnnnnnnnnnnnnnnnnnnnnnnnnnnnnnnnnnnnnnnnnnnnnnnnnnnnnnnnnnnnnnnnnnnnnnnnnnnnnnnnnnnnnnnnnnnnnnnnnnnntaatagggttggatcataaaggttgtgtgtaaattaagagatgtacattatagggcattattatggccgagttcgtactgtgtaatgcatccagactgtctttttagaacagttagattaaaaatgctgcctctgtgaaacatcgagaccatgagcgaattttgcatataggggatggtctatgtagtccaaatgactccctataactagaatatctatggtggatgtatttgatgccaagatctactttactaggaaagctcacttatctcccagctgttatgagttttgctgctagtagctgacatttatcttgttcactagagaattctc

SEQ ID NO: 672512 - DNA, 614 bp, Homo sapiens
tcacagagttattcctggccatacactctacatcagttaccctagccactttctcrtcagttgctcatatcagctgagatgtaaattatggctgaatggtctgctattttcatgctaacggcgcctcaatatttttcatctgctttttcttacacattggctgaggcctatactacgggtcattcctatttttagaaacctgaaatattggcattatactccttcttaccactatagcaacagcattcataggctacatactcccatgaggctaaatatcattctgaggtgctacagtaattacaaatctattatcagccatcccaaatattggaaccgaccttgtacaatgaatctcaggtggattctcagttgacaaagccaccctcacacgatttttcccctttcatttcatcttacccttcatcattacagctctagcaactgttcaccttttatttttacatgaaacagaatctaacagccctttagggatttcatcagaccccaacaaaatcacttttcatcccctactacacaaccaaagacattctaggtttaatttttctcctcctcctcctaacaactctagtactattttcacctgatctcct

SEQ ID NO: 672513 - DNA, 594 bp, Homo sapiens
gaaaaagatgtagactatctcattaataattttctatgttgacacatgttgaagttgtattttggatgttgagttgaataaaatatattgataaaattaatttcacctgtttctttttacttttttkgtaatgtggctactagaaaatttaagcacatacatggcatctatttgtgacttgcattctgtttttattggacagtgccatcttaaaggcttccgtttgctatctttgattcttctgtcatcccaattctgtctggctacctattccattttcaaggctggctgaccctgcatcttccttagttgctggctcttggctgcagctttgagatggcaatagagcagccattccttcttctatcggtccaccatagcttccttttgcaacaactctctgctgcccctgttgctgccaagcaacctctgaactctctcagcccaattttagctcttccagccaaaccccatcgaactccagcaatcttaatttgttagggatcctttcagaaagacatagcaagagattgaatttagactagggaagtgagaaaacaatcaaggctatccctccttggacttggagtacac

SEQ ID NO: 672514 - DNA, 1165 bp, Homo sapiens
tattttaatgagaaaaatattattattaaaactacagatatttacatattactctaactcartaagctaggtctaagttcttagcactgtgtgacattctgtggggaatacaaaaagaagcctcaattgtccagatggcgctacttctctgtcttcaatagagatgcaacaaggcgtaatgaaaagaagaactaagttctagtactggtttggaatctagtcagttgtgaagtgtttaatatgtgggctcactcaaccgctgaccttggttgtggatggtgtgaggttgatcctttcctatccaatcccctcatggtcatcagcagaaaggctgtacagtctttccaggggaaacccagagctttccatggttgggcattttatctttagtcataaacttaggtaaaacttagtggcacatgtggagtcaaatcttgaactttgcctcattctccccttgtaataccaatgaatttaatggctcacacaggatttatgagttcggagtatcaggtctgtgtacaactggctcaaatcactgatctttcacttttgcttactttagtgttagaatctgggaaggttgtgcagtggaaccactcacttcaaaatatcaaagcgtttaaaaaactgggcttagctgaatcttaacagagcaaatctattttgccctctggtttttacatgcaccctcttatgacattagcttcagatgattggcatggtgagcagctactaatatattcttgccaagttactatctatttagggaatctttaacacagctgtatgacacaaaacaagttaatgcctctgttaaagccattagatgggactcgacagtgtctatccagagaatctttcaggctatgctgttgatgtaatgcgccatattggttccttgtgtgtagtcagggtttataatgccagtttgtatataggaatcacataacatactaatccatgtgagaagagtgacgacaggtactgatgaatcccaggagctttgctgagtgcaagtagtcgatgtttgaccaagatgcactttaggaaggtggcgatgtgtgaaactgaaatgctctacaccttttcccaggctgccttttgacaacaggagtgtttggatctcttagccctgtgttcctgtggtgctacacgtctccat

SEQ ID NO: 672515 - DNA, 694 bp, Homo sapiens
agctcaagtgatactcccatcttggcctcccagagtgctgggattatatgtgtgagccaccgtgcctggccctgtttctttttcaaacttaatttattttagagacatggtcttactctgtcatccaggctggagtgcagtggtgtaatcatggttcactgmagcctgaaccttcccaggctcaggtgatcctcccacctcagcctcctgagtagctgggactactagcatacaccaccattcctggctaaattttgtattttttgtacagacagagttacatcatgttgcccaggctactctccaacttgcgagctcaagtgatccgcccactccgcctcccaaagtgtcgatattacaggcatgagccactgtgcccagcctgtaattgtttgctgtggtgaccaagtcacactggtccggagaagacaggtcatagtgacctctttgatagctttctgccaagttgcttatccaaagggagcaaaatcacaatggtcccagtcatttttttctcctcccctttcctcttttctttataaatgttgattttacttttatttgatgaacacaatctaatgccagttcctcttctatattgatggagaatgagcatgcagacagtgtctctgtattattcctcgactgatttctttcagaggctatgtccataaaaattaatccatctgacacc

SEQ ID NO: 672516 - DNA, 1098 bp, Homo sapiens
cacaaatcaaatttaataatctccagaacatcaaggaagttcagctcttaatgaaaatggatgaaaagaaatgatttactcacttttatacgctcgggaaagagaatgccctgccagactcaaaagggtatcacagaatcactcagattttcagcactgagggttttccaaggatctaatgatgttccttttttcagtttgtttcgctcactgataagccttgttaataaataccattgcatctgttttcactttaaacgatgttacttaacacaattatttgctttcgaatgccccctagattggtggaaagaaattttctgatttataaatatattttcttatgaaaccaattggcatactcttccagtggagtgaatagataaattaagtctctaaaactttaaagagattactgccccaattatcttaaggacagtaataattacgtatataaaattaaaatatggaaattaagcagggtgtggtggctcacacctgtaatcttagcattttaggcagctgaggagagaagaagaattgaagtcaggagtttgataccagcctgggaaatatggtgagacccctgtctctacaaatttaaaaatgagctgattttaaaaaactagccagcacagtggctcacattggtagtcccagctgcttgggaggctgaggcaggaggatcgcttgagcccaggagatccaggctgcagtgaactataattgtaccactgcactccagcctgggtgacagagtaagacctcaactcaaaataaaagaaaatgaagaataatttcttgacttttttttttycctgcaatgccaggctggttgactcacacctgtaatcccagaaaatcaggaggctgatgtgggaggattgctttaggcaaggagttggagaccagcctgggcaacagggcaagatgccatctctaagaagttaaaaggcgggctgagctgggaggactgcctgagcccagagttccaggttggtcagctgtggttgcaccagtgcactctcacctggatgacacagcaagacactgtctattacattttttaattctacttatgctttaaatgtgatgttt

SEQ ID NO: 672517 - DNA, 590 bp, Homo sapiens
tgctgtgttttccaggctggacctgaatgaacttctgggctcaatcaatccttcccctcagcctaacatttacactgggagcagagatgcatttggagtaggtgatgattttggaatgctttagaagcaacataggtatctgatttcatcaggtcaagccatcaaaaatgaccaataaatctctgacctcttagaagcaatttgaagacccaaattttggccatcatcaaaattcgtgttcattcaaaattagacattctggagagcaaggacaatcattttgctgatgctgcagctaagaatgcagctctgaagktgacatcagacacagaactcctcgaaatgaccttgctgacttatgacccattgaagacttcattagaagtacaagtgggctgggcatggtggctcatgcctgtaatcccagcactttgggaggccaaggctggcggatcacctgaggtcaggagtttgagcccagcctggccaacatggtgaaatcctgtctctattaaaaatacaaaaattagctggtgtggtgacacatgtctataatccctgctacttgggaggcagaggcatgagaattg

SEQ ID NO: 672518 - DNA, 590 bp, Homo sapiens
tgctgtgttttccaggctggacctgaatgaacttctgggctcaatcaatccttcccctcagcctaacatttacactgggagcagagatgcatttggagtaggtgatgattttggaatgctttagaagcaacataggtatctgatttcatcaggtcaagccatcaaaaatgaccaataaatctctgacctcttagaagcaatttgaagacccaaattttggccatcatcaaaattcgtgttcattcaaaattagacattctggagagcaaggacaatcattttgctgatgctgcagctaagaatgcagctctgaaggtgacatcagacacagaactcctcgaaatgaccttgctgacttatgacccattgaagacttcattagaagtacaagtgggctgggcatggtggctcatgcctgtaatcccagcactttgggaggccaaggctggcggatcacctgaggtcaggagtttgagcccagcctggccaacatggtgaaatcctgtctctaytaaaaatacaaaaattagctggtgtggtgacacatgtctataatccctgctacttgggaggcagaggcatgagaattg

SEQ ID NO: 672519 - DNA, 1304 bp, Homo sapiens
cagttacataagatcttcgagcctcagtttccttatctctgaagtgagaaaagtaatattgatattgttaaaaaggcatgagatttagatataagtaaaatacttgtattttacttagtacctacttaatcttcatgagtgagtcaaagaaagcaagtagaattaggcagggttgtgcggatggggagaggcaagctgtgctaaagrcaggggaaatgggcagatagaatgcagggctaaacacagatacctacaacctgcagcagaggcaacttactgagcttaacatagagaatacaagtcactttaaaatgtacagctgtatgttacttttcaccccacaataaaatcggtccttacctagaaaaaagtaaagataaaaatgaaagaaaagaggagtgggggaagtaacatacatgtgtacacattcagacctttggcatgcttacatcagagaaagaacacttttgcaagttttcttggcacaacgaatggtaataatttttaagtctattgtgtctgtcctctattcatatattctgaaactgctgacctctcattgacaacagtatgcctctttttctaagattagaaattttaaaatgtaattgctgataataaacaatggacattatgctaagcgaagtgagccagtcaaaaaaataaacaaacaaacaaacaaataaatactacatgattcaactcattttaggttggtgcgaagttattgtggtttttgccattaaaagtaatataaagtacctggaatagtcaaatgtatagcaagagaaaatagaatggtgcttgccaggggctggagggaaggagaaatggggttgttgttcagtgggtgcagggtttgaattttgcaagatgaaagggttctgtggctggatggtggtcatggcttcacagcactgtcaacgtgcatgatgccactgacctgcgcacatcttaagtggttaatgatcaattttatgtcatatgtattttttcacatttgaaaacacttttaaaaaccattcttgttagtatttaaagaactgcaagataaaaaagagacatttttaaagtatgaagtcgtgtgcacaggttcatcgtctaggtgtgtactcatgaaaacaaatctcttgtgttgcagatagcgctcgttaaggttgatttctgcatatcagtgagagttcagtgatcttacattcaacataaatatgacaactttacaaacatcccccctttcatccactgagtgagtttatcaggaaaacccaacaaaatccttccaggcctccctgggggaaggtaca
